(19) United States
(12) Patent Application Publication
(10) Pub. No.: US 2023/0041377 A1
(43) Pub. Date: Feb. 9, 2023

(54) BISPECIFIC CHECKPOINT INHIBITOR ANTIBODIES

(71) Applicant: Xencor, Inc., Monrovia, CA (US)

(72) Inventors: Matthew Bernett, Monrovia, CA (US); Gregory Moore, Azusa, CA (US); John Desjarlais, Pasadena, CA (US); Michael Hedvat, Encino, CA (US); Christine Bonzon, Los Angeles, CA (US); Alex Nisthal, Monrovia, CA (US); Umesh S. Muchhal, Monrovia, CA (US)

(21) Appl. No.: 17/936,331

(22) Filed: Sep. 28, 2022

Related U.S. Application Data
(63) Continuation of application No. 16/435,375, filed on Jun. 7, 2019, now Pat. No. 11,492,407.
Application No. 16/435,375 is a continuation of application No. 15/623,314, filed on Jun. 14, 2017, now Pat. No. 10,787,518.
(60) Provisional application No. 62/350,145, filed on Jun. 14, 2016.
(60) Provisional application No. 62/353,511, filed on Jun. 22, 2016.
(60) Provisional application No. 62/420,500, filed on Nov. 10, 2016.

(51) Int. Cl. C07K 16/28; C07K 14/735; C12N 15/861

(52) U.S. Cl. CPC C07K 16/2863; C07K 16/2803; C07K 16/2818; C07K 14/70535; C12N 15/8613; A61K 2039/505

(57) ABSTRACT

The present invention is directed to heterodimeric anti-LAG-3×anti-CTLA-4. Also provided are nucleic acid compositions that encode the antibodies, expression vector compositions that include the nucleic acids, and host cells that include the expression vector compositions.

### CROSS REFERENCE TO RELATED APPLICATIONS

[0001] This application is a continuation of U.S. patent application Ser. No. 16/435,375, filed Jun. 7, 2019 which is a continuation U.S. patent application Ser. No. 15/623,314, filed Jun. 14, 2017 which claims priority to U.S. Provisional Patent Application No. 62/350,145, filed Jun. 14, 2016, U.S. Provisional Patent Application No. 62/353,511, filed Jun. 22, 2016 and U.S. Provisional Patent Application No. 62/420,500, filed Nov. 10, 2016, the contents of which are expressly fully incorporated by reference in their entirety.

### SEQUENCE LISTING

[0002] The instant application contains a Sequence Listing which has been submitted electronically in XML file format and is hereby incorporated by reference in its entirety. Said XML, copy, created on Sep. 23, 2022, is named 067461-5191-US03_SL.xml and is 52,732,234 bytes in size.

### BACKGROUND OF THE INVENTION

[0003] Checkpoint receptors such as CTLA-4, PD-1 (programmed cell death 1), TIM-3 (T cell immunoglobulin and mucin domain 3), LAG-3 (lymphocyte-activation gene 3), TIGIT (T cell immunoreceptor with Ig and ITIM domains), and others, inhibit the activation, proliferation, and/or effector activities of T cells and other cell types. Guided by the hypothesis that checkpoint receptors suppress the endogenous T cell response against tumor cells, preclinical and clinical studies of anti-CTLA4 and anti-PD1 antibodies, including nivolumab, pembrolizumab, ipilimumab, and tremelimumab, have indeed demonstrated that checkpoint blockade results in impressive anti-tumor responses, stimulating endogenous T cells to attack tumor cells, leading to long-term cancer remissions in a fraction of patients with a variety of malignancies. Unfortunately, only a subset of patients responds to these therapies, with response rates generally ranging from 10 to 30% and sometimes higher for each monotherapy, depending on the indication and other factors. Therapeutic combination of these agents, for example ipilimumab plus nivolumab, leads to even higher response rates, approaching 60% in some cases. Preclinical studies have shown additional synergies between anti-PD-1 antibodies and/or anti-CTLA-4 antibodies with blockade of more recently identified checkpoint receptors, including LAG-3, TIM-3, BTLA and TIGIT. While the potential of multiple checkpoint blockade is very promising, combination therapy with such agents is expected to carry a high financial burden. Moreover, autoimmune toxicities of combination therapies, for example nivolumab plus ipilimumab, are significantly elevated compared to monotherapy, causing many patients to halt the therapy.

[0004] A number of studies (Ahmadzadeh et al., Blood 114:1537 (2009), Matsuzaki et al., PNAS 107(17):7875-7880 (2010), Fourcade et al., Cancer Res. 72(4):887-896 (2012) and Gros et al., J. Clinical Invest. 124(5):2246 (2014)) examining tumor-infiltrating lymphocytes (TILs) have shown that TILs commonly express multiple checkpoint receptors. Moreover, it is likely that TILs that express multiple checkpoints are in fact the most tumor-reactive. In contrast, non-tumor reactive T cells in the periphery are more likely to express a single checkpoint. Checkpoint blockade with monospecific full-length antibodies is likely nondiscriminatory with regards to de-repression of tumor-reactive TILs versus autoantigen-reactive single expressing T cells that are assumed to contribute to autoimmune toxicities.

[0005] Accordingly, the invention is directed to bispecific antibodies that bind to two different checkpoint inhibitor proteins.

### I. BRIEF SUMMARY OF THE INVENTION

[0006] The present invention provides bispecific heterodimeric antibodies that bind to two different checkpoint cell surface receptors such as human PD-1, human CTLA-4, human TIM-3, human LAG-3 and human TIGIT. Thus, in some aspects, suitable bispecific antibodies bind PD-1 and CTLA-4, PD-1 and TIM-3, PD-1 and LAG-3, PD-1 and TIGIT, PD-1 and BTLA, CTLA-4 and TIM-3, CTLA-4 and LAG-3, CTLA-4 and TIGIT, CTLA-4 and BTLA, TIM-3 and LAG-3, TIM-3 and TIGIT, TIM-3 and BTLA, LAG-3 and TIGIT, LAG-3 and BTLA and TIGIT and BTLA.

[0007] In one aspect, the invention provides bottle opener formats that comprise: a) a first monomer (the “scFv monomer”, sometimes referred to as the “scFv heavy chain”) that comprises a scFv with a variable heavy and variable light domain linked using a charged scFv linker (with the +H sequence of FIG. 7 being preferred in some embodiments), an Fc domain comprising the skew variants S364K/E357Q, the ablation variants E233P/L234V/L235A/G236del/S267K, and an Fv that binds to a checkpoint receptor as outlined herein; b) a second monomer (the “Fab monomer” or “heavy chain”) that comprises an Fc domain with the skew variants L368D/K370S, the pI variants N208D/Q295E/N384D/Q418E/N421D, the ablation variants E233P/L234V/L235A/DB2/G236del/S267K, and a variable heavy domain that, with the variable light domain, makes up an Fv that binds to a second checkpoint receptor as outlined herein; and c) a light chain. In this particular embodiment, suitable monomer Fv pairs include (Fabs listed first, scFvs second) PD-1 and CTLA-4, CTLA-4 and PD-1, PD-1 and TIM-3, TIM-3 and PD-1, PD-1 and LAG-3, LAG-3×PD1, PD-1 and TIGIT, TIGIT and PD-1, PD-1 and BTLA, BTLA and PD-1, CTLA-4 and TIM-3, TIM-3 and CTLA-4, CTLA-4 and LAG-3, LAG-3 and CTLA-4, CTLA-4 and TIGIT, TIGIT and CTLA-4, CTLA-4 and BTLA, BTLA and CTLA-4, TIM-3 and LAG-3, LAG-3 and TIM-3, TIM-3 and TIGIT, TIGIT and TIM-3, TIM-3 and BTLA, BTLA and TIM-3, LAG-3 and TIGIT, TIGIT and LAG-3, LAG-3 and BTLA, BTLA and LAG-3, BTLA and TIGIT, and TIGIT and BTLA.

[0008] Other aspects of the invention are provided herein.

### II. BRIEF DESCRIPTION OF THE DRAWINGS

[0009] FIG. 1A-1I depict several formats of the present invention. The first is the “bottle opener” format, with a first and a second anti-antigen binding domain. Additionally, mAb-Fv, mAb-scFv, Central-scFv, Central-Fv, one armed central-scFv, one scFv-mAb, scFv-mAb and a dual scFv format are all shown. For all of the scFv domains depicted, they can be either N- to C-terminus variable heavy-(optional linker)-variable light, or the opposite. In addition, for the one armed scFv-mAb, the scFv can be attached either to the N-terminus of a heavy chain monomer or to the N-terminus of the light chain.

[0010] FIG. 2A-2D depict the antigen sequences for a number of antigens of use in the invention, including both human and cynomolgus monkey in many cases, to facilitate the development of antigen binding domains that bind to both for ease of clinical development.

[0011] FIG. 3A-3F depict useful pairs of heterodimerization variant sets (including skew and pI variants). On FIG. 3E, there are variants for which there are no corresponding “monomer 2” variants; these are pI variants which can be used alone on either monomer, or included on the Fab side of a bottle opener, for example, and an appropriate charged scFv linker can be used on the second monomer that utilizes a scFv as the second antigen binding domain. Suitable charged linkers are shown in FIG. 7.

[0012] FIG. 4 depict a list of isosteric variant antibody constant regions and their respective substitutions. pI_(−) indicates lower pI variants, while pI_(+) indicates higher pI variants. These can be optionally and independently combined with other heterodimerization variants of the invention (and other variant types as well, as outlined herein).

[0013] FIG. 5 depict useful ablation variants that ablate FcγR binding (sometimes referred to as “knock outs” or “KO” variants). Generally, ablation variants are found on both monomers, although in some cases they may be on only one monomer.

[0014] FIG. 6A-6B show two particularly useful embodiments of the invention, that can be used for either the format of FIG. 1A or FIG. 1F. For the FIG. 1A format, the “non-Fv” components of this embodiment are shown in FIG. 37A, although the other formats of can be used as well (and that of FIG. 38 as well).

[0015] FIG. 7A-7B depicts a number of charged scFv linkers that find use in increasing or decreasing the pI of heterodimeric antibodies that utilize one or more scFv as a component. The (+H) positive linker finds particular use herein, particularly with anti-CD3 vl and vh sequences shown herein. A single prior art scFv linker with a single charge is referenced as “Whitlow”, from Whitlow et al., Protein Engineering 6(8):989-995 (1993). It should be noted that this linker was used for reducing aggregation and enhancing proteolytic stability in scFvs.

[0016] FIG. 8 depicts a list of engineered heterodimer-skewing Fc variants with heterodimer yields (determined by HPLC-CIEX) and thermal stabilities (determined by DSC). Not determined thermal stability is denoted by “n.d.”.

[0017] FIG. 9A-9E depict a select number of PD-1 ABDs, with additional anti-PD-1 ABDs being listed as SEQ ID NOs: 6209-11464, SEQ ID NOs: 11465-17134, SEQ ID NOs: 33003-33072, SEQ ID NOs: 33073-35394 and SEQ ID NOs: 36127-36146. The CDRs are underlined, the scFv linker is double underlined (in the sequences, the scFv linker is a positively charged scFv (GKPGS)₄ linker (SEQ ID NO: 37755), although as will be appreciated by those in the art, this linker can be replaced by other linkers, including uncharged or negatively charged linkers, some of which are depicted in FIG. 7), and the slashes indicate the border(s) of the variable domains. In addition, the naming convention illustrates the orientation of the scFv from N- to C-terminus. That is, “H1.279_L1.194” shows that the orientation is vh-scFv linker-vl (from N- to C-terminus, with optional domain linkers on one or both sides, depending on the format used), although these sequences may also be used in the opposite orientation, (from N- to C-terminus) vl-linker-vh. Similarly, “L1.194_H1.279” shows that the orientation is vl-scFv linker-vh (from N- to C-terminus, again with optional domain linkers), with the opposite orientation also included within the invention. As noted herein and is true for every sequence herein containing CDRs, the exact identification of the CDR locations may be slightly different depending on the numbering used as is shown in Table 1, and thus included herein are not only the CDRs that are underlined but also CDRs included within the vh and vl domains using other numbering systems. Furthermore, as for all the sequences in the Figures, these vh and vl sequences can be used either in a scFv format or in a Fab format.

[0018] FIG. 10A-10PP depict a number of CTLA-4 ABDs, with additional anti-CTLA-4 ABDs being listed as SEQ ID NOs: 21-2918, SEQ ID NOs: 2919-6208, SEQ ID NOs: 36739-36818 and SEQ ID NOs: 35395-35416. The CDRs are underlined, the scFv linker is double underlined (in the sequences, the scFv linker is a positively charged scFv (GKPGS)₄ linker (SEQ ID NO: 37755), although as will be appreciated by those in the art, this linker can be replaced by other linkers, including uncharged or negatively charged linkers, some of which are depicted in FIG. 7), and the slashes indicate the border(s) of the variable domains. As above, the naming convention illustrates the orientation of the scFv from N- to C-terminus; in the sequences listed in this figure, they are all oriented as vh-scFv linker-vl (from N- to C-terminus), although these sequences may also be used in the opposite orientation, (from N- to C-terminus) vl-linker-vh; additionally, some of the sequences in SEQ ID NOs: 21-2918, SEQ ID NOs: 2919-6208, SEQ ID NOs: 36739-36818 and SEQ ID NOs: 35395-35416 are in the opposite orientation. As noted herein and is true for every sequence herein containing CDRs, the exact identification of the CDR locations may be slightly different depending on the numbering used as is shown in Table 1, and thus included herein are not only the CDRs that are underlined but also CDRs included within the vh and vl domains using other numbering systems. Furthermore, as for all the sequences in the Figures, these vh and vl sequences can be used either in a scFv format or in a Fab format. In particular, many of the figures include the XENP identifier for both the scFv format as well as the Fab format; see for example FIG. 10A, that shows that XENP19235 is the molecule using the Fab format and XENP19769 is the scFv molecule.

[0019] FIG. 11A-11N depict a number of LAG-3 ABDs, with additional anti-LAG-3 ABDs being listed as SEQ ID NOs: 17135-20764, SEQ ID NOs: 36819-36962, SEQ ID NOs: 35417-35606, SEQ ID NOs: 25194-32793 and SEQ ID NOs: 32794-33002. The CDRs are underlined, the scFv linker is double underlined (in the sequences, the scFv linker is a positively charged scFv (GKPGS)₄ linker, although as will be appreciated by those in the art, this linker can be replaced by other linkers, including uncharged or negatively charged linkers, some of which are depicted in FIG. 7), and the slashes indicate the border(s) of the variable domains. As above, the naming convention illustrates the orientation of the scFv from N- to C-terminus; in the sequences listed in this figure, they are all oriented as vh-scFv linker-vl (from N- to C-terminus), although these sequences may also be used in the opposite orientation, (from N- to C-terminus) vl-linker-vh; additionally, some of the sequences in SEQ ID NOs: 17135-20764, SEQ ID NOs: 36819-36962, SEQ ID NOs: 35417-35606, SEQ ID NOs: 25194-32793 and SEQ ID NOs: 32794-33002 are in the opposite orientation. As noted herein and is true for every sequence herein containing CDRs, the exact identification of the CDR locations may be slightly different depending on the numbering used as is shown in Table 1, and thus included herein are not only the CDRs that are underlined but also CDRs included within the vh and vl domains using other numbering systems. Furthermore, as for all the sequences in the Figures, these vh and vl sequences can be used either in a scFv format or in a Fab format.

[0020] FIG. 12A-12C depict a number of BTLA ABDs, with additional anti-BTLA ABDs being listed as SEQ ID NOs: 20885-21503 and SEQ ID NOs: 36707-36738. The CDRs are underlined, the scFv linker is double underlined (in the sequences, the scFv linker is a positively charged scFv (GKPGS)₄ linker, although as will be appreciated by those in the art, this linker can be replaced by other linkers, including uncharged or negatively charged linkers, some of which are depicted in FIG. 7), and the slashes indicate the border(s) of the variable domains. As above, the naming convention illustrates the orientation of the scFv from N- to C-terminus; in the sequences listed in this figure, they are all oriented as vh-scFv linker-vl (from N- to C-terminus), although these sequences may also be used in the opposite orientation, (from N- to C-terminus) vl-linker-vh; additionally, some of the sequences in SEQ ID NOs: 20885-21503 and SEQ ID NOs: 36707-36738 are in the opposite orientation. As noted herein and is true for every sequence herein containing CDRs, the exact identification of the CDR locations may be slightly different depending on the numbering used as is shown in Table 1, and thus included herein are not only the CDRs that are underlined but also CDRs included within the vh and vl domains using other numbering systems. Furthermore, as for all the sequences in the Figures, these vh and vl sequences can be used either in a scFv format or in a Fab format.

[0021] FIG. 13A-13I depict a number of TIM-3 ABDs, with additional anti-TIM-3 ABDs being listed as SEQ ID NOs: 20765-20884, SEQ ID NOs: 37587-37698 and SEQ ID NOs: 36347-36706. The CDRs are underlined, the scFv linker is double underlined (in the sequences, the scFv linker is a positively charged scFv (GKPGS)₄ linker, although as will be appreciated by those in the art, this linker can be replaced by other linkers, including uncharged or negatively charged linkers, some of which are depicted in FIG. 7), and the slashes indicate the border(s) of the variable domains. As above, the naming convention illustrates the orientation of the scFv from N- to C-terminus; in the sequences listed in this figure, they are all oriented as vh-scFv linker-vl (from N- to C-terminus), although these sequences may also be used in the opposite orientation, (from N- to C-terminus) vl-linker-vh; additionally, some of the sequences in SEQ ID NOs: 20765-20884, SEQ ID NOs: 37587-37698 and SEQ ID NOs: 36347-36706 are in the opposite orientation. As noted herein and is true for every sequence herein containing CDRs, the exact identification of the CDR locations may be slightly different depending on the numbering used as is shown in Table 1, and thus included herein are not only the CDRs that are underlined but also CDRs included within the vh and vl domains using other numbering systems. Furthermore, as for all the sequences in the Figures, these vh and vl sequences can be used either in a scFv format or in a Fab format.

[0022] FIG. 14A-14I depicts the amino acid sequences of specific anti-CTLA-4×anti-PD-1 antibodies in the bottle opener format (Fab-scFv-Fc). The antibodies are named using the Fab variable region first and the scFv variable region second, separated by a dash, followed by the chain designation (Fab-Fc heavy chain, scFv-Fc heavy chain or light chain). CDRs are underlined and slashes indicate the border(s) of the variable regions. The scFv domain has different orientations (N- to C-terminus) of either vh-linker-vl or vl-linker-vh as indicated, although this can be reversed. In addition, each sequence outlined herein can include or exclude the M428L/N434S variants in one or preferably both Fc domains, which results in longer half-life in serum.

[0023] FIG. 15A-15K depicts the amino acid sequences of specific anti-LAG-3×anti-PD-1 Fab-scFv-Fc bispecific antibodies. The antibodies are named using the Fab variable region first and the scFv variable region second, separated by a dash, followed by the chain designation (Fab-Fc heavy chain, scFv-Fc heavy chain or light chain). CDRs are underlined and slashes indicate the border(s) of the variable regions. The scFv domains have the orientation (N- to C-terminus) vl-linker-vh, although this can be reversed. In addition, each sequence outlined herein can include or exclude the M428L/N434S variants in one or preferably both Fc domains, which results in longer half-life in serum.

[0024] FIG. 16A-16D depicts the amino acid sequences of specific anti-BTLA×anti-PD-1 Fab-scFv-Fc bispecific antibodies. The antibodies are named using the Fab variable region first and the scFv variable region second, separated by a dash, followed by the chain designation (Fab-Fc heavy chain, scFv-Fc heavy chain or light chain). CDRs are underlined and slashes indicate the border(s) of the variable regions. The scFv domains have the orientation (N- to C-terminus) vl-linker-vh, although this can be reversed. In addition, each sequence outlined herein can include or exclude the M428L/N434S variants in one or preferably both Fc domains, which results in longer half-life in serum.

[0025] FIG. 17A-17O depicts the amino acid sequences of specific anti-LAG-3×anti-CTLA-4 Fab-scFv-Fc bispecific antibodies. The antibodies are named using the Fab variable region first and the scFv variable region second, separated by a dash, followed by the chain designation (Fab-Fc heavy chain, scFv-Fc heavy chain or light chain). CDRs are underlined and slashes indicate the border(s) of the variable regions. The scFv domains have the orientation (N- to C-terminus) vh-linker-vl, although this can be reversed. In addition, each sequence outlined herein can include or exclude the M428L/N434S variants in one or preferably both Fc domains, which results in longer half-life in serum.

[0026] FIG. 18 shows the results of some anti-LAG-3 hybridoma screening. 1 μg of human LAG-3-hIg in 10 μL was mixed with 50 μL of hybridoma supernatant (diluted 2-fold, 8 times in RPMI media with 10% FBS) for 20 minutes at room temperature. 40 μL of Daudi or Ramos cells (which endogenously express MHC-II) were added and incubated at 4° C. for 30 minutes. The cells were then washed and incubated with anti-human-Fc-Alexa647 secondary antibody for 30 minutes. Cells were then washed and analyzed by FACS for Alexa647.

[0027] FIG. 19A-19B depict cytokine release assays (A: IL-2, B: IFNγ) after SEB stimulation of human PBMCs and treatment with an anti-CTLA-4×anti-PD-1 bispecific antibody.

[0028] FIG. 20A-20C depict CD45+ events and CD8+ events on Day 14 after human PBMCs were engrated into NSG mice on Day 0 followed by dosing with the indicated test articles on Day 1.

[0029] FIG. 21A-21B depicts T cell binding in an SEB-stimulated PBMC assay by chimeric antibodies generated from anti-TIM-3 hybridomas.

[0030] FIG. 22 depicts some anti-TIM-3 antigen binding domain engineering data from three experiments. This depicts XENP code for bivalent embodiments, the derivative clone, the designations of the vh and vl engineered domains, the KD binding constant, association constant and dissociation constant against human TIM-3 as measured by OCTET®.

[0031] FIG. 23A-23N depicts some anti-PD-1 antigen binding domain engineering data. This depicts the XENP code for the bivalent and scFv embodiments, the designation of the vh and vl engineered domains, the scFv orientation (N- to C-terminal), the KD binding constant against human PD-1 as measured by OCTET®, and the Tm of the scFv.

[0032] FIG. 24A-24G depicts the results of some anti-CTLA-4 Fab screening. This depicts the XENP code for the Fab and scFv embodiments, the designation of the vh and vl engineered domains, the KD binding constant against human and cyno CTLA-4 as measured by OCTET®, and the Tm of the scFv and Fab. Additionally, the number of sequence 9-mers that were an exact match to at least one human VH or VL germline are depicted as a measure of humanness for the variable regions of both Fabs and scFvs.

[0033] FIG. 25 depicts a mixed lymphocyte reaction looking enhancement of IL-2 release by nivolumab (anti-PD-1 monoclonal antibody, marketed as Opdivo®) alone, ipilimumab alone (anti-CTLA-4 monoclonal antibody, marketed as Yervoy®), a prototype anti-CTLA-4×anti-PD-1 bispecific based on the nivolumab and ipilimumab arms, and a “one-armed” combination control.

[0034] FIG. 26 depicts mixed lymphocyte reaction looking at enhancement of IL-2 release by anti-CTLA-4×anti-PD-1 bispecific antibodies with variant anti-CTLA-4 Fab arms and variant anti-PD-1 scFv arms, as well as nivolumab alone, ipilimumab alone, and a prototype anti-CTLA-4×anti-PD-1 bispecific based on the nivolumab and ipilimumab arms as controls.

[0035] FIG. 27 shows that anti-CTLA-4×anti-PD-1 bispecifics enhance engraftment (as measured by human CD45 counts) in human PBMC-engrafted NSG mice. Enhancement is greater than that seen with nivolumab (XENP16432) alone (dashed line).

[0036] FIG. 28 depicts the correlation between body weight and CD45 cell count in Graft-versus-Host disease, demonstrating that CD45 cell levels are predictive of disease.

[0037] FIG. 29 depicts the correlation between CD45 cell count and IFNγ release in the study depicted in FIG. 27.

[0038] FIG. 30 shows that anti-CTLA-4×anti-PD-1 bispecifics enhance engraftment (as measured by human CD45 counts) in human PBMC-engrafted NSG mice. Enhancement is greater than that seen with nivolumab (XENP16432) alone (dashed line).

[0039] FIG. 31 depicts the correlation between CD45 cell count and IFNγ release in the study depicted in FIG. 30.

[0040] FIG. 32 shows the comparison of test article effects between the studies depicted in FIGS. 27 and 30 demonstrating the consistent superiority of anti-PD-1×anti-CTLA-4 bispecific checkpoint antibodies over nivolumab alone.

[0041] FIG. 33A-33B show the results of mixed lymphocyte reactions to evaluate anti-CTLA-4×anti-PD-1, anti-LAG-3×anti-PD-1, and anti-LAG-3×anti-CTLA-4 bispecifics. Analyte levels were normalized to those induced by nivolumab alone (values greater than one represent an enhancement relative to nivolumab).

[0042] FIG. 34 shows SEB reactions to evaluate anti-LAG-3×anti-CTLA-4 bispecifics. The anti-LAG-3×anti-CTLA-4 bispecific itself enhances the IL-2 response relative to control, although it is inferior to nivolumab alone. However, the anti-LAG-3×anti-CTLA-4 bispecific combined with nivolumab leads to significantly higher IL-2 response than either alone.

[0043] FIG. 35 Anti-CTLA-4×anti-PD-1, anti-LAG-3×anti-PD-1, anti-BTLA×anti-PD-1, and anti-LAG-3×anti-CTLA-4 bispecifics enhance engraftment (as measured by human CD45 counts) in human PBMC-engrafted NSG mice. Enhancement is greater than that seen with nivolumab (XENP 16432) alone. Also, the anti-LAG-3×anti-CTLA-4 bispecific combines with nivolumab to yield the highest engraftment levels.

[0044] FIG. 36A-36B show that the anti-BTLA×anti-PD-1 bispecifics require disruption of the HVEM/BTLA interaction to possess equivalent de-repressive activity as nivolumab.

[0045] FIG. 37A-37E shows the sequences of several useful bottle opener format backbones based on human IgG1, without the Fv sequences (e.g. the scFv and the vh and vl for the Fab side). Bottle opener backbone 1 is based on human IgG1 (356E/358M allotype), and includes the S364K/E357Q:L368D/K370S skew variants, the N208D/Q295E/N384D/Q418E/N421D pI variants on the Fab side and the E233P/L234V/L235A/G236del/S267K ablation variants on both chains. Bottle opener backbone 2 is based on human IgG1 (356E/358M allotype), and includes different skew variants, the N208D/Q295E/N384D/Q418E/N421D pI variants on the Fab side and the E233P/L234V/L235A/G236del/S267K ablation variants on both chains. Bottle opener backbone 3 is based on human IgG1 (356E/358M allotype), and includes different skew variants, the N208D/Q295E/N384D/Q418E/N421D pI variants on the Fab side and the E233P/L234V/L235A/G236del/S267K ablation variants on both chains. Bottle opener backbone 4 is based on human IgG1 (356E/358M allotype), and includes different skew variants, the N208D/Q295E/N384D/Q418E/N421D pI variants on the Fab side and the E233P/L234V/L235A/G236del/S267K ablation variants on both chains. Bottle opener backbone 5 is based on human IgG1 (356D/358L allotype), and includes the S364K/E357Q:L368D/K370S skew variants, the N208D/Q295E/N384D/Q418E/N421D pI variants on the Fab side and the E233P/L234V/L235A/G236del/S267K ablation variants on both chains. Bottle opener backbone 6 is based on human IgG1 (356E/358M allotype), and includes the S364K/E357Q:L368D/K370S skew variants, N208D/Q295E/N384D/Q418E/N421D pI variants on the Fab side and the E233P/L234V/L235A/G236del/S267K ablation variants on both chains, as well as an N297A variant on both chains. Bottle opener backbone 7 is identical to 6 except the mutation is N297S. Alternative formats for bottle opener backbones 6 and 7 can exclude the ablation variants E233P/L234V/L235A/G236del/S267K in both chains. Backbone 8 is based on human IgG4, and includes the S364K/E357Q:L368D/K370S skew variants, the N208D/Q295E/N384D/Q418E/N421D pI variants on the Fab side and the E233P/L234V/L235A/G236del/S267K ablation variants on both chains, as well as a S228P (EU numbering, this is S241P in Kabat) variant on both chains that ablates Fab arm exchange as is known in the art. Alternative formats for bottle opener backbone 8 can exclude the ablation variants E233P/L234V/L235A/G236del/S267K in both chains Backbone 9 is based on human IgG2, and includes the S364K/E357Q:L368D/K370S skew variants, the N208D/Q295E/N384D/Q418E/N421D pI variants on the Fab side. Backbone 10 is based on human IgG2, and includes the S364K/E357Q:L368D/K370S skew variants, the N208D/Q295E/N384D/Q418E/N421D pI variants on the Fab side as well as a S267K variant on both chains.

[0046] As will be appreciated by those in the art and outlined below, these sequences can be used with any vh and vl pairs outlined herein, with one monomer including a scFv (optionally including a charged scFv linker) and the other monomer including the Fab sequences (e.g. a vh attached to the “Fab side heavy chain” and a vl attached to the “constant light chain”). That is, any Fv sequences outlined herein for anti-CTLA-4, anti-PD-1, anti-LAG-3, anti-TIM-3, anti-TIGIT and anti-BTLA, whether as scFv (again, optionally with charged scFv linkers) or as Fabs, can be incorporated into these FIG. 37 backbones in any combination. The constant light chain depicted in FIG. 37A can be used for all of the constructs in the figure, although the kappa constant light chain can also be substituted.

[0047] It should be noted that these bottle opener backbones find use in the Central-scFv format of FIG. 1F, where an additional, second Fab (vh-CH1 and vl-constant light) with the same antigen binding as the first Fab is added to the N-terminus of the scFv on the “bottle opener side”.

[0048] Included within each of these backbones are sequences that are 90, 95, 98 and 99% identical (as defined herein) to the recited sequences, and/or contain from 1, 2, 3, 4, 5, 6, 7, 8, 9 or 10 additional amino acid substitutions (as compared to the “parent” of the Figure, which, as will be appreciated by those in the art, already contain a number of amino acid modifications as compared to the parental human IgG1 (or IgG2 or IgG4, depending on the backbone). That is, the recited backbones may contain additional amino acid modifications (generally amino acid substitutions) in addition to the skew, pI and ablation variants contained within the backbones of this figure.

[0049] FIG. 38A-38 D shows the sequences of a mAb-scFv backbone of use in the invention, to which the Fv sequences of the invention are added. mAb-scFv backbone 1 is based on human IgG1 (356E/358M allotype), and includes the S364K/E357Q:L368D/K370S skew variants, the N208D/Q295E/N384D/Q418E/N421D pI variants on the Fab side and the E233P/L234V/L235A/G236del/S267K ablation variants on both chains. Backbone 2 is based on human IgG1 (356D/358L allotype), and includes the S364K/E357Q:L368D/K370S skew variants, the N208D/Q295E/N384D/Q418E/N421D pI variants on the Fab side and the E233P/L234V/L235A/G236del/S267K ablation variants on both chains. Backbone 3 is based on human IgG1 (356E/358M allotype), and includes the S364K/E357Q:L368D/K370S skew variants, N208D/Q295E/N384D/Q418E/N421D pI variants on the Fab side and the E233P/L234V/L235A/G236del/S267K ablation variants on both chains, as well as an N297A variant on both chains. Backbone 4 is identical to 3 except the mutation is N297S. Alternative formats for mAb-scFv backbones 3 and 4 can exclude the ablation variants E233P/L234V/L235A/G236del/S267K in both chains. Backbone 5 is based on human IgG4, and includes the S364K/E357Q:L368D/K370S skew variants, the N208D/Q295E/N384D/Q418E/N421D pI variants on the Fab side and the E233P/L234V/L235A/G236del/S267K ablation variants on both chains, as well as a S228P (EU numbering, this is S241P in Kabat) variant on both chains that ablates Fab arm exchange as is known in the art Backbone 6 is based on human IgG2, and includes the S364K/E357Q:L368D/K370S skew variants, the N208D/Q295E/N384D/Q418E/N421D pI variants on the Fab side. Backbone 7 is based on human IgG2, and includes the S364K/E357Q:L368D/K370S skew variants, the N208D/Q295E/N384D/Q418E/N421D pI variants on the Fab side as well as a S267K variant on both chains.

[0050] As will be appreciated by those in the art and outlined below, these sequences can be used with any vh and vl pairs outlined herein, with one monomer including both a Fab and an scFv (optionally including a charged scFv linker) and the other monomer including the Fab sequence (e.g. a vh attached to the “Fab side heavy chain” and a vl attached to the “constant light chain”). That is, any Fv sequences outlined herein for anti-CTLA-4, anti-PD-1, anti-LAG-3, anti-TIM-3, anti-TIGIT and anti-BTLA, whether as scFv (again, optionally with charged scFv linkers) or as Fabs, can be incorporated into this FIG. 38 backbone in any combination. The monomer 1 side is the Fab-scFv pI negative side, and includes the heterodimerization variants L368D/K370S, the isosteric pI variants N208D/Q295E/N384D/Q418E/N421D, the ablation variants E233P/L234V/L235A/G236del/S267K, (all relative to IgG1). The monomer 2 side is the scFv pI positive side, and includes the heterodimerization variants 364K/E357Q. However, other skew variant pairs can be substituted, particularly [S364K/E357Q:L368D/K370S]; [L368D/K370S:S364K]; [L368E/K370S:S364K]; [T411T/E360E/Q362E:D401K]; [L368D/K370S:S364K/E357L], [K370S:S364K/E357Q], [T366S/L368A/Y407V:T366W] and [T366S/L368A/Y407V/Y394C:T366W/S354C].

[0051] The constant light chain depicted in FIG. 38A can be used for all of the constructs in the figure, although the kappa constant light chain can also be substituted.

[0052] It should be noted that these mAb-scFv backbones find use in the both the mAb-Fv format of FIG. 1H (where one monomer comprises a vl at the C-terminus and the other a vh at the C-terminus) as well as the scFv-mAb format of FIG. 1E (with a scFv domain added to the C-terminus of one of the monomers).

[0053] Included within each of these backbones are sequences that are 90, 95, 98 and 99% identical (as defined herein) to the recited sequences, and/or contain from 1, 2, 3, 4, 5, 6, 7, 8, 9 or 10 additional amino acid substitutions (as compared to the “parent” of the Figure, which, as will be appreciated by those in the art, already contain a number of amino acid modifications as compared to the parental human IgG1 (or IgG2 or IgG4, depending on the backbone). That is, the recited backbones may contain additional amino acid modifications (generally amino acid substitutions) in addition to the skew, pI and ablation variants contained within the backbones of this figure.

[0054] FIG. 39A-39B depicts a matrix of possible combinations for the bispecific checkpoint antibodies of the present invention. In FIG. 39A, the combinations are not bound by format, and any format of FIG. 1 can be used. An “A” in a box means that the CDRs from the first ABD (listed on the X axis) can be combined with the CDRs of the second ABD (listed on Y axis). A “B” in the box means the vh and vl chains from the first ABD can be combined with the vh and vl chains from the second ABD. A “C” in the box means that the CDRs from the first ABD can be combined with the vh and vl chains from the second ABD. A “D” in the box means that the vh and vl chains from the first ABD can be combined with the CDRs from the second ABD. An “E” in the box means that the PD-1 ABD is selected from the group of 1G6_H1.279_L1.194; 1G6_H1.280_L1.224; 1G6_L1.194_H1.279; 1G6_L1.210_H1.288; and 2E9_H1L1. An “F” in the box means that the CTLA-4 ABD is selected from the group of [CTLA-4]_H0.25_L0; [CTLA-4]_H0.26_L0; [CTLA-4]_H0.27_L0; [CTLA-4]_H0.29_L0; [CTLA-4]_H0.38_L0; [CTLA-4]_H0.39_L0; 0[CTLA-4]_H0.40_L0; [CTLA-4]_H0.70_L0; [CTLA-4]_H0_L0.22; [CTLA-4]_H2_L0; [CTLA-4]_H3.21_L0.124; [CTLA-4]_H3.21_L0.129; [CTLA-4]_H3.21_L0.132; [CTLA-4]_H3.23_L0.124; [CTLA-4]_H3.23_L0.129; [CTLA-4]_H3.23_L0.132; [CTLA-4]_H3.25_L0.124; [CTLA-4]_H3.25_L0.129; [CTLA-4]_H3.25_L0.132; [CTLA-4]_H3.4_L0.118; [CTLA-4]_H3.4_L0.119; [CTLA-4]_H3.4_L0.12; [CTLA-4]_H3.4_L0.121; [CTLA-4]_H3.4_L0.122; [CTLA-4]_H3.4_L0.123; [CTLA-4]_H3.4_L0.124; [CTLA-4]_H3.4_L0.125; [CTLA-4]_H3.4_L0.126; [CTLA-4]_H3.4_L0.127; [CTLA-4]_H3.4_L0.128; [CTLA-4]_H3.4_L0.129; [CTLA-4]_H3.4_L0.130; [CTLA-4]_H3.4_L0.131; [CTLA-4]_H3.4_L0.132; [CTLA-4]_H3.5_L2.1; [CTLA-4]_H3.5_L2.2; [CTLA-4]_H3.5_L2.3; [CTLA-4]_H3_L0; [CTLA-4]_H3_L0.22; [CTLA-4]_H3_L0.44; [CTLA-4]_H3_L0.67; and [CTLA-4]_H3_L0.74. A “G” in the box means that the TIM-3 ABD is selected from the group of 1D10_H0L0; 1D12_H0L0; 3H3_H1_L2.1; 6C8_H0L0; 6D9_H0_1D12_L0; 7A9_H0L0; 7B11_H0L0; 7B11var_H0L0; and 7C2_H0L0. An “H” in the box means that the LAG-3 ABD is selected from the group of identifiers 2A11_H0L0; 2A11_H1.125_L2.113; 2A11_H1.144_L2.142; 2A11_H1_L2.122; 2A11_H1_L2.123; 2A11_H1_L2.124; 2A11_H1_L2.25; 2A11_H1_L2.47; 2A11_H1_L2.50; 2A11_H1_L2.91; 2A11_H1_L2.93; 2A11_H1_L2.97; 2A11_H1L1; 2A11_H1L2; 2A11_H2L2; 2A11_H3L1; 2A11_H3L2; 2A11_H4L1; 2A11_H4L2; 7G8_H0L0; 7G8_H1L1; 7G8_H3.18_L1.11; 7G8_H3.23_L1.11; 7G8_H3.28_L1; 7G8_H3.28_L1.11; 7G8_H3.28_L1.13; 7G8_H3.30_L1.34; 7G8_H3.30_L1.34; and 7G8_H3L1. An “I” in box means that A “J” in the box means that the BTLA ABD is selected from the group 9C6_H0L0; 9C6_H1.1_L1; and 9C6_H1.11_L1. FIG. 39B is identical to FIG. 39A except that FIG. 39B is specific to the bottle opener format. In B, when the first ABD binds PD-1, the first ABD is the scFv monomer, and the other ABD (CTLA-4, LAG-3, TIGIT, TIM-3 and BTLA) are in the Fab monomer. In B, when the first ABD binds CTLA-4, it is in the scFv monomer (except when combined with PD-1, when it is the Fab side), with the other ABD (CTLA-4, LAG-3, TIGIT, TIM-3 and BTLA) are in the Fab monomer.

[0055] FIG. 40 depicts a matrix of possible bottle opener format combinations. A “Q” in the box means that the first ABD domain (again, listed on the X axis) is the scFv and the second ABD (again, listed on the Y axis) is the Fab side. An “R” in the box means that the first ABD is the Fab side and the second ABD is the scFv. An “S” in the box means that the first ABD is anti-PD-1 and is the scFv side. A “T” in the box means that the first ABD is anti-CTLA-4 and is the scFv side. A “U” in the box means that the first ABD is anti-TIM-3 and is the scFv side. A “V” in the box means that the first ABD is anti LAG-3 and is the scFv side. A “W” in the box means that the first ABD is anti TIGIT and is the scFv side. An “X” in the box means that the first ABD is anti-BTLA and is the scFv side. In addition, each combination outlined in FIG. 39 can use the CDRs, scFvs and vh and vl combinations of FIG. 38. In addition, particular embodiments of the bottle opener backbones of FIG. 39 are the sequences of FIG. 36.

[0056] FIG. 41A-41B depicts a schematic associated with the benefit that a bispecific checkpoint antibody can provide over combination therapies using two different antibodies or drugs.

[0057] FIG. 42 depicts a similar schematic, showing that because tumor TILs co-express multiple checkpoints, a bivalent binding increases avidity, enhancing anti-tumor activity and avoiding peripheral toxicity.

[0058] FIG. 43 shows that bispecific checkpoint antibodies of the invention (e.g. anti-LAG-3×anti-CTLA-4) can be combined with other monospecific checkpoint antibodies (e.g. nivolumab, pemobrolizumab).

[0059] FIG. 44 shows that PD-1 and CTLA-4 are coexpressed in a variety of tumor types, including bladder, breast, colon, prostate, lung, melanoma and ovarian cancer.

[0060] FIG. 45A-45C depicts a comparison of the enhancement of IL-2 B) by anti-PD-1 bivalent and anti-CTLA-4×anti-PD-1 and C) and one-arm anti-PD-1+one-arm anti-CTLA-4 and anti-CTLA-4×anti-PD-1 in an SEB-stimulated PBMC assay as well as C) a control experiment without SEB stimulation.

[0061] FIG. 46A-46B depicts blocking of PD-1 to ligands PD-L1 and PD-L2 by an exemplary anti-CTLA-4×anti-PD-1 bispecific in comparison to one-arm anti-PD-1 and one-arm anti-CTLA-4 antibodies.

[0062] FIG. 47 depicts T cell binding in an SEB-stimulated PBMC assay by an exemplary anti-CTLA-4×anti-PD-1 bispecific antibody.

[0063] FIG. 48 shows that anti-CTLA-4×anti-PD-1 bispecifics enhance engraftment (as measured by human CD45 counts) in human PBMC-engrafted NSG mice. Enhancement is greater than that seen with nivolumab (XENP16432) alone.

[0064] FIG. 49 shows that the anti-BTLA×anti-PD-1 bispecific candidates bind more avidly to T cells compared to “one-armed” controls in an SEB-stimulated PBMC assay.

[0065] FIG. 50A-50B show that anti-BTLA×anti-PD-1 chimeric bispecific promotes IL-2 secretion from SEB stimulated PBMCs. PBMCs were stimulated with 10 ng/mL SEB for 3 days with indicated test articles. Cell supernatants were collected and assayed with MSD for indicated analyte. A: 20 μg/mL test article; B 5 μg/mL test article.

[0066] FIG. 51A-51B show that anti-BTLA×anti-PD-1 chimeric bispecific promotes IFNγ secretion from SEB stimulated PBMCs. PBMCs were stimulated with 10 ng/mL SEB for 3 days with indicated test articles. Cell supernatants were collected and assayed with MSD for indicated analyte. A: 20 μg/mL test article; B 5 μg/mL test article.

[0067] FIG. 52A-52B shows that anti-BTLA×anti-PD-1 bispecific antibodies (chimeric and with humanized/optimized anti-BTLA Fab arms) promotes IL-2 secretion and IFN-γ from SEB stimulated PBMCs. Both panels were PBMCs stimulated with 10 ng/mL SEB for 3 days with indicated 20 μg/mL test articles. Cell supernatants were collected 72 hours later and assayed for indicated analyte.

[0068] FIG. 53A-53F shows the time course (Days 10, 14 and 22) enhancement in CD45 cell counts and IFNγ secretion by an exemplary anti-BTLA×anti-PD-1 bispecific antibody in a GVHD study.

[0069] FIG. 54 depicts some 9C6 anti-BTLA antigen binding domain engineering data. This depicts XENP code for bivalent embodiments, the designations of the vh and vl engineered domains, and the KD binding constant against human BTLA as measured by OCTET®.

[0070] FIG. 55A-55E depicts some 2A11 anti-LAG-3 antigen binding domain engineering data. This depicts XENP code for Fab embodiments, the designations of the vh and vl engineered domains, the KD binding constant against human LAG-3 as measured by OCTET® and the Tm of the Fab.

[0071] FIG. 56A-56K depicts some 7G8 anti-LAG-3 antigen binding domain engineering data. This depicts XENP code for Fab embodiments, the designations of the vh and vl engineered domains, the KD binding constant against human LAG-3 as measured by OCTET® and the Tm of the Fab.

[0072] FIG. 57A-57B depicts the Kds for anti-LAG-3×anti-CTLA-4 bispecific, heterodimeric bottle opener formats based on either optimized 2A11 or 7G8 anti-LAG-3 Fab arms as measured by OCTET®.

[0073] FIG. 58 shows that anti-LAG-3 (7G8)×anti-CTLA-4 and anti-LAG-3 (2A11)×anti-CTLA-4 bispecifics bind more avidly than one-armed anti-LAG-3 controls. PBMCs were stimulated with 100 ng/mL SEB for 3 days. Cells were then treated with the indicated test articles for 30 min at 4 C degrees and washed twice. Cells were then treated with an anti-CD3-FITC and anti-human-Fc-APC antibody. Cells were then washed twice and analyzed by flow cytometry.

[0074] FIG. 59A-59B shows that 7G8 based anti-LAG-3×anti-CTLA-4 bispecifics exhibit more selective function on PBMCs than 2A11 based anti-LAG-3×anti-CTLA-4 bispecifics as indicated by enhancement in IL-2 and IFNγ release. PBMCs were stimulated with 500 ng/mL of SEB for 2 days. Cells were then washed twice in culture medium and stimulated with 500 ng/mL SEB in combination with the indicated amounts of test articles. Cells were assayed for the indicated analyte (either IL-2 or IFN-γ) 24 hours after treatment. Each point represents a unique donor tested in technical singlet.

[0075] FIG. 60A-60B depicts mixed lymphocyte reactions (MLRs) with anti-LAG-3×anti-CTLA-4 bispecific antibodies. 40 unique MLR reactions were made in the presence of 20 ug/mL of indicated test articles. Cell supernatants were then assayed by MSD 6 days after treatment for A: IL-2 and B: IFNγ.

[0076] FIG. 61A-61B shows enhancement of IL-2 and IFNγ release by additional anti-LAG-3×anti-CTLA-4 candidates in the SEB assays. PBMCs were stimulated with 500 ng/mL SEB for 2 days. Cells were then washed twice in culture medium and stimulated with 500 ng/mL SEB in combination with indicated amounts of test articles. Cells were assayed for indicated analyte (either IL-2 or IFN-γ) 24 hours after treatment. Each point represents a unique donor tested in technical singlet.

[0077] FIG. 62A-62B depicts the Kds for anti-LAG-3×anti-PD-1 bispecific, heterodimeric bottle opener formats based on either optimized 2A11 or 7G8 anti-LAG-3 Fab arms as measured by OCTET®.

[0078] FIG. 63A-63B depicts the ability of humanized/optimized 7G8 and 2A11 anti-LAG-3 clones to block LAG-3 binding to Daudi cells endogenously expressing MHC-II.

[0079] FIG. 64A-64B depicts anti-LAG-3×anti-PD-1 candidate function on SEB stimulated T cells. PBMCs were stimulated with 500 ng/ml SEB for 2 days. Cells were then washed twice in culture medium and stimulated with 500 ng/mL SEB in combination with indicated amounts of test articles. Cells were assayed for indicated analyte 24 h after treatment. Each point represents a unique donor tested in technical singlet.

[0080] FIG. 65 are graphs, showing that tumor infiltrating lymphocytes (TILs) co-express multiple checkpoint receptors in various tumors. In particular, the graphs show that various tumors coexpress PD-1 and CTLA-4, PD-1 and BTLA, PD-1 and LAG-3; and LAG-3 and CTLA-4. The results shown are based upon data generated by the TCGA Research network: http://cancergenome.nih.gov/

[0081] FIG. 66 shows that subject bispecific antibodies provided herein selectively target dual-checkpoint positive T cells. Bispeicifc PD-1×LAG-3 antibodies are used to show PD-1 and LAG-3 receptor occupancy in CD3+ T-cells stimulated with staphylococcal enterotoxin B (SEB) as compared to a negative control.

[0082] FIG. 67A-67F are graphs showing that component antibody domains of the subject antibodies provided herein are capable of blocking checkpoint receptor/ligand interactions. In particular, a bispecific antibody comprising a 1G6 anti-PD-1 scFv arm is capable of blocking PD-1/PD-L1 and PD-1/PD-L2 interactions; 7G8 anti-LAG-3 one arm is capable of blocking LAG-3/MHC II interaction; a bispecific antibody comprising an exemplary anti-PD-1 Fab arm is capable of blocking CTLA-4/CD80 and CTLA-4/CD86 interactions; and a bispecific antibody comprising a 9C6 anti-BTLA Fab arm is capable of blocking BTLA/HVEM interaction.

[0083] FIG. 68 compares the enhancement of IL-2 release by an exemplary anti-CTLA-4×anti-PD-1 bispecific antibody and nivolumab.

[0084] FIG. 69 compares the enhancement of IL-2 release by an exemplary anti-LAG-3×anti-CTLA-4 bispecific antibody, the same bispecific antibody in combination with nivolumab, and nivolumab alone.

[0085] FIG. 70 compares the enhancement of IL-2 release by an exemplary anti-LAG-3×anti-PD-1 bispecific antibody and nivolumab.

[0086] FIG. 71 compares the enhancement of IL-2 release by an exemplary anti-BTLA×anti-PD-1 bispecific antibody and nivolumab.

[0087] FIG. 72 compares the enhancement of GVHD (as indicated by CD45 cell count) by an exemplary anti-PD-1×anti-CTLA-4 bispecific antibody, nivolumab alone, and nivolumab in combination with ipilimumab.

[0088] FIG. 73 compares the enhancement of GVHD (as indicated by CD45 cell count) by an exemplary anti-BTLA×anti-PD-1 bispecific antibody and nivolumab.

[0089] FIG. 74 compares the enhancement of GVHD (as indicated by CD45 cell count) by an exemplary anti-LAG-3×anti-CTLA-4 bispecific antibody, the same bispecific antibody in combination with nivolumab, and nivolumab alone.

[0090] FIG. 75 compares the enhancement of GVHD (as indicated by CD45 cell count) by an exemplary anti-LAG-3×anti-PD-1 bispecific antibody and nivolumab.

[0091] FIGS. 76A-76D depicts two studies, showing that anti-CTLA-4×anti-PD-1 bispecific antibodies can promote in vivo T cell mediated anti-tumor efficacy. KG1a-luc cancer cells were engrafted into mice. Twenty-one days later, huPMCs were engrafted into the same mice and weekly antibody treatments (anti-CTLA-4×anti-PD-1 bispecific antibodies; anti-PD-1 bivalent antibodies; or anti-PD-1 bivalent antibody+anti-CTLA-4 bivalent antibody) were administered. IVIS cancer cell imaging was conducted on the mice to assess tumor size, as determined by change in tumor flux.

### III. DETAILED DESCRIPTION OF THE INVENTION

### A. Incorporation of Materials

[0092] 1. Figures and Legends

[0093] All the figures and accompanying legends of U.S. Ser. Nos. 62,350,145, 62/353,511 and 62/420,500 are expressly and independently incorporated by reference herein in their entirety, particularly for the amino acid sequences depicted therein.

[0094] 2. Sequences

[0095] Reference is made to the accompanying sequence listing as following: anti-PD-1 sequences suitable for use as ABDs include SEQ ID NOs: 6209-11464 (PD-1 scFv sequences, although the Fv sequences therein can be formatted as Fabs), SEQ ID NOs: 11465-17134 (PD-1 Fab sequences, although the Fv sequences therein can be formatted as scFvs), SEQ ID NOs: 33003-33072 (additional PD-1 Fab sequences, although the Fv sequences therein can be formatted as scFvs), SEQ ID NOs: 33073-35394 (additional PD-1 scFv sequences, although the Fv sequences therein can be formatted as Fabs) and SEQ ID NOs: 36127-36146 (PD-1 bivalent constructs, which can be formatted as either scFvs or Fabs). Anti-CTLA-4 sequences suitable for use as ABDs include SEQ ID NOs: 21-2918 (CTLA-4 scFv sequences, although the Fv sequences therein can be formatted as Fabs), SEQ ID NOs: 2919-6208 (CTLA-4 Fab sequences, although the Fv sequences therein can be formatted as scFvs), SEQ ID NOs: 36739-36818 (additional CTLA-4 Fab sequences, although the Fv sequences therein can be formatted as scFvs) and SEQ ID NOs: 35395-35416 (CTLA-4 one armed constructs, which can be formatted as either Fabs or scFvs). Anti-LAG-3 sequences suitable for use as ABDs include SEQ ID NOs: 17135-20764 (LAG-3 Fabs, although the Fv sequences therein can be formatted as scFvs), SEQ ID NOs: 36819-36962 (additional LAG-3 Fabs although the Fv sequences therein can be formatted as scFvs), SEQ ID NOs: 35417-35606 (additional LAG-3 Fabs although the Fv sequences therein can be formatted as scFvs), SEQ ID NOs: 25194-32793 (additional LAG-3 Fabs although the Fv sequences therein can be formatted as scFvs) and SEQ ID NOs: 32794-33002 (one armed LAG-3 constructs which can be formatted as either Fabs or scFvs). Anti-TIM-3 sequences suitable for use as ABDs include SEQ ID NOs: 20765-20884 (TIM-3 Fabs, although the Fv sequences therein can be formatted as scFvs), SEQ ID NOs: 37587-37698 (additional TIM-3 Fabs, the Fv sequences therein can be formatted as scFvs) and SEQ ID NOs: 36347-36706 (bivalent TIM-3 constructs which can be formatted as either Fabs or scFvs). Anti-BTLA sequences suitable for use as ABDs include SEQ ID NOs: 20885-21503 (BTLA Fabs although the Fv sequences therein can be formatted as scFvs) and SEQ ID NOs: 36707-36738 (additional BTLA Fabs although the Fv sequences therein can be formatted as scFvs). Anti-TIGIT sequences suitable for use as ABDs include SEQ ID NOs: 21504-21523 (TIGIT Fab although the Fv sequences therein can be formatted as scFvs) and SEQ ID NOs: 37435-37586 (additional TIGIT Fabs although the Fv sequences therein can be formatted as scFvs).

[0096] Bispecific antibodies of the invention include LAG3×CTLA4 constructs of SEQ ID NOs: 35607-35866 and SEQ ID NOs: 21524-22620. PD-1×CTLA4 constructs include those listed as SEQ ID NOs: 36167-36346 and SEQ ID NOs: 23316-23735. PD-1×TIM3 constructs include those listed as SEQ ID NOs: 25174-25193. PD-1×LAG3 constructs include those listed as SEQ ID NOs: 35867-36126 and SEQ ID NOs: 23736-25133. PD-1×TIGIT constructs include those listed as SEQ ID NOs: 25134-25173. PD-1×BTLA constructs include those listed as SEQ ID NOs: 22724-23315 and SEQ ID NOs: 36147-36166. CTLA4×BTLA constructs include those listed as SEQ ID NOs: 22624-22723. Finally, the names for XENP23552, XENP22841, XENP22842, XENP22843, XENP22844, XENP22845, XENP22846, XENP22847, XENP22848, XENP22849, XENP22850, XENP22851, XENP22852, XENP22858, XENP22854, XENP22855 all should have included the “M428L/N434S” notation in the title, which were inadvertantly left off.

### B. Overview

[0097] Therapeutic antibodies directed against immune checkpoint inhibitors such as PD-1 are showing great promise in limited circumstances in the clinic for the treatment of cancer. Cancer can be considered as an inability of the patient to recognize and eliminate cancerous cells. In many instances, these transformed (e.g. cancerous) cells counteract immunosurveillance. There are natural control mechanisms that limit T-cell activation in the body to prevent unrestrained T-cell activity, which can be exploited by cancerous cells to evade or suppress the immune response. Restoring the capacity of immune effector cells—especially T cells—to recognize and eliminate cancer is the goal of immunotherapy. The field of immuno-oncology, sometimes referred to as “immunotherapy” is rapidly evolving, with several recent approvals of T cell checkpoint inhibitory antibodies such as Yervoy, Keytruda and Opdivo. These antibodies are generally referred to as “checkpoint inhibitors” because they block normally negative regulators of T cell immunity. It is generally understood that a variety of immunomodulatory signals, both costimulatory and coinhibitory, can be used to orchestrate an optimal antigen-specific immune response.

[0098] Generally, these monoclonal antibodies bind to checkpoint inhibitor proteins such as CTLA-4 and PD-1, which under normal circumstances prevent or suppress activation of cytotoxic T cells (CTLs). By inhibiting the checkpoint protein, for example through the use of antibodies that bind these proteins, an increased T cell response against tumors can be achieved. That is, these cancer checkpoint proteins suppress the immune response; when the proteins are blocked, for example using antibodies to the checkpoint protein, the immune system is activated, leading to immune stimulation, resulting in treatment of conditions such as cancer and infectious disease.

[0099] However, as discussed above, studies have shown that TILs commonly express multiple checkpoint receptors; this may suggest that single checkpoint blockade could be insufficient to promote a complete T cell response. Moreover, it is likely that TILs that express multiple checkpoints are in fact the most tumor-reactive, thus suggesting that therapies that engage more than one checkpoint antigen could be very useful.

[0100] Accordingly, the present invention provides bispecific checkpoint antibodies, that bind to cells expressing the two antigens and methods of activating T cells and/or NK cells to treat diseases such as cancer and infectious diseases, and other conditions where increased immune activity results in treatment.

[0101] Thus, the invention is directed, in some instances, to solving the issue of toxicity and expense of administering multiple antibodies by providing bispecific antibodies that bind to two different checkpoint inhibitor molecules on a single cell and advantageously requiring administration of only one therapeutic substance.

[0102] Bispecific antibodies, which can bind two different targets simultaneously, offer the potential to improve the selectivity of targeting TILs vs peripheral T cells, while also reducing cost of therapy. The bivalent interaction of an antibody with two targets on a cell surface should—in some cases—lead to a higher binding avidity relative to a monovalent interaction with one target at a time. Because of this, normal bivalent antibodies tend to have high avidity for their target on a cell surface. With bispecific antibodies, the potential exists to create higher selectivity for cells that simultaneously express two different targets, utilizing the higher avidity afforded by simultaneous binding to both targets.

[0103] Accordingly, the present invention is directed to novel constructs to provide heterodimeric antibodies that allow binding to more than one checkpoint antigen or ligand, e.g. to allow for bispecific binding. Hence, for example, an anti-PD1×anti-CTLA4 (PD1×CTLA4) bispecific antibody is expected to be more selective for PD1+CTLA4+ double positive TILs versus single positive PD1-only or CTLA4-only T cells. Selective blockade of double-positive TILs versus single positive T cells is therefore expected to improve the therapeutic index of combined checkpoint blockade. This is similarly true for the other possible combinations as outlined herein. Accordingly, suitable bispecific antibodies of the invention bind PD-1 and CTLA-4, PD-1 and TIM-3, PD-1 and LAG-3, PD-1 and TIGIT, PD-1 and BTLA, CTLA-4 and TIM-3, CTLA-4 and LAG-3, CTLA-4 and TIGIT, CTLA-4 and BTLA, TIM-3 and LAG-3, TIM-3 and TIGIT, TIM-3 and BTLA, LAG-3 and TIGIT, LAG-3 and BTLA and TIGIT and BTLA. Note that generally these bispecific antibodies are named “anti-PD-1×anti-CTLA-4”, or generally simplistically or for ease (and thus interchangeably) as “PD-1×CTLA-4”, etc. for each pair.

[0104] The heterodimeric bispecific checkpoint antibodies of the invention are useful to treat a variety of types of cancers. As will be appreciated by those in the art, in contrast to traditional monoclonal antibodies that bind to tumor antigens, or to the newer classes of bispecific antibodies that bind, for example, CD3 and tumor antigens (such as described in U.S. Ser. No. 15/141,350, for example), checkpoint antibodies are used to increase the immune response but are not generally tumor specific in their action. That is, the bispecific checkpoint antibodies of the invention inhibit the suppression of the immune system, generally leading to T cell activation, which in turn leads to greater immune response to cancerous cells and thus treatment. Such antibodies can therefore be expected to find utility for treatment of a wide variety of tumor types. For example, the FDA recently approved Keytruda®, an anti-PD-1 monospecific antibody on the basis of a genetic feature, rather than a tumor type.

[0105] As discussed below, there are a variety of ways that T cell activation can be measured. Functional effects of the bispecific checkpoint antibodies on NK and T-cells can be assessed in vitro (and in some cases in vivo, as described more fully below) by measuring changes in the following parameters: proliferation, cytokine release and cell-surface makers. For NK cells, increases in cell proliferation, cytotoxicity (ability to kill target cells as measured by increases in CD107a, granzyme, and perforin expression, or by directly measuring target cells killing), cytokine production (e.g. IFN-γ and TNF), and cell surface receptor expression (e.g. CD25) is indicative of immune modulation, e.g. enhanced killing of cancer cells. For T-cells, increases in proliferation, increases in expression of cell surface markers of activation (e.g. CD25, CD69, CD137, and PD1), cytotoxicity (ability to kill target cells), and cytokine production (e.g. IL-2, IL-4, IFN-γ, TNF-α, IL-10, IL-17A) are indicative of immune modulation, e.g. enhanced killing of cancer cells. Accordingly, assessment of treatment can be done using assays that evaluate one or more of the following: (i) increases in immune response, (ii) increases in activation of αβ and/or γδ T cells, (iii) increases in cytotoxic T cell activity, (iv) increases in NK and/or NKT cell activity, (v) alleviation of αβ and/or γδ T-cell suppression, (vi) increases in pro-inflammatory cytokine secretion, (vii) increases in IL-2 secretion; (viii) increases in interferon-γ production, (ix) increases in Th1 response, (x) decreases in Th2 response, (xi) decreases in cell number and/or activity of at least one of regulatory T cells and cells (xii) increases of tumor immune infiltrates.

[0106] Thus, in some embodiments the invention provides the use of bispecific checkpoint antibodies to perform one or more of the following in a subject in need thereof: (a) upregulating pro-inflammatory cytokines; (b) increasing T-cell proliferation, expansion or tumor infiltration; (c) increasing interferon-γ, TNF-α and other cytokine production by T-cells; (d) increasing IL-2 secretion; (e) stimulating antibody responses; (f) inhibiting cancer cell growth; (g) promoting antigenic specific T cell immunity; (h) promoting CD4+ and/or CD8+ T cell activation; (i) alleviating T-cell suppression; (j) promoting NK cell activity; (k) promoting apoptosis or lysis of cancer cells; and/or (1) cytotoxic or cytostatic effect on cancer cells.

[0107] Accordingly, the present invention provides bispecific, heterodimeric checkpoint antibodies. The heterodimeric antibody constructs are based on the self-assembling nature of the two Fc domains of the heavy chains of antibodies, e.g. two “monomers” that assemble into a “dimer”. Heterodimeric antibodies are made by altering the amino acid sequence of each monomer as more fully discussed below. Thus, the present invention is generally directed to the creation of heterodimeric antibodies, which can co-engage checkpoint antigens in several ways, relying on amino acid variants in the constant regions that are different on each chain to promote heterodimeric formation and/or allow for ease of purification of heterodimers over the homodimers.

[0108] Thus, the present invention provides bispecific checkpoint antibodies. An ongoing problem in antibody technologies is the desire for “bispecific” antibodies that bind to two (or more) different antigens simultaneously, in general thus allowing the different antigens to be brought into proximity and resulting in new functionalities and new therapies. In general, these antibodies are made by including genes for each heavy and light chain into the host cells (generally, in the present invention, genes for two heavy chain monomers and a light chain as outlined herein). This generally results in the formation of the desired heterodimer (A-B), as well as the two homodimers (A-A and B-B). However, a major obstacle in the formation of bispecific antibodies is the difficulty in purifying the heterodimeric antibodies away from the homodimeric antibodies and/or biasing the formation of the heterodimer over the formation of the homodimers.

[0109] To solve this issue, there are a number of mechanisms that can be used to generate the heterodimers of the present invention. In addition, as will be appreciated by those in the art, these mechanisms can be combined to ensure high heterodimerization. Thus, amino acid variants that lead to the production of heterodimeric antibodies are referred to as “heterodimerization variants”. As discussed below, heterodimerization variants can include steric variants (e.g. the “knobs and holes” or “skew” variants described below and the “charge pairs” variants described below) as well as “pI variants”, which allows purification of homodimers away from heterodimers.

[0110] One mechanism, generally referred to in the art as “knobs and holes” (“KIH”) or sometimes herein as “skew” variants, referring to amino acid engineering that creates steric and/or electrostatic influences to favor heterodimeric formation and disfavor homodimeric formation can also optionally be used, as described in Ridgway et al., Protein Engineering 9(7):617 (1996); Atwell et al., J. Mol. Biol. 1997 270:26; U.S. Pat. No. 8,216,805, US 2012/0149876, all of which are hereby incorporated by reference in their entirety. The Figures identify a number of “monomer A-monomer B” pairs that include “knobs and holes” amino acid substitutions. In addition, as described in Merchant et al., Nature Biotech. 16:677 (1998), these “knobs and hole” mutations can be combined with disulfide bonds to skew formation to heterodimerization. Of use in the present invention are T366S/L368A/Y407V paired with T366W, as well as this variant with a bridging disulfide, T366S/L368A/Y407V/Y349C paired with T366W/S354C, particularly in combination with other heterodimerization variants including pI variants as outlined below.

[0111] An additional mechanism that finds use in the generation of heterodimeric antibodies is sometimes referred to as “electrostatic steering” or “charge pairs” as described in Gunasekaran et al., J. Biol. Chem. 285(25):19637 (2010), hereby incorporated by reference in its entirety. This is sometimes referred to herein as “charge pairs”. In this embodiment, electrostatics are used to skew the formation towards heterodimerization. As those in the art will appreciate, these may also have an effect on pI, and thus on purification, and thus could in some cases also be considered pI variants. However, as these were generated to force heterodimerization and were not used as purification tools, they are classified as “steric variants”. These include, but are not limited to, D221E/P228E/L368E paired with D221R/P228R/K409R (e.g. these are “monomer corresponding sets) and C220E/P228E/368E paired with C220R/E224R/P228R/K409R and others shown in the Figures.

[0112] In the present invention, in some embodiments, pI variants are used to alter the pI of one or both of the monomers and thus allowing the isoelectric separation of A-A, A-B and B-B dimeric proteins.

[0113] In the present invention, there are several basic mechanisms that can lead to ease of purifying heterodimeric proteins; one relies on the use of pI variants, such that each monomer has a different pI, thus allowing the isoelectric purification of A-A, A-B and B-B dimeric proteins. Alternatively, some scaffold formats, such as the “triple F” format, also allows separation on the basis of size. As is further outlined below, it is also possible to “skew” the formation of heterodimers over homodimers. Thus, a combination of steric heterodimerization variants and pI or charge pair variants find particular use in the invention. Additionally, as more fully outlined below, scaffolds that utilize scFv(s) such as the Triple F format can include charged scFv linkers (either positive or negative), that give a further pI boost for purification purposes. As will be appreciated by those in the art, some Triple F formats are useful with just charged scFv linkers and no additional pI adjustments, although the invention does provide the use of skew variants with charged scFv linkers as well (and combinations of Fc, FcRn and KO variants discussed herein).

[0114] In the present invention that utilizes pI as a separation mechanism to allow the purification of heterodimeric proteins, amino acid variants can be introduced into one or both of the monomer polypeptides; that is, the pI of one of the monomers (referred to herein for simplicity as “monomer A”) can be engineered away from monomer B, or both monomer A and B can be changed, with the pI of monomer A increasing and the pI of monomer B decreasing. As is outlined more fully below, the pI changes of either or both monomers can be done by removing or adding a charged residue (e.g. a neutral amino acid is replaced by a positively or negatively charged amino acid residue, e.g. glycine to glutamic acid), changing a charged residue from positive or negative to the opposite charge (e.g. aspartic acid to lysine) or changing a charged residue to a neutral residue (e.g. loss of a charge; lysine to serine). A number of these variants are shown in the Figures. In addition, suitable pI variants for use in the creation of heterodimeric antibodies herein are those that are isotypic, e.g. importing pI variants from different IgG isotypes such that pI is changed without introducing significant immunogenicity; see FIG. 29 from US Publication No. 20140288275, hereby incorporated by reference in its entirety.

[0115] Accordingly, in this embodiment of the present invention provides for creating a sufficient change in pI in at least one of the monomers such that heterodimers can be separated from homodimers. As will be appreciated by those in the art, and as discussed further below, this can be done by using a “wild type” heavy chain constant region and a variant region that has been engineered to either increase or decrease it's pI (wt A-+B or wt A-−B), or by increasing one region and decreasing the other region (A+-B− or A-B+).

[0116] Thus, in general, a component of some embodiments of the present invention are amino acid variants in the constant regions of antibodies that are directed to altering the isoelectric point (pI) of at least one, if not both, of the monomers of a dimeric protein to form “pI heterodimers” (when the protein is an antibody, these are referred to as “pI antibodies”) by incorporating amino acid substitutions (“pI variants” or “pI substitutions”) into one or both of the monomers. As shown herein, the separation of the heterodimers from the two homodimers can be accomplished if the pIs of the two monomers differ by as little as 0.1 pH unit, with 0.2, 0.3, 0.4 and 0.5 or greater all finding use in the present invention.

[0117] As will be appreciated by those in the art, the number of pI variants to be included on each or both monomer(s) to get good separation will depend in part on the starting pI of the scFv and Fab of interest. That is, to determine which monomer to engineer or in which “direction” (e.g. more positive or more negative), the Fv sequences of the two target antigens are calculated and a decision is made from there. As is known in the art, different Fvs will have different starting pIs which are exploited in the present invention. In general, as outlined herein, the pIs are engineered to result in a total pI difference of each monomer of at least about 0.1 logs, with 0.2 to 0.5 being preferred as outlined herein.

[0118] Furthermore, as will be appreciated by those in the art and outlined herein, in some cases (depending on the format) heterodimers can be separated from homodimers on the basis of size (e.g. molecular weight). For example, as shown in some embodiments of FIG. 1, some formats result in homodimers and heterodimers with different sizes (e.g. for bottle openers, one homodimer is a “dual scFv” format, one homodimer is a standard antibody, and the heterodimer has one Fab and one scFv.

[0119] In addition, as depicted in FIG. 1, it will be recognized that it is possible that some antigens are bound bivalently (e.g. two antigen binding sites to a single antigen). As will be appreciated, any combination of Fab and scFvs can be utilized to achieve the desired result and combinations.

[0120] In the case where pI variants are used to achieve purified heterodimers over homodimers, by using the constant region(s) of the heavy chain(s), a more modular approach to designing and purifying multispecific proteins, including antibodies, is provided. Thus, in some embodiments, heterodimerization variants (including skew and purification heterodimerization variants) are not included in the variable regions, such that each individual antibody must be engineered. In addition, in some embodiments, the possibility of immunogenicity resulting from the pI variants is significantly reduced by importing pI variants from different IgG isotypes such that pI is changed without introducing significant immunogenicity. Thus, an additional problem to be solved is the elucidation of low pI constant domains with high human sequence content, e.g. the minimization or avoidance of non-human residues at any particular position.

[0121] A side benefit that can occur with this pI engineering is also the extension of serum half-life and increased FcRn binding. That is, as described in U.S. Ser. No. 13/194,904 (incorporated by reference in its entirety), lowering the pI of antibody constant domains (including those found in antibodies and Fc fusions) can lead to longer serum retention in vivo. These pI variants for increased serum half life also facilitate pI changes for purification.

[0122] In addition, it should be noted that the pI variants of the heterodimerization variants give an additional benefit for the analytics and quality control process of bispecific antibodies, as the ability to either eliminate, minimize and distinguish when homodimers are present is significant. Similarly, the ability to reliably test the reproducibility of the heterodimeric protein production is important.

[0123] As will be appreciated by those in the art and discussed more fully below, the heterodimeric fusion proteins of the present invention can take on a wide variety of configurations, as are generally depicted in FIG. 1. Some figures depict “single ended” configurations, where there is one type of specificity on one “arm” of the molecule and a different specificity on the other “arm”. Other figures depict “dual ended” configurations, where there is at least one type of specificity at the “top” of the molecule and one or more different specificities at the “bottom” of the molecule. Thus, the present invention is directed to novel immunoglobulin compositions that co-engage a first and a second antigen. First and second antigens of the invention are herein referred to as antigen-1 and antigen-2 respectively (or “checkpoint-1” and “checkpoint-2”).

[0124] One heterodimeric scaffold that finds particular use in the present invention is the “triple F” or “bottle opener” scaffold format as depicted in FIG. 1A. In this embodiment, one heavy chain of the antibody contains an single chain Fv (“scFv”, as defined below) and the other heavy chain is a “regular” FAb format, comprising a variable heavy chain and a light chain. This structure is sometimes referred to herein as “triple F” format (scFv-FAb-Fc) or the “bottle-opener” format, due to a rough visual similarity to a bottle-opener (see FIG. 1A). The two chains are brought together by the use of amino acid variants in the constant regions (e.g. the Fc domain and/or the hinge region) that promote the formation of heterodimeric antibodies as is described more fully below.

[0125] There are several distinct advantages to the present “triple F” format. As is known in the art, antibody analogs relying on two scFv constructs often have stability and aggregation problems, which can be alleviated in the present invention by the addition of a “regular” heavy and light chain pairing. In addition, as opposed to formats that rely on two heavy chains and two light chains, there is no issue with the incorrect pairing of heavy and light chains (e.g. heavy 1 pairing with light 2, etc.)

[0126] Furthermore, as outlined herein, additional amino acid variants may be introduced into the bispecific antibodies of the invention, to add additional functionalities. For example, amino acid changes within the Fc region can be added (either to one monomer or both) to facilitate increased ADCC or CDC (e.g. altered binding to Fcγ receptors) as well as to increase binding to FcRn and/or increase serum half-life of the resulting molecules. As is further described herein and as will be appreciated by those in the art, any and all of the variants outlined herein can be optionally and independently combined with other variants.

[0127] Similarly, another category of functional variants are “Fcγ ablation variants” or “Fc knock out (FcKO or KO) variants. In these embodiments, for some therapeutic applications, it is desirable to reduce or remove the normal binding of the Fc domain to one or more or all of the Fcγ receptors (e.g. FcγR1, FcγRIIa, FcγRIIb, FcγRIIIa, etc.) to avoid additional mechanisms of action. That is, for example, it is generally desirable to ablate FcγRIIIa binding to eliminate or significantly reduce ADCC activity. Suitable ablation variants are shown in FIG. 5.

### C. Nomenclature

[0128] The bispecific antibodies of the invention are listed in several different formats. Each polypeptide is given a unique “XENP” number, although as will be appreciated in the art, a longer sequence might contain a shorter one. For example, the heavy chain of the scFv side monomer of a bottle opener format for a given sequence will have a first XENP number, while the scFv domain will have a different XENP number. Some molecules have three polypeptides, so the XENP number, with the components, is used as a name. Thus, the molecule XENP20717, which is in bottle opener format, comprises three sequences, generally referred to as “XENP20717 HC-Fab”, XENP20717 HC-scFv” and “XENP20717 LC” or equivalents, although one of skill in the art would be able to identify these easily through sequence alignment. These XENP numbers are in the sequence listing as well as identifiers, and used in the Figures. In addition, one molecule, comprising the three components, gives rise to multiple sequence identifiers. For example, the listing of the Fab monomer has the full length sequence, the variable heavy sequence and the three CDRs of the variable heavy sequence; the light chain has a full length sequence, a variable light sequence and the three CDRs of the variable light sequence; and the scFv-Fc domain has a full length sequence, an scFv sequence, a variable light sequence, 3 light CDRs, a scFv linker, a variable heavy sequence and 3 heavy CDRs; note that all molecules herein with a scFv domain use a single charged scFv linker (+H), although others can be used. In addition, the naming nomenclature of particular variable domains uses a “Hx.xx_Ly.yy” type of format, with the numbers being unique identifiers to particular variable chain sequences. Thus, the variable domain of the Fab side of XENP22841 is “7G8_H3.30_L1.34”, which indicates that the variable heavy domain H3.30 was combined with the light domain L1.34. In the case that these sequences are used as scFvs, the designation “7G8_H3.30_L1.34”, indicates that the variable heavy domain H3.30 was combined with the light domain L1.34 and is in vh-linker-vl orientation, from N- to C-terminus. This molecule with the identical sequences of the heavy and light variable domains but in the reverse order would be named “7G8_L1.34_H3.30”. Similarly, different constructs may “mix and match” the heavy and light chains as will be evident from the sequence listing and the Figures.

### D. Definitions

[0129] In order that the application may be more completely understood, several definitions are set forth below. Such definitions are meant to encompass grammatical equivalents.

[0130] By “ablation” herein is meant a decrease or removal of activity. Thus for example, “ablating FcγR binding” means the Fc region amino acid variant has less than 50% starting binding as compared to an Fc region not containing the specific variant, with more than 70-80-90-95-98% loss of activity being preferred, and in general, with the activity being below the level of detectable binding in a BIACORE®, SPR or BLI assay. Of particular use in the ablation of FcγR binding are those shown in FIG. 5, which generally are added to both monomers.

[0131] By “ADCC” or “antibody dependent cell-mediated cytotoxicity” as used herein is meant the cell-mediated reaction wherein nonspecific cytotoxic cells that express FcγRs recognize bound antibody on a target cell and subsequently cause lysis of the target cell. ADCC is correlated with binding to FcγRIIIa; increased binding to FcγRIIIa leads to an increase in ADCC activity.

[0132] By “ADCP” or antibody dependent cell-mediated phagocytosis as used herein is meant the cell-mediated reaction wherein nonspecific phagocytic cells that express FcγRs recognize bound antibody on a target cell and subsequently cause phagocytosis of the target cell.

[0133] By “antigen binding domain” or “ABD” herein is meant a set of six Complementary Determining Regions (CDRs) that, when present as part of a polypeptide sequence, specifically binds a target antigen as discussed herein. Thus, a “checkpoint antigen binding domain” binds a target checkpoint antigen as outlined herein. As is known in the art, these CDRs are generally present as a first set of variable heavy CDRs (vhCDRs or VHCDRs) and a second set of variable light CDRs (vlCDRs or VLCDRs), each comprising three CDRs: vhCDR1, vhCDR2, vhCDR3 for the heavy chain and vlCDR1, vlCDR2 and vlCDR3 for the light. The CDRs are present in the variable heavy and variable light domains, respectively, and together form an Fv region. (See Table 1 and related discussion above for CDR numbering schemes). Thus, in some cases, the six CDRs of the antigen binding domain are contributed by a variable heavy and a variable light domain. In a “Fab” format, the set of 6 CDRs are contributed by two different polypeptide sequences, the variable heavy domain (vh or VH; containing the vhCDR1, vhCDR2 and vhCDR3) and the variable light domain (vl or VL; containing the vlCDR1, vlCDR2 and vlCDR3), with the C-terminus of the vh domain being attached to the N-terminus of the CH1 domain of the heavy chain and the C-terminus of the vl domain being attached to the N-terminus of the constant light domain (and thus forming the light chain). In a scFv format, the vh and vl domains are covalently attached, generally through the use of a linker (a “scFv linker”) as outlined herein, into a single polypeptide sequence, which can be either (starting from the N-terminus) vh-linker-vl or vl-linker-vh, with the former being generally preferred (including optional domain linkers on each side, depending on the format used (e.g. from FIG. 1). In general, the C-terminus of the scFv domain is attached to the N-terminus of the hinge in the second monomer.

[0134] By “modification” herein is meant an amino acid substitution, insertion, and/or deletion in a polypeptide sequence or an alteration to a moiety chemically linked to a protein. For example, a modification may be an altered carbohydrate or PEG structure attached to a protein. By “amino acid modification” herein is meant an amino acid substitution, insertion, and/or deletion in a polypeptide sequence. For clarity, unless otherwise noted, the amino acid modification is always to an amino acid coded for by DNA, e.g. the 20 amino acids that have codons in DNA and RNA.

[0135] By “amino acid substitution” or “substitution” herein is meant the replacement of an amino acid at a particular position in a parent polypeptide sequence with a different amino acid. In particular, in some embodiments, the substitution is to an amino acid that is not naturally occurring at the particular position, either not naturally occurring within the organism or in any organism. For example, the substitution E272Y refers to a variant polypeptide, in this case an Fc variant, in which the glutamic acid at position 272 is replaced with tyrosine. For clarity, a protein which has been engineered to change the nucleic acid coding sequence but not change the starting amino acid (for example exchanging CGG (encoding arginine) to CGA (still encoding arginine) to increase host organism expression levels) is not an “amino acid substitution”; that is, despite the creation of a new gene encoding the same protein, if the protein has the same amino acid at the particular position that it started with, it is not an amino acid substitution.

[0136] By “amino acid insertion” or “insertion” as used herein is meant the addition of an amino acid sequence at a particular position in a parent polypeptide sequence. For example, -233E or 233E designates an insertion of glutamic acid after position 233 and before position 234. Additionally, -233ADE or A233ADE designates an insertion of AlaAspGlu after position 233 and before position 234.

[0137] By “amino acid deletion” or “deletion” as used herein is meant the removal of an amino acid sequence at a particular position in a parent polypeptide sequence. For example, E233− or E233#, E233( ) or E233del designates a deletion of glutamic acid at position 233. Additionally, EDA233− or EDA233# designates a deletion of the sequence GluAspAla that begins at position 233.

[0138] By “variant protein” or “protein variant”, or “variant” as used herein is meant a protein that differs from that of a parent protein by virtue of at least one amino acid modification. The protein variant has at least one amino acid modification compared to the parent protein, yet not so many that the variant protein will not align with the parental protein using an alignment program such as that described below. In general, variant proteins (such as variant Fc domains, etc., outlined herein, are generally at least 75, 80, 85, 90, 91, 92, 93, 94, 95, 96, 97, 98 or 99% identical to the parent protein, using the alignment programs described below, such as BLAST.

[0139] As described below, in some embodiments the parent polypeptide, for example an Fc parent polypeptide, is a human wild type sequence, such as the heavy constant domain or Fc region from IgG1, IgG2, IgG3 or IgG4, although human sequences with variants can also serve as “parent polypeptides”, for example the IgG1/2 hybrid of US Publication 2006/0134105 can be included. The protein variant sequence herein will preferably possess at least about 80% identity with a parent protein sequence, and most preferably at least about 90% identity, more preferably at least about 95-98-99% identity. Accordingly, by “antibody variant” or “variant antibody” as used herein is meant an antibody that differs from a parent antibody by virtue of at least one amino acid modification, “IgG variant” or “variant IgG” as used herein is meant an antibody that differs from a parent IgG (again, in many cases, from a human IgG sequence) by virtue of at least one amino acid modification, and “immunoglobulin variant” or “variant immunoglobulin” as used herein is meant an immunoglobulin sequence that differs from that of a parent immunoglobulin sequence by virtue of at least one amino acid modification. “Fc variant” or “variant Fc” as used herein is meant a protein comprising an amino acid modification in an Fc domain as compared to an Fc domain of human IgG1, IgG2 or IgG4.

[0140] The Fc variants of the present invention are defined according to the amino acid modifications that compose them. Thus, for example, N434S or 434S is an Fc variant with the substitution serine at position 434 relative to the parent Fc polypeptide, wherein the numbering is according to the EU index. Likewise, M428L/N434S defines an Fc variant with the substitutions M428L and N434S relative to the parent Fc polypeptide. The identity of the WT amino acid may be unspecified, in which case the aforementioned variant is referred to as 428L/434S. It is noted that the order in which substitutions are provided is arbitrary, that is to say that, for example, N434S/M428L is the same Fc variant as M428L/N434S, and so on. For all positions discussed in the present invention that relate to antibodies, unless otherwise noted, amino acid position numbering is according to the EU index. The EU index or EU index as in Kabat or EU numbering scheme refers to the numbering of the EU antibody. Kabat et al. collected numerous primary sequences of the variable regions of heavy chains and light chains. Based on the degree of conservation of the sequences, they classified individual primary sequences into the CDR and the framework and made a list thereof (see SEQUENCES OF IMMUNOLOGICAL INTEREST, 5th edition, NIH publication, No. 91-3242, E. A. Kabat et al., entirely incorporated by reference). See also Edelman et al., 1969, Proc Natl Acad Sci USA 63:78-85, hereby entirely incorporated by reference. The modification can be an addition, deletion, or substitution.

[0141] By “protein” herein is meant at least two covalently attached amino acids, which includes proteins, polypeptides, oligopeptides and peptides. In addition, polypeptides that make up the antibodies of the invention may include synthetic derivatization of one or more side chains or termini, glycosylation, PEGylation, circular permutation, cyclization, linkers to other molecules, fusion to proteins or protein domains, and addition of peptide tags or labels.

[0142] By “residue” as used herein is meant a position in a protein and its associated amino acid identity. For example, Asparagine 297 (also referred to as Asn297 or N297) is a residue at position 297 in the human antibody IgG1.

[0143] By “Fab” or “Fab region” as used herein is meant the polypeptide that comprises the VH, CH1, VL, and CL immunoglobulin domains, generally on two different polypeptide chains (e.g. VH-CH1 on one chain and VL-CL on the other). Fab may refer to this region in isolation, or this region in the context of a bispecific antibody of the invention. In the context of a Fab, the Fab comprises an Fv region in addition to the CH1 and CL domains.

[0144] By “Fv” or “Fv fragment” or “Fv region” as used herein is meant a polypeptide that comprises the VL and VH domains of an ABD. Fv regions can be formatted as both Fabs (as discussed above, generally two different polypeptides that also include the constant regions as outlined above) and scFvs, where the vl and vh domains are combined (generally with a linker as discussed herein) to form an scFv.

[0145] By “single chain Fv” or “scFv” herein is meant a variable heavy domain covalently attached to a variable light domain, generally using a scFv linker as discussed herein, to form a scFv or scFv domain. A scFv domain can be in either orientation from N- to C-terminus (vh-linker-vl or vl-linker-vh). In the sequences depicted in the sequence listing and in the figures, the order of the vh and vl domain is indicated in the name, e.g. H.X_L.Y means N- to C-terminal is vh-linker-vl, and L.Y_H.X_is vl-linker-vh.

[0146] By “IgG subclass modification” or “isotype modification” as used herein is meant an amino acid modification that converts one amino acid of one IgG isotype to the corresponding amino acid in a different, aligned IgG isotype. For example, because IgG1 comprises a tyrosine and IgG2 a phenylalanine at EU position 296, a F296Y substitution in IgG2 is considered an IgG subclass modification.

[0147] By “non-naturally occurring modification” as used herein is meant an amino acid modification that is not isotypic. For example, because none of the human IgGs comprise a serine at position 434, the substitution 434S in IgG1, IgG2, IgG3, or IgG4 (or hybrids thereof) is considered a non-naturally occurring modification.

[0148] By “amino acid” and “amino acid identity” as used herein is meant one of the 20 naturally occurring amino acids that are coded for by DNA and RNA.

[0149] By “effector function” as used herein is meant a biochemical event that results from the interaction of an antibody Fc region with an Fc receptor or ligand. Effector functions include but are not limited to ADCC, ADCP, and CDC.

[0150] By “IgG Fc ligand” as used herein is meant a molecule, preferably a polypeptide, from any organism that binds to the Fc region of an IgG antibody to form an Fc/Fc ligand complex. Fc ligands include but are not limited to FcγRIs, FcγRIIs, FcγRIIIs, FcRn, C1q, C3, mannan binding lectin, mannose receptor, staphylococcal protein A, streptococcal protein G, and viral FcγR. Fc ligands also include Fc receptor homologs (FcRH), which are a family of Fc receptors that are homologous to the FcγRs (Davis et al., 2002, Immunological Reviews 190:123-136, entirely incorporated by reference). Fc ligands may include undiscovered molecules that bind Fc. Particular IgG Fc ligands are FcRn and Fc gamma receptors. By “Fc ligand” as used herein is meant a molecule, preferably a polypeptide, from any organism that binds to the Fc region of an antibody to form an Fc/Fc ligand complex.

[0151] By “Fc gamma receptor”, “FcγR” or “FcgammaR” as used herein is meant any member of the family of proteins that bind the IgG antibody Fc region and is encoded by an FcγR gene. In humans this family includes but is not limited to FcγRI (CD64), including isoforms FcγRIa, FcγRIb, and FcγRIc; FcγRII (CD32), including isoforms FcγRIIa (including allotypes H131 and R131), FcγRIIb (including FcγRIIb-1 and FcγRIIb-2), and FcγRIIc; and FcγRIII (CD16), including isoforms FcγRIIIa (including allotypes V158 and F158) and FcγRIIIb (including allotypes FcγRIIb-NA1 and FcγRIIb-NA2) (Jefferis et al., 2002, Immunol Lett 82:57-65, entirely incorporated by reference), as well as any undiscovered human FcγRs or FcγR isoforms or allotypes. An FcγR may be from any organism, including but not limited to humans, mice, rats, rabbits, and monkeys. Mouse FcγRs include but are not limited to FcγRI (CD64), FcγRII (CD32), FcγRIII (CD16), and FcγRIII-2 (CD16-2), as well as any undiscovered mouse FcγRs or FcγR isoforms or allotypes.

[0152] By “FcRn” or “neonatal Fc Receptor” as used herein is meant a protein that binds the IgG antibody Fc region and is encoded at least in part by an FcRn gene. The FcRn may be from any organism, including but not limited to humans, mice, rats, rabbits, and monkeys. As is known in the art, the functional FcRn protein comprises two polypeptides, often referred to as the heavy chain and light chain. The light chain is beta-2-microglobulin and the heavy chain is encoded by the FcRn gene. Unless otherwise noted herein, FcRn or an FcRn protein refers to the complex of FcRn heavy chain with beta-2-microglobulin. A variety of FcRn variants used to increase binding to the FcRn receptor, and in some cases, to increase serum half-life. An “FcRn variant” is one that increases binding to the FcRn receptor, and suitable FcRn variants are shown below.

[0153] By “parent polypeptide” as used herein is meant a starting polypeptide that is subsequently modified to generate a variant. The parent polypeptide may be a naturally occurring polypeptide, or a variant or engineered version of a naturally occurring polypeptide. Accordingly, by “parent immunoglobulin” as used herein is meant an unmodified immunoglobulin polypeptide that is modified to generate a variant, and by “parent antibody” as used herein is meant an unmodified antibody that is modified to generate a variant antibody. It should be noted that “parent antibody” includes known commercial, recombinantly produced antibodies as outlined below. In this context, a “parent Fc domain” will be relative to the recited variant; thus, a “variant human IgG1 Fc domain” is compared to the parent Fc domain of human IgG1, a “variant human IgG4 Fc domain” is compared to the parent Fc domain human IgG4, etc.

[0154] By “Fc” or “Fc region” or “Fc domain” as used herein is meant the polypeptide comprising the CH2-CH3 domains of an IgG molecule, and in some cases, inclusive of the hinge. In EU numbering for human IgG1, the CH2-CH3 domain comprises amino acids 231 to 447, and the hinge is 216 to 230. Thus the definition of “Fe domain” includes both amino acids 231-447 (CH2-CH3) or 216-447 (hinge-CH2-CH3), or fragments thereof. An “Fc fragment” in this context may contain fewer amino acids from either or both of the N- and C-termini but still retains the ability to form a dimer with another Fc domain or Fc fragment as can be detected using standard methods, generally based on size (e.g. non-denaturing chromatography, size exclusion chromatography, etc.) Human IgG Fc domains are of particular use in the present invention, and can be the Fc domain from human IgG1, IgG2 or IgG4.

[0155] A “variant Fc domain” contains amino acid modifications as compared to a parental Fc domain. Thus, a “variant human IgG1 Fc domain” is one that contains amino acid modifications (generally amino acid substitutions, although in the case of ablation variants, amino acid deletions are included) as compared to the human IgG1 Fc domain. In general, variant Fc domains have at least about 80, 85, 90, 95, 97, 98 or 99 percent identity to the corresponding parental human IgG Fc domain (using the identity algorithms discussed below, with one embodiment utilizing the BLAST algorithm as is known in the art, using default parameters). Alternatively, the variant Fc domains can have from 1, 2, 3, 4, 5, 6, 7, 8, 9, 10, 11, 12, 13, 14, 15, 16, 11, 12, 13, 14, 15, 16, 17, 18, 19 or 20 amino acid modifications as compared to the parental Fc domain. Additionally, as discussed herein, the variant Fc domains herein still retain the ability to form a dimer with another Fc domain as measured using known techniques as described herein, such as non-denaturing gel electrophoresis.

[0156] By “heavy chain constant region” herein is meant the CH1-hinge-CH2-CH3 portion of an antibody (or fragments thereof), excluding the variable heavy domain; in EU numbering of human IgG1 this is amino acids 118-447 By “heavy chain constant region fragment” herein is meant a heavy chain constant region that contains fewer amino acids from either or both of the N- and C-termini but still retains the ability to form a dimer with another heavy chain constant region.

[0157] By “position” as used herein is meant a location in the sequence of a protein. Positions may be numbered sequentially, or according to an established format, for example the EU index for antibody numbering.

[0158] By “target antigen” as used herein is meant the molecule that is bound specifically by the antigen binding domain comprising the variable regions of a given antibody. As discussed below, in the present case the target antigens are checkpoint inhibitor proteins.

[0159] By “strandedness” in the context of the monomers of the heterodimeric antibodies of the invention herein is meant that, similar to the two strands of DNA that “match”, heterodimerization variants are incorporated into each monomer so as to preserve the ability to “match” to form heterodimers. For example, if some pI variants are engineered into monomer A (e.g. making the pI higher) then steric variants that are “charge pairs” that can be utilized as well do not interfere with the pI variants, e.g. the charge variants that make a pI higher are put on the same “strand” or “monomer” to preserve both functionalities. Similarly, for “skew” variants that come in pairs of a set as more fully outlined below, the skilled artisan will consider pI in deciding into which strand or monomer one set of the pair will go, such that pI separation is maximized using the pI of the skews as well.

[0160] By “target cell” as used herein is meant a cell that expresses a target antigen.

[0161] By “host cell” in the context of producing a bispecific antibody according to the invention herein is meant a cell that contains the exogeneous nucleic acids encoding the components of the bispecific antibody and is capable of expressing the bispecific antibody under suitable conditions. Suitable host cells are discussed below.

[0162] By “variable region” or “variable domain” as used herein is meant the region of an immunoglobulin that comprises one or more Ig domains substantially encoded by any of the Vκ, Vλ, and/or VH genes that make up the kappa, lambda, and heavy chain immunoglobulin genetic loci respectively, and contains the CDRs that confer antigen specificity. Thus, a “variable heavy domain” pairs with a “variable light domain” to form an antigen binding domain (“ABD”). In addition, each variable domain comprises three hypervariable regions (“complementary determining regions,” “CDRs”) (vhCDR1, vhCDR2 and vhCDR3 for the variable heavy domain and vlCDR1, vlCDR2 and vlCDR3 for the variable light domain) and four framework (FR) regions, arranged from amino-terminus to carboxy-terminus in the following order: FR1-CDR1-FR2-CDR2-FR3-CDR3-FR4.

[0163] By “wild type or WT” herein is meant an amino acid sequence or a nucleotide sequence that is found in nature, including allelic variations. A WT protein has an amino acid sequence or a nucleotide sequence that has not been intentionally modified.

[0164] The invention provides a number of antibody domains that have sequence identity to human antibody domains. Sequence identity between two similar sequences (e.g., antibody variable domains) can be measured by algorithms such as that of Smith, T. F. & Waterman, M. S. (1981) “Comparison Of Biosequences,” Adv. Appl. Math. 2:482 [local homology algorithm]; Needleman, S. B. & Wunsch, C D. (1970) “A General Method Applicable To The Search For Similarities In The Amino Acid Sequence Of Two Proteins,” J. Mol. Biol. 48:443 [homology alignment algorithm], Pearson, W. R. & Lipman, D. J. (1988) “Improved Tools For Biological Sequence Comparison,” Proc. Natl. Acad. Sci. (U.S.A.) 85:2444 [search for similarity method]; or Altschul, S. F. et al, (1990) “Basic Local Alignment Search Tool,” J. Mol. Biol. 215:403-10, the “BLAST” algorithm, see https://blast.ncbi.nlm.nih.gov/Blast.cgi. When using any of the aforementioned algorithms, the default parameters (for Window length, gap penalty, etc) are used. In one embodiment, sequence identity is done using the BLAST algorithm, using default parameters

[0165] The antibodies of the present invention are generally isolated or recombinant. “Isolated,” when used to describe the various polypeptides disclosed herein, means a polypeptide that has been identified and separated and/or recovered from a cell or cell culture from which it was expressed. Ordinarily, an isolated polypeptide will be prepared by at least one purification step. An “isolated antibody,” refers to an antibody which is substantially free of other antibodies having different antigenic specificities. “Recombinant” means the antibodies are generated using recombinant nucleic acid techniques in exogeneous host cells, and they can be isolated as well.

[0166] “Specific binding” or “specifically binds to” or is “specific for” a particular antigen or an epitope means binding that is measurably different from a non-specific interaction. Specific binding can be measured, for example, by determining binding of a molecule compared to binding of a control molecule, which generally is a molecule of similar structure that does not have binding activity. For example, specific binding can be determined by competition with a control molecule that is similar to the target.

[0167] Specific binding for a particular antigen or an epitope can be exhibited, for example, by an antibody having a KD for an antigen or epitope of at least about 10⁻⁴ M, at least about 10⁻⁵ M, at least about 10⁻⁶ M, at least about 10⁻⁷ M, at least about 10⁻⁸ M, at least about 10⁻⁹ M, alternatively at least about 10⁻¹⁰ M, at least about 10⁻¹¹ M, at least about 10⁻¹² M, or greater, where KD refers to a dissociation rate of a particular antibody-antigen interaction. Typically, an antibody that specifically binds an antigen will have a KD that is 20-, 50-, 100-, 500-, 1000-, 5,000-, 10,000- or more times greater for a control molecule relative to the antigen or epitope.

[0168] Also, specific binding for a particular antigen or an epitope can be exhibited, for example, by an antibody having a KA or Ka for an antigen or epitope of at least 20-, 50-, 100-, 500-, 1000-, 5,000-, 10,000- or more times greater for the epitope relative to a control, where KA or Ka refers to an association rate of a particular antibody-antigen interaction. Binding affinity is generally measured using a BIACORE®, SPR or BLI assay.

### E. Antibodies

[0169] The present invention relates to the generation of bispecific checkpoint antibodies that bind two different checkpoint antigens as discussed herein. As is discussed below, the term “antibody” is used generally. Antibodies that find use in the present invention can take on a number of formats as described herein, including traditional antibodies as well as antibody derivatives, fragments and mimetics, described herein and depicted in the figures.

[0170] Traditional antibody structural units typically comprise a tetramer. Each tetramer is typically composed of two identical pairs of polypeptide chains, each pair having one “light” (typically having a molecular weight of about 25 kDa) and one “heavy” chain (typically having a molecular weight of about 50-70 kDa). Human light chains are classified as kappa and lambda light chains. The present invention is directed to bispecific antibodies that generally are based on the IgG class, which has several subclasses, including, but not limited to IgG1, IgG2, IgG3, and IgG4. In general, IgG1, IgG2 and IgG4 are used more frequently than IgG3. It should be noted that IgG1 has different allotypes with polymorphisms at 356 (D or E) and 358 (L or M). The sequences depicted herein use the 356E/358M allotype, however the other allotype is included herein. That is, any sequence inclusive of an IgG1 Fc domain included herein can have 356D/358L replacing the 356E/358M allotype.

[0171] In addition, many of the antibodies herein have at least one of the cysteines at position 220 replaced by a serine; generally this is the on the “scFv monomer” side for most of the sequences depicted herein, although it can also be on the “Fab monomer” side, or both, to reduce disulfide formation. Specifically included within the sequences herein are one or both of these cysteines replaced (C220S).

[0172] Thus, “isotype” as used herein is meant any of the subclasses of immunoglobulins defined by the chemical and antigenic characteristics of their constant regions. It should be understood that therapeutic antibodies can also comprise hybrids of isotypes and/or subclasses. For example, as shown in US Publication 2009/0163699, incorporated by reference, the present invention the use of human IgG1/G2 hybrids.

[0173] The hypervariable region generally encompasses amino acid residues from about amino acid residues 24-34 (LCDR1; “L” denotes light chain), 50-56 (LCDR2) and 89-97 (LCDR3) in the light chain variable region and around about 31-35B (HCDR1; “H” denotes heavy chain), 50-65 (HCDR2), and 95-102 (HCDR3) in the heavy chain variable region; Kabat et al., SEQUENCES OF PROTEINS OF IMMUNOLOGICAL INTEREST, 5th Ed. Public Health Service, National Institutes of Health, Bethesda, Md. (1991) and/or those residues forming a hypervariable loop (e.g. residues 26-32 (LCDR1), 50-52 (LCDR2) and 91-96 (LCDR3) in the light chain variable region and 26-32 (HCDR1), 53-55 (HCDR2) and 96-101 (HCDR3) in the heavy chain variable region; Chothia and Lesk (1987) J. Mol. Biol. 196:901-917. Specific CDRs of the invention are described below.

[0174] As will be appreciated by those in the art, the exact numbering and placement of the CDRs can be different among different numbering systems. However, it should be understood that the disclosure of a variable heavy and/or variable light sequence includes the disclosure of the associated (inherent) CDRs. Accordingly, the disclosure of each variable heavy region is a disclosure of the vhCDRs (e.g. vhCDR1, vhCDR2 and vhCDR3) and the disclosure of each variable light region is a disclosure of the vlCDRs (e.g. vlCDR1, vlCDR2 and vlCDR3). A useful comparison of CDR numbering is as below, see Lafranc et al., Dev. Comp. Immunol. 27(1):55-77 (2003):

TABLE 1

| | Kabat + | | | | | | |
|---|---|---|---|---|---|---|---|
| | Chothia | IMGT | Kabat | AbM | Chothia | Contact | Xencor |
| vhCDR1 | 26-35 | 27-38 | 31-35 | 26-35 | 26-32 | 30-35 | 27-35 |
| vhCDR2 | 50-65 | 56-65 | 50-65 | 50-58 | 52-56 | 47-58 | 54-61 |
| vhCDR3 | 95-102 | 105-117 | 95-102 | 95-102 | 95-102 | 93-101 | 103-116 |
| vlCDR1 | 24-34 | 27-38 | 24-34 | 24-34 | 24-34 | 30-36 | 27-38 |
| vlCDR2 | 50-56 | 56-65 | 50-56 | 50-56 | 50-56 | 46-55 | 56-62 |
| vlCDR3 | 89-97 | 105-117 | 89-97 | 89-97 | 89-97 | 89-96 | 97-105 |

[0175] Throughout the present specification, the Kabat numbering system is generally used when referring to a residue in the variable domain (approximately, residues 1-107 of the light chain variable region and residues 1-113 of the heavy chain variable region) and the EU numbering system for Fc regions (e.g, Kabat et al., supra (1991)).

[0176] Another type of Ig domain of the heavy chain is the hinge region. By “hinge” or “hinge region” or “antibody hinge region” or “hinge domain” herein is meant the flexible polypeptide comprising the amino acids between the first and second constant domains of an antibody. Structurally, the IgG CH1 domain ends at EU position 215, and the IgG CH2 domain begins at residue EU position 231. Thus for IgG the antibody hinge is herein defined to include positions 216 (E216 in IgG1) to 230 (p230 in IgG1), wherein the numbering is according to the EU index as in Kabat. In some cases, a “hinge fragment” is used, which contains fewer amino acids at either or both of the N- and C-termini of the hinge domain. As noted herein, pI variants can be made in the hinge region as well.

[0177] The light chain generally comprises two domains, the variable light domain (containing the light chain CDRs and together with the variable heavy domains forming the Fv region), and a constant light chain region (often referred to as CL or Cκ.

[0178] Another region of interest for additional substitutions, outlined below, is the Fc region.

[0179] The present invention provides a large number of different CDR sets. In this case, a “full CDR set” comprises the three variable light and three variable heavy CDRs, e.g. a vlCDR1, vlCDR2, vlCDR3, vhCDR1, vhCDR2 and vhCDR3. These can be part of a larger variable light or variable heavy domain, respectfully. In addition, as more fully outlined herein, the variable heavy and variable light domains can be on separate polypeptide chains, when a heavy and light chain is used (for example when Fabs are used), or on a single polypeptide chain in the case of scFv sequences.

[0180] The CDRs contribute to the formation of the antigen-binding, or more specifically, epitope binding site of antibodies. “Epitope” refers to a determinant that interacts with a specific antigen binding site in the variable region of an antibody molecule known as a paratope. Epitopes are groupings of molecules such as amino acids or sugar side chains and usually have specific structural characteristics, as well as specific charge characteristics. A single antigen may have more than one epitope.

[0181] The epitope may comprise amino acid residues directly involved in the binding (also called immunodominant component of the epitope) and other amino acid residues, which are not directly involved in the binding, such as amino acid residues which are effectively blocked by the specifically antigen binding peptide; in other words, the amino acid residue is within the footprint of the specifically antigen binding peptide.

[0182] Epitopes may be either conformational or linear. A conformational epitope is produced by spatially juxtaposed amino acids from different segments of the linear polypeptide chain. A linear epitope is one produced by adjacent amino acid residues in a polypeptide chain. Conformational and nonconformational epitopes may be distinguished in that the binding to the former but not the latter is lost in the presence of denaturing solvents.

[0183] An epitope typically includes at least 3, and more usually, at least 5 or 8-10 amino acids in a unique spatial conformation. Antibodies that recognize the same epitope can be verified in a simple immunoassay showing the ability of one antibody to block the binding of another antibody to a target antigen, for example “binning.” As outlined below, the invention not only includes the enumerated antigen binding domains and antibodies herein, but those that compete for binding with the epitopes bound by the enumerated antigen binding domains.

[0184] Thus, the present invention provides different antibody domains. As described herein and known in the art, the heterodimeric antibodies of the invention comprise different domains within the heavy and light chains, which can be overlapping as well. These domains include, but are not limited to, the Fc domain, the CH1 domain, the CH2 domain, the CH3 domain, the hinge domain, the heavy constant domain (CH1-hinge-Fc domain or CH1-hinge-CH2-CH3), the variable heavy domain, the variable light domain, the light constant domain, Fab domains and scFv domains.

[0185] Thus, the “Fc domain” includes the —CH2-CH3 domain, and optionally a hinge domain (-H-CH2-CH3). In the embodiments herein, when a scFv is attached to an Fc domain, it is the C-terminus of the scFv construct that is attached to all or part of the hinge of the Fc domain; for example, it is generally attached to the sequence EPKS which is the beginning of the hinge. The heavy chain comprises a variable heavy domain and a constant domain, which includes a CH1-optional hinge-Fc domain comprising a CH2-CH3. The light chain comprises a variable light chain and the light constant domain. A scFv comprises a variable heavy chain, an scFv linker, and a variable light domain. In most of the constructs and sequences outlined herein, the C-terminus of the variable heavy chain is attached to the N-terminus of the scFv linker, the C-terminus of which is attached to the N-terminus of a variable light chain (N-vh-linker-vl-C) although that can be switched (N-vl-linker-vh-C).

[0186] Some embodiments of the invention comprise at least one scFv domain, which, while not naturally occurring, generally includes a variable heavy domain and a variable light domain, linked together by a scFv linker. As outlined herein, while the scFv domain is generally from N- to C-terminus oriented as vh-scFv linker-vl, this can be reversed for any of the scFv domains (or those constructed using vh and vl sequences from Fabs), to vl-scFv linker-vh, with optional linkers at one or both ends depending on the format (see generally FIG. 1).

[0187] As shown herein, there are a number of suitable linkers (for use as either domain linkers or scFv linkers) that can be used to covalently attach the recited domains, including traditional peptide bonds, generated by recombinant techniques. In some embodiments, the linker peptide may predominantly include the following amino acid residues: Gly, Ser, Ala, or Thr. The linker peptide should have a length that is adequate to link two molecules in such a way that they assume the correct conformation relative to one another so that they retain the desired activity. In one embodiment, the linker is from about 1 to 50 amino acids in length, preferably about 1 to 30 amino acids in length. In one embodiment, linkers of 1 to 20 amino acids in length may be used, with from about 5 to about 10 amino acids finding use in some embodiments. Useful linkers include glycine-serine polymers, including for example (GS)n, (GSGGS)n (SEQ ID NO: 37756), (GGGGS)n (SEQ ID NO: 37757), and (GGGS)n (SEQ ID NO: 37758), where n is an integer of at least one (and generally from 3 to 4), glycine-alanine polymers, alanine-serine polymers, and other flexible linkers. Alternatively, a variety of nonproteinaceous polymers, including but not limited to polyethylene glycol (PEG), polypropylene glycol, polyoxyalkylenes, or copolymers of polyethylene glycol and polypropylene glycol, may find use as linkers.

[0188] Other linker sequences may include any sequence of any length of CL/CH1 domain but not all residues of CL/CH1 domain; for example the first 5-12 amino acid residues of the CL/CH1 domains. Linkers can be derived from immunoglobulin light chain, for example Cκ or Cλ. Linkers can be derived from immunoglobulin heavy chains of any isotype, including for example Cγ1, Cγ2, Cγ3, Cγ4, Cα1, Cα2, Cδ, Cε, and Cμ. Linker sequences may also be derived from other proteins such as Ig-like proteins (e.g. TCR, FcR, KIR), hinge region-derived sequences, and other natural sequences from other proteins.

[0189] In some embodiments, the linker is a “domain linker”, used to link any two domains as outlined herein together. For example, in FIG. 1F, there may be a domain linker that attaches the C-terminus of the CH1 domain of the Fab to the N-terminus of the scFv, with another optional domain linker attaching the C-terminus of the scFv to the CH2 domain (although in many embodiments the hinge is used as this domain linker). While any suitable linker can be used, many embodiments utilize a glycine-serine polymer as the domain linker, including for example (GS)n, (GSGGS)n (SEQ ID NO: 37756), (GGGGS)n (SEQ ID NO: 37757), and (GGGS)n (SEQ ID NO: 37758), where n is an integer of at least one (and generally from 3 to 4 to 5) as well as any peptide sequence that allows for recombinant attachment of the two domains with sufficient length and flexibility to allow each domain to retain its biological function. In some cases, and with attention being paid to “strandedness”, as outlined below, charged domain linkers, as used in some embodiments of scFv linkers can be used.

[0190] In some embodiments, the linker is a scFv linker, used to covalently attach the vh and vl domains as discussed herein. In many cases, the scFv linker is a charged scFv linker, a number of which are shown in

[0191] FIG. 7. Accordingly, the present invention further provides charged scFv linkers, to facilitate the separation in pI between a first and a second monomer. That is, by incorporating a charged scFv linker, either positive or negative (or both, in the case of scaffolds that use scFvs on different monomers), this allows the monomer comprising the charged linker to alter the pI without making further changes in the Fc domains. These charged linkers can be substituted into any scFv containing standard linkers. Again, as will be appreciated by those in the art, charged scFv linkers are used on the correct “strand” or monomer, according to the desired changes in pI. For example, as discussed herein, to make triple F format heterodimeric antibody, the original pI of the Fv region for each of the desired antigen binding domains are calculated, and one is chosen to make an scFv, and depending on the pI, either positive or negative linkers are chosen.

[0192] Charged domain linkers can also be used to increase the pI separation of the monomers of the invention as well, and thus those included in

[0193] FIG. 7 can be used in any embodiment herein where a linker is utilized.

[0194] In particular, the formats depicted in FIG. 1 are antibodies, usually referred to as “heterodimeric antibodies”, meaning that the protein has at least two associated Fc sequences self-assembled into a heterodimeric Fc domain and at least two Fv regions, whether as Fabs or as scFvs.

### F. Chimeric and Humanized Antibodies

[0195] In certain embodiments, the antibodies of the invention comprise a heavy chain variable region from a particular germline heavy chain immunoglobulin gene and/or a light chain variable region from a particular germline light chain immunoglobulin gene. For example, such antibodies may comprise or consist of a human antibody comprising heavy or light chain variable regions that are “the product of” or “derived from” a particular germline sequence. A human antibody that is “the product of” or “derived from” a human germline immunoglobulin sequence can be identified as such by comparing the amino acid sequence of the human antibody to the amino acid sequences of human germline immunoglobulins and selecting the human germline immunoglobulin sequence that is closest in sequence (i.e., greatest % identity) to the sequence of the human antibody (using the methods outlined herein). A human antibody that is “the product of” or “derived from” a particular human germline immunoglobulin sequence may contain amino acid differences as compared to the germline sequence, due to, for example, naturally-occurring somatic mutations or intentional introduction of site-directed mutation. However, a humanized antibody typically is at least 90% identical in amino acids sequence to an amino acid sequence encoded by a human germline immunoglobulin gene and contains amino acid residues that identify the antibody as being derived from human sequences when compared to the germline immunoglobulin amino acid sequences of other species (e.g., murine germline sequences). In certain cases, a humanized antibody may be at least 95, 96, 97, 98 or 99%, or even at least 96%, 97%, 98%, or 99% identical in amino acid sequence to the amino acid sequence encoded by the germline immunoglobulin gene. Typically, a humanized antibody derived from a particular human germline sequence will display no more than 10-20 amino acid differences from the amino acid sequence encoded by the human germline immunoglobulin gene (prior to the introduction of any skew, pI and ablation variants herein; that is, the number of variants is generally low, prior to the introduction of the variants of the invention). In certain cases, the humanized antibody may display no more than 5, or even no more than 4, 3, 2, or 1 amino acid difference from the amino acid sequence encoded by the germline immunoglobulin gene (again, prior to the introduction of any skew, pI and ablation variants herein; that is, the number of variants is generally low, prior to the introduction of the variants of the invention).

[0196] In one embodiment, the parent antibody has been affinity matured, as is known in the art. Structure-based methods may be employed for humanization and affinity maturation, for example as described in U.S. Ser. No. 11/004,590. Selection based methods may be employed to humanize and/or affinity mature antibody variable regions, including but not limited to methods described in Wu et al., 1999, J. Mol. Biol. 294:151-162; Baca et al., 1997, J. Biol. Chem. 272(16):10678-10684; Rosok et al., 1996, J. Biol. Chem. 271(37): 22611-22618; Rader et al., 1998, Proc. Natl. Acad. Sci. USA 95: 8910-8915; Krauss et al., 2003, Protein Engineering 16(10):753-759, all entirely incorporated by reference. Other humanization methods may involve the grafting of only parts of the CDRs, including but not limited to methods described in U.S. Ser. No. 09/810,510; Tan et al., 2002, J. Immunol. 169:1119-1125; De Pascalis et al., 2002, J. Immunol. 169:3076-3084, all entirely incorporated by reference.

### IV. HETERODIMERIC ANTIBODIES

[0197] Accordingly, in some embodiments the present invention provides heterodimeric checkpoint antibodies that rely on the use of two different heavy chain variant Fc sequences, that will self-assemble to form heterodimeric Fc domains and heterodimeric antibodies.

[0198] The present invention is directed to novel constructs to provide heterodimeric antibodies that allow binding to more than one checkpoint antigen or ligand, e.g. to allow for bispecific binding. The heterodimeric antibody constructs are based on the self-assembling nature of the two Fc domains of the heavy chains of antibodies, e.g. two “monomers” that assemble into a “dimer”. Heterodimeric antibodies are made by altering the amino acid sequence of each monomer as more fully discussed below. Thus, the present invention is generally directed to the creation of heterodimeric checkpoint antibodies which can co-engage antigens in several ways, relying on amino acid variants in the constant regions that are different on each chain to promote heterodimeric formation and/or allow for ease of purification of heterodimers over the homodimers.

[0199] Thus, the present invention provides bispecific antibodies. An ongoing problem in antibody technologies is the desire for “bispecific” antibodies that bind to two different antigens simultaneously, in general thus allowing the different antigens to be brought into proximity and resulting in new functionalities and new therapies. In general, these antibodies are made by including genes for each heavy and light chain into the host cells. This generally results in the formation of the desired heterodimer (A-B), as well as the two homodimers (A-A and B-B (not including the light chain heterodimeric issues)). However, a major obstacle in the formation of bispecific antibodies is the difficulty in purifying the heterodimeric antibodies away from the homodimeric antibodies and/or biasing the formation of the heterodimer over the formation of the homodimers.

[0200] There are a number of mechanisms that can be used to generate the heterodimers of the present invention. In addition, as will be appreciated by those in the art, these mechanisms can be combined to ensure high heterodimerization. Thus, amino acid variants that lead to the production of heterodimers are referred to as “heterodimerization variants”. As discussed below, heterodimerization variants can include steric variants (e.g. the “knobs and holes” or “skew” variants described below and the “charge pairs” variants described below) as well as “pI variants”, which allows purification of homodimers away from heterodimers. As is generally described in WO2014/145806, hereby incorporated by reference in its entirety and specifically as below for the discussion of “heterodimerization variants”, useful mechanisms for heterodimerization include “knobs and holes” (“KIH”; sometimes herein as “skew” variants (see discussion in WO2014/145806), “electrostatic steering” or “charge pairs” as described in WO2014/145806, pI variants as described in WO2014/145806, and general additional Fc variants as outlined in WO2014/145806 and below.

[0201] In the present invention, there are several basic mechanisms that can lead to ease of purifying heterodimeric antibodies; one relies on the use of pI variants, such that each monomer has a different pI, thus allowing the isoelectric purification of A-A, A-B and B-B dimeric proteins. Alternatively, some scaffold formats, such as the “triple F” format, also allows separation on the basis of size. As is further outlined below, it is also possible to “skew” the formation of heterodimers over homodimers. Thus, a combination of steric heterodimerization variants and pI or charge pair variants find particular use in the invention.

[0202] In general, embodiments of particular use in the present invention rely on sets of variants that include skew variants, which encourage heterodimerization formation over homodimerization formation, coupled with pI variants, which increase the pI difference between the two monomers to facilitate purification of heterodimers away from homodimers.

[0203] Additionally, as more fully outlined below, depending on the format of the heterodimer antibody, pI variants can be either contained within the constant and/or Fc domains of a monomer, or charged linkers, either domain linkers or scFv linkers, can be used. That is, scaffolds that utilize scFv(s) such as the Triple F format can include charged scFv linkers (either positive or negative), that give a further pI boost for purification purposes. As will be appreciated by those in the art, some Triple F formats are useful with just charged scFv linkers and no additional pI adjustments, although the invention does provide pI variants that are on one or both of the monomers, and/or charged domain linkers as well. In addition, additional amino acid engineering for alternative functionalities may also confer pI changes, such as Fc, FcRn and KO variants.

[0204] In the present invention that utilizes pI as a separation mechanism to allow the purification of heterodimeric proteins, amino acid variants can be introduced into one or both of the monomer polypeptides; that is, the pI of one of the monomers (referred to herein for simplicity as “monomer A”) can be engineered away from monomer B, or both monomer A and B change be changed, with the pI of monomer A increasing and the pI of monomer B decreasing. As discussed, the pI changes of either or both monomers can be done by removing or adding a charged residue (e.g. a neutral amino acid is replaced by a positively or negatively charged amino acid residue, e.g. glycine to glutamic acid), changing a charged residue from positive or negative to the opposite charge (e.g. aspartic acid to lysine) or changing a charged residue to a neutral residue (e.g. loss of a charge; lysine to serine). A number of these variants are shown in the Figures.

[0205] Accordingly, this embodiment of the present invention provides for creating a sufficient change in pI in at least one of the monomers such that heterodimers can be separated from homodimers. As will be appreciated by those in the art, and as discussed further below, this can be done by using a “wild type” heavy chain constant region and a variant region that has been engineered to either increase or decrease its pI (wt A-+B or wt A-−B), or by increasing one region and decreasing the other region (A+-B− or A-B+).

[0206] Thus, in general, a component of some embodiments of the present invention are amino acid variants in the constant regions of antibodies that are directed to altering the isoelectric point (pI) of at least one, if not both, of the monomers of a dimeric protein to form “pI antibodies” by incorporating amino acid substitutions (“pI variants” or “pI substitutions”) into one or both of the monomers. As shown herein, the separation of the heterodimers from the two homodimers can be accomplished if the pIs of the two monomers differ by as little as 0.1 pH unit, with 0.2, 0.3, 0.4 and 0.5 or greater all finding use in the present invention.

[0207] As will be appreciated by those in the art, the number of pI variants to be included on each or both monomer(s) to get good separation will depend in part on the starting pI of the components, for example in the triple F format, the starting pI of the scFv and Fab of interest. That is, to determine which monomer to engineer or in which “direction” (e.g. more positive or more negative), the Fv sequences of the two target antigens are calculated and a decision is made from there. As is known in the art, different Fvs will have different starting pIs which are exploited in the present invention. In general, as outlined herein, the pIs are engineered to result in a total pI difference of each monomer of at least about 0.1 logs, with 0.2 to 0.5 being preferred as outlined herein.

[0208] Furthermore, as will be appreciated by those in the art and outlined herein, in some embodiments, heterodimers can be separated from homodimers on the basis of size. As shown in FIG. 1 for example, several of the formats allow separation of heterodimers and homodimers on the basis of size.

### A. Heterodimerization Variants

[0209] The present invention provides heterodimeric proteins, including heterodimeric antibodies in a variety of formats, which utilize heterodimeric variants to allow for heterodimeric formation and/or purification away from homodimers.

[0210] There are a number of suitable pairs of sets of heterodimerization skew variants. These variants come in “pairs” of “sets”. That is, one set of the pair is incorporated into the first monomer and the other set of the pair is incorporated into the second monomer. It should be noted that these sets do not necessarily behave as “knobs in holes” variants, with a one-to-one correspondence between a residue on one monomer and a residue on the other; that is, these pairs of sets form an interface between the two monomers that encourages heterodimer formation and discourages homodimer formation, allowing the percentage of heterodimers that spontaneously form under biological conditions to be over 90%, rather than the expected 50% (25 homodimer A/A:50% heterodimer A/B:25% homodimer B/B).

### B. Steric Variants

[0211] In some embodiments, the formation of heterodimers can be facilitated by the addition of steric variants. That is, by changing amino acids in each heavy chain, different heavy chains are more likely to associate to form the heterodimeric structure than to form homodimers with the same Fc amino acid sequences. Suitable steric variants are included in in the Figures.

[0212] One mechanism is generally referred to in the art as “knobs and holes”, referring to amino acid engineering that creates steric influences to favor heterodimeric formation and disfavor homodimeric formation can also optionally be used; this is sometimes referred to as “knobs and holes”, as described in U.S. Ser. No. 61/596,846, Ridgway et al., Protein Engineering 9(7):617 (1996); Atwell et al., J. Mol. Biol. 1997 270:26; U.S. Pat. No. 8,216,805, all of which are hereby incorporated by reference in their entirety. The Figures identify a number of “monomer A— monomer B” pairs that rely on “knobs and holes”. In addition, as described in Merchant et al., Nature Biotech. 16:677 (1998), these “knobs and hole” mutations can be combined with disulfide bonds to skew formation to heterodimerization.

[0213] An additional mechanism that finds use in the generation of heterodimers is sometimes referred to as “electrostatic steering” as described in Gunasekaran et al., J. Biol. Chem. 285(25):19637 (2010), hereby incorporated by reference in its entirety. This is sometimes referred to herein as “charge pairs”. In this embodiment, electrostatics are used to skew the formation towards heterodimerization. As those in the art will appreciate, these may also have an effect on pI, and thus on purification, and thus could in some cases also be considered pI variants. However, as these were generated to force heterodimerization and were not used as purification tools, they are classified as “steric variants”. These include, but are not limited to, D221E/P228E/L368E paired with D221R/P228R/K409R (e.g. these are “monomer corresponding sets) and C220E/P228E/368E paired with C220R/E224R/P228R/K409R.

[0214] Additional monomer A and monomer B variants that can be combined with other variants, optionally and independently in any amount, such as pI variants outlined herein or other steric variants that are shown in FIG. 37 of US 2012/0149876, the figure and legend and SEQ ID NOs of which are incorporated expressly by reference herein.

[0215] In some embodiments, the steric variants outlined herein can be optionally and independently incorporated with any pI variant (or other variants such as Fc variants, FcRn variants, etc.) into one or both monomers, and can be independently and optionally included or excluded from the proteins of the invention.

[0216] A list of suitable skew variants is found in FIG. 3 and FIG. 8 showing some pairs of particular utility in many embodiments. Of particular use in many embodiments are the pairs of sets including, but not limited to, S364K/E357Q:L368D/K370S; L368D/K370S:S364K; L368E/K370S:S364K; T411T/E360E/Q362E:D401K; L368D/K370S:S364K/E357L, K370S:S364K/E357Q and T366S/L368A/Y407V:T366W (optionally including a bridging disulfide, T366S/L368A/Y407V/Y349C:T366W/S354C). In terms of nomenclature, the pair “S364K/E357Q:L368D/K370S” means that one of the monomers has the double variant set S364K/E357Q and the other has the double variant set L368D/K370S; as above, the “strandedness” of these pairs depends on the starting pI.

### C. pI (Isoelectric Point) Variants for Heterodimers

[0217] In general, as will be appreciated by those in the art, there are two general categories of pI variants: those that increase the pI of the protein (basic changes) and those that decrease the pI of the protein (acidic changes). As described herein, all combinations of these variants can be done: one monomer may be wild type, or a variant that does not display a significantly different pI from wild-type, and the other can be either more basic or more acidic. Alternatively, each monomer is changed, one to more basic and one to more acidic.

[0218] Preferred combinations of pI variants are shown in FIG. 4. As outlined herein and shown in the figures, these changes are shown relative to IgG1, but all isotypes can be altered this way, as well as isotype hybrids. In the case where the heavy chain constant domain is from IgG2-4, R133E and R133Q can also be used.

[0219] In one embodiment, for example in the FIGS. 1A, E, F, G, H and I formats, a preferred combination of pI variants has one monomer (the negative Fab side) comprising 208D/295E/384D/418E/421D variants (N208D/Q295E/N384D/Q418E/N421D when relative to human IgG1) and a second monomer (the positive scFv side) comprising a positively charged scFv linker, including (GKPGS)₄ (SEQ ID NO: 37755). However, as will be appreciated by those in the art, the first monomer includes a CH1 domain, including position 208. Accordingly, in constructs that do not include a CH1 domain (for example for antibodies that do not utilize a CH1 domain on one of the domains, for example in a dual scFv format or a “one armed” format such as those depicted in FIG. 1B, C or D), a preferred negative pI variant Fc set includes 295E/384D/418E/421D variants (Q295E/N384D/Q418E/N421D when relative to human IgG1).

[0220] Accordingly, in some embodiments, one monomer has a set of substitutions from FIG. 4 and the other monomer has a charged linker (either in the form of a charged scFv linker because that monomer comprises an scFv or a charged domain linker, as the format dictates, which can be selected from those depicted in FIG. 7).

[0221] 1. Isotypic Variants

[0222] In addition, many embodiments of the invention rely on the “importation” of pI amino acids at particular positions from one IgG isotype into another, thus reducing or eliminating the possibility of unwanted immunogenicity being introduced into the variants. A number of these are shown in FIG. 21 of US Publ. 2014/0370013, hereby incorporated by reference. That is, IgG1 is a common isotype for therapeutic antibodies for a variety of reasons, including high effector function. However, the heavy constant region of IgG1 has a higher pI than that of IgG2 (8.10 versus 7.31). By introducing IgG2 residues at particular positions into the IgG1 backbone, the pI of the resulting monomer is lowered (or increased) and additionally exhibits longer serum half-life. For example, IgG1 has a glycine (pI 5.97) at position 137, and IgG2 has a glutamic acid (pI 3.22); importing the glutamic acid will affect the pI of the resulting protein. As is described below, a number of amino acid substitutions are generally required to significant affect the pI of the variant antibody. However, it should be noted as discussed below that even changes in IgG2 molecules allow for increased serum half-life.

[0223] In other embodiments, non-isotypic amino acid changes are made, either to reduce the overall charge state of the resulting protein (e.g. by changing a higher pI amino acid to a lower pI amino acid), or to allow accommodations in structure for stability, etc. as is more further described below.

[0224] In addition, by pI engineering both the heavy and light constant domains, significant changes in each monomer of the heterodimer can be seen. As discussed herein, having the pIs of the two monomers differ by at least 0.5 can allow separation by ion exchange chromatography or isoelectric focusing, or other methods sensitive to isoelectric point.

### D. Calculating pI

[0225] The pI of each monomer can depend on the pI of the variant heavy chain constant domain and the pI of the total monomer, including the variant heavy chain constant domain and the fusion partner. Thus, in some embodiments, the change in pI is calculated on the basis of the variant heavy chain constant domain, using the chart in the FIG. 19 of US Pub. 2014/0370013. As discussed herein, which monomer to engineer is generally decided by the inherent pI of the Fv and scaffold regions. Alternatively, the pI of each monomer can be compared.

### E. pI Variants that Also Confer Better FcRn In Vivo Binding

[0226] In the case where the pI variant decreases the pI of the monomer, they can have the added benefit of improving serum retention in vivo.

[0227] Although still under examination, Fc regions are believed to have longer half-lives in vivo, because binding to FcRn at pH 6 in an endosome sequesters the Fc (Ghetie and Ward, 1997 Immunol Today. 18(12): 592-598, entirely incorporated by reference). The endosomal compartment then recycles the Fc to the cell surface. Once the compartment opens to the extracellular space, the higher pH, —7.4, induces the release of Fc back into the blood. In mice, Dall'Acqua et al. showed that Fc mutants with increased FcRn binding at pH 6 and pH 7.4 actually had reduced serum concentrations and the same half life as wild-type Fc (Dall'Acqua et al. 2002, J. Immunol. 169:5171-5180, entirely incorporated by reference). The increased affinity of Fc for FcRn at pH 7.4 is thought to forbid the release of the Fc back into the blood. Therefore, the Fc mutations that will increase Fc's half-life in vivo will ideally increase FcRn binding at the lower pH while still allowing release of Fc at higher pH. The amino acid histidine changes its charge state in the pH range of 6.0 to 7.4. Therefore, it is not surprising to find His residues at important positions in the Fc/FcRn complex.

[0228] Recently it has been suggested that antibodies with variable regions that have lower isoelectric points may also have longer serum half-lives (Igawa et al., 2010 PEDS. 23(5): 385-392, entirely incorporated by reference). However, the mechanism of this is still poorly understood. Moreover, variable regions differ from antibody to antibody. Constant region variants with reduced pI and extended half-life would provide a more modular approach to improving the pharmacokinetic properties of antibodies, as described herein.

### F. Additional Fc Variants for Additional Functionality

[0229] In addition to pI amino acid variants, there are a number of useful Fc amino acid modification that can be made for a variety of reasons, including, but not limited to, altering binding to one or more FcγR receptors, altered binding to FcRn receptors, etc.

[0230] Accordingly, the proteins of the invention can include amino acid modifications, including the heterodimerization variants outlined herein, which includes the pI variants and steric variants. Each set of variants can be independently and optionally included or excluded from any particular heterodimeric protein.

### G. FcγR Variants

[0231] Accordingly, there are a number of useful Fc substitutions that can be made to alter binding to one or more of the FcγR receptors. Substitutions that result in increased binding as well as decreased binding can be useful. For example, it is known that increased binding to FcγRIIIa results in increased ADCC (antibody dependent cell-mediated cytotoxicity; the cell-mediated reaction wherein nonspecific cytotoxic cells that express FcγRs recognize bound antibody on a target cell and subsequently cause lysis of the target cell). Similarly, decreased binding to FcγRIIb (an inhibitory receptor) can be beneficial as well in some circumstances. Amino acid substitutions that find use in the present invention include those listed in U.S. Ser. No. 11/124,620 (particularly FIG. 41), Ser. Nos. 11/174,287, 11/396,495, 11/538,406, all of which are expressly incorporated herein by reference in their entirety and specifically for the variants disclosed therein. Particular variants that find use include, but are not limited to, 236A, 239D, 239E, 332E, 332D, 239D/332E, 267D, 267E, 328F, 267E/328F, 236A/332E, 239D/332E/330Y, 239D, 332E/330L, 243A, 243L, 264A, 264V and 299T.

[0232] In addition, there are additional Fc substitutions that find use in increased binding to the FcRn receptor and increased serum half life, as specifically disclosed in U.S. Ser. No. 12/341,769, hereby incorporated by reference in its entirety, including, but not limited to, 434S, 434A, 428L, 308F, 259I, 428L/434S, 259I/308F, 436I/428L, 436I or V/434S, 436V/428L and 259I/308F/428L.

### H. Ablation Variants

[0233] Similarly, another category of functional variants are “FcγR ablation variants” or “Fc knock out (FcKO or KO)” variants. In these embodiments, for some therapeutic applications, it is desirable to reduce or remove the normal binding of the Fc domain to one or more or all of the Fcγ receptors (e.g. FcγR1, FcγRIIa, FcγRIIb, FcγRIIIa, etc.) to avoid additional mechanisms of action. That is, for example, in many embodiments, particularly in the use of bispecific checkpoint antibodies desirable to ablate FcγRIIIa binding to eliminate or significantly reduce ADCC activity such that one of the Fc domains comprises one or more Fcγ receptor ablation variants. These ablation variants are depicted in FIG. 5, and each can be independently and optionally included or excluded, with preferred aspects utilizing ablation variants selected from the group consisting of G236R/L328R, E233P/L234V/L235A/G236del/S239K, E233P/L234V/L235A/G236del/S267K, E233P/L234V/L235A/G236del/S239K/A327G, E233P/L234V/L235A/G236del/S267K/A327G and E233P/L234V/L235A/G236del. It should be noted that the ablation variants referenced herein ablate FcγR binding but generally not FcRn binding.

[0234] As is known in the art, the Fc domain of human IgG1 has the highest binding to the Fcγ receptors, and thus ablation variants can be used when the constant domain (or Fc domain) in the backbone of the heterodimeric antibody is IgG1. Alternatively, or in addition to ablation variants in an IgG1 background, mutations at the glycosylation position 297 (generally to A or S) can significantly ablate binding to FcγRIIIa, for example. Human IgG2 and IgG4 have naturally reduced binding to the Fcγ receptors, and thus those backbones can be used with or without the ablation variants.

### I. Combination of Heterodimeric and Fc Variants

[0235] As will be appreciated by those in the art, all of the recited heterodimerization variants (including skew and/or pI variants) can be optionally and independently combined in any way, as long as they retain their “strandedness” or “monomer partition”. In addition, all of these variants can be combined into any of the heterodimerization formats.

[0236] In the case of pI variants, while embodiments finding particular use are shown in the Figures, other combinations can be generated, following the basic rule of altering the pI difference between two monomers to facilitate purification.

[0237] In addition, any of the heterodimerization variants, skew and pI, are also independently and optionally combined with Fc ablation variants, Fc variants, FcRn variants, as generally outlined herein.

### V. USEFUL FORMATS OF THE INVENTION

[0238] As will be appreciated by those in the art and discussed more fully below, the bispecific heterodimeric antibodies of the present invention can take on a wide variety of configurations, as are generally depicted in FIG. 1. Some figures depict “single ended” configurations, where there is one type of specificity on one “arm” of the molecule and a different specificity on the other “arm”. Other figures depict “dual ended” configurations, where there is at least one type of specificity at the “top” of the molecule and one or more different specificities at the “bottom” of the molecule. Thus, the present invention is directed to novel immunoglobulin compositions that co-engage a different first and a second antigen.

[0239] As will be appreciated by those in the art, the heterodimeric formats of the invention can have different valencies as well as be bispecific. That is, heterodimeric antibodies of the invention can be bivalent and bispecific, wherein one checkpoint target is bound by one ABD and the other checkpoint target is bound by a second ABD. The heterodimeric antibodies can also be trivalent and bispecific, wherein the first antigen is bound by two ABDs and the second antigen by a second ABD.

### A. Bottle Opener Format

[0240] One heterodimeric scaffold that finds particular use in the present invention is the “triple F” or “bottle opener” scaffold format as shown in FIG. 1A. In this embodiment, one heavy chain of the antibody contains a single chain Fv (“scFv”, as defined below) and the other heavy chain is a “regular” Fab format, comprising a variable heavy chain and a light chain. This structure is sometimes referred to herein as “triple F” format (scFv-Fab-Fc) or the “bottle-opener” format, due to a rough visual similarity to a bottle-opener (see FIG. 1A). The two chains are brought together by the use of amino acid variants in the constant regions (e.g. the Fc domain, the CH1 domain and/or the hinge region) that promote the formation of heterodimeric antibodies as is described more fully below.

[0241] There are several distinct advantages to the present “triple F” format. As is known in the art, antibody analogs relying on two scFv constructs often have stability and aggregation problems, which can be alleviated in the present invention by the addition of a “regular” heavy and light chain pairing. In addition, as opposed to formats that rely on two heavy chains and two light chains, there is no issue with the incorrect pairing of heavy and light chains (e.g. heavy 1 pairing with light 2, etc.).

[0242] Many of the embodiments outlined herein rely in general on the bottle opener format that comprises a first monomer comprising an scFv, comprising a variable heavy and a variable light domain, covalently attached using an scFv linker (charged, in many but not all instances), where the scFv is covalently attached to the N-terminus of a first Fc domain usually through a domain linker (which, as outlined herein can either be un-charged or charged and can be exogeneous or endogeneous (e.g. all or part of the native hinge domain). The second monomer of the bottle opener format is a heavy chain, and the composition further comprises a light chain.

[0243] In addition, the Fc domains of the bottle opener format generally comprise skew variants (e.g. a set of amino acid substitutions as shown in FIG. 3 and FIG. 8, with particularly useful skew variants being selected from the group consisting of S364K/E357Q:L368D/K370S; L368D/K370S:S364K; L368E/K370S:S364K; T411T/E360E/Q362E:D401K; L368D/K370S:S364K/E357L, K370S:S364K/E357Q, T366S/L368A/Y407V:T366W and T366S/L368A/Y407V/Y349C:T366W/S354C), optionally ablation variants (including those shown in FIG. 5), optionally charged scFv linkers (including those shown in FIG. 7) and the heavy chain comprises pI variants (including those shown in FIG. 4).

[0244] In some embodiments, the bottle opener format includes skew variants, pI variants, and ablation variants. Accordingly, some embodiments include bottle opener formats that comprise: a) a first monomer (the “scFv monomer”) that comprises a charged scFv linker (with the +H sequence of FIG. 7 being preferred in some embodiments), the skew variants S364K/E357Q, the ablation variants E233P/L234V/L235A/G236del/S267K, and an Fv that binds to a checkpoint receptor as outlined herein; b) a second monomer (the “Fab monomer”) that comprises the skew variants L368D/K370S, the pI variants N208D/Q295E/N384D/Q418E/N421D, the ablation variants E233P/L234V/L235A/G236del/S267K, and a variable heavy domain that, with the variable light domain, makes up an Fv that binds to a second checkpoint receptor as outlined herein; and c) a light chain. In this particular embodiment, suitable monomer Fv pairs include (Fabs listed first, scFvs second) PD-1 and CTLA-4, CTLA-4 and PD-1, PD-1 and TIM-3, TIM-3 and PD-1, PD-1 and LAG-3, LAG-3×PD1, PD-1 and TIGIT, TIGIT and PD-1, PD-1 and BTLA, BTLA and PD-1, CTLA-4 and TIM-3, TIM-3 and CTLA-4, CTLA-4 and LAG-3, LAG-3 and CTLA-4, CTLA-4 and TIGIT, TIGIT and CTLA-4, CTLA-4 and BTLA, BTLA and CTLA-4, TIM-3 and LAG-3, LAG-3 and TIM-3, TIM-3 and TIGIT, TIGIT and TIM-3, TIM-3 and BTLA, BTLA and TIM-3. LAG-3 and TIGIT, TIGIT and LAG-3, LAG-3 and BTLA, BTLA and LAG-3, BTLA and TIGIT, and TIGIT and BTLA. In this particular embodiment, a bottle opener with these variants have the scFv side comprising the ABD 1G6_L1.194_H1.279 that binds to PD-1 finds particular use. In this particular embodiment, a bottle opener with these variants have the scFv side comprising the [CTLA-4]_H3.23_L0.129 ABD that binds to CTLA-4 finds particular use.

[0245] Of particular use in some embodiments, particularly in the bottle opener format, are CTLA-4×PD-1, LAG-3×PD-1, BTLA×PD-1, TIM-3×PD-1 and LAG-3×CTLA-4.

[0246] The ABD sequences for these combinations can be as disclosed in the sequence listing or as shown in FIGS. 9 to 13, and in any combination as shown in FIG. 39 and FIG. 40.

[0247] In some embodiments, the bottle opener format includes skew variants, pI variants, ablation variants and FcRn variants. Accordingly, some embodiments include bottle opener formats that comprise: a) a first monomer (the “scFv monomer”) that comprises a charged scFv linker (with the +H sequence of FIG. 7 being preferred in some embodiments), the skew variants S364K/E357Q, the ablation variants E233P/L234V/L235A/G236del/S267K, the FcRn variants M428L/N434S and an Fv that binds to a checkpoint inhibitor as outlined herein; b) a second monomer (the “Fab monomer”) that comprises the skew variants L368D/K370S, the pI variants N208D/Q295E/N384D/Q418E/N421D, the ablation variants E233P/L234V/L235A/G236del/S267K, the FcRn variants M428L/N434S and a variable heavy domain that, with the variable light domain, makes up an Fv that binds to a second checkpoint inhibitor as outlined herein; and c) a light chain. In this particular embodiment, suitable Fv pairs include (Fabs listed first, scFvs second) PD-1 and CTLA-4, CTLA-4 and PD-1, PD-1 and TIM-3, TIM-3 and PD-1, PD-1 and LAG-3, LAG-3×PD1, PD-1 and TIGIT, TIGIT and PD-1, PD-1 and BTLA, BTLA and PD-1, CTLA-4 and TIM-3, TIM-3 and CTLA-4, CTLA-4 and LAG-3, LAG-3 and CTLA-4, CTLA-4 and TIGIT, TIGIT and CTLA-4, CTLA-4 and BTLA, BTLA and CTLA-4, TIM-3 and LAG-3, LAG-3 and TIM-3, TIM-3 and TIGIT, TIGIT and TIM-3, TIM-3 and BTLA, BTLA and TIM-3. LAG-3 and TIGIT, TIGIT and LAG-3, LAG-3 and BTLA, BTLA and LAG-3, BTLA and TIGIT, and TIGIT and BTLA. In this particular embodiment, a bottle opener with these variants have the scFv side comprising the ABD 1G6_L1.194_H1.279 that binds to PD-1 finds particular use. In this particular embodiment, a bottle opener with these variants have the scFv side comprising the [CTLA-4]_H3.23_L0.129 ABD that binds to CTLA-4 finds particular use.

[0248] Of particular use in some embodiments, particularly in the bottle opener format, are CTLA-4×PD-1, LAG-3×PD-1, BTLA×PD-1, TIM-3×PD-1 and LAG-3×CTLA-4.

[0249] Specifically, FIG. 37 shows some bottle opener “backbone” sequences that are missing the Fv sequences that can be used in the present invention. That is, Fv sequences for the scFv portion and the Fab portion can be used from any combination of PD-1 and CTLA-4, PD-1 and TIM-3, PD-1 and LAG-3, PD-1 and TIGIT, PD-1 and BTLA, CTLA-4 and TIM-3, CTLA-4 and LAG-3, CTLA-4 and TIGIT, CTLA-4 and BTLA, TIM-3 and LAG-3, TIM-3 and TIGIT, TIM-3 and BTLA, LAG-3 and TIGIT, LAG-3 and BTLA and TIGIT and BTLA. The sequences can be any of those disclosed herein in the sequence listing and/or in FIGS. 9 to 13.

[0250] For bottle opener backbone 1 from FIG. 37, specific Fv combinations of use in the present invention include PD-1 and CTLA-4, PD-1 and TIM-3, PD-1 and LAG-3, PD-1 and TIGIT, PD-1 and BTLA, CTLA-4 and TIM-3, CTLA-4 and LAG-3, CTLA-4 and TIGIT, CTLA-4 and BTLA, TIM-3 and LAG-3, TIM-3 and TIGIT, TIM-3 and BTLA, LAG-3 and TIGIT, LAG-3 and BTLA and TIGIT and BTLA. The sequences can be any of those disclosed herein in the sequence listing and/or in FIGS. 9 to 13.

[0251] For bottle opener backbone 1 from FIG. 37, specific Fv combinations of use in the present invention include CTLA-4 (Fab)×PD-1 (scFv), PD-1 (Fab)×CTLA-4 (scFv), LAG-3 (Fab)×PD-1 (scFv), BTLA (Fab)×PD-1 (scFv) and LAG-3 (Fab)×CTLA-4 (scFv).

[0252] For bottle opener backbone 1 from FIG. 37 (optionally including the 428L/434S variants), specific ABDs that bind human PD-1 include, but are not limited to, 1G6_H1.279_L1.194, 1G6_H1.280_L1.224; 1G6_L1.194_H1.279, 1G6_L1.210_H1.288 and 2E9_H1L1, as well as those listed in SEQ ID NOs: 6209-11464, SEQ ID NOs: 11465-17134, SEQ ID NOs: 33003-33072, SEQ ID NOs: 33073-35394 and SEQ ID NOs: 36127-36146.

[0253] For bottle opener backbone 1 from FIG. 37 (optionally including the 428L/434S variants), specific ABDs that bind human CTLA-4 include, but are not limited to, [CTLA-4]_H0.25_L0; [CTLA-4]_H0.26_L0; [CTLA-4]_H0.27_L0; [CTLA-4]_H0.29_L0; [CTLA-4]_H0.38_L0; [CTLA-4]_H0.39_L0; [CTLA-4]_H0.40_L0; [CTLA-4]_H0.70_L0; [CTLA-4]_H0_L0.22; [CTLA-4]_H2_L0; [CTLA-4]_H3.21_L0.124; [CTLA-4]_H3.21_L0.129; [CTLA-4]_H3.21_L0.132; [CTLA-4]_H3.23_L0.124; [CTLA-4]_H3.23_L0.129; [CTLA-4]_H3.23_L0.132; [CTLA-4]_H3.25_L0.124; [CTLA-4]_H3.25_L0.129; [CTLA-4]_H3.25_L0.132; [CTLA-4]_H3.4_L0.118; [CTLA-4]_H3.4_L0.119; [CTLA-4]_H3.4_L0.12; [CTLA-4]_H3.4_L0.121; [CTLA-4]_H3.4_L0.122; [CTLA-4]_H3.4_L0.123; [CTLA-4]_H3.4_L0.124; [CTLA-4]_H3.4_L0.125; [CTLA-4]_H3.4_L0.126; [CTLA-4]_H3.4_L0.127; [CTLA-4]_H3.4_L0.128; [CTLA-4]_H3.4_L0.129; [CTLA-4]_H3.4_L0.130; [CTLA-4]_H3.4_L0.131; [CTLA-4]_H3.4_L0.132; [CTLA-4]_H3.5_L2.1; [CTLA-4]_H3.5_L2.2; [CTLA-4]_H3.5_L2.3; [CTLA-4]_H3_L0; [CTLA-4]_H3_L0.22; [CTLA-4]_H3_L0.44; [CTLA-4]_H3_L0.67 and [CTLA-4]_H3_L0.74, as well as those listed in SEQ ID NOs: 21-2918, SEQ ID NOs: 2919-6208, SEQ ID NOs: 36739-36818 and SEQ ID NOs: 35395-35416.

[0254] For bottle opener backbone 1 from FIG. 37 (optionally including the 428L/434S variants), specific ABDs that bind human LAG-3 include, but are not limited to, 2A11_H0L0; 2A11_H1.125_L2.113; 2A11_H1.144_L2.142; 2A11_H1_L2.122; 2A11_H1_L2.123; 2A11_H1_L2.124; 2A11_H1_L2.25; 2A11_H1_L2.47; 2A11_H1_L2.50; 2A11_H1_L2.91; 2A11_H1_L2.93; 2A11_H1_L2.97; 2A11_H1L1; 2A11_H1L2; 2A11_H2L2; 2A11_H3L1; 2A11_H3L2; 2A11_H4L1; 2A11_H4L2; 7G8_H0L0; 7G8_H1L1; 7G8_H3.18_L1.11; 7G8_H3.23_L1.11; 7G8_H3.28_L1; 7G8_H3.28_L1.11; 7G8_H3.28_L1.13; 7G8_H3.30_L1.34; 7G8_H3.30_L1.34; and 7G8_H3L1, as well as those listed in SEQ ID NOs: 17135-20764, SEQ ID NOs: 36819-36962, SEQ ID NOs: 35417-35606, SEQ ID NOs: 25194-32793 and SEQ ID NOs: 32794-33002.

[0255] For bottle opener backbone 1 from FIG. 37 (optionally including the 428L/434S variants), specific ABDs that bind human BTLA include, but are not limited to, 9C6_H0L0^{.} 9C6_H11_L1; and 9C6_H1.11_L1, as well as those listed in SEQ ID SEQ ID NOs: 20885-21503 and SEQ ID NOs: 36707-36738.

[0256] For bottle opener backbone 1 from FIG. 37 (optionally including the 428L/434S variants), specific ABDs that bind human TIM-3 include, but are not limited to, 1D10_H0L0; 1D12_H0L0; 3H3_H1_L21; 6C8_H0L0; 6D9_H0_1D12_L0; 7A9_H0L0; 7B11_H0L0; 7B11var_H0L0 and 7C2_H0L0, as well as those listed in SEQ ID NOs: 20765-20884, SEQ ID NOs: 37587-37698 and SEQ ID NOs: 36347-36706.

[0257] Specific bottle opener embodiments are outlined below.

### B. mAb-Fv Format

[0258] One heterodimeric scaffold that finds particular use in the present invention is the mAb-Fv format shown in FIG. 1H. In this embodiment, the format relies on the use of a C-terminal attachment of an “extra” variable heavy domain to one monomer and the C-terminal attachment of an “extra” variable light domain to the other monomer, thus forming a third antigen binding domain, wherein the Fab portions of the two monomers bind one checkpoint target and the “extra” scFv domain binds a different checkpoint target.

[0259] In this embodiment, the first monomer comprises a first heavy chain, comprising a first variable heavy domain and a first constant heavy domain comprising a first Fc domain, with a first variable light domain covalently attached to the C-terminus of the first Fc domain using a domain linker (vh1-CH1-hinge-CH2-CH3-[optional linker]-vl2). The second monomer comprises a second variable heavy domain of the second constant heavy domain comprising a second Fc domain, and a third variable heavy domain covalently attached to the C-terminus of the second Fc domain using a domain linker (vh1-CH1-hinge-CH2-CH3-[optional linker]-vh2. The two C-terminally attached variable domains make up a scFv. This embodiment further utilizes a common light chain comprising a variable light domain and a constant light domain, which associates with the heavy chains to form two identical Fabs. As for many of the embodiments herein, these constructs include skew variants, pI variants, ablation variants, additional Fc variants, etc. as desired and described herein. In this embodiment, suitable Fv pairs include (Fabs listed first, scFvs second) PD-1 and CTLA-4, CTLA-4 and PD-1, PD-1 and TIM-3, TIM-3 and PD-1, PD-1 and LAG-3, LAG-3×PD1, PD-1 and TIGIT, TIGIT and PD-1, PD-1 and BTLA, BTLA and PD-1, CTLA-4 and TIM-3, TIM-3 and CTLA-4, CTLA-4 and LAG-3, LAG-3 and CTLA-4, CTLA-4 and TIGIT, TIGIT and CTLA-4, CTLA-4 and BTLA, BTLA and CTLA-4, TIM-3 and LAG-3, LAG-3 and TIM-3, TIM-3 and TIGIT, TIGIT and TIM-3, TIM-3 and BTLA, BTLA and TIM-3. LAG-3 and TIGIT, TIGIT and LAG-3, LAG-3 and BTLA, BTLA and LAG-3, BTLA and TIGIT, and TIGIT and BTLA.

[0260] The ABD sequences for these combinations can be as disclosed in the sequence listing or as shown in FIGS. 9 to 13, and in any combination as shown in FIG. 39 and FIG. 40.

[0261] In addition, the Fc domains of the mAb-Fv format comprise skew variants (e.g. a set of amino acid substitutions as shown in FIG. 3 and FIG. 8, with particularly useful skew variants being selected from the group consisting of S364K/E357Q:L368D/K370S; L368D/K370S:S364K; L368E/K370S:S364K; T411T/E360E/Q362E:D401K; L368D/K370S:S364K/E357L, K370S:S364K/E357Q, T366S/L368A/Y407V:T366W and T366S/L368A/Y407V/Y349C:T366W/S354C), optionally ablation variants (including those shown in FIG. 5), optionally charged scFv linkers (including those shown in FIG. 7) and the heavy chain comprises pI variants (including those shown in FIG. 4).

[0262] In some embodiments, the mAb-Fv format includes skew variants, pI variants, and ablation variants. Accordingly, some embodiments include bottle opener formats that comprise: a) a first monomer that comprises the skew variants S364K/E357Q, the ablation variants E233P/L234V/L235A/G236del/S267K, and a first variable heavy domain that, with the first variable light domain of the light chain, makes up an Fv that binds to a first checkpoint inhibitor, and a second variable heavy domain; b) a second monomer that comprises the skew variants L368D/K370S, the pI variants N208D/Q295E/N384D/Q418E/N421D, the ablation variants E233P/L234V/L235A/G236del/S267K, and a first variable heavy domain that, with the first variable light domain, makes up the Fv that binds to the first checkpoint inhibitor as outlined herein, and a second variable light chain, that together with the second variable heavy chain forms an Fv (ABD) that binds a second checkpoint inhibitors; and c) a light chain comprising a first variable light domain and a constant light domain. Of particular use in some embodiments in this format, are (Fab-scFv order) CTLA-4×PD-1, LAG-3×PD-1, BTLA×PD-1, and LAG-3×CTLA-4.

[0263] In some embodiments, the mAb-Fv format includes skew variants, pI variants, ablation variants and FcRn variants. Accordingly, some embodiments include bottle opener formats that comprise: a) a first monomer that comprises the skew variants S364K/E357Q, the ablation variants E233P/L234V/L235A/G236del/S267K, the FcRn variants M428L/N434S and a first variable heavy domain that, with the first variable light domain of the light chain, makes up an Fv that binds to a first checkpoint inhibitor, and a second variable heavy domain; b) a second monomer that comprises the skew variants L368D/K370S, the pI variants N208D/Q295E/N384D/Q418E/N421D, the ablation variants E233P/L234V/L235A/G236del/S267K, the FcRn variants M428L/N434S and a first variable heavy domain that, with the first variable light domain, makes up the Fv that binds to the first checkpoint inhibitor as outlined herein, and a second variable light chain, that together with the second variable heavy chain forms an Fv (ABD) that binds a second checkpoint inhibitors; and c) a light chain comprising a first variable light domain and a constant light domain. Of particular use in some embodiments in this format, are (Fab-scFv order) CTLA-4×PD-1, LAG-3×PD-1, BTLA×PD-1, and LAG-3×CTLA-4.

[0264] For mAb-Fv sequences that are similar to the mAb-scFv backbone 1 (optionally including M428L/N434S) from FIG. 38, specific ABDs that bind human PD-1 include, but are not limited to, 1G6_H1.279_L1.194, 1G6_H1.280_L1.224; 1G6_L1.194_H1.279, 1G6_L1.210_H1.288 and 2E9_H1L1, as well as those listed in SEQ ID NOs: 6209-11464, SEQ ID NOs: 11465-17134, SEQ ID NOs: 33003-33072, SEQ ID NOs: 33073-35394 and SEQ ID NOs: 36127-36146.

[0265] For mAb-Fv sequences that are similar to the mAb-scFv backbone 1 (optionally including M428L/N434S) from FIG. 38, specific ABDs that bind human CTLA-4 include, but are not limited to, [CTLA-4]_H0.25_L0; [CTLA-4]_H0.26_L0; [CTLA-4]_H0.27_L0; [CTLA-4]_H0.29_L0; [CTLA-4]_H0.38_L0; [CTLA-4]_H0.39_L0; [CTLA-4]_H0.40_L0; [CTLA-4]_H0.70_L0; [CTLA-4]_H0_L0.22; [CTLA-4]_H2_L0; [CTLA-4]_H3.21_L0.124; [CTLA-4]_H3.21_L0.129; [CTLA-4]_H3.21_L0.132; [CTLA-4]_H3.23_L0.124; [CTLA-4]_H3.23_L0.129; [CTLA-4]_H3.23_L0.132; [CTLA-4]_H3.25_L0.124; [CTLA-4]_H3.25_L0.129; [CTLA-4]_H3.25_L0.132; [CTLA-4]_H3.4_L0.118; [CTLA-4]_H3.4_L0.119; [CTLA-4]_H3.4_L0.12; [CTLA-4]_H3.4_L0.121; [CTLA-4]_H3.4_L0.122; [CTLA-4]_H3.4_L0.123; [CTLA-4]_H3.4_L0.124; [CTLA-4]_H3.4_L0.125; [CTLA-4]_H3.4_L0.126; [CTLA-4]_H3.4_L0.127; [CTLA-4]_H3.4_L0.128; [CTLA-4]_H3.4_L0.129; [CTLA-4]_H3.4_L0.130; [CTLA-4]_H3.4_L0.131; [CTLA-4]_H3.4_L0.132; [CTLA-4]_H3.5_L2.1; [CTLA-4]_H3.5_L2.2; [CTLA-4]_H3.5_L2.3; [CTLA-4]_H3_L0; [CTLA-4]_H3_L0.22; [CTLA-4]_H3_L0.44; [CTLA-4]_H3_L0.67 and [CTLA-4]_H3_L0.74, as well as those listed in SEQ ID NOs: 21-2918, SEQ ID NOs: 2919-6208, SEQ ID NOs: 36739-36818 and SEQ ID NOs: 35395-35416.

[0266] For mAb-Fv sequences that are similar to the mAb-scFv backbone 1 (optionally including M428L/N434S) from FIG. 38, specific ABDs that bind human LAG-3 include, but are not limited to, 2A11_H0L0; 2A11_H1.125_L2.113; 2A11_H1.144_L2.142; 2A11_H1_L2.122; 2A11_H1_L2.123; 2A11_H1_L2.124; 2A11_H1_L2.25; 2A11_H1_L2.47; 2A11_H1_L2.50; 2A11_H1_L2.91; 2A11_H1_L2.93; 2A11_H1_L2.97; 2A11_H1L1; 2A11_H1L2; 2A11_H2L2; 2A11_H3L1; 2A11_H3L2; 2A11_H4L1; 2A11_H4L2; 7G8_H0L0; 7G8_H1L1; 7G8_H3.18_L1.11; 7G8_H3.23_L1.11; 7G8_H3.28_L1; 7G8_H3.28_L1.11; 7G8_H3.28_L1.13; 7G8_H3.30_L1.34; 7G8_H3.30_L1.34; and 7G8_H3L1, as well as those listed in SEQ ID NOs: 17135-20764, SEQ ID NOs: 36819-36962, SEQ ID NOs: 35417-35606, SEQ ID NOs: 25194-32793 and SEQ ID NOs: 32794-33002.

[0267] For mAb-Fv sequences that are similar to the mAb-scFv backbone 1 (optionally including M428L/N434S) from FIG. 38, specific ABDs that bind human BTLA include, but are not limited to, 9C6_H0L0; 9C6_H1.1_L1; and 9C6_H1.11_L1, as well as those listed in SEQ ID NOs: 20885-21503 and SEQ ID NOs: 36707-36738.

[0268] For mAb-Fv sequences that are similar to the mAb-scFv backbone 1 (optionally including M428L/N434S) from FIG. 38, specific ABDs that bind human TIM-3 include, but are not limited to, 1D10_H0L0; 1D12_H0L0; 3H3_H1_L2.1; 6C8_H0L0; 6D9_H0_1D12_L0; 7A9_H0L0; 7B11_H0L0; 7B11var_H0L0 and 7C2_H0L0, as well as those listed in SEQ ID NOs: 20765-20884, SEQ ID NOs: 37587-37698 and SEQ ID NOs: 36347-36706.

### C. mAb-scFv

[0269] One heterodimeric scaffold that finds particular use in the present invention is the mAb-scFv format shown in FIG. 1I. In this embodiment, the format relies on the use of a C-terminal attachment of an scFv to one of the monomers, thus forming a third antigen binding domain, wherein the Fab portions of the two monomers bind one checkpoint target and the “extra” scFv domain binds a different checkpoint target.

[0270] In this embodiment, the first monomer comprises a first heavy chain (comprising a variable heavy domain and a constant domain), with a C-terminally covalently attached scFv comprising a scFv variable light domain, an scFv linker and a scFv variable heavy domain in either orientation (vh1-CH1-hinge-CH2-CH3-[optional linker]-vh2-scFv linker-v12 or vh1-CH1-hinge-CH2-CH3-[optional linker]-v12-scFv linker-vh2). This embodiment further utilizes a common light chain comprising a variable light domain and a constant light domain, which associates with the heavy chains to form two identical Fabs that bind one of the target antigens. As for many of the embodiments herein, these constructs include skew variants, pI variants, ablation variants, additional Fc variants, etc. as desired and described herein. In this embodiment, suitable Fv pairs include (Fabs listed first, scFvs second) PD-1 and CTLA-4, CTLA-4 and PD-1, PD-1 and TIM-3, TIM-3 and PD-1, PD-1 and LAG-3, LAG-3×PD1, PD-1 and TIGIT, TIGIT and PD-1, PD-1 and BTLA, BTLA and PD-1, CTLA-4 and TIM-3, TIM-3 and CTLA-4, CTLA-4 and LAG-3, LAG-3 and CTLA-4, CTLA-4 and TIGIT, TIGIT and CTLA-4, CTLA-4 and BTLA, BTLA and CTLA-4, TIM-3 and LAG-3, LAG-3 and TIM-3, TIM-3 and TIGIT, TIGIT and TIM-3, TIM-3 and BTLA, BTLA and TIM-3. LAG-3 and TIGIT, TIGIT and LAG-3, LAG-3 and BTLA, BTLA and LAG-3, BTLA and TIGIT, and TIGIT and BTLA.

[0271] The ABD sequences for these combinations can be as disclosed in the sequence listing or as shown in FIGS. 9 to 13, and in any combination as shown in FIG. 39 and FIG. 40.

[0272] In addition, the Fc domains of the mAb-scFv format generally comprise skew variants (e.g. a set of amino acid substitutions as shown in FIG. 3 and FIG. 8, with particularly useful skew variants being selected from the group consisting of S364K/E357Q:L368D/K370S; L368D/K370S:S364K; L368E/K370S:S364K; T411T/E360E/Q362E:D401K; L368D/K370S:S364K/E357L, K370S:S364K/E357Q, T366S/L368A/Y407V:T366W and T366S/L368A/Y407V/Y349C:T366W/S354C), optionally ablation variants (including those shown in FIG. 5), optionally charged scFv linkers (including those shown in FIG. 7) and the heavy chain comprises pI variants (including those shown in FIG. 4).

[0273] In some embodiments, the mAb-scFv format includes skew variants, pI variants, and ablation variants. Accordingly, some embodiments include bottle opener formats that comprise: a) a first monomer that comprises the skew variants S364K/E357Q, the ablation variants E233P/L234V/L235A/G236del/S267K, and a first variable heavy domain that, with the first variable light domain of the light chain, makes up an Fv that binds to a first checkpoint inhibitor, and a second variable heavy domain; b) a second monomer that comprises the skew variants L368D/K370S, the pI variants N208D/Q295E/N384D/Q418E/N421D, the ablation variants E233P/L234V/L235A/G236del/S267K, and a first variable heavy domain that, with the first variable light domain, makes up the Fv that binds to the first checkpoint inhibitor as outlined herein, and a second variable light chain, that together with the second variable heavy chain forms an Fv (ABD) that binds a second checkpoint inhibitors; and c) a light chain comprising a first variable light domain and a constant light domain. Of particular use in some embodiments in this format, are (Fab-scFv order) CTLA-4×PD-1, LAG-3×PD-1, BTLA×PD-1, and LAG-3×CTLA-4.

[0274] In some embodiments, the mAb-scFv format includes skew variants, pI variants, ablation variants and FcRn variants. Accordingly, some embodiments include bottle opener formats that comprise: a) a first monomer that comprises the skew variants S364K/E357Q, the ablation variants E233P/L234V/L235A/G236del/S267K, the FcRn variants M428L/N434S and a first variable heavy domain that, with the first variable light domain of the light chain, makes up an Fv that binds to a first checkpoint inhibitor, and a second variable heavy domain; b) a second monomer that comprises the skew variants L368D/K370S, the pI variants N208D/Q295E/N384D/Q418E/N421D, the ablation variants E233P/L234V/L235A/G236del/S267K, the FcRn variants M428L/N434S and a first variable heavy domain that, with the first variable light domain, makes up the Fv that binds to the first checkpoint inhibitor as outlined herein, and a second variable light chain, that together with the second variable heavy chain forms an Fv (ABD) that binds a second checkpoint inhibitors; and c) a light chain comprising a first variable light domain and a constant light domain. In mAb-scFv formats, specific Fv combinations of use in the present invention include CTLA-4 (Fab)×PD-1 (scFv), PD-1 (Fab)×CTLA-4 (scFv), LAG-3 (Fab)×PD-1 (scFv), BTLA (Fab)×PD-1 (scFv) and LAG-3 (Fab)×CTLA-4 (scFv).

[0275] In mAb-scFv backbone 1 (optionally including M428L/N434S) from FIG. 38, specific ABDs that bind human PD-1 include, but are not limited to, 1G6_H1.279_L1.194, 1G6_H1.280_L1.224; 1G6_L1.194_H1.279, 1G6_L1.210_H1.288 and 2E9_H1L1, as well as those listed in SEQ ID NOs: 6209-11464, SEQ ID NOs: 11465-17134, SEQ ID NOs: 33003-33072, SEQ ID NOs: 33073-35394 and SEQ ID NOs: 36127-36146.

[0276] In mAb-scFv backbone 1 (optionally including M428L/N434S) from FIG. 38, specific ABDs that bind human CTLA-4 include, but are not limited to, [CTLA-4]_H0.25_L0; [CTLA-4]_H0.26_L0; [CTLA-4]_H0.27_L0; [CTLA-4]_H0.29_L0; [CTLA-4]_H0.38_L0; [CTLA-4]_H0.39_L0; [CTLA-4]_H0.40_L0; [CTLA-4]_H0.70_L0; [CTLA-4]_H0_L0.22; [CTLA-4]_H2_L0; [CTLA-4]_H3.21_L0.124; [CTLA-4]_H3.21_L0.129; [CTLA-4]_H3.21_L0.132; [CTLA-4]_H3.23_L0.124; [CTLA-4]_H3.23_L0.129; [CTLA-4]_H3.23_L0.132; [CTLA-4]_H3.25_L0.124; [CTLA-4]_H3.25_L0.129; [CTLA-4]_H3.25_L0.132; [CTLA-4]_H3.4_L0.118; [CTLA-4]_H3.4_L0.119; [CTLA-4]_H3.4_L0.12; [CTLA-4]_H3.4_L0.121; [CTLA-4]_H3.4_L0.122; [CTLA-4]_H3.4_L0.123; [CTLA-4]_H3.4_L0.124; [CTLA-4]_H3.4_L0.125; [CTLA-4]_H3.4_L0.126; [CTLA-4]_H3.4_L0.127; [CTLA-4]_H3.4_L0.128; [CTLA-4]_H3.4_L0.129; [CTLA-4]_H3.4_L0.130; [CTLA-4]_H3.4_L0.131; [CTLA-4]_H3.4_L0.132; [CTLA-4]_H3.5_L2.1; [CTLA-4]_H3.5_L2.2; [CTLA-4]_H3.5_L2.3; [CTLA-4]_H3_L0; [CTLA-4]_H3_L0.22; [CTLA-4]_H3_L0.44; [CTLA-4]_H3_L0.67 and [CTLA-4]_H3_L0.74, as well as those listed in SEQ ID NOs: 21-2918, SEQ ID NOs: 2919-6208, SEQ ID NOs: 36739-36818 and SEQ ID NOs: 35395-35416.

[0277] In mAb-scFv backbone 1 (optionally including M428L/N434S) from FIG. 38, specific ABDs that bind human LAG-3 include, but are not limited to, 2A11_H0L0; 2A11_H1.125_L2.113; 2A11_H1.144_L2.142; 2A11_H1_L2.122; 2A11_H1_L2.123; 2A11_H1_L2.124; 2A11_H1_L2.25; 2A11_H1_L2.47; 2A11_H1_L2.50; 2A11_H1_L2.91; 2A11_H1_L2.93; 2A11_H1_L2.97; 2A11_H1L1; 2A11_H1L2; 2A11_H2L2; 2A11_H3L1; 2A11_H3L2; 2A11_H4L1; 2A11_H4L2; 7G8_H0L0; 7G8_H1L1; 7G8_H3.18_L1.11; 7G8_H3.23_L1.11; 7G8_H3.28_L1; 7G8_H3.28_L1.11; 7G8_H3.28_L1.13; 7G8_H3.30_L1.34; 7G8_H3.30_L1.34; and 7G8_H3L1, as well as those listed in SEQ ID NOs: 17135-20764, SEQ ID NOs: 36819-36962, SEQ ID NOs: 35417-35606, SEQ ID NOs: 25194-32793 and SEQ ID NOs: 32794-33002.

[0278] In mAb-scFv backbone 1 (optionally including M428L/N434S) from FIG. 38, specific ABDs that bind human BTLA include, but are not limited to, 9C6_H0L0; 9C6_H1.1_L1; and 9C6_H1.11_L1, as well as those listed in SEQ ID NOs: 20885-21503 and SEQ ID NOs: 36707-36738.

[0279] In mAb-scFv backbone 1 (optionally including M428L/N434S) from FIG. 38, specific ABDs that bind human TIM-3 include, but are not limited to, 1D10_H0L0; 1D12_H0L0; 3H3_H1_L2.1; 6C8_H0L0; 6D9_H0_1D12_L0; 7A9_H0L0; 7B11_H0L0; 7B11var_H0L0 and 7C2_H0L0, as well as those listed in SEQ ID NOs: 20765-20884, SEQ ID NOs: 37587-37698 and SEQ ID NOs: 36347-36706.

### D. Central scFv

[0280] One heterodimeric scaffold that finds particular use in the present invention is the Central-scFv format shown in FIG. 1F. In this embodiment, the format relies on the use of an inserted scFv domain thus forming a third antigen binding domain, wherein the Fab portions of the two monomers bind one checkpoint target and the “extra” scFv domain binds another. The scFv domain is inserted between the Fc domain and the CH1-Fv region of one of the monomers, thus providing a third antigen binding domain.

[0281] In this embodiment, one monomer comprises a first heavy chain comprising a first variable heavy domain, a CH1 domain (and optional hinge) and Fc domain, with a scFv comprising a scFv variable light domain, an scFv linker and a scFv variable heavy domain. The scFv is covalently attached between the C-terminus of the CH1 domain of the heavy constant domain and the N-terminus of the first Fc domain using optional domain linkers (vh1-CH1-[optional linker]-vh2-scFv linker-v12-[optional linker including the hinge]-CH2-CH3, or the opposite orientation for the scFv, vh1-CH1-[optional linker]-v12-scFv linker-vh2-[optional linker including the hinge]-CH2-CH3). The other monomer is a standard Fab side. This embodiment further utilizes a common light chain comprising a variable light domain and a constant light domain, which associates with the heavy chains to form two identical Fabs that bind a checkpoint inhibitor. As for many of the embodiments herein, these constructs include skew variants, pI variants, ablation variants, additional Fc variants, etc. as desired and described herein. In this embodiment, suitable Fv pairs include (Fabs listed first, scFvs second) PD-1 and CTLA-4, CTLA-4 and PD-1, PD-1 and TIM-3, TIM-3 and PD-1, PD-1 and LAG-3, LAG-3×PD1, PD-1 and TIGIT, TIGIT and PD-1, PD-1 and BTLA, BTLA and PD-1, CTLA-4 and TIM-3, TIM-3 and CTLA-4, CTLA-4 and LAG-3, LAG-3 and CTLA-4, CTLA-4 and TIGIT, TIGIT and CTLA-4, CTLA-4 and BTLA, BTLA and CTLA-4, TIM-3 and LAG-3, LAG-3 and TIM-3, TIM-3 and TIGIT, TIGIT and TIM-3, TIM-3 and BTLA, BTLA and TIM-3. LAG-3 and TIGIT, TIGIT and LAG-3, LAG-3 and BTLA, BTLA and LAG-3, BTLA and TIGIT, and TIGIT and BTLA.

[0282] The ABD sequences for these combinations can be as disclosed in the sequence listing or as shown in FIGS. 9 to 13, and in any combination as shown in FIG. 39 and FIG. 40.

[0283] In addition, the Fc domains of the central scFv format generally comprise skew variants (e.g. a set of amino acid substitutions as shown in FIG. 3 and FIG. 8, with particularly useful skew variants being selected from the group consisting of S364K/E357Q:L368D/K370S; L368D/K370S:S364K; L368E/K370S:S364K; T411T/E360E/Q362E:D401K; L368D/K370S:S364K/E357L, K370S:S364K/E357Q, T366S/L368A/Y407V:T366W and T366S/L368A/Y407V/Y349C:T366W/S354C), optionally ablation variants (including those shown in FIG. 5), optionally charged scFv linkers (including those shown in FIG. 7) and the heavy chain comprises pI variants (including those shown in FIG. 4).

[0284] In some embodiments, the central scFv format includes skew variants, pI variants, and ablation variants. Accordingly, some embodiments include bottle opener formats that comprise: a) a first monomer that comprises the skew variants S364K/E357Q, the ablation variants E233P/L234V/L235A/G236del/S267K, and a first variable heavy domain that, with the first variable light domain of the light chain, makes up an Fv that binds to a first checkpoint inhibitor, and a second variable heavy domain; b) a second monomer that comprises the skew variants L368D/K370S, the pI variants N208D/Q295E/N384D/Q418E/N421D, the ablation variants E233P/L234V/L235A/G236del/S267K, and a first variable heavy domain that, with the first variable light domain, makes up the Fv that binds to the first checkpoint inhibitor as outlined herein, and a second variable light chain, that together with the second variable heavy chain forms an Fv (ABD) that binds a second checkpoint inhibitors; and c) a light chain comprising a first variable light domain and a constant light domain. In this embodiment, suitable Fv pairs include (Fabs listed first, scFvs second) CTLA-4×PD-1, PD-1×CTLA-4, LAG-3×PD-1, BTLA×PD-1, and LAG-3×CTLA-4.

[0285] In some embodiments, the central scFv format includes skew variants, pI variants, ablation variants and FcRn variants. Accordingly, some embodiments include bottle opener formats that comprise: a) a first monomer that comprises the skew variants S364K/E357Q, the ablation variants E233P/L234V/L235A/G236del/S267K, the FcRn variants M428L/N434S and a first variable heavy domain that, with the first variable light domain of the light chain, makes up an Fv that binds to a first checkpoint inhibitor, and a second variable heavy domain; b) a second monomer that comprises the skew variants L368D/K370S, the pI variants N208D/Q295E/N384D/Q418E/N421D, the ablation variants E233P/L234V/L235A/G236del/S267K, the FcRn variants M428L/N434S and a first variable heavy domain that, with the first variable light domain, makes up the Fv that binds to the first checkpoint inhibitor as outlined herein, and a second variable light chain, that together with the second variable heavy chain forms an Fv (ABD) that binds a second checkpoint inhibitors; and c) a light chain comprising a first variable light domain and a constant light domain. In this embodiment, suitable Fv pairs include (Fabs listed first, scFvs second) CTLA-4×PD-1, PD-1×CTLA-4, LAG-3×PD-1, BTLA×PD-1, and LAG-3×CTLA-4.

[0286] For central-scFv sequences that are similar to/utilize the bottle opener backbone 1 of FIG. 37 (optionally including M428L/N434S), specific Fv combinations of use in the present invention include CTLA-4 (Fab)×PD-1 (scFv), PD-1 (Fab)×CTLA-4 (scFv), LAG-3 (Fab)×PD-1 (scFv), BTLA (Fab)×PD-1 (scFv) and LAG-3 (Fab)×CTLA-4 (scFv).

[0287] For central-scFv sequences that are similar to/utilize the bottle opener backbone 1 of FIG. 37, (optionally including M428L/N434S), specific ABDs that bind human PD-1 include, but are not limited to, 1G6_H1.279_L1.194, 1G6_H1.280_L1.224; 1G6_L1.194_H1.279, 1G6_L1.210_H1.288 and 2E9_H1L1, as well as those listed in SEQ ID NOs: 6209-11464, SEQ ID NOs: 11465-17134, SEQ ID NOs: 33003-33072, SEQ ID NOs: 33073-35394 and SEQ ID NOs: 36127-36146.

[0288] For central-scFv sequences that are similar to/utilize the bottle opener backbone 1 of FIG. 37 (optionally including M428L/N434S), specific ABDs that bind human CTLA-4 include, but are not limited to, [CTLA-4]_H0.25_L0; [CTLA-4]_H0.26_L0; [CTLA-4]_H0.27_L0; [CTLA-4]_H0.29_L0; [CTLA-4]_H0.38_L0; [CTLA-4]_H0.39_L0; [CTLA-4]_H0.40_L0; [CTLA-4]_H0.70_L0; [CTLA-4]_H0_L0.22; [CTLA-4]_H2_L0; [CTLA-4]_H3.21_L0.124; [CTLA-4]_H3.21_L0.129; [CTLA-4]_H3.21_L0.132; [CTLA-4]_H3.23_L0.124; [CTLA-4]_H3.23_L0.129; [CTLA-4]_H3.23_L0.132; [CTLA-4]_H3.25_L0.124; [CTLA-4]_H3.25_L0.129; [CTLA-4]_H3.25_L0.132; [CTLA-4]_H3.4_L0.118; [CTLA-4]_H3.4_L0.119; [CTLA-4]_H3.4_L0.12; [CTLA-4]_H3.4_L0.121; [CTLA-4]_H3.4_L0.122; [CTLA-4]_H3.4_L0.123; [CTLA-4]_H3.4_L0.124; [CTLA-4]_H3.4_L0.125; [CTLA-4]_H3.4_L0.126; [CTLA-4]_H3.4_L0.127; [CTLA-4]_H3.4_L0.128; [CTLA-4]_H3.4_L0.129; [CTLA-4]_H3.4_L0.130; [CTLA-4]_H3.4_L0.131; [CTLA-4]_H3.4_L0.132; [CTLA-4]_H3.5_L2.1; [CTLA-4]_H3.5_L2.2; [CTLA-4]_H3.5_L2.3; [CTLA-4]_H3_L0; [CTLA-4]_H3_L0.22; [CTLA-4]_H3_L0.44; [CTLA-4]_H3_L0.67 and [CTLA-4]_H3_L0.74, as well as those listed in SEQ ID NOs: 21-2918, SEQ ID NOs: 2919-6208, SEQ ID NOs: 36739-36818 and SEQ ID NOs: 35395-35416.

[0289] For central-scFv sequences that are similar to/utilize the bottle opener backbone 1 of FIG. 37 (optionally including M428L/N434S), specific ABDs that bind human LAG-3 include, but are not limited to, 2A11_H0L0; 2A11_H1.125_L2.113; 2A11_H1.144_L2.142; 2A11_H1_L2.122; 2A11_H1_L2.123; 2A11_H1_L2.124; 2A11_H1_L2.25; 2A11_H1_L2.47; 2A11_H1_L2.50; 2A11_H1_L2.91; 2A11_H1_L2.93; 2A11_H1_L2.97; 2A11_H1L1; 2A11_H1L2; 2A11_H2L2; 2A11_H3L1; 2A11_H3L2; 2A11_H4L1; 2A11_H4L2; 7G8_H0L0; 7G8_H1L1; 7G8_H3.18 L1.11; 7G8_H3.23_L1.11; 7G8_H3.28_L1; 7G8_H3.28_L1.11; 7G8_H3.28_L1.13; 7G8_H3.30_L1.34; 7G8_H3.30_L1.34; and 7G8_H3L1, as well as those listed in SEQ ID NOs: 17135-20764, SEQ ID NOs: 36819-36962, SEQ ID NOs: 35417-35606, SEQ ID NOs: 25194-32793 and SEQ ID NOs: 32794-33002.

[0290] For central-scFv sequences that are similar to/utilize the bottle opener backbone 1 of FIG. 37 (optionally including M428L/N434S), specific ABDs that bind human BTLA include, but are not limited to, 9C6_H0L0; 9C6_H1.1_L1; and 9C6_H1.11_L1, as well as those listed in SEQ ID NOs: 20885-21503 and SEQ ID NOs: 36707-36738.

[0291] For central-scFv sequences that are similar to/utilize the bottle opener backbone 1 of FIG. 37 (optionally including M428L/N434S), specific ABDs that bind human TIM-3 include, but are not limited to, 1D10_H0L0; 1D12_H0L0; 3H3_H1_L2.1; 6C8_H0L0; 6D9_H0_1D12_L0; 7A9_H0L0; 7B11_H0L0; 7B11var_H0L0 and 7C2_H0L0, as well as those listed in SEQ ID NOs: 20765-20884, SEQ ID NOs: 37587-37698 and SEQ ID NOs: 36347-36706.

### E. Central-Fv Format

[0292] One heterodimeric scaffold that finds particular use in the present invention is the Central-Fv format shown in FIG. 1G. In this embodiment, the format relies on the use of an inserted scFv domain thus forming a third antigen binding domain, wherein the Fab portions of the two monomers bind one checkpoint target and the “extra” scFv domain binds another. The scFv domain is inserted between the Fc domain and the CH1-Fv region of the monomers, thus providing a third antigen binding domain, wherein each monomer contains a component of the scFv (e.g. one monomer comprises a variable heavy domain and the other a variable light domain).

[0293] In this embodiment, one monomer comprises a first heavy chain comprising a first variable heavy domain, a CH1 domain, and Fc domain and an additional variable light domain. The light domain is covalently attached between the C-terminus of the CH1 domain of the heavy constant domain and the N-terminus of the first Fc domain using domain linkers (vhf-CH1-[optional linker]-v12-hinge-CH2-CH3). The other monomer comprises a first heavy chain comprising a first variable heavy domain, a CH1 domain and Fc domain and an additional variable heavy domain (vh1-CH1-[optional linker]-vh2-hinge-CH2-CH3). The light domain is covalently attached between the C-terminus of the CH1 domain of the heavy constant domain and the N-terminus of the first Fc domain using domain linkers. This embodiment further utilizes a common light chain comprising a variable light domain and a constant light domain, that associates with the heavy chains to form two identical Fabs that bind a TTA. As for many of the embodiments herein, these constructs include skew variants, pI variants, ablation variants, additional Fc variants, etc. as desired and described herein. In this embodiment, suitable Fv pairs include (Fabs listed first, scFvs second) PD-1 and CTLA-4, CTLA-4 and PD-1, PD-1 and TIM-3, TIM-3 and PD-1, PD-1 and LAG-3, LAG-3×PD1, PD-1 and TIGIT, TIGIT and PD-1, PD-1 and BTLA, BTLA and PD-1, CTLA-4 and TIM-3, TIM-3 and CTLA-4, CTLA-4 and LAG-3, LAG-3 and CTLA-4, CTLA-4 and TIGIT, TIGIT and CTLA-4, CTLA-4 and BTLA, BTLA and CTLA-4, TIM-3 and LAG-3, LAG-3 and TIM-3, TIM-3 and TIGIT, TIGIT and TIM-3, TIM-3 and BTLA, BTLA and TIM-3. LAG-3 and TIGIT, TIGIT and LAG-3, LAG-3 and BTLA, BTLA and LAG-3, BTLA and TIGIT, and TIGIT and BTLA.

[0294] The ABD sequences for these combinations can be as disclosed in the sequence listing or as shown in FIGS. 9 to 13, and in any combination as shown in FIG. 39 and FIG. 40.

[0295] In central-scFv formats, specific Fv combinations of use in the present invention include CTLA-4 (Fab)×PD-1 (scFv), PD-1 (Fab)×CTLA-4 (scFv), LAG-3 (Fab)×PD-1 (scFv), BTLA (Fab)×PD-1 (scFv) and LAG-3 (Fab)×CTLA-4 (scFv).

[0296] In central-scFv formats, specific ABDs that bind human PD-1 include, but are not limited to, 1G6_H1.279_L1.194, 1G6_H1.280_L1.224; 1G6_L1.194_H1.279, 1G6_L1.210_H1.288 and 2E9_H1L1, as well as those listed in SEQ ID NOs: 6209-11464, SEQ ID NOs: 11465-17134, SEQ ID NOs: 33003-33072, SEQ ID NOs: 33073-35394 and SEQ ID NOs: 36127-36146.

[0297] In central-scFv formats, specific ABDs that bind human CTLA-4 include, but are not limited to, [CTLA-4]_H0.25_L0; [CTLA-4]_H0.26_L0; [CTLA-4]_H0.27_L0; [CTLA-4]_H0.29_L0; [CTLA-4]_H0.38_L0; [CTLA-4]_H0.39_L0; [CTLA-4]_H0.40_L0; [CTLA-4]_H0.70_L0; [CTLA-4]_H0_L0.22; [CTLA-4]_H2_L0; [CTLA-4]_H3.21_L0.124; [CTLA-4]_H3.21_L0.129; [CTLA-4]_H3.21_L0.132; [CTLA-4]_H3.23_L0.124; [CTLA-4]_H3.23_L0.129; [CTLA-4]_H3.23_L0.132; [CTLA-4]_H3.25_L0.124; [CTLA-4]_H3.25_L0.129; [CTLA-4]_H3.25_L0.132; [CTLA-4]_H3.4_L0.118; [CTLA-4]_H3.4_L0.119; [CTLA-4]_H3.4_L0.12; [CTLA-4]_H3.4_L0.121; [CTLA-4]_H3.4_L0.122; [CTLA-4]_H3.4_L0.123; [CTLA-4]_H3.4_L0.124; [CTLA-4]_H3.4_L0.125; [CTLA-4]_H3.4_L0.126; [CTLA-4]_H3.4_L0.127; [CTLA-4]_H3.4_L0.128; [CTLA-4]_H3.4_L0.129; [CTLA-4]_H3.4_L0.130; [CTLA-4]_H3.4_L0.131; [CTLA-4]_H3.4_L0.132; [CTLA-4]_H3.5_L2.1; [CTLA-4]_H3.5_L2.2; [CTLA-4]_H3.5_L2.3; [CTLA-4]_H3_L0; [CTLA-4]_H3_L0.22; [CTLA-4]_H3_L0.44; [CTLA-4]_H3_L0.67 and [CTLA-4]_H3_L0.74, as well as those listed in SEQ ID NOs: 21-2918, SEQ ID NOs: 2919-6208, SEQ ID NOs: 36739-36818 and SEQ ID NOs: 35395-35416.

[0298] In central-scFv formats, specific ABDs that bind human LAG-3 include, but are not limited to, 2A11_H0L0; 2A11_H1.125_L2.113; 2A11_H1.144_L2.142; 2A11_H1_L2.122; 2A11_H1_L2.123; 2A11_H1_L2.124; 2A11_H1_L2.25; 2A11_H1_L2.47; 2A11_H1_L2.50; 2A11_H1_L2.91; 2A11_H1_L2.93; 2A11_H1_L2.97; 2A11_H1L1; 2A11_H1L2; 2A11_H2L2; 2A11_H3L1; 2A11_H3L2; 2A11_H4L1; 2A11_H4L2; 7G8_H0L0; 7G8_H1L1; 7G8_H3.18_L1.11; 7G8_H3.23_L1.11; 7G8_H3.28_L1; 7G8_H3.28_L1.11; 7G8_H3.28_L113; 7G8_H3.30_L1.34; 7G8_H3.30_L1.34; and 7G8_H3L1, as well as those listed in SEQ ID NOs: 17135-20764, SEQ ID NOs: 36819-36962, SEQ ID NOs: 35417-35606, SEQ ID NOs: 25194-32793 and SEQ ID NOs: 32794-33002.

[0299] In central-scFv formats, specific ABDs that bind human BTLA include, but are not limited to, 9C6_H0L0; 9C6_H1.1_L1; and 9C6_H1.11_L1, as well as those listed in SEQ ID NOs: 20885-21503 and SEQ ID NOs: 36707-36738.

[0300] In central-scFv formats, specific ABDs that bind human TIM-3 include, but are not limited to, 1D10_H0L0; 1D12_H0L0; 3H3_H1_L2.1; 6C8_H0L0; 6D9_H0_1D12_L0; 7A9_H0L0; 7B11_H0L0; 7B11var_H0L0 and 7C2_H0L0, as well as those listed in SEQ ID NOs: 20765-20884, SEQ ID NOs: 37587-37698 and SEQ ID NOs: 36347-36706.

### F. One Armed Central-scFv

[0301] One heterodimeric scaffold that finds particular use in the present invention is the one armed central-scFv format shown in FIG. 1C. In this embodiment, one monomer comprises just an Fc domain, while the other monomer uses an inserted scFv domain thus forming the second antigen binding domain. In this format, either the Fab portion binds one checkpoint target and the scFv binds another. The scFv domain is inserted between the Fc domain and the CH1-Fv region of one of the monomers.

[0302] In this embodiment, one monomer comprises a first heavy chain comprising a first variable heavy domain, a CH1 domain and Fc domain, with a scFv comprising a scFv variable light domain, an scFv linker and a scFv variable heavy domain. The scFv is covalently attached between the C-terminus of the CH1 domain of the heavy constant domain and the N-terminus of the first Fc domain using domain linkers. The second monomer comprises an Fc domain. This embodiment further utilizes a light chain comprising a variable light domain and a constant light domain, that associates with the heavy chain to form a Fab. As for many of the embodiments herein, these constructs include skew variants, pI variants, ablation variants, additional Fc variants, etc. as desired and described herein. In this embodiment, suitable Fv pairs include (Fabs listed first, scFvs second) PD-1 and CTLA-4, CTLA-4 and PD-1, PD-1 and TIM-3, TIM-3 and PD-1, PD-1 and LAG-3, LAG-3×PD1, PD-1 and TIGIT, TIGIT and PD-1, PD-1 and BTLA, BTLA and PD-1, CTLA-4 and TIM-3, TIM-3 and CTLA-4, CTLA-4 and LAG-3, LAG-3 and CTLA-4, CTLA-4 and TIGIT, TIGIT and CTLA-4, CTLA-4 and BTLA, BTLA and CTLA-4, TIM-3 and LAG-3, LAG-3 and TIM-3, TIM-3 and TIGIT, TIGIT and TIM-3, TIM-3 and BTLA, BTLA and TIM-3. LAG-3 and TIGIT, TIGIT and LAG-3, LAG-3 and BTLA, BTLA and LAG-3, BTLA and TIGIT, and TIGIT and BTLA.

[0303] The ABD sequences for these combinations can be as disclosed in the sequence listing or as shown in FIGS. 9 to 13, and in any combination as shown in FIG. 39 and FIG. 40.

[0304] In addition, the Fc domains of the one armed central-scFv format generally comprise skew variants (e.g. a set of amino acid substitutions as shown in FIG. 3 and FIG. 8, with particularly useful skew variants being selected from the group consisting of S364K/E357Q:L368D/K370S; L368D/K370S:S364K; L368E/K370S:S364K; T411T/E360E/Q362E:D401K; L368D/K370S:S364K/E357L, K370S:S364K/E357Q, T366S/L368A/Y407V:T366W and T366S/L368A/Y407V/Y349C:T366W/S354C), optionally ablation variants (including those shown in FIG. 5), optionally charged scFv linkers (including those shown in FIG. 7) and the heavy chain comprises pI variants (including those shown in FIG. 4).

[0305] In some embodiments, the one armed central-scFv format includes skew variants, pI variants, and ablation variants. Accordingly, some embodiments include bottle opener formats that comprise: a) a first monomer that comprises the skew variants S364K/E357Q, the ablation variants E233P/L234V/L235A/G236del/S267K, and a first variable heavy domain that, with the first variable light domain of the light chain, makes up an Fv that binds to a first checkpoint inhibitor, and a second variable heavy domain; b) a second monomer that comprises the skew variants L368D/K370S, the pI variants N208D/Q295E/N384D/Q418E/N421D, the ablation variants E233P/L234V/L235A/G236del/S267K, and a first variable heavy domain that, with the first variable light domain, makes up the Fv that binds to the first checkpoint inhibitor as outlined herein, and a second variable light chain, that together with the second variable heavy chain forms an Fv (ABD) that binds a second checkpoint inhibitors; and c) a light chain comprising a first variable light domain and a constant light domain. In this embodiment, suitable Fv pairs include (Fabs listed first, scFvs second) CTLA-4×PD-1, PD-1×CTLA-4, LAG-3×PD-1, BTLA×PD-1, and LAG-3×CTLA-4.

[0306] In some embodiments, the one armed central-scFv format includes skew variants, pI variants, ablation variants and FcRn variants. Accordingly, some embodiments include bottle opener formats that comprise: a) a first monomer that comprises the skew variants S364K/E357Q, the ablation variants E233P/L234V/L235A/G236del/S267K, the FcRn variants M428L/N434S and a first variable heavy domain that, with the first variable light domain of the light chain, makes up an Fv that binds to a first checkpoint inhibitor, and a second variable heavy domain; b) a second monomer that comprises the skew variants L368D/K370S, the pI variants N208D/Q295E/N384D/Q418E/N421D, the ablation variants E233P/L234V/L235A/G236del/S267K, the FcRn variants M428L/N434S and a first variable heavy domain that, with the first variable light domain, makes up the Fv that binds to the first checkpoint inhibitor as outlined herein, and a second variable light chain, that together with the second variable heavy chain forms an Fv (ABD) that binds a second checkpoint inhibitors; and c) a light chain comprising a first variable light domain and a constant light domain. In this embodiment, suitable Fv pairs include (Fabs listed first, scFvs second) CTLA-4×PD-1, PD-1×CTLA-4, LAG-3×PD-1, BTLA×PD-1, and LAG-3×CTLA-4.

[0307] In one armed central-scFv formats, specific ABDs that bind human PD-1 include, but are not limited to, 1G6_H1.279_L1.194, 1G6_H1.280_L1.224; 1G6_L1.194_H1.279, 1G6_L1.210_H1.288 and 2E9_H1L1, as well as those listed in SEQ ID NOs: 6209-11464, SEQ ID NOs: 11465-17134, SEQ ID NOs: 33003-33072, SEQ ID NOs: 33073-35394 and SEQ ID NOs: 36127-36146.

[0308] In one armed central-scFv formats, specific ABDs that bind human CTLA-4 include, but are not limited to, [CTLA-4]_H0.25_L0; [CTLA-4]_H0.26_L0; [CTLA-4]_H0.27_L0; [CTLA-4]_H0.29_L0; [CTLA-4]_H0.38_L0; [CTLA-4]_H0.39_L0; [CTLA-4]_H0.40_L0; [CTLA-4]_H0.70_L0; [CTLA-4]_H0_L0.22; [CTLA-4]_H2_L0; [CTLA-4]_H3.21_L0.124; [CTLA-4]_H3.21_L0.129; [CTLA-4]_H3.21_L0.132; [CTLA-4]_H3.23_L0.124; [CTLA-4]_H3.23_L0.129; [CTLA-4]_H3.23_L0.132; [CTLA-4]_H3.25_L0.124; [CTLA-4]_H3.25_L0.129; [CTLA-4]_H3.25_L0.132; [CTLA-4]_H3.4_L0.118; [CTLA-4]_H3.4_L0.119; [CTLA-4]_H3.4_L0.12; [CTLA-4]_H3.4_L0.121; [CTLA-4]_H3.4_L0.122; [CTLA-4]_H3.4_L0.123; [CTLA-4]_H3.4_L0.124; [CTLA-4]_H3.4_L0.125; [CTLA-4]_H3.4_L0.126; [CTLA-4]_H3.4_L0.127; [CTLA-4]_H3.4_L0.128; [CTLA-4]_H3.4_L0.129; [CTLA-4]_H3.4_L0.130; [CTLA-4]_H3.4_L0.131; [CTLA-4]_H3.4_L0.132; [CTLA-4]_H3.5_L2.1; [CTLA-4]_H3.5_L2.2; [CTLA-4]_H3.5_L2.3; [CTLA-4]_H3_L0; [CTLA-4]_H3_L0.22; [CTLA-4]_H3_L0.44; [CTLA-4]_H3_L0.67 and [CTLA-4]_H3_L0.74, as well as those listed in SEQ ID NOs: 21-2918, SEQ ID NOs: 2919-6208, SEQ ID NOs: 36739-36818 and SEQ ID NOs: 35395-35416.

[0309] In one armed central-scFv formats, specific ABDs that bind human LAG-3 include, but are not limited to, 2A11_H0L0; 2A11_H1.125_L2.113; 2A11_H1.144_L2.142; 2A11_H1_L2.122; 2A11_H1_L2.123; 2A11_H1_L2.124; 2A11_H1_L2.25; 2A11_H1_L2.47; 2A11_H1_L2.50; 2A11_H1_L2.91; 2A11_H1_L2.93; 2A11_H1_L2.97; 2A11_H1L1; 2A11_H1L2; 2A11_H2L2; 2A11_H3L1; 2A11_H3L2; 2A11_H4L1; 2A11_H4L2; 7G8_H0L0; 7G8_H1L1; 7G8_H3.18_L1.11; 7G8_H3.23_L1.11; 7G8_H3.28_L1; 7G8_H3.28_L1.11; 7G8_H3.28_L1.13; 7G8_H3.30_L1.34; 7G8_H3.30_L1.34; and 7G8_H3L1, as well as those listed in SEQ ID NOs: 17135-20764, SEQ ID NOs: 36819-36962, SEQ ID NOs: 35417-35606, SEQ ID NOs: 25194-32793 and SEQ ID NOs: 32794-33002.

[0310] In one armed central-scFv formats, specific ABDs that bind human BTLA include, but are not limited to, 9C6_H0L0; 9C6_H1.1_L1; and 9C6_H1.11_L1, as well as those listed in SEQ ID NOs: 20885-21503 and SEQ ID NOs: 36707-36738.

[0311] In one armed central-scFv formats, specific ABDs that bind human TIM-3 include, but are not limited to, 1D10_H0L0; 1D12_H0L0; 3H3_H1_L2.1; 6C8_H0L0; 6D9_H0_1D12_L0; 7A9_H0L0; 7B11_H0L0; 7B11var_H0L0 and 7C2_H0L0, as well as those listed in SEQ ID NOs: 20765-20884, SEQ ID NOs: 37587-37698 and SEQ ID NOs: 36347-36706.

### G. One Armed scFv-mAb

[0312] One heterodimeric scaffold that finds particular use in the present invention is the one armed scFv-mAb format shown in FIG. 1D. In this embodiment, one monomer comprises just an Fc domain, while the other monomer uses a scFv domain attached at the N-terminus of the heavy chain, generally through the use of a linker: vh-scFv linker-vl-[optional domain linker]-CH1-hinge-CH2-CH3 or (in the opposite orientation) vl-scFv linker-vh-[optional domain linker]-CH1-hinge-CH2-CH3. In this format, either the Fab portion binds one checkpoint target and the scFv binds another. This embodiment further utilizes a light chain comprising a variable light domain and a constant light domain, that associates with the heavy chain to form a Fab. As for many of the embodiments herein, these constructs include skew variants, pI variants, ablation variants, additional Fc variants, etc. as desired and described herein. In this embodiment, suitable Fv pairs include (Fabs listed first, scFvs second) PD-1 and CTLA-4, CTLA-4 and PD-1, PD-1 and TIM-3, TIM-3 and PD-1, PD-1 and LAG-3, LAG-3×PD1, PD-1 and TIGIT, TIGIT and PD-1, PD-1 and BTLA, BTLA and PD-1, CTLA-4 and TIM-3, TIM-3 and CTLA-4, CTLA-4 and LAG-3, LAG-3 and CTLA-4, CTLA-4 and TIGIT, TIGIT and CTLA-4, CTLA-4 and BTLA, BTLA and CTLA-4, TIM-3 and LAG-3, LAG-3 and TIM-3, TIM-3 and TIGIT, TIGIT and TIM-3, TIM-3 and BTLA, BTLA and TIM-3. LAG-3 and TIGIT, TIGIT and LAG-3, LAG-3 and BTLA, BTLA and LAG-3, BTLA and TIGIT, and TIGIT and BTLA.

[0313] The ABD sequences for these combinations can be as disclosed in the sequence listing or as shown in FIGS. 9 to 13, and in any combination as shown in FIG. 39 and FIG. 40.

[0314] In addition, the Fc domains of the comprise skew variants (e.g. a set of amino acid substitutions as shown in FIG. 3 and FIG. 8, with particularly useful skew variants being selected from the group consisting of S364K/E357Q:L368D/K370S; L368D/K370S:S364K; L368E/K370S:S364K; T411T/E360E/Q362E:D401K; L368D/K370S:S364K/E357L, K370S:S364K/E357Q, T366S/L368A/Y407V:T366W and T366S/L368A/Y407V/Y349C:T366W/S354C), optionally ablation variants (including those shown in FIG. 5), optionally charged scFv linkers (including those shown in FIG. 7) and the heavy chain comprises pI variants (including those shown in FIG. 4).

[0315] In some embodiments, the one armed scFv-mAb format includes skew variants, pI variants, and ablation variants. Accordingly, some embodiments include bottle opener formats that comprise: a) a first monomer that comprises the skew variants S364K/E357Q, the ablation variants E233P/L234V/L235A/G236del/S267K, and a first variable heavy domain that, with the first variable light domain of the light chain, makes up an Fv that binds to a first checkpoint inhibitor, and a second variable heavy domain; b) a second monomer that comprises the skew variants L368D/K370S, the pI variants N208D/Q295E/N384D/Q418E/N421D, the ablation variants E233P/L234V/L235A/G236del/S267K, and a first variable heavy domain that, with the first variable light domain, makes up the Fv that binds to the first checkpoint inhibitor as outlined herein, and a second variable light chain, that together with the second variable heavy chain forms an Fv (ABD) that binds a second checkpoint inhibitors; and c) a light chain comprising a first variable light domain and a constant light domain. In this embodiment, suitable Fv pairs include (Fabs listed first, scFvs second) CTLA-4×PD-1, PD-1×CTLA-4, LAG-3×PD-1, BTLA×PD-1, and LAG-3×CTLA-4.

[0316] In some embodiments, the one armed scFv-mAb format includes skew variants, pI variants, ablation variants and FcRn variants. Accordingly, some embodiments include bottle opener formats that comprise: a) a first monomer that comprises the skew variants S364K/E357Q, the ablation variants E233P/L234V/L235A/G236del/S267K, the FcRn variants M428L/N434S and a first variable heavy domain that, with the first variable light domain of the light chain, makes up an Fv that binds to a first checkpoint inhibitor, and a second variable heavy domain; b) a second monomer that comprises the skew variants L368D/K370S, the pI variants N208D/Q295E/N384D/Q418E/N421D, the ablation variants E233P/L234V/L235A/G236del/S267K, the FcRn variants M428L/N434S and a first variable heavy domain that, with the first variable light domain, makes up the Fv that binds to the first checkpoint inhibitor as outlined herein, and a second variable light chain, that together with the second variable heavy chain forms an Fv (ABD) that binds a second checkpoint inhibitors; and c) a light chain comprising a first variable light domain and a constant light domain. In this embodiment, suitable Fv pairs include (Fabs listed first, scFvs second) CTLA-4×PD-1, PD-1×CTLA-4, LAG-3×PD-1, BTLA×PD-1, and LAG-3×CTLA-4.

[0317] In one armed scFv-mAb formats, specific ABDs that bind human PD-1 include, but are not limited to, 1G6_H1.279_L1.194, 1G6_H1.280_L1.224; 1G6_L1.194_H1.279, 1G6_L1.210_H1.288 and 2E9_H1L1, as well as those listed in SEQ ID NOs: 6209-11464, SEQ ID NOs: 11465-17134, SEQ ID NOs: 33003-33072, SEQ ID NOs: 33073-35394 and SEQ ID NOs: 36127-36146.

[0318] In one armed scFv-mAb formats, specific ABDs that bind human CTLA-4 include, but are not limited to, [CTLA-4]_H0.25_L0; [CTLA-4]_H0.26_L0; [CTLA-4]_H0.27_L0; [CTLA-4]_H0.29_L0; [CTLA-4]_H0.38_L0; [CTLA-4]_H0.39_L0; [CTLA-4]_H0.40_L0; [CTLA-4]_H0.70_L0; [CTLA-4]_H0_L0.22; [CTLA-4]_H2_L0; [CTLA-4]_H3.21_L0.124; [CTLA-4]_H3.21_L0.129; [CTLA-4]_H3.21_L0.132; [CTLA-4]_H3.23_L0.124; [CTLA-4]_H3.23_L0.129; [CTLA-4]_H3.23_L0.132; [CTLA-4]_H3.25_L0.124; [CTLA-4]_H3.25_L0.129; [CTLA-4]_H3.25_L0.132; [CTLA-4]_H3.4_L0.118; [CTLA-4]_H3.4_L0.119; [CTLA-4]_H3.4_L0.12; [CTLA-4]_H3.4_L0.121; [CTLA-4]_H3.4_L0.122; [CTLA-4]_H3.4_L0.123; [CTLA-4]_H3.4_L0.124; [CTLA-4]_H3.4_L0.125; [CTLA-4]_H3.4_L0.126; [CTLA-4]_H3.4_L0.127; [CTLA-4]_H3.4_L0.128; [CTLA-4]_H3.4_L0.129; [CTLA-4]_H3.4_L0.130; [CTLA-4]_H3.4_L0.131; [CTLA-4]_H3.4_L0.132; [CTLA-4]_H3.5_L2.1; [CTLA-4]_H3.5_L2.2; [CTLA-4]_H3.5_L2.3; [CTLA-4]_H3_L0; [CTLA-4]_H3_L0.22; [CTLA-4]_H3_L0.44; [CTLA-4]_H3_L0.67 and [CTLA-4]_H3_L0.74, as well as those listed in SEQ ID NOs: 21-2918, SEQ ID NOs: 2919-6208, SEQ ID NOs: 36739-36818 and SEQ ID NOs: 35395-35416.

[0319] In one armed scFv-mAb formats, specific ABDs that bind human LAG-3 include, but are not limited to, 2A11_H0L0; 2A11_H1.125_L2.113; 2A11_H1.144_L2.142; 2A11_H1_L2.122; 2A11_H1_L2.123; 2A11_H1_L2.124; 2A11_H1_L2.25; 2A11_H1_L2.47; 2A11_H1_L2.50; 2A11_H1_L2.91; 2A11_H1_L2.93; 2A11_H1_L2.97; 2A11_H1L1; 2A11_H1L2; 2A11_H2L2; 2A11_H3L1; 2A11_H3L2; 2A11_H4L1; 2A11_H4L2; 7G8_H0L0; 7G8_H1L1; 7G8_H3.18_L1.11; 7G8_H3.23_L1.11; 7G8_H3.28_L1; 7G8_H3.28_L1.11; 7G8_H3.28_L1.13; 7G8_H3.30_L1.34; 7G8_H3.30_L1.34; and 7G8_H3L1, as well as those listed in SEQ ID NOs: 17135-20764, SEQ ID NOs: 36819-36962, SEQ ID NOs: 35417-35606, SEQ ID NOs: 25194-32793 and SEQ ID NOs: 32794-33002.

[0320] In one armed scFv-mAb formats, specific ABDs that bind human BTLA include, but are not limited to, 9C6_H0L0; 9C6_H1.1_L1; and 9C6_H1.11_L1, as well as those listed in SEQ ID NOs: 20885-21503 and SEQ ID NOs: 36707-36738.

[0321] In one armed scFv-mAb formats, specific ABDs that bind human TIM-3 include, but are not limited to, 1D10_H0L0; 1D12_H0L0; 3H3_H1_L2.1; 6C8_H0L0; 6D9_H0_1D12_L0; 7A9_H0L0; 7B11_H0L0; 7B11var_H0L0 and 7C2_H0L0, as well as those listed in SEQ ID NOs: 20765-20884, SEQ ID NOs: 37587-37698 and SEQ ID NOs: 36347-36706.

### H. scFv-mAb Format

[0322] One heterodimeric scaffold that finds particular use in the present invention is the mAb-scFv format shown in FIG. 1E. In this embodiment, the format relies on the use of a N-terminal attachment of a scFv to one of the monomers, thus forming a third antigen binding domain, wherein the Fab portions of the two monomers bind one checkpoint target and the “extra” scFv domain binds a different checkpoint target.

[0323] In this embodiment, the first monomer comprises a first heavy chain (comprising a variable heavy domain and a constant domain), with a N-terminally covalently attached scFv comprising a scFv variable light domain, an scFv linker and a scFv variable heavy domain in either orientation ((vh1-scFv linker-vl1-[optional domain linker]-vh2-CH1-hinge-CH2-CH3) or (with the scFv in the opposite orientation) ((vl1-scFv linker-vh1-[optional domain linker]-vh2-CH1-hinge-CH2-CH3)). This embodiment further utilizes a common light chain comprising a variable light domain and a constant light domain, that associates with the heavy chains to form two identical Fabs that bind one of the target antigens. As for many of the embodiments herein, these constructs include skew variants, pI variants, ablation variants, additional Fc variants, etc. as desired and described herein. In this embodiment, suitable Fv pairs include (Fabs listed first, scFvs second) PD-1 and CTLA-4, CTLA-4 and PD-1, PD-1 and TIM-3, TIM-3 and PD-1, PD-1 and LAG-3, LAG-3×PD1, PD-1 and TIGIT, TIGIT and PD-1, PD-1 and BTLA, BTLA and PD-1, CTLA-4 and TIM-3, TIM-3 and CTLA-4, CTLA-4 and LAG-3, LAG-3 and CTLA-4, CTLA-4 and TIGIT, TIGIT and CTLA-4, CTLA-4 and BTLA, BTLA and CTLA-4, TIM-3 and LAG-3, LAG-3 and TIM-3, TIM-3 and TIGIT, TIGIT and TIM-3, TIM-3 and BTLA, BTLA and TIM-3. LAG-3 and TIGIT, TIGIT and LAG-3, LAG-3 and BTLA, BTLA and LAG-3, BTLA and TIGIT, and TIGIT and BTLA.

[0324] The ABD sequences for these combinations can be as disclosed in the sequence listing or as shown in FIGS. 9 to 13, and in any combination as shown in FIG. 39 and FIG. 40.

[0325] In addition, the Fc domains of the scFv-mAb format comprise skew variants (e.g. a set of amino acid substitutions as shown in FIG. 3 and FIG. 8, with particularly useful skew variants being selected from the group consisting of S364K/E357Q:L368D/K370S; L368D/K370S:S364K; L368E/K370S:S364K; T411T/E360E/Q362E:D401K; L368D/K370S:S364K/E357L, K370S:S364K/E357Q, T366S/L368A/Y407V:T366W and T366S/L368A/Y407V/Y349C:T366W/S354C), optionally ablation variants (including those shown in FIG. 5), optionally charged scFv linkers (including those shown in FIG. 7) and the heavy chain comprises pI variants (including those shown in FIG. 4).

[0326] In some embodiments, the mAb-scFv format includes skew variants, pI variants, and ablation variants. Accordingly, some embodiments include bottle opener formats that comprise: a) a first monomer that comprises the skew variants S364K/E357Q, the ablation variants E233P/L234V/L235A/G236del/S267K, and a first variable heavy domain that, with the first variable light domain of the light chain, makes up an Fv that binds to a first checkpoint inhibitor, and a second variable heavy domain; b) a second monomer that comprises the skew variants L368D/K370S, the pI variants N208D/Q295E/N384D/Q418E/N421D, the ablation variants E233P/L234V/L235A/G236del/S267K, and a first variable heavy domain that, with the first variable light domain, makes up the Fv that binds to the first checkpoint inhibitor as outlined herein, and a second variable light chain, that together with the second variable heavy chain forms an Fv (ABD) that binds a second checkpoint inhibitors; and c) a light chain comprising a first variable light domain and a constant light domain. Of particular use in some embodiments in this format, are (Fab-scFv order) CTLA-4×PD-1, LAG-3×PD-1, BTLA×PD-1, and LAG-3×CTLA-4.

[0327] In some embodiments, the mAb-scFv format includes skew variants, pI variants, ablation variants and FcRn variants. Accordingly, some embodiments include bottle opener formats that comprise: a) a first monomer that comprises the skew variants S364K/E357Q, the ablation variants E233P/L234V/L235A/G236del/S267K, the FcRn variants M428L/N434S and a first variable heavy domain that, with the first variable light domain of the light chain, makes up an Fv that binds to a first checkpoint inhibitor, and a second variable heavy domain; b) a second monomer that comprises the skew variants L368D/K370S, the pI variants N208D/Q295E/N384D/Q418E/N421D, the ablation variants E233P/L234V/L235A/G236del/S267K, the FcRn variants M428L/N434S and a first variable heavy domain that, with the first variable light domain, makes up the Fv that binds to the first checkpoint inhibitor as outlined herein, and a second variable light chain, that together with the second variable heavy chain forms an Fv (ABD) that binds a second checkpoint inhibitors; and c) a light chain comprising a first variable light domain and a constant light domain. Of particular use in some embodiments in this format, are (Fab-scFv order) CTLA-4×PD-1, LAG-3×PD-1, BTLA×PD-1, and LAG-3×CTLA-4.

[0328] For the mAb-scFv format backbone 1 (optionally including M428L/N434S) from FIG. 38, specific ABDs that bind human PD-1 include, but are not limited to, 1G6_H1.279_L1.194, 1G6_H1.280_L1.224; 1G6_L1.194_H1.279, 1G6_L1.210_H1.288 and 2E9_H1L1, as well as those listed in SEQ ID NOs: 6209-11464, SEQ ID NOs: 11465-17134, SEQ ID NOs: 33003-33072, SEQ ID NOs: 33073-35394 and SEQ ID NOs: 36127-36146.

[0329] For the mAb-scFv format backbone 1 (optionally including M428L/N434S) from FIG. 38, specific ABDs that bind human CTLA-4 include, but are not limited to, [CTLA-4]_H0.25_L0; [CTLA-4]_H0.26_L0; [CTLA-4]_H0.27_L0; [CTLA-4]_H0.29_L0; [CTLA-4]_H0.38_L0; [CTLA-4]_H0.39_L0; [CTLA-4]_H0.40_L0; [CTLA-4]_H0.70_L0; [CTLA-4]_H0_L0.22; [CTLA-4]_H2_L0; [CTLA-4]_H3.21_L0.124; [CTLA-4]_H3.21_L0.129; [CTLA-4]_H3.21_L0.132; [CTLA-4]_H3.23_L0.124; [CTLA-4]_H3.23_L0.129; [CTLA-4]_H3.23_L0.132; [CTLA-4]_H3.25_L0.124; [CTLA-4]_H3.25_L0.129; [CTLA-4]_H3.25_L0.132; [CTLA-4]_H3.4_L0.118; [CTLA-4]_H3.4_L0.119; [CTLA-4]_H3.4_L0.12; [CTLA-4]_H3.4_L0.121; [CTLA-4]_H3.4_L0.122; [CTLA-4]_H3.4_L0.123; [CTLA-4]_H3.4_L0.124; [CTLA-4]_H3.4_L0.125; [CTLA-4]_H3.4_L0.126; [CTLA-4]_H3.4_L0.127; [CTLA-4]_H3.4_L0.128; [CTLA-4]_H3.4_L0.129; [CTLA-4]_H3.4_L0.130; [CTLA-4]_H3.4_L0.131; [CTLA-4]_H3.4_L0.132; [CTLA-4]_H3.5_L2.1; [CTLA-4]_H3.5_L2.2; [CTLA-4]_H3.5_L2.3; [CTLA-4]_H3_L0; [CTLA-4]_H3_L0.22; [CTLA-4]_H3_L0.44; [CTLA-4]_H3_L0.67 and [CTLA-4]_H3_L0.74, as well as those listed in SEQ ID NOs: 21-2918, SEQ ID NOs: 2919-6208, SEQ ID NOs: 36739-36818 and SEQ ID NOs: 35395-35416.

[0330] For the mAb-scFv format backbone 1 (optionally including M428L/N434S) from FIG. 38, specific ABDs that bind human LAG-3 include, but are not limited to, 2A11_H0L0; 2A11_H1.125_L2.113; 2A11_H1.144_L2.142; 2A11_H1_L2.122; 2A11_H1_L2.123; 2A11_H1_L2.124; 2A11_H1_L2.25; 2A11_H1_L2.47; 2A11_H1_L2.50; 2A11_H1_L2.91; 2A11_H1_L2.93; 2A11_H1_L2.97; 2A11_H1L1; 2A11_H1L2; 2A11_H2L2; 2A11_H3L1; 2A11_H3L2; 2A11_H4L1; 2A11_H4L2; 7G8_H0L0; 7G8_H1L1; 7G8_H3.18_L1.11; 7G8_H3.23_L1.11; 7G8_H3.28_L1; 7G8_H3.28_L1.11; 7G8_H3.28_L1.13; 7G8_H3.30_L1.34; 7G8_H3.30_L1.34; and 7G8_H3L1, as well as those listed in SEQ ID NOs: 17135-20764, SEQ ID NOs: 36819-36962, SEQ ID NOs: 35417-35606, SEQ ID NOs: 25194-32793 and SEQ ID NOs: 32794-33002.

[0331] For the mAb-scFv format backbone 1 (optionally including M428L/N434S) from FIG. 38, specific ABDs that bind human BTLA include, but are not limited to, 9C6_H0L0; 9C6_H1.1_L1; and 9C6_H1.11_L1, as well as those listed in SEQ ID NOs: 20885-21503 and SEQ ID NOs: 36707-36738.

[0332] For the mAb-scFv format backbone 1 (optionally including M428L/N434S) from FIG. 38, specific ABDs that bind human TIM-3 include, but are not limited to, 1D10_H0L0; 1D12_H0L0; 3H3_H1_L2.1; 6C8_H0L0; 6D9_H0_1D12_L0; 7A9_H0L0; 7B11_H0L0; 7B11var_H0L0 and 7C2_H0L0, as well as those listed in SEQ ID NOs: 20765-20884, SEQ ID NOs: 37587-37698 and SEQ ID NOs: 36347-36706.

### I. Dual scFv Formats

[0333] The present invention also provides dual scFv formats as are known in the art and shown in FIG. 1B. In this embodiment, the heterodimeric bispecific antibody is made up of two scFv-Fc monomers (both in either (vh-scFv linker-vl-[optional domain linker]-CH2-CH3) format or (vl-scFv linker-vh-[optional domain linker]-CH2-CH3) format, or with one monomer in one orientation and the other in the other orientation.

[0334] In this case, all ABDs are in the scFv format, with any combination of PD-1 and CTLA-4, PD-1 and TIM-3, PD-1 and LAG-3, PD-1 and TIGIT, PD-1 and BTLA, CTLA-4 and TIM-3, CTLA-4 and LAG-3, CTLA-4 and TIGIT, CTLA-4 and BTLA, TIM-3 and LAG-3, TIM-3 and TIGIT, TIM-3 and BTLA, LAG-3 and TIGIT, LAG-3 and BTLA and TIGIT and BTLA being useful. The ABD sequences for these combinations can be as disclosed in the sequence listing or as shown in FIGS. 9 to 13, and in any combination as shown in FIG. 39 and FIG. 40.

[0335] In addition, the Fc domains of the dual scFv format comprise skew variants (e.g. a set of amino acid substitutions as shown in FIG. 3 and FIG. 8, with particularly useful skew variants being selected from the group consisting of S364K/E357Q:L368D/K370S; L368D/K370S:S364K; L368E/K370S:S364K; T411T/E360E/Q362E:D401K; L368D/K370S:S364K/E357L, K370S:S364K/E357Q, T366S/L368A/Y407V:T366W and T366S/L368A/Y407V/Y349C:T366W/S354C), optionally ablation variants (including those shown in FIG. 5), optionally charged scFv linkers (including those shown in FIG. 7) and the heavy chain comprises pI variants (including those shown in FIG. 4).

[0336] In some embodiments, the dual scFv format includes skew variants, pI variants, and ablation variants. Accordingly, some embodiments include bottle opener formats that comprise: a) a first monomer that comprises the skew variants S364K/E357Q, the ablation variants E233P/L234V/L235A/G236del/S267K, and a first variable heavy domain that, with the first variable light domain of the light chain, makes up an Fv that binds to a first checkpoint inhibitor, and a second variable heavy domain; b) a second monomer that comprises the skew variants L368D/K370S, the pI variants N208D/Q295E/N384D/Q418E/N421D, the ablation variants E233P/L234V/L235A/G236del/S267K, and a first variable heavy domain that, with the first variable light domain, makes up the Fv that binds to the first checkpoint inhibitor as outlined herein, and a second variable light chain, that together with the second variable heavy chain forms an Fv (ABD) that binds a second checkpoint inhibitors; and c) a light chain comprising a first variable light domain and a constant light domain. Of particular use in some embodiments in this format, are (Fab-scFv order) CTLA-4×PD-1, LAG-3×PD-1, BTLA×PD-1, and LAG-3×CTLA-4.

[0337] In some embodiments, the dual scFv format includes skew variants, pI variants, ablation variants and FcRn variants. Accordingly, some embodiments include bottle opener formats that comprise: a) a first monomer that comprises the skew variants S364K/E357Q, the ablation variants E233P/L234V/L235A/G236del/S267K, the FcRn variants M428L/N434S and a first variable heavy domain that, with the first variable light domain of the light chain, makes up an Fv that binds to a first checkpoint inhibitor, and a second variable heavy domain; b) a second monomer that comprises the skew variants L368D/K370S, the pI variants N208D/Q295E/N384D/Q418E/N421D, the ablation variants E233P/L234V/L235A/G236del/S267K, the FcRn variants M428L/N434S and a first variable heavy domain that, with the first variable light domain, makes up the Fv that binds to the first checkpoint inhibitor as outlined herein, and a second variable light chain, that together with the second variable heavy chain forms an Fv (ABD) that binds a second checkpoint inhibitors; and c) a light chain comprising a first variable light domain and a constant light domain. Of particular use in some embodiments in this format, are (Fab-scFv order) CTLA-4×PD-1, LAG-3×PD-1, BTLA×PD-1, and LAG-3×CTLA-4.

### J. Non-Heterodimeric Bispecific Antibodies

[0338] As will be appreciated by those in the art, the Fv sequences outlined herein can also be used in both monospecific antibodies (e.g. “traditional monoclonal antibodies”) or non-heterodimeric bi specific formats.

[0339] Suitable non-heterodimeric bispecific formats are known in the art, and include a number of different formats as generally depicted in Spiess et al., Molecular Immunology (67):95-106 (2015) and Kontermann, mAbs 4:2, 182-197 (2012), both of which are expressly incorporated by reference and in particular for the figures, legends and citations to the formats therein.

### K. Monospecific, Monoclonal Antibodies

[0340] As will be appreciated by those in the art, the novel Fv sequences outlined herein can also be used in both monospecific antibodies (e.g. “traditional monoclonal antibodies”) or non-heterodimeric bispecific formats. Accordingly, the present invention provides monoclonal (monospecific) antibodies comprising the 6 CDRs and/or the vh and vl sequences from the figures, generally with IgG1, IgG2, IgG3 or IgG4 constant regions, with IgG1, IgG2 and IgG4 (including IgG4 constant regions comprising a S228P amino acid substitution) finding particular use in some embodiments. That is, any sequence herein with a “H_L” designation can be linked to the constant region of a human IgG1 antibody.

### VI. ANTIGEN BINDING DOMAINS TO TARGET ANTIGENS

[0341] The bispecific antibodies of the invention have two different antigen binding domains (ABDs) that bind to two different target checkpoint antigens (“target pairs”), in either bivalent, bispecific formats or trivalent, bispecific formats as generally shown in FIG. 1. Suitable target checkpoint antigens include human (and sometimes cyno) PD-1, CTLA-4, TIM-3, LAG-3, TIGIT and BTLA, the sequences of which are shown in FIG. 2. Accordingly, suitable bispecific antibodies bind PD-1 and CTLA-4, PD-1 and TIM-3, PD-1 and LAG-3, PD-1 and TIGIT, PD-1 and BTLA, CTLA-4 and TIM-3, CTLA-4 and LAG-3, CTLA-4 and TIGIT, CTLA-4 and BTLA, TIM-3 and LAG-3, TIM-3 and TIGIT, TIM-3 and BTLA, LAG-3 and TIGIT, LAG-3 and BTLA and TIGIT and BTLA. Note that generally these bispecific antibodies are named “anti-PD-1×anti-CTLA-4”, or generally simplistically or for ease (and thus interchangeably) as “PD-1×CTLA-4”, etc. for each pair. Note that unless specified herein, the order of the antigen list in the name does not confer structure; that is a PD-1×CTLA-4 bottle opener antibody can have the scFv bind to PD-1 or CTLA-4, although in some cases, the order specifies structure as indicated.

[0342] As is more fully outlined herein, these combinations of ABDs can be in a variety of formats, as outlined below, generally in combinations where one ABD is in a Fab format and the other is in an scFv format. As discussed herein and shown in FIG. 1, some formats use a single Fab and a single scFv (FIGS. 1A, C and D), and some formats use two Fabs and a single scFv (FIGS. 1E, F, G, H and I).

### A. Antigen Binding Domains

[0343] As discussed herein, the bispecific checkpoint heterodimeric antibodies of the invention include two antigen binding domains (ABDs), each of which bind to a different checkpoint protein. As outlined herein, these heterodimeric antibodies can be bispecific and bivalent (each antigen is bound by a single ABD, for example, in the format depicted in FIG. 1A), or bispecific and trivalent (one antigen is bound by a single ABD and the other is bound by two ABDs, for example as depicted in FIG. 1F).

[0344] In addition, in general, one of the ABDs comprises a scFv as outlined herein, in an orientation from N- to C-terminus of vh-scFv linker-vl or vl-scFv linker-vh. One or both of the other ABDs, according to the format, generally is a Fab, comprising a vh domain on one protein chain (generally as a component of a heavy chain) and a vl on another protein chain (generally as a component of a light chain).

[0345] The invention provides a number of ABDs that bind to a number of different checkpoint proteins, as outlined below. As will be appreciated by those in the art, any set of 6 CDRs or vh and vl domains can be in the scFv format or in the Fab format, which is then added to the heavy and light constant domains, where the heavy constant domains comprise variants (including within the CH1 domain as well as the Fc domain). The scFv sequences contained in the sequence listing utilize a particular charged linker, but as outlined herein, uncharged or other charged linkers can be used, including those depicted in FIG. 7.

[0346] In addition, as discussed above, the numbering used in the Sequence Listing for the identification of the CDRs is Kabat, however, different numbering can be used, which will change the amino acid sequences of the CDRs as shown in Table 1.

[0347] For all of the variable heavy and light domains listed herein, further variants can be made. As outlined herein, in some embodiments the set of 6 CDRs can have from 0, 1, 2, 3, 4 or 5 amino acid modifications (with amino acid substitutions finding particular use), as well as changes in the framework regions of the variable heavy and light domains, as long as the frameworks (excluding the CDRs) retain at least about 80, 85 or 90% identity to a human germline sequence selected from those listed in FIG. 1 of U.S. Pat. No. 7,657,380, which Figure and Legend is incorporated by reference in its entirety herein. Thus, for example, the identical CDRs as described herein can be combined with different framework sequences from human germline sequences, as long as the framework regions retain at least 80, 85 or 90% identity to a human germline sequence selected from those listed in FIG. 1 of U.S. Pat. No. 7,657,380. Alternatively, the CDRs can have amino acid modifications (e.g. from 1, 2, 3, 4 or 5 amino acid modifications in the set of CDRs (that is, the CDRs can be modified as long as the total number of changes in the set of 6 CDRs is less than 6 amino acid modifications, with any combination of CDRs being changed; e.g. there may be one change in vlCDR1, two in vhCDR2, none in vhCDR3, etc.)), as well as having framework region changes, as long as the framework regions retain at least 80, 85 or 90% identity to a human germline sequence selected from those listed in FIG. 1 of U.S. Pat. No. 7,657,380.

### B. PD-1 Antigen Binding Domains

[0348] In some embodiments, one of the ABDs binds PD-1. Suitable sets of 6 CDRs and/or vh and vl domains, as well as scFv sequences, are depicted in SEQ ID NOs: 6209-11464, SEQ ID NOs: 11465-17134, SEQ ID NOs: 33003-33072, SEQ ID NOs: 33073-35394 and SEQ ID NOs: 36127-36146. ABD sequences of particular interest in some embodiments are shown in FIG. 9 and include those sequences in the sequence listing with the identifiers 1G6_H1.279_L1.194; 1G6_H1.280_L1.224; 1G6_L1.194_H1.279; 1G6_L1.210_H1.288; and 2E9_H1L1.

[0349] As will be appreciated by those in the art, suitable anti-PD-1 ABDs can comprise a set of 6 CDRs as depicted in these sequences and Figures, either as they are underlined or, in the case where a different numbering scheme is used as described herein and as shown in Table 1, as the CDRs that are identified using other alignments within the vh and vl sequences of SEQ ID NOs: 6209-11464, SEQ ID NOs: 11465-17134, SEQ ID NOs: 33003-33072, SEQ ID NOs: 33073-35394 and SEQ ID NOs: 36127-36146. Suitable ABDs can also include the entire vh and vl sequences as depicted in these sequences and Figures, used as scFvs or as Fabs. In many of the embodiments herein that contain an Fv to PD-1, it is the scFv monomer that binds PD-1. As discussed herein, the other of the target pair when PD-1 is one of the antigens is selected from CTLA-4 (suitable sequences are depicted in SEQ ID NOs: 21-2918, SEQ ID NOs: 2919-6208, SEQ ID NOs: 36739-36818 and SEQ ID NOs: 35395-35416 (which can be scFv sequences, CDR sequence sets or vh and vl sequences)), TIM-3 (suitable sequences are depicted in SEQ ID NOs: 20765-20884, SEQ ID NOs: 37587-37698 and SEQ ID NOs: 36347-36706 (which can be scFv sequences, CDR sequence sets or vh and vl sequences)), LAG-3 (suitable sequences are depicted in SEQ ID NOs: 17135-20764, SEQ ID NOs: 36819-36962, SEQ ID NOs: 35417-35606, SEQ ID NOs: 25194-32793 and SEQ ID NOs: 32794-33002 (which can be scFv sequences, CDR sequence sets or vh and vl sequences)), BTLA (suitable sequences are depicted in SEQ ID NOs: 20885-21503 and SEQ ID NOs: 36707-36738 (which can be scFv sequences, CDR sequence sets or vh and vl sequences)), and TIGIT (suitable sequences are depicted in SEQ ID NOs: 21504-21523 and SEQ ID NOs: 37435-37586 (which can be scFv sequences, CDR sequence sets or vh and vl sequences)).

[0350] Particularly useful ABDs that bind human PD-1 include, but are not limited to, 1G6_H1.279_L1.194, 1G6_H1.280_L1.224; 1G6_L1.194_H1.279, 1G6_L1.210_H1.288 and 2E9_H1L1.

[0351] In addition to the parental CDR sets disclosed in the sequence listing that form an ABD to PD-1, the invention provides variant CDR sets. In one embodiment, a set of 6 CDRs can have 1, 2, 3, 4 or 5 amino acid changes from the parental CDRs, as long as the ABD is still able to bind to the target antigen, as measured by at least one of a BIACORE®, surface plasmon resonance (SPR) and/or BLI (biolayer interferometry, e.g. OCTET® assay) assay, with the latter finding particular use in many embodiments.

[0352] In addition to the parental variable heavy and variable light domains disclosed herein that form an ABD to PD-1, the invention provides variant vh and vl domains. In one embodiment, the variant vh and vl domains each can have from 1, 2, 3, 4, 5, 6, 7, 8, 9 or 10 amino acid changes from the parental vh and vl domain, as long as the ABD is still able to bind to the target antigen, as measured at least one of a BIACORE®, surface plasmon resonance (SPR) and/or BLI (biolayer interferometry, e.g. OCTET® assay) assay, with the latter finding particular use in many embodiments. In another embodiment, the variant vh and vl are at least 90, 95, 97, 98 or 99% identical to the respective parental vh or vl, as long as the ABD is still able to bind to the target antigen, as measured by at least one of a BIACORE®, surface plasmon resonance (SPR) and/or BLI (biolayer interferometry, e.g. OCTET® assay) assay, with the latter finding particular use in many embodiments.

[0353] Specific preferred embodiments include the 1G6_L1.194_H1.279 anti-PD-1 Fv, in a scFv format, included within any of the bottle opener format backbones of FIG. 37.

[0354] Specific preferred embodiments include the 1G6_L1.194_H1.279 anti-PD-1 Fv, in a scFv format, included within any of the mAb-scFv format backbones of FIG. 38.

### C. CTLA-4 Antigen Binding Domains

[0355] In some embodiments, one of the ABDs binds CTLA-4. Suitable sets of 6 CDRs and/or vh and vl domains, as well as scFv sequences, are depicted in SEQ ID NOs: 21-2918, SEQ ID NOs: 2919-6208, SEQ ID NOs: 36739-36818 and SEQ ID NOs: 35395-35416. ABD sequences of particular interest in some embodiments are shown in FIG. 10 and also include those sequences in the sequence listing with the identifiers [CTLA-4]_H0.25_L0; [CTLA-4]_H0.26_L0; [CTLA-4]_H0.27_L0; [CTLA-4]_H0.29_L0; [CTLA-4]_H0.38_L0; [CTLA-4]_H0.39_L0; 0[CTLA-4]_H0.40_L0; [CTLA-4]_H0.70_L0; [CTLA-4]_H0_L0.22; [CTLA-4]_H2_L0; [CTLA-4]_H3.21_L0.124; [CTLA-4]_H3.21_L0.129; [CTLA-4]_H3.21_L0.132; [CTLA-4]_H3.23_L0.124; [CTLA-4]_H3.23_L0.129; [CTLA-4]_H3.23_L0.132; [CTLA-4]_H3.25_L0.124; [CTLA-4]_H3.25_L0.129; [CTLA-4]_H3.25_L0.132; [CTLA-4]_H3.4_L0.118; [CTLA-4]_H3.4_L0.119; [CTLA-4]_H3.4_L0.12; [CTLA-4]_H3.4_L0.121; [CTLA-4]_H3.4_L0.122; [CTLA-4]_H3.4_L0.123; [CTLA-4]_H3.4_L0.124; [CTLA-4]_H3.4_L0.125; [CTLA-4]_H3.4_L0.126; [CTLA-4]_H3.4_L0.127; [CTLA-4]_H3.4_L0.128; [CTLA-4]_H3.4_L0.129; [CTLA-4]_H3.4_L0.130; [CTLA-4]_H3.4_L0.131; [CTLA-4]_H3.4_L0.132; [CTLA-4]_H3.5_L2.1; [CTLA-4]_H3.5_L2.2; [CTLA-4]_H3.5_L2.3; [CTLA-4]_H3_L0; [CTLA-4]_H3_L0.22; [CTLA-4]_H3_L0.44; [CTLA-4]_H3_L0.67; and [CTLA-4]_H3_L0.74.

[0356] As will be appreciated by those in the art, suitable anti-CTLA-4 ABDs can comprise a set of 6 CDRs as depicted in these sequences and Figures, either as they are underlined or, in the case where a different numbering scheme is used as described herein and as shown in Table 1, as the CDRs that are identified using other alignments within the vh and vl sequences of SEQ ID NOs: 21-2918, SEQ ID NOs: 2919-6208, SEQ ID NOs: 36739-36818 and SEQ ID NOs: 35395-35416. Suitable ABDs can also include the entire vh and vl sequences as depicted in these sequences and Figures, used as scFvs or as Fabs. In many of the embodiments herein that contain an Fv to CTLA-4, it is the scFv monomer that binds CTLA-4. As discussed herein, the other of the target pair when CTLA-4 is one of the antigens is selected from PD-1 (suitable sequences are depicted in SEQ ID NOs: 6209-11464, SEQ ID NOs: 11465-17134, SEQ ID NOs: 33003-33072, SEQ ID NOs: 33073-35394 and SEQ ID NOs: 36127-36146 (which can be scFv sequences, CDR sequence sets or vh and vl sequences)), TIM-3 (suitable sequences are depicted in SEQ ID NOs: 20765-20884, SEQ ID NOs: 37587-37698 and SEQ ID NOs: 36347-36706 (which can be scFv sequences, CDR sequence sets or vh and vl sequences)), LAG-3 (suitable sequences are depicted in SEQ ID NOs: 17135-20764, SEQ ID NOs: 36819-36962, SEQ ID NOs: 35417-35606, SEQ ID NOs: 25194-32793 and SEQ ID NOs: 32794-33002 (which can be scFv sequences, CDR sequence sets or vh and vl sequences)), BTLA (suitable sequences are depicted in SEQ ID NOs: 20885-21503 and SEQ ID NOs: 36707-36738 (which can be scFv sequences, CDR sequence sets or vh and vl sequences)), and TIGIT (suitable sequences are depicted in SEQ ID NOs: 21504-21523 and SEQ ID NOs: 37435-37586 (which can be scFv sequences, CDR sequence sets or vh and vl sequences)).

[0357] In addition to the parental CDR sets disclosed in the sequence listing that form an ABD to CTLA-4, the invention provides variant CDR sets. In one embodiment, a set of 6 CDRs can have 1, 2, 3, 4 or 5 amino acid changes from the parental CDRs, as long as the ABD is still able to bind to the target antigen, as measured by at least one of a BIACORE®, surface plasmon resonance (SPR) and/or BLI (biolayer interferometry, e.g. OCTET® assay) assay, with the latter finding particular use in many embodiments.

[0358] In addition to the parental variable heavy and variable light domains disclosed herein that form an ABD to CTLA-4, the invention provides variant vh and vl domains. In one embodiment, the variant vh and vl domains each can have from 1, 2, 3, 4, 5, 6, 7, 8, 9 or 10 amino acid changes from the parental vh and vl domain, as long as the ABD is still able to bind to the target antigen, as measured by at least one of a BIACORE®, surface plasmon resonance (SPR) and/or BLI (biolayer interferometry, e.g. OCTET® assay) assay, with the latter finding particular use in many embodiments. In another embodiment, the variant vh and vl are at least 90, 95, 97, 98 or 99% identical to the respective parental vh or vl, as long as the ABD is still able to bind to the target antigen, as measured by at least one of a BIACORE®, surface plasmon resonance (SPR) and/or BLI (biolayer interferometry, e.g. OCTET® assay) assay, with the latter finding particular use in many embodiments.

[0359] Specific preferred embodiments include the [CTLA-4]_H3_L0.22 anti-CTLA-4 Fv, in a Fab format, included within any of the bottle opener format backbones of FIG. 37.

[0360] Specific preferred embodiments include the [CTLA-4]_H3_L0.22 anti-CTLA-4 Fv, in a scFv format, included within any of the bottle opener format backbones of FIG. 37.

[0361] Specific preferred embodiments include the [CTLA-4]_H3_L0.22 anti-CTLA-4 Fv, in a scFv format, included within any of the mAb-scFv format backbones of FIG. 38.

[0362] Specific preferred embodiments include the [CTLA-4]_H3_L0.22 anti-CTLA-4 Fv, in a Fab format, included within any of the mAb-scFv format backbones of FIG. 38.

### D. TIM-3 Antigen Binding Domains

[0363] In some embodiments, one of the ABDs binds TIM-3. Suitable sets of 6 CDRs and/or vh and vl domains, as well as scFv sequences, are depicted SEQ ID NOs: 20765-20884, SEQ ID NOs: 37587-37698 and SEQ ID NOs: 36347-36706. ABD sequences of particular interest in some embodiments include those sequences in the sequence listing with the identifiers 1D10_H0L0; 1D12_H0L0; 3H3_H1_L2.1; 6C8_H0L0^{.} 6 D9_H0_1D12_L0^{.} 7A9_H0L0; 7B11_H0L0; 7B11var_H0L0; and 7C2_H0L0.

[0364] As will be appreciated by those in the art, suitable anti-TIM-3 ABDs can comprise a set of 6 CDRs as depicted in these sequences and Figures, either as they are underlined or, in the case where a different numbering scheme is used as described herein and as shown in Table 1, as the CDRs that are identified using other alignments within the vh and vl sequences of SEQ ID NOs: 20765-20884, SEQ ID NOs: 37587-37698 and SEQ ID NOs: 36347-36706. Suitable ABDs can also include the entire vh and vl sequences as depicted in these sequences and Figures, used as scFvs or as Fabs. In many of the embodiments herein that contain an Fv to TIM-3, it is the Fab monomer that binds TIM-3. As discussed herein, the other of the target pair when TIM-3 is one of the antigens is selected from PD-1 (suitable sequences are depicted in SEQ ID NOs: 6209-11464, SEQ ID NOs: 11465-17134, SEQ ID NOs: 33003-33072, SEQ ID NOs: 33073-35394 and SEQ ID NOs: 36127-36146 (which can be scFv sequences, CDR sequence sets or vh and vl sequences)), CTLA-4 (suitable sequences are depicted in SEQ ID NOs: 21-2918, SEQ ID NOs: 2919-6208, SEQ ID NOs: 36739-36818 and SEQ ID NOs: 35395-35416 (which can be scFv sequences, CDR sequence sets or vh and vl sequences)), LAG-3 (suitable sequences are depicted in SEQ ID NOs: 17135-20764, SEQ ID NOs: 36819-36962, SEQ ID NOs: 35417-35606, SEQ ID NOs: 25194-32793 and SEQ ID NOs: 32794-33002 (which can be scFv sequences, CDR sequence sets or vh and vl sequences)), BTLA (suitable sequences are depicted in SEQ ID NOs: 20885-21503 and SEQ ID NOs: 36707-36738 (which can be scFv sequences, CDR sequence sets or vh and vl sequences)), and TIGIT (suitable sequences are depicted in SEQ ID NOs: 21504-21523 and SEQ ID NOs: 37435-37586 (which can be scFv sequences, CDR sequence sets or vh and vl sequences)).

[0365] In addition to the parental CDR sets disclosed in the sequence listing that form an ABD to TIM-3, the invention provides variant CDR sets. In one embodiment, a set of 6 CDRs can have 1, 2, 3, 4 or 5 amino acid changes from the parental CDRs, as long as the ABD is still able to bind to the target antigen, as measured by at least one of a BIACORE®, surface plasmon resonance (SPR) and/or BLI (biolayer interferometry, e.g. OCTET® assay) assay, with the latter finding particular use in many embodiments.

[0366] In addition to the parental variable heavy and variable light domains disclosed herein that form an ABD to TIM-3, the invention provides variant vh and vl domains. In one embodiment, the variant vh and vl domains each can have from 1, 2, 3, 4, 5, 6, 7, 8, 9 or 10 amino acid changes from the parental vh and vl domain, as long as the ABD is still able to bind to the target antigen, as measured at least one of a BIACORE®, surface plasmon resonance (SPR) and/or BLI (biolayer interferometry, e.g. OCTET® assay) assay, with the latter finding particular use in many embodiments. In another embodiment, the variant vh and vl are at least 90, 95, 97, 98 or 99% identical to the respective parental vh or vl, as long as the ABD is still able to bind to the target antigen, as measured by at least one of a BIACORE®, surface plasmon resonance (SPR) and/or BLI (biolayer interferometry, e.g. OCTET® assay) assay, with the latter finding particular use in many embodiments.

[0367] LAG-3 Antigen Binding Domains

[0368] In some embodiments, one of the ABDs binds LAG-3. Suitable sets of 6 CDRs and/or vh and vl domains, as well as scFv sequences, are depicted SEQ ID NOs: 17135-20764, SEQ ID NOs: 36819-36962, SEQ ID NOs: 35417-35606, SEQ ID NOs: 25194-32793 and SEQ ID NOs: 32794-33002. ABD sequences of particular interest in some embodiments are shown in FIG. 11 and also include those sequences in the sequence listing with the identifiers 2A11_H0L0; 2A11_H1.125_L2.113; 2A11_H1.144_L2.142; 2A11_H1_L2.122; 2A11_H1_L2.123; 2A11_H1_L2.124; 2A11_H1_L2.25; 2A11_H1_L2.47; 2A11_H1_L2.50; 2A11_H1_L2.91; 2A11_H1_L2.93; 2A11_H1_L2.97; 2A11_H1L1; 2A11_H1L2; 2A11_H2L2; 2A11_H3L1; 2A11_H3L2; 2A11_H4L1; 2A11_H4L2; 7G8_H0L0; 7G8_H1L1; 7G8_H3.18_L1.11; 7G8_H3.23_L1.11; 7G8_H3.28_L1; 7G8_H3.28_L1.11; 7G8_H3.28_L1.13; 7G8_H3.30_L1.34; 7G8_H3.30_L1.34; and 7G8_H3L1.

[0369] As will be appreciated by those in the art, suitable anti-LAG-3 ABDs can comprise a set of 6 CDRs as depicted in these sequences and Figures, either as they are underlined or, in the case where a different numbering scheme is used as described herein and as shown in Table 1, as the CDRs that are identified using other alignments within the vh and vl sequences of SEQ ID NOs: 17135-20764, SEQ ID NOs: 36819-36962, SEQ ID NOs: 35417-35606, SEQ ID NOs: 25194-32793 and SEQ ID NOs: 32794-33002. Suitable ABDs can also include the entire vh and vl sequences as depicted in these sequences and Figures, used as scFvs or as Fabs. In many of the embodiments herein that contain an Fv to LAG-3, it is the Fab monomer that binds LAG-3. As discussed herein, the other of the target pair when LAG-3 is one of the antigens is selected from PD-1 (suitable sequences are depicted in SEQ ID NOs: 6209-11464, SEQ ID NOs: 11465-17134, SEQ ID NOs: 33003-33072, SEQ ID NOs: 33073-35394 and SEQ ID NOs: 36127-36146 (which can be scFv sequences, CDR sequence sets or vh and vl sequences)), CTLA-4 (suitable sequences are depicted in SEQ ID NOs: 21-2918, SEQ ID NOs: 2919-6208, SEQ ID NOs: 36739-36818 and SEQ ID NOs: 35395-35416 (which can be scFv sequences, CDR sequence sets or vh and vl sequences)), TIM-3 (suitable sequences are depicted in SEQ ID NOs: 20765-20884, SEQ ID NOs: 37587-37698 and SEQ ID NOs: 36347-36706 (which can be scFv sequences, CDR sequence sets or vh and vl sequences)), BTLA (suitable sequences are depicted in SEQ ID NOs: 20885-21503 and SEQ ID NOs: 36707-36738 (which can be scFv sequences, CDR sequence sets or vh and vl sequences)), and TIGIT (suitable sequences are depicted in SEQ ID NOs: 21504-21523 and SEQ ID NOs: 37435-37586 (which can be scFv sequences, CDR sequence sets or vh and vl sequences).

[0370] In addition to the parental CDR sets disclosed in the sequence listing that form an ABD to LAG-3, the invention provides variant CDR sets. In one embodiment, a set of 6 CDRs can have 1, 2, 3, 4 or 5 amino acid changes from the parental CDRs, as long as the ABD is still able to bind to the target antigen, as measured by at least one of a BIACORE®, surface plasmon resonance (SPR) and/or BLI (biolayer interferometry, e.g. OCTET® assay) assay, with the latter finding particular use in many embodiments.

[0371] In addition to the parental variable heavy and variable light domains disclosed herein that form an ABD to LAG-3, the invention provides variant vh and vl domains. In one embodiment, the variant vh and vl domains each can have from 1, 2, 3, 4, 5, 6, 7, 8, 9 or 10 amino acid changes from the parental vh and vl domain, as long as the ABD is still able to bind to the target antigen, as measured by at least one of a BIACORE®, surface plasmon resonance (SPR) and/or BLI (biolayer interferometry, e.g. OCTET® assay) assay, with the latter finding particular use in many embodiments. In another embodiment, the variant vh and vl are at least 90, 95, 97, 98 or 99% identical to the respective parental vh or vl, as long as the ABD is still able to bind to the target antigen, as measured by at least one of a BIACORE®, surface plasmon resonance (SPR) and/or BLI (biolayer interferometry, e.g. OCTET® assay) assay, with the latter finding particular use in many embodiments.

[0372] Specific preferred embodiments include the 7G8_H3.30_L1.34 anti-LAG-3 Fv, in a Fab format, included within any of the bottle opener format backbones of FIG. 37.

[0373] Specific preferred embodiments include the 7G8_H3.30_L1.34 anti-LAG-3 Fv, in a scFv format, included within any of the bottle opener format backbones of FIG. 37.

### E. BTLA Antigen Binding Domains

[0374] In some embodiments, one of the ABDs binds BTLA. Suitable sets of 6 CDRs and/or vh and vl domains, as well as scFv sequences, are depicted in SEQ ID NOs: 20885-21503 and SEQ ID NOs: 36707-36738. ABD sequences of particular interest in some embodiments are shown in FIG. 12 and also include those sequences in the sequence listing with the identifiers 9C6_H0L0; 9C6_H1.1_L1; and 9C6_H1.11_L1.

[0375] As will be appreciated by those in the art, suitable anti-BTLA ABDs can comprise a set of 6 CDRs as depicted in these sequences and Figures, either as they are underlined or, in the case where a different numbering scheme is used as described herein and as shown in Table 1, as the CDRs that are identified using other alignments within the vh and vl sequences SEQ ID NOs: 20885-21503 and SEQ ID NOs: 36707-36738. Suitable ABDs can also include the entire vh and vl sequences as depicted in these sequences and Figures, used as scFvs or as Fabs. In many of the embodiments herein that contain an Fv to BTLA, it is the Fab monomer that binds BTLA. As discussed herein, the other of the target pair when LAG-3 is one of the antigens is selected from PD-1 (suitable sequences are depicted in SEQ ID NOs: 6209-11464, SEQ ID NOs: 11465-17134, SEQ ID NOs: 33003-33072, SEQ ID NOs: 33073-35394 and SEQ ID NOs: 36127-36146 (which can be scFv sequences, CDR sequence sets or vh and vl sequences)), CTLA-4 (suitable sequences are depicted in SEQ ID NOs: 21-2918, SEQ ID NOs: 2919-6208, SEQ ID NOs: 36739-36818 and SEQ ID NOs: 35395-35416 (which can be scFv sequences, CDR sequence sets or vh and vl sequences)), TIM-3 (suitable sequences are depicted in SEQ ID NOs: 20765-20884, SEQ ID NOs: 37587-37698 and SEQ ID NOs: 36347-36706 (which can be scFv sequences, CDR sequence sets or vh and vl sequences)), LAG-3 (suitable sequences are depicted in SEQ ID NOs: 17135-20764, SEQ ID NOs: 36819-36962, SEQ ID NOs: 35417-35606, SEQ ID NOs: 25194-32793 and SEQ ID NOs: 32794-33002 (which can be scFv sequences, CDR sequence sets or vh and vl sequences)), and TIGIT (suitable sequences are depicted in SEQ ID NOs: 21504-21523 and SEQ ID NOs: 37435-37586 (which can be scFv sequences, CDR sequence sets or vh and vl sequences)).

[0376] In addition to the parental CDR sets disclosed in the sequence listing that form an ABD to BTLA, the invention provides variant CDR sets. In one embodiment, a set of 6 CDRs can have 1, 2, 3, 4 or 5 amino acid changes from the parental CDRs, as long as the ABD is still able to bind to the target antigen, as measured at least one of a BIACORE®, surface plasmon resonance (SPR) and/or BLI (biolayer interferometry, e.g. OCTET® assay) assay, with the latter finding particular use in many embodiments.

[0377] In addition to the parental variable heavy and variable light domains disclosed herein that form an ABD to BTLA, the invention provides variant vh and vl domains. In one embodiment, the variant vh and vl domains each can have from 1, 2, 3, 4, 5, 6, 7, 8, 9 or 10 amino acid changes from the parental vh and vl domain, as long as the ABD is still able to bind to the target antigen, as measured by at least one of a BIACORE®, surface plasmon resonance (SPR) and/or BLI (biolayer interferometry, e.g. OCTET® assay) assay, with the latter finding particular use in many embodiments. In another embodiment, the variant vh and vl are at least 90, 95, 97, 98 or 99% identical to the respective parental vh or vl, as long as the ABD is still able to bind to the target antigen, as measured by at least one of a BIACORE®, surface plasmon resonance (SPR) and/or BLI (biolayer interferometry, e.g. OCTET® assay) assay, with the latter finding particular use in many embodiments.

[0378] Specific preferred embodiments include the 9C6_H1.1_L1 anti-LAG-3 Fv, in a Fab format, included within any of the bottle opener format backbones of FIG. 37.

[0379] Specific preferred embodiments include the 7G8_H3.30_L1.34 anti-LAG-3 Fv, in a scFv format, included within any of the bottle opener format backbones of FIG. 37.

### F. TIGIT Antigen Binding Domains

[0380] In some embodiments, one of the ABDs binds TIGIT. Suitable sets of 6 CDRs and/or vh and vl domains, as well as scFv sequences, are depicted in SEQ ID NOs: 21504-21523 and SEQ ID NOs: 37435-37586.

[0381] As will be appreciated by those in the art, suitable anti-TIGIT ABDs can comprise a set of 6 CDRs as depicted in these sequences and Figures, either as they are underlined or, in the case where a different numbering scheme is used as described herein and as shown in Table 1, as the CDRs that are identified using other alignments within the vh and vl sequences of SEQ ID NOs: 21504-21523 and SEQ ID NOs: 37435-37586. Suitable ABDs can also include the entire vh and vl sequences as depicted in these sequences and Figures, used as scFvs or as Fabs. In many of the embodiments herein that contain an Fv to TIGIT, it is the Fab monomer that binds TIGIT. As discussed herein, the other of the target pair when LAG-3 is one of the antigens is selected from PD-1 (suitable sequences are depicted in SEQ ID NOs: 6209-11464, SEQ ID NOs: 11465-17134, SEQ ID NOs: 33003-33072, SEQ ID NOs: 33073-35394 and SEQ ID NOs: 36127-36146 (which can be scFv sequences, CDR sequence sets or vh and vl sequences)), CTLA-4 (suitable sequences are depicted in SEQ ID NOs: 21-2918, SEQ ID NOs: 2919-6208, SEQ ID NOs: 36739-36818 and SEQ ID NOs: 35395-35416 (which can be scFv sequences, CDR sequence sets or vh and vl sequences)), TIM-3 (suitable sequences are depicted in SEQ ID NOs: 20765-20884, SEQ ID NOs: 37587-37698 and SEQ ID NOs: 36347-36706 (which can be scFv sequences, CDR sequence sets or vh and vl sequences)), LAG-3 (suitable sequences are depicted in SEQ ID NOs: 17135-20764, SEQ ID NOs: 36819-36962, SEQ ID NOs: 35417-35606, SEQ ID NOs: 25194-32793 and SEQ ID NOs: 32794-33002 (which can be scFv sequences, CDR sequence sets or vh and vl sequences)), and BTLA (suitable sequences are depicted in SEQ ID NOs: 20885-21503 and SEQ ID NOs: 36707-36738 (which can be scFv sequences, CDR sequence sets or vh and vl sequences)).

### G. Specific Bispecific Embodiments

[0382] The invention provides a number of particular bispecific antibodies as outlined below.

[0383] 1. LAG-3×CTLA-4

[0384] In some embodiments, the invention provides bispecific heterodimeric antibodies comprising a first ABD that binds human LAG-3 and a second ABD that binds human CTLA-4, and can be in any format shown in FIG. 1. Most of the disclosure refers to a bottle opener format with the Fab being the LAG-3 side and the CLTA-4 side being the scFv side, but this can be reversed for all of the embodiments herein.

[0385] In one embodiment, the LAG-3×CTLA-4 bispecific antibody is in the bottle opener format of FIG. 1A, wherein the CTLA-4 ABD is the scFv. In another embodiment, the LAG-3×CTLA-4 bispecific antibody is in the central-scFv format of FIG. 1F, with the LAG-3 ABD being the Fab components. In another embodiment, the LAG-3×CTLA-4 bispecific antibody is in the central-scFv format of FIG. 1F, with the CTLA-4 ABD being the scFv.

[0386] The LAG-3×CTLA-4 bispecific antibodies (in either the bottle opener format or the central-scFv format) generally include skew variants, pI variants and ablation variants as outlined herein. That is, in either format, the Fc domains of the two monomers can comprise skew variants (e.g. a set of amino acid substitutions as shown in FIG. 3 and FIG. 8), optionally ablation variants (including those shown in FIG. 5), and the monomer comprising the Fab side (e.g. the heavy chain constant domain) comprises pI variants (including those shown in FIG. 4).

[0387] In some embodiments, the LAG-3×CTLA-4 bispecific antibody comprises Fc domains with skew variants, with particularly useful skew variants being selected from the group consisting of S364K/E357Q:L368D/K370S; L368D/K370S:S364K; L368E/K370S:S364K; T411T/E360E/Q362E:D401K; L368D/K370S:S364K/E357L, K370S:S364K/E357Q, T366S/L368A/Y407V:T366W and T366S/L368A/Y407V/Y349C:T366W/S354C.

[0388] In some embodiments, the LAG-3×CTLA-4 antibody includes skew variants, pI variants, and ablation variants. Accordingly, some embodiments include bottle opener formats that comprise: a) a first monomer (the “scFv monomer”) that comprises a charged scFv linker (with the +H sequence of FIG. 7 being preferred in some embodiments), the skew variants S364K/E357Q, the ablation variants E233P/L234V/L235A/G236del/S267K, and an Fv that binds to a checkpoint inhibitor as outlined herein; b) a second monomer (the “Fab monomer”) that comprises the skew variants L368D/K370S, the pI variants N208D/Q295E/N384D/Q418E/N421D, the ablation variants E233P/L234V/L235A/G236del/S267K, and a variable heavy domain that, with the variable light domain, makes up an Fv that binds to a second checkpoint inhibitor as outlined herein; and c) a light chain. A specific example of this embodiment utilizes the LAG-3 Fab 7G8_H3.30_L1.34 and the CTLA-4 scFv [CTLA-4]_H3.23_L0.129, although any of the CTLA-4 or LAG-3 Fvs in the sequence listing can be paired in any combination and used.

[0389] In some embodiments, the LAG-3×CTLA-4 antibody includes skew variants, pI variants, ablation variants and FcRn variants. Accordingly, some embodiments include bottle opener formats that comprise: a) a first monomer (the “scFv monomer”) that comprises a charged scFv linker (with the +H sequence of FIG. 7 being preferred in some embodiments), the skew variants S364K/E357Q, the ablation variants E233P/L234V/L235A/G236del/S267K, the FcRn variants M428L/N434S and an Fv that binds to a checkpoint inhibitor as outlined herein; b) a second monomer (the “Fab monomer”) that comprises the skew variants L368D/K370S, the pI variants N208D/Q295E/N384D/Q418E/N421D, the ablation variants E233P/L234V/L235A/G236del/S267K, the FcRn variants M428L/N434S and a variable heavy domain that, with the variable light domain, makes up an Fv that binds to a second checkpoint inhibitor as outlined herein; and c) a light chain. A specific example of this embodiment utilizes the LAG-3 Fab 7G8_H3.30_L1.34 and the CTLA-4 scFv [CTLA-4]_H3.23_L0.129, although any of the CTLA-4 or LAG-3 Fvs in the sequence listing can be paired in any combination and used.

[0390] Additional embodiments include any of the backbones from FIG. 37 with the LAG-3 Fab 7G8_H3.30_L1.34 and the CTLA-4 scFv [CTLA-4]_H3.23_L0.129.

[0391] Additional embodiments include any of the backbones from FIG. 38 with the LAG-3 Fab 7G8_H3.30_L1.34 and the CTLA-4 scFv [CTLA-4]_H3.23_L0.129.

[0392] In some embodiments, for LAG-3×CLTA-4 bispecific antibodies, the Fv for the LAG-3 Fab side is selected from those sequences in the sequence listing with the identifiers 2A11_H0L0; 2A11_H1.125_L2.113; 2A11_H1.144_L2.142; 2A11_H1_L2.122; 2A11_H1_L2.123; 2A11_H1_L2.124; 2A11_H1_L2.25; 2A11_H1_L2.47; 2A11_H1_L2.50; 2A11_H1_L2.91; 2A11_H1_L2.93; 2A11_H1_L2.97; 2A11_H1L1; 2A11_H1L2; 2A11_H2L2; 2A11_H3L1; 2A11_H3L2; 2A11_H4L1; 2A11_H4L2; 7G8_H0L0; 7G8_H1L1; 7G8_H3.18_L1.11; 7G8_H3.23_L1.11; 7G8_H3.28_L1; 7G8_H3.28_L1.11; 7G8_H3.28_L1.13; 7G8_H3.30_L1.34; 7G8_H3.30_L1.34; and 7G8_H3L1. The Fv for the CTLA-4 scFv side is selected from those sequences in the sequence listing with the identifiers [CTLA-4]_H0.25_L0; [CTLA-4]_H0.26_L0; [CTLA-4]_H0.27_L0; [CTLA-4]_H0.29_L0; [CTLA-4]_H0.38_L0; [CTLA-4]_H0.39_L0; 0[CTLA-4]_H0.40_L0; [CTLA-4]_H0.70_L0; [CTLA-4]_H0_L0.22; [CTLA-4]_H2_L0; [CTLA-4]_H3.21_L0.124; [CTLA-4]_H3.21_L0.129; [CTLA-4]_H3.21_L0.132; [CTLA-4]_H3.23_L0.124; [CTLA-4]_H3.23_L0.129; [CTLA-4]_H3.23_L0.132; [CTLA-4]_H3.25_L0.124; [CTLA-4]_H3.25_L0.129; [CTLA-4]_H3.25_L0.132; [CTLA-4]_H3.4_L0.118; [CTLA-4]_H3.4_L0.119; [CTLA-4]_H3.4_L0.12; [CTLA-4]_H3.4_L0.121; [CTLA-4]_H3.4_L0.122; [CTLA-4]_H3.4_L0.123; [CTLA-4]_H3.4_L0.124; [CTLA-4]_H3.4_L0.125; [CTLA-4]_H3.4_L0.126; [CTLA-4]_H3.4_L0.127; [CTLA-4]_H3.4_L0.128; [CTLA-4]_H3.4_L0.129; [CTLA-4]_H3.4_L0.130; [CTLA-4]_H3.4_L0.131; [CTLA-4]_H3.4_L0.132; [CTLA-4]_H3.5_L2.1; [CTLA-4]_H3.5_L2.2; [CTLA-4]_H3.5_L2.3; [CTLA-4]_H3_L0; [CTLA-4]_H3_L0.22; [CTLA-4]_H3_L0.44; [CTLA-4]_H3_L0.67; and [CTLA-4]_H3_L0.74.

[0393] In some embodiments, the LAG-3×CTLA-4 bispecific antibody is selected from those constructs listed in SEQ ID NOs: 35607-35866 and SEQ ID NOs: 21524-22620.

[0394] In some embodiments, the LAG-3×CTLA-4 bispecific antibody is selected from XENP20206, XENP21582, XENP21584, XENP21588, XENP22123, XENP22124, XENP22125, XENP22604, XENP22672, XENP22847, XENP22847, XENP22841 and XENP22849.

[0395] 2. BTLA×PD-1

[0396] In some embodiments, the invention provides bispecific heterodimeric antibodies comprising a first ABD that binds human BTLA and a second ABD that binds human PD-1, and can be in any format shown in FIG. 1. Most of the disclosure refers to a bottle opener format with the Fab being the BTLA side and the PD-1 side being the scFv side, but this can be reversed for all of the embodiments herein.

[0397] In one embodiment, the BTLA×PD-1 bispecific antibody is in the bottle opener format of FIG. 1A, wherein the PD-1 ABD is the scFv. In another embodiment, the BTLA×PD-1 bispecific antibody is in the central-scFv format of FIG. 1F, with the BTLA ABD being the Fab components. In another embodiment, the BTLA×PD-1 bispecific antibody is in the central-scFv format of FIG. 1F, with the PD-1 ABD being the scFv.

[0398] The BTLA×PD-1 bispecific antibodies (in either the bottle opener format or the central-scFv format) generally include skew variants, pI variants and ablation variants as outlined herein. That is, in either format, the Fc domains of the two monomers can comprise skew variants (e.g. a set of amino acid substitutions as shown in FIG. 3 and FIG. 8), optionally ablation variants (including those shown in FIG. 5), and the monomer comprising the Fab side (e.g. the heavy chain constant domain) comprises pI variants (including those shown in FIG. 4).

[0399] In some embodiments, the BTLA×PD-1 bispecific antibody comprises Fc domains with skew variants, with particularly useful skew variants being selected from the group consisting of S364K/E357Q:L368D/K370S; L368D/K370S:S364K; L368E/K370S:S364K; T411T/E360E/Q362E:D401K; L368D/K370S:S364K/E357L, K370S:S364K/E357Q, T366S/L368A/Y407V:T366W and T366S/L368A/Y407V/Y349C:T366W/S354C.

[0400] In some embodiments, the BTLA×PD-1 antibody includes skew variants, pI variants, and ablation variants. Accordingly, some embodiments include bottle opener formats that comprise: a) a first monomer (the “scFv monomer”) that comprises a charged scFv linker (with the +H sequence of FIG. 7 being preferred in some embodiments), the skew variants S364K/E357Q, the ablation variants E233P/L234V/L235A/G236del/S267K, and an Fv that binds to a checkpoint inhibitor as outlined herein; b) a second monomer (the “Fab monomer”) that comprises the skew variants L368D/K370S, the pI variants N208D/Q295E/N384D/Q418E/N421D, the ablation variants E233P/L234V/L235A/G236del/S267K, and a variable heavy domain that, with the variable light domain, makes up an Fv that binds to a second checkpoint inhibitor as outlined herein; and c) a light chain. A specific example of this embodiment utilizes the BTLA Fab 9C6_H1.1_L1 and the PD-1 scFv 1G6_L1.194_H1.279 although any of the BTLA or PD-1 Fvs in the sequence listing can be paired in any combination and used.

[0401] In some embodiments, the BTLA×PD-1 antibody includes skew variants, pI variants, ablation variants and FcRn variants. Accordingly, some embodiments include bottle opener formats that comprise: a) a first monomer (the “scFv monomer”) that comprises a charged scFv linker (with the +H sequence of FIG. 7 being preferred in some embodiments), the skew variants S364K/E357Q, the ablation variants E233P/L234V/L235A/G236del/S267K, the FcRn variants M428L/N434S and an Fv that binds to a checkpoint inhibitor as outlined herein; b) a second monomer (the “Fab monomer”) that comprises the skew variants L368D/K370S, the pI variants N208D/Q295E/N384D/Q418E/N421D, the ablation variants E233P/L234V/L235A/G236del/S267K, the FcRn variants M428L/N434S and a variable heavy domain that, with the variable light domain, makes up an Fv that binds to a second checkpoint inhibitor as outlined herein; and c) a light chain. A specific example of this embodiment utilizes the BTLA Fab 9C6_H1.1_L1 and the PD-1 scFv 1G6_L1.194_H1.279 although any of the BTLA or PD-1 Fvs in the sequence listing can be paired in any combination and used.

[0402] Additional embodiments include any of the backbones from FIG. 37 with the BTLA Fab 9C6_H1.1_L1 and the PD-1 scFv 1G6_L1.194_H1.279.

[0403] Additional embodiments include any of the backbones from FIG. 38 with the BTLA Fab 9C6_H1.1_L1 and the PD-1 scFv 1G6_L1.194_H1.279.

[0404] In some embodiments, for BTLA×PD-1 bispecific antibodies, the Fv for the BTLA Fab side is selected from those sequences in the sequence listing with the identifiers 9C6_H0L0, 9C6_H1.1_L1, 9C6_H1.11_L1. The Fv for the PD-1 scFv side is selected from those sequences in the sequence listing with the identifiers 1G6_H1.279_L1.194; 1G6_H1.280_L1.224; 1G6_L1.194_H1.279; 1G6_L1.210_H1.288; and 2E9_H1L1.

[0405] In some embodiments, the BTLA×PD-1 bispecific antibody is selected from constructs include those listed as SEQ ID NOs: 22724-23315 and SEQ ID NOs: 36147-36166.

[0406] In some embodiments, the BTLA×PD-1 bispecific antibody is selected from XENP20895, XENP21220, XENP21221 and XENP22858.

[0407] 3. CTLA-4×PD-1

[0408] In some embodiments, the invention provides bispecific heterodimeric antibodies comprising a first ABD that binds human CTLA-4 and a second ABD that binds human PD-1, and can be in any format shown in FIG. 1. Most of the disclosure refers to a bottle opener format with the Fab being the CTLA-4 side and the PD-1 side being the scFv side, but this can be reversed for all of the embodiments herein.

[0409] In one embodiment, the CTLA-4×PD-1 bispecific antibody is in the bottle opener format of FIG. 1A, wherein the PD-1 ABD is the scFv. In another embodiment, the CTLA-4×PD-1 bispecific antibody is in the central-scFv format of FIG. 1F, with the CTLA-4 ABD being the Fab components. In another embodiment, the CTLA-4×PD-1 bispecific antibody is in the central-scFv format of FIG. 1F, with the PD-1 ABD being the scFv.

[0410] The CTLA-4×PD-1 bispecific antibodies (in either the bottle opener format or the central-scFv format) generally include skew variants, pI variants and ablation variants as outlined herein. That is, in either format, the Fc domains of the two monomers can comprise skew variants (e.g. a set of amino acid substitutions as shown in FIG. 3 and FIG. 8), optionally ablation variants (including those shown in FIG. 5), and the monomer comprising the Fab side (e.g. the heavy chain constant domain) comprises pI variants (including those shown in FIG. 4).

[0411] In some embodiments, the CTLA-4×PD-1 bispecific antibody comprises Fc domains with skew variants, with particularly useful skew variants being selected from the group consisting of S364K/E357Q:L368D/K370S; L368D/K370S:S364K; L368E/K370S:S364K; T411T/E360E/Q362E:D401K; L368D/K370S:S364K/E357L, K370S:S364K/E357Q, T366S/L368A/Y407V:T366W and T366S/L368A/Y407V/Y349C:T366W/S354C.

[0412] In some embodiments, the CTLA-4×PD-1 antibody includes skew variants, pI variants, and ablation variants. Accordingly, some embodiments include bottle opener formats that comprise: a) a first monomer (the “scFv monomer”) that comprises a charged scFv linker (with the +H sequence of FIG. 7 being preferred in some embodiments), the skew variants S364K/E357Q, the ablation variants E233P/L234V/L235A/G236del/S267K, and an Fv that binds to a checkpoint inhibitor as outlined herein; b) a second monomer (the “Fab monomer”) that comprises the skew variants L368D/K370S, the pI variants N208D/Q295E/N384D/Q418E/N421D, the ablation variants E233P/L234V/L235A/G236del/S267K, and a variable heavy domain that, with the variable light domain, makes up an Fv that binds to a second checkpoint inhibitor as outlined herein; and c) a light chain. A specific example of this embodiment utilizes the CTLA-4 Fab [CTLA-4]_H3_L0.22 and the PD-1 scFv 1G6_L1.194_H1.279 although any of the CTLA-4 or PD-1 Fvs in the sequence listing can be paired in any combination and used.

[0413] In some embodiments, the CTLA-4×PD-1 antibody includes skew variants, pI variants, ablation variants and FcRn variants. Accordingly, some embodiments include bottle opener formats that comprise: a) a first monomer (the “scFv monomer”) that comprises a charged scFv linker (with the +H sequence of FIG. 7 being preferred in some embodiments), the skew variants S364K/E357Q, the ablation variants E233P/L234V/L235A/G236del/S267K, the FcRn variants M428L/N434S and an Fv that binds to a checkpoint inhibitor as outlined herein; b) a second monomer (the “Fab monomer”) that comprises the skew variants L368D/K370S, the pI variants N208D/Q295E/N384D/Q418E/N421D, the ablation variants E233P/L234V/L235A/G236del/S267K, the FcRn variants M428L/N434S and a variable heavy domain that, with the variable light domain, makes up an Fv that binds to a second checkpoint inhibitor as outlined herein; and c) a light chain. A specific example of this embodiment utilizes the CTLA-4 Fab [CTLA-4]_H3_L0.22 and the PD-1 scFv 1G6_L1.194_H1.279 although any of the CTLA-4 or PD-1 Fvs in the sequence listing can be paired in any combination and used.

[0414] Additional embodiments include any of the backbones from FIG. 37 with the CTLA-4 Fab [CTLA-4]_H3_L0.22 and the PD-1 scFv 1G6_L1.194_H1.279.

[0415] Additional embodiments include any of the backbones from FIG. 38 with the CTLA-4 Fab [CTLA-4]_H3_L0.22 and the PD-1 scFv 1G6_L1.194_H1.279.

[0416] In some embodiments, for CTLA-4×PD-1 bispecific antibodies, the Fv for the CTLA-4 Fab side is selected from those sequences in the sequence listing with the identifiers with the identifiers [CTLA-4]_H0.25_L0; [CTLA-4]_H0.26_L0; [CTLA-4]_H0.27_L0; [CTLA-4]_H0.29_L0; [CTLA-4]_H0.38_L0; [CTLA-4]_H0.39_L0; 0[CTLA-4]_H0.40_L0; [CTLA-4]_H0.70_L0; [CTLA-4]_H0_L0.22; [CTLA-4]_H2_L0; [CTLA-4]_H3.21_L0.124; [CTLA-4]_H3.21_L0.129; [CTLA-4]_H3.21_L0.132; [CTLA-4]_H3.23_L0.124; [CTLA-4]_H3.23_L0.129; [CTLA-4]_H3.23_L0.132; [CTLA-4]_H3.25_L0.124; [CTLA-4]_H3.25_L0.129; [CTLA-4]_H3.25_L0.132; [CTLA-4]_H3.4_L0.118; [CTLA-4]_H3.4_L0.119; [CTLA-4]_H3.4_L0.12; [CTLA-4]_H3.4_L0.121; [CTLA-4]_H3.4_L0.122; [CTLA-4]_H3.4_L0.123; [CTLA-4]_H3.4_L0.124; [CTLA-4]_H3.4_L0.125; [CTLA-4]_H3.4_L0.126; [CTLA-4]_H3.4_L0.127; [CTLA-4]_H3.4_L0.128; [CTLA-4]_H3.4_L0.129; [CTLA-4]_H3.4_L0.130; [CTLA-4]_H3.4_L0.131; [CTLA-4]_H3.4_L0.132; [CTLA-4]_H3.5_L2.1; [CTLA-4]_H3.5_L2.2; [CTLA-4]_H3.5_L2.3; [CTLA-4]_H3_L0; [CTLA-4]_H3_L0.22; [CTLA-4]_H3_L0.44; [CTLA-4]_H3_L0.67; and [CTLA-4]_H3_L0.74. The Fv for the PD-1 scFv side is selected from those sequences in the sequence listing with the identifiers identifiers 1G6_H1.279_L1.194; 1G6_H1.280_L1.224; 1G6_L1.194_H1.279; 1G6_L1.210_H1.288; and 2E9_H1L1.

[0417] In some embodiments, the CTLA-4×PD-1 bispecific antibody is selected from those listed as SEQ ID NOs: 36167-36346 and SEQ ID NOs: 23316-23735.

[0418] In some embodiments, the CTLA-4×PD-1 bispecific antibody is selected from XENP19738, XENP19739, XENP19741, XENP20053, XENP20066, XENP20130, XENP20146, XENP20717 and XENP22836.

[0419] 4. LAG-3×PD-1

[0420] In some embodiments, the invention provides bispecific heterodimeric antibodies comprising a first ABD that binds human LAG-3 and a second ABD that binds human PD-1, and can be in any format shown in FIG. 1. Most of the disclosure refers to a bottle opener format with the Fab being the LAG-3 side and the PD-1 side being the scFv side, but this can be reversed for all of the embodiments herein.

[0421] In one embodiment, the LAG-3×PD-1 bispecific antibody is in the bottle opener format of FIG. 1A, wherein the PD-1 ABD is the scFv. In another embodiment, the LAG-3×PD-1 bispecific antibody is in the central-scFv format of FIG. 1F, with the LAG-3 ABD being the Fab components. In another embodiment, the LAG-3×PD-1 bispecific antibody is in the central-scFv format of FIG. 1F, with the PD-1 ABD being the scFv.

[0422] The LAG-3×PD-1 bispecific antibodies (in either the bottle opener format or the central-scFv format) generally include skew variants, pI variants and ablation variants as outlined herein. That is, in either format, the Fc domains of the two monomers can comprise skew variants (e.g. a set of amino acid substitutions as shown in FIG. 3 and FIG. 8), optionally ablation variants (including those shown in FIG. 5), and the monomer comprising the Fab side (e.g. the heavy chain constant domain) comprises pI variants (including those shown in FIG. 4).

[0423] In some embodiments, the LAG-3×PD-1 bispecific antibody comprises Fc domains with skew variants, with particularly useful skew variants being selected from the group consisting of S364K/E357Q:L368D/K370S; L368D/K370S:S364K; L368E/K370S:S364K; T411T/E360E/Q362E:D401K; L368D/K370S:S364K/E357L, K370S:S364K/E357Q, T366S/L368A/Y407V:T366W and T366S/L368A/Y407V/Y349C:T366W/S354C.

[0424] In some embodiments, the LAG-3×PD-1 antibody includes skew variants, pI variants, and ablation variants. Accordingly, some embodiments include bottle opener formats that comprise: a) a first monomer (the “scFv monomer”) that comprises a charged scFv linker (with the +H sequence of FIG. 7 being preferred in some embodiments), the skew variants S364K/E357Q, the ablation variants E233P/L234V/L235A/G236del/S267K, and an Fv that binds to a checkpoint inhibitor as outlined herein; b) a second monomer (the “Fab monomer”) that comprises the skew variants L368D/K370S, the pI variants N208D/Q295E/N384D/Q418E/N421D, the ablation variants E233P/L234V/L235A/G236del/S267K, and a variable heavy domain that, with the variable light domain, makes up an Fv that binds to a second checkpoint inhibitor as outlined herein; and c) a light chain. A specific example of this embodiment utilizes the LAG-3 Fab 7G8_H3.30_L1.34 and the PD-1 scFv 1G6_L1.194_H1.279 although any of the LAG-3 or PD-1 Fvs in the sequence listing can be paired in any combination and used.

[0425] In some embodiments, the LAG-3×PD-1 antibody includes skew variants, pI variants, ablation variants and FcRn variants. Accordingly, some embodiments include bottle opener formats that comprise: a) a first monomer (the “scFv monomer”) that comprises a charged scFv linker (with the +H sequence of FIG. 7 being preferred in some embodiments), the skew variants S364K/E357Q, the ablation variants E233P/L234V/L235A/G236del/S267K, the FcRn variants M428L/N434S and an Fv that binds to a checkpoint inhibitor as outlined herein; b) a second monomer (the “Fab monomer”) that comprises the skew variants L368D/K370S, the pI variants N208D/Q295E/N384D/Q418E/N421D, the ablation variants E233P/L234V/L235A/G236del/S267K, the FcRn variants M428L/N434S and a variable heavy domain that, with the variable light domain, makes up an Fv that binds to a second checkpoint inhibitor as outlined herein; and c) a light chain. A specific example of this embodiment utilizes the LAG-3 Fab 7G8_H3.30_L1.34 and the PD-1 scFv 1G6_L1.194_H1.279 although any of the LAG-3 or PD-1 Fvs in the sequence listing can be paired in any combination and used.

[0426] Additional embodiments include any of the backbones from FIG. 37 with the LAG-3 Fab 7G8_H3.30_L1.34 and the PD-1 scFv 1G6_L1.194_H1.279.

[0427] Additional embodiments include any of the backbones from FIG. 38 with the LAG-3 Fab 7G8_H3.30_L1.34 and the PD-1 scFv 1G6_L1.194_H1.279.

[0428] In some embodiments, for LAG-3×PD-1 bispecific antibodies, the Fv for the LAG-3 Fab side is selected from those sequences in the sequence listing with the identifiers 2A11_H0L0; 2A11_H1.125_L2.113; 2A11_H1.144_L2.142; 2A11_H1_L2.122; 2A11_H1_L2.123; 2A11_H1_L2.124; 2A11_H1_L2.25; 2A11_H1_L2.47; 2A11_H1_L2.50; 2A11_H1_L2.91; 2A11_H1_L2.93; 2A11_H1_L2.97; 2A11_H1L1; 2A11_H1L2; 2A11_H2L2; 2A11_H3L1; 2A11_H3L2; 2A11_H4L1; 2A11_H4L2; 7G8_H0L0; 7G8_H1L1; 7G8_H3.18_L1.11; 7G8_H3.23_L1.11; 7G8_H3.28_L1; 7G8_H3.28_L1.11; 7G8_H3.28_L1.13; 7G8_H3.30_L1.34; 7G8_H3.30_L1.34; and 7G8_H3L1. The Fv for the PD-1 scFv side is selected from those sequences in the sequence listing with the identifiers identifiers 1G6_H1.279_L1.194; 1G6_H1.280_L1.224; 1G6_L1.194_H1.279; 1G6_L1.210_H1.288; and 2E9_H1L1.

[0429] In some embodiments, the LAG-3×PD-1 bispecific antibody is selected from constructs include those listed as SEQ ID NOs: 35867-36126 and SEQ ID NOs: 23736-25133.

[0430] In some embodiments, the LAG-3×PD-1 bispecific antibody is selected from XENP20206, XENP21582, XENP21584, XENP21588, XENP22123, XENP22124, XENP22125, XENP22604, XENP22672, XENP22847, XENP22847 and XENP22849

[0431] 5. TIGIT×PD-1

[0432] In some embodiments, the TIGIT×PD-1 bispecific antibody is selected from those constructs listed in SEQ ID NOs: 25134-25173.

[0433] 6. TIM-3×PD-1

[0434] In some embodiments, the invention provides bispecific heterodimeric antibodies comprising a first ABD that binds human TIM-3 and a second ABD that binds human PD-1, and can be in any format shown in FIG. 1. Most of the disclosure refers to a bottle opener format with the Fab being the TIM-3 side and the PD-1 side being the scFv side, but this can be reversed for all of the embodiments herein.

[0435] In one embodiment, the TIM-3×PD-1 bispecific antibody is in the bottle opener format of FIG. 1A, wherein the PD-1 ABD is the scFv. In another embodiment, the TIM-3×PD-1 bispecific antibody is in the central-scFv format of FIG. 1F, with the TIM-3 ABD being the Fab components. In another embodiment, the TIM-3×PD-1 bispecific antibody is in the central-scFv format of FIG. 1F, with the PD-1 ABD being the scFv.

[0436] The TIM-3×PD-1 bispecific antibodies (in either the bottle opener format or the central-scFv format) generally include skew variants, pI variants and ablation variants as outlined herein. That is, in either format, the Fc domains of the two monomers can comprise skew variants (e.g. a set of amino acid substitutions as shown in FIG. 3 and FIG. 8), optionally ablation variants (including those shown in FIG. 5), and the monomer comprising the Fab side (e.g. the heavy chain constant domain) comprises pI variants (including those shown in FIG. 4).

[0437] In some embodiments, the TIM-3×PD-1 bispecific antibody comprises Fc domains with skew variants, with particularly useful skew variants being selected from the group consisting of S364K/E357Q:L368D/K370S; L368D/K370S:S364K; L368E/K370S:S364K; T411T/E360E/Q362E:D401K; L368D/K370S:S364K/E357L, K370S:S364K/E357Q, T366S/L368A/Y407V:T366W and T366S/L368A/Y407V/Y349C:T366W/S354C.

[0438] In some embodiments, the TIM-3×PD-1 antibody includes skew variants, pI variants, and ablation variants. Accordingly, some embodiments include bottle opener formats that comprise: a) a first monomer (the “scFv monomer”) that comprises a charged scFv linker (with the +H sequence of FIG. 7 being preferred in some embodiments), the skew variants S364K/E357Q, the ablation variants E233P/L234V/L235A/G236del/S267K, and an Fv that binds to a checkpoint inhibitor as outlined herein; b) a second monomer (the “Fab monomer”) that comprises the skew variants L368D/K370S, the pI variants N208D/Q295E/N384D/Q418E/N421D, the ablation variants E233P/L234V/L235A/G236del/S267K, and a variable heavy domain that, with the variable light domain, makes up an Fv that binds to a second checkpoint inhibitor as outlined herein; and c) a light chain. A specific example of this embodiment utilizes the PD-1 scFv 1G6_L1.194_H1.279 although any of the TIM-3 or PD-1 Fvs in the sequence listing can be paired in any combination and used.

[0439] In some embodiments, the TIM-3×PD-1 antibody includes skew variants, pI variants, ablation variants and FcRn variants. Accordingly, some embodiments include bottle opener formats that comprise: a) a first monomer (the “scFv monomer”) that comprises a charged scFv linker (with the +H sequence of FIG. 7 being preferred in some embodiments), the skew variants S364K/E357Q, the ablation variants E233P/L234V/L235A/G236del/S267K, the FcRn variants M428L/N434S and an Fv that binds to a checkpoint inhibitor as outlined herein; b) a second monomer (the “Fab monomer”) that comprises the skew variants L368D/K370S, the pI variants N208D/Q295E/N384D/Q418E/N421D, the ablation variants E233P/L234V/L235A/G236del/S267K, the FcRn variants M428L/N434S and a variable heavy domain that, with the variable light domain, makes up an Fv that binds to a second checkpoint inhibitor as outlined herein; and c) a light chain. A specific example of this embodiment utilizes the PD-1 scFv 1G6_L1.194_H1.279 although any of the TIM-3 or PD-1 Fvs in the sequence listing can be paired in any combination and used.

[0440] Additional embodiments include any of the backbones from FIG. 37 with a TIM-3 Fab side and the PD-1 scFv 1G6_L1.194_H1.279.

[0441] Additional embodiments include any of the backbones from FIG. 38 with TIM-3 Fab side and the PD-1 scFv 1G6_L1.194_H1.279.

[0442] In some embodiments, for TIM-3 Fab side×PD-1 bispecific antibodies, the Fv for the TIM-3 Fab side Fab side is selected from those sequences in the sequence listing with the identifiers 1D10_H0L0; 1D12_H0L0; 3H3_H1_L2.1; 6C8_H0L0; 6D9_H0_1D12_L0; 7A9_H0L0; 7B11_H0L0; 7B11var_H0L0; and 7C2_H0L0. The Fv for the PD-1 scFv side is selected from those sequences in the sequence listing with the identifiers 1G6_H1.279_L1.194; 1G6_H1.280_L1.224; 1G6_L1.194_H1.279; 1G6_L1.210_H1.288; and 2E9_H1L1.

[0443] In addition, the antibodies of the invention include those that bind to either the same epitope as the antigen binding domains outlined herein, or compete for binding with the antigen binding domains outlined herein. In some embodiments, the bispecific checkpoint antibody can contain one of the ABDs outlined herein and a second ABD that competes for binding with one of the ABDs outlined herein. In some embodiments both ABDs compete for binding with the corresponding ABD outlined herein. Binding competition is generally determined using at least one of a BIACORE®, surface plasmon resonance (SPR) and/or BLI (biolayer interferometry, e.g. OCTET® assay) assay, with the latter finding particular use in many embodiments.

### VII. USEFUL EMBODIMENTS

[0444] In one embodiment, a particular combination of skew and pI variants that finds use in the present invention is T366S/L368A/Y407V:T366W (optionally including a bridging disulfide, T366S/L368A/Y407V/Y349C:T366W/S354C) with one monomer comprises Q295E/N384D/Q418E/N481D and the other a positively charged scFv linker (when the format includes an scFv domain). As will be appreciated in the art, the “knobs in holes” variants do not change pI, and thus can be used on either monomer.

### VIII. NUCLEIC ACIDS OF THE INVENTION

[0445] The invention further provides nucleic acid compositions encoding the bispecific antibodies of the invention (or, in the case of “monospecific” antibodies, nucleic acids encoding those as well).

[0446] As will be appreciated by those in the art, the nucleic acid compositions will depend on the format and scaffold of the heterodimeric protein. Thus, for example, when the format requires three amino acid sequences, such as for all the formats depicted in FIG. 1 except for the dual scFv format, three nucleic acid sequences can be incorporated into one or more expression vectors for expression. Similarly, some formats (e.g. dual scFv formats such as disclosed in FIG. 1) only two nucleic acids are needed; again, they can be put into one or two expression vectors.

[0447] As is known in the art, the nucleic acids encoding the components of the invention can be incorporated into expression vectors as is known in the art, and depending on the host cells used to produce the heterodimeric antibodies of the invention. Generally the nucleic acids are operably linked to any number of regulatory elements (promoters, origin of replication, selectable markers, ribosomal binding sites, inducers, etc.). The expression vectors can be extra-chromosomal or integrating vectors.

[0448] The nucleic acids and/or expression vectors of the invention are then transformed into any number of different types of host cells as is well known in the art, including mammalian, bacterial, yeast, insect and/or fungal cells, with mammalian cells (e.g. CHO cells), finding use in many embodiments.

[0449] In some embodiments, nucleic acids encoding each monomer and the optional nucleic acid encoding a light chain, as applicable depending on the format, are each contained within a single expression vector, generally under different or the same promoter controls. In embodiments of particular use in the present invention, each of these two or three nucleic acids are contained on a different expression vector. As shown herein and in 62/025,931, hereby incorporated by reference, different vector ratios can be used to drive heterodimer formation. That is, surprisingly, while the proteins comprise first monomer:second monomer:light chains (in the case of many of the embodiments herein that have three polypeptides comprising the heterodimeric antibody) in a 1:1:2 ratio, these are not the ratios that give the best results.

[0450] The heterodimeric antibodies of the invention are made by culturing host cells comprising the expression vector(s) as is well known in the art. Once produced, traditional antibody purification steps are done, including an ion exchange chromotography step. As discussed herein, having the pIs of the two monomers differ by at least 0.5 can allow separation by ion exchange chromatography or isoelectric focusing, or other methods sensitive to isoelectric point. That is, the inclusion of pI substitutions that alter the isoelectric point (pI) of each monomer so that such that each monomer has a different pI and the heterodimer also has a distinct pI, thus facilitating isoelectric purification of the “triple F” heterodimer (e.g., anionic exchange columns, cationic exchange columns). These substitutions also aid in the determination and monitoring of any contaminating dual scFv-Fc and mAb homodimers post-purification (e.g., IEF gels, cIEF, and analytical IEX columns).

### IX. BIOLOGICAL AND BIOCHEMICAL FUNCTIONALITY OF THE HETERODIMERIC CHECKPOINT ANTIBODIES

[0451] Generally the bispecific checkpoint antibodies of the invention are administered to patients with cancer, and efficacy is assessed, in a number of ways as described herein. Thus, while standard assays of efficacy can be run, such as cancer load, size of tumor, evaluation of presence or extent of metastasis, etc., immuno-oncology treatments can be assessed on the basis of immune status evaluations as well. This can be done in a number of ways, including both in vitro and in vivo assays. For example, evaluation of changes in immune status (e.g. presence of ICOS+ CD4+ T cells following ipi treatment) along with “old fashioned” measurements such as tumor burden, size, invasiveness, LN involvement, metastasis, etc. can be done. Thus, any or all of the following can be evaluated: the inhibitory effects of the checkpoints on CD4+ T cell activation or proliferation, CD8+ T (CTL) cell activation or proliferation, CD8+ T cell-mediated cytotoxic activity and/or CTL mediated cell depletion, NK cell activity and NK mediated cell depletion, the potentiating effects of the checkpoints on Treg cell differentiation and proliferation and Treg- or myeloid derived suppressor cell (MDSC)-mediated immunosuppression or immune tolerance, and/or the effects of the checkpoints on proinflammatory cytokine production by immune cells, e.g., IL-2, IFN-γ or TNF-α production by T or other immune cells.

[0452] In some embodiments, assessment of treatment is done by evaluating immune cell proliferation, using for example, CFSE dilution method, Ki67 intracellular staining of immune effector cells, and 3H-Thymidine incorporation method,

[0453] In some embodiments, assessment of treatment is done by evaluating the increase in gene expression or increased protein levels of activation-associated markers, including one or more of: CD25, CD69, CD137, ICOS, PD1, GITR, OX40, and cell degranulation measured by surface expression of CD107A.

[0454] In general, gene expression assays are done as is known in the art.

[0455] In general, protein expression measurements are also similarly done as is known in the art.

[0456] In some embodiments, assessment of treatment is done by assessing cytotoxic activity measured by target cell viability detection via estimating numerous cell parameters such as enzyme activity (including protease activity), cell membrane permeability, cell adherence, ATP production, co-enzyme production, and nucleotide uptake activity. Specific examples of these assays include, but are not limited to, Trypan Blue or PI staining, 51Cr or 35S release method, LDH activity, MTT and/or WST assays, Calcein-AM assay, Luminescent based assay, and others.

[0457] In some embodiments, assessment of treatment is done by assessing T cell activity measured by cytokine production, measure either intracellularly in culture supernatant using cytokines including, but not limited to, IFNγ, TNFα, GM-CSF, IL2, IL6, IL4, IL5, IL10, IL13 using well known techniques.

[0458] Accordingly, assessment of treatment can be done using assays that evaluate one or more of the following: (i) increases in immune response, (ii) increases in activation of and/or γδ T cells, (iii) increases in cytotoxic T cell activity, (iv) increases in NK and/or NKT cell activity, (v) alleviation of αβ and/or γδ T-cell suppression, (vi) increases in pro-inflammatory cytokine secretion, (vii) increases in IL-2 secretion; (viii) increases in interferon-γ production, (ix) increases in Th1 response, (x) decreases in Th2 response, (xi) decreases or eliminates cell number and/or activity of at least one of regulatory T cells (Tregs.

[0459] Assays to Measure Efficacy

[0460] In some embodiments, T cell activation is assessed using a Mixed Lymphocyte Reaction (MLR) assay as is known in the art. An increase in activity indicates immunostimulatory activity. Appropriate increases in activity are outlined below.

[0461] In one embodiment, the signaling pathway assay measures increases or decreases in immune response as measured for an example by phosphorylation or de-phosphorylation of different factors, or by measuring other post translational modifications. An increase in activity indicates immunostimulatory activity. Appropriate increases in activity are outlined below.

[0462] In one embodiment, the signaling pathway assay measures increases or decreases in activation of αβ and/or γδ T cells as measured for an example by cytokine secretion or by proliferation or by changes in expression of activation markers like for an example CD137, CD107a, PD1, etc. An increase in activity indicates immunostimulatory activity. Appropriate increases in activity are outlined below.

[0463] In one embodiment, the signaling pathway assay measures increases or decreases in cytotoxic T cell activity as measured for an example by direct killing of target cells like for an example cancer cells or by cytokine secretion or by proliferation or by changes in expression of activation markers like for an example CD137, CD107a, PD1, etc. An increase in activity indicates immunostimulatory activity. Appropriate increases in activity are outlined below.

[0464] In one embodiment, the signaling pathway assay measures increases or decreases in NK and/or NKT cell activity as measured for an example by direct killing of target cells like for an example cancer cells or by cytokine secretion or by changes in expression of activation markers like for an example CD107a, etc. An increase in activity indicates immunostimulatory activity. Appropriate increases in activity are outlined below.

[0465] In one embodiment, the signaling pathway assay measures increases or decreases in and/or γδ T-cell suppression, as measured for an example by cytokine secretion or by proliferation or by changes in expression of activation markers like for an example CD137, CD107a, PD1, etc. An increase in activity indicates immunostimulatory activity. Appropriate increases in activity are outlined below.

[0466] In one embodiment, the signaling pathway assay measures increases or decreases in pro-inflammatory cytokine secretion as measured for example by ELISA or by LUMINEX® or by multiplex bead based methods or by intracellular staining and FACS analysis or by Alispot etc. An increase in activity indicates immunostimulatory activity. Appropriate increases in activity are outlined below.

[0467] In one embodiment, the signaling pathway assay measures increases or decreases in IL-2 secretion as measured for example by ELISA or by LUMINEX® or by multiplex bead based methods or by intracellular staining and FACS analysis or by Alispot etc. An increase in activity indicates immunostimulatory activity. Appropriate increases in activity are outlined below.

[0468] In one embodiment, the signaling pathway assay measures increases or decreases in interferon-γ production as measured for example by ELISA or by LUMINEX® or by multiplex bead based methods or by intracellular staining and FACS analysis or by Alispot etc. An increase in activity indicates immunostimulatory activity. Appropriate increases in activity are outlined below.

[0469] In one embodiment, the signaling pathway assay measures increases or decreases in Th1 response as measured for an example by cytokine secretion or by changes in expression of activation markers. An increase in activity indicates immunostimulatory activity. Appropriate increases in activity are outlined below.

[0470] In one embodiment, the signaling pathway assay measures increases or decreases in Th2 response as measured for an example by cytokine secretion or by changes in expression of activation markers. An increase in activity indicates immunostimulatory activity. Appropriate increases in activity are outlined below.

[0471] In one embodiment, the signaling pathway assay measures increases or decreases cell number and/or activity of at least one of regulatory T cells (Tregs), as measured for example by flow cytometry or by IHC. A decrease in response indicates immunostimulatory activity. Appropriate decreases are the same as for increases, outlined below.

[0472] In one embodiment, the signaling pathway assay measures increases or decreases in M2 macrophages cell numbers, as measured for example by flow cytometry or by IHC. A decrease in response indicates immunostimulatory activity. Appropriate decreases are the same as for increases, outlined below.

[0473] In one embodiment, the signaling pathway assay measures increases or decreases in M2 macrophage pro-tumorigenic activity, as measured for an example by cytokine secretion or by changes in expression of activation markers. A decrease in response indicates immunostimulatory activity. Appropriate decreases are the same as for increases, outlined below.

[0474] In one embodiment, the signaling pathway assay measures increases or decreases in N2 neutrophils increase, as measured for example by flow cytometry or by IHC. A decrease in response indicates immunostimulatory activity. Appropriate decreases are the same as for increases, outlined below.

[0475] In one embodiment, the signaling pathway assay measures increases or decreases in N2 neutrophils pro-tumorigenic activity, as measured for an example by cytokine secretion or by changes in expression of activation markers. A decrease in response indicates immunostimulatory activity. Appropriate decreases are the same as for increases, outlined below.

[0476] In one embodiment, the signaling pathway assay measures increases or decreases in inhibition of T cell activation, as measured for an example by cytokine secretion or by proliferation or by changes in expression of activation markers like for an example CD137, CD107a, PD1, etc. An increase in activity indicates immunostimulatory activity. Appropriate increases in activity are outlined below.

[0477] In one embodiment, the signaling pathway assay measures increases or decreases in inhibition of CTL activation as measured for an example by direct killing of target cells like for an example cancer cells or by cytokine secretion or by proliferation or by changes in expression of activation markers like for an example CD137, CD107a, PD1, etc. An increase in activity indicates immunostimulatory activity. Appropriate increases in activity are outlined below.

[0478] In one embodiment, the signaling pathway assay measures increases or decreases in αβ and/or γδ T cell exhaustion as measured for an example by changes in expression of activation markers. A decrease in response indicates immunostimulatory activity. Appropriate decreases are the same as for increases, outlined below.

[0479] In one embodiment, the signaling pathway assay measures increases or decreases αβ and/or γδ T cell response as measured for an example by cytokine secretion or by proliferation or by changes in expression of activation markers like for an example CD137, CD107a, PD1, etc. An increase in activity indicates immunostimulatory activity. Appropriate increases in activity are outlined below.

[0480] In one embodiment, the signaling pathway assay measures increases or decreases in stimulation of antigen-specific memory responses as measured for an example by cytokine secretion or by proliferation or by changes in expression of activation markers like for an example CD45RA, CCR7 etc. An increase in activity indicates immunostimulatory activity. Appropriate increases in activity are outlined below.

[0481] In one embodiment, the signaling pathway assay measures increases or decreases in apoptosis or lysis of cancer cells as measured for an example by cytotoxicity assays such as for an example MTT, Cr release, Calcine AM, or by flow cytometry based assays like for an example CFSE dilution or propidium iodide staining etc. An increase in activity indicates immunostimulatory activity. Appropriate increases in activity are outlined below.

[0482] In one embodiment, the signaling pathway assay measures increases or decreases in stimulation of cytotoxic or cytostatic effect on cancer cells. as measured for an example by cytotoxicity assays such as for an example MTT, Cr release, Calcine AM, or by flow cytometry based assays like for an example CFSE dilution or propidium iodide staining etc. An increase in activity indicates immunostimulatory activity. Appropriate increases in activity are outlined below.

[0483] In one embodiment, the signaling pathway assay measures increases or decreases direct killing of cancer cells as measured for an example by cytotoxicity assays such as for an example MTT, Cr release, Calcine AM, or by flow cytometry based assays like for an example CFSE dilution or propidium iodide staining etc. An increase in activity indicates immunostimulatory activity. Appropriate increases in activity are outlined below.

[0484] In one embodiment, the signaling pathway assay measures increases or decreases Th17 activity as measured for an example by cytokine secretion or by proliferation or by changes in expression of activation markers. An increase in activity indicates immunostimulatory activity. Appropriate increases in activity are outlined below.

[0485] In one embodiment, the signaling pathway assay measures increases or decreases in induction of complement dependent cytotoxicity and/or antibody dependent cell-mediated cytotoxicity, as measured for an example by cytotoxicity assays such as for an example MTT, Cr release, Calcine AM, or by flow cytometry based assays like for an example CFSE dilution or propidium iodide staining etc. An increase in activity indicates immunostimulatory activity. Appropriate increases in activity are outlined below.

[0486] In one embodiment, T cell activation is measured for an example by direct killing of target cells like for an example cancer cells or by cytokine secretion or by proliferation or by changes in expression of activation markers like for an example CD137, CD107a, PD1, etc. For T-cells, increases in proliferation, cell surface markers of activation (e.g. CD25, CD69, CD137, PD1), cytotoxicity (ability to kill target cells), and cytokine production (e.g. IL-2, IL-4, IL-6, IFNγ, TNF-α, IL-10, IL-17A) would be indicative of immune modulation that would be consistent with enhanced killing of cancer cells.

[0487] In one embodiment, NK cell activation is measured for example by direct killing of target cells like for an example cancer cells or by cytokine secretion or by changes in expression of activation markers like for an example CD107a, etc. For NK cells, increases in proliferation, cytotoxicity (ability to kill target cells and increases CD107a, granzyme, and perforin expression), cytokine production (e.g. IFNγ and TNF), and cell surface receptor expression (e.g. CD25) would be indicative of immune modulation that would be consistent with enhanced killing of cancer cells.

[0488] In one embodiment, γδ T cell activation is measured for example by cytokine secretion or by proliferation or by changes in expression of activation markers.

[0489] In one embodiment, Th1 cell activation is measured for example by cytokine secretion or by changes in expression of activation markers.

[0490] Appropriate increases in activity or response (or decreases, as appropriate as outlined above), are increases of 10%, 20%, 30%, 40%, 50%, 60%, 70%, 80%, 90%, 95% or 98 to 99% percent over the signal in either a reference sample or in control samples, for example test samples that do not contain an antibody of the invention. Similarly, increases of at least one-, two-, three-, four- or five-fold as compared to reference or control samples show efficacy.

### X. TREATMENTS

[0491] Once made, the compositions of the invention find use in a number of oncology applications, by treating cancer, generally by inhibiting the suppression of T cell activation (e.g. T cells are no longer suppressed) with the binding of the bispecific checkpoint antibodies of the invention.

[0492] Accordingly, the heterodimeric compositions of the invention find use in the treatment of these cancers.

### XI. COMBINATION THERAPIES

[0493] In some embodiments, when the bispecific checkpoint does not include an anti-PD-1 antigen binding domain, the bispecific antibody can be co-administered with a separate anti-PD-1 antibody such as pembrolizumab (Keytruda®) or nivolumab (Opdivo®). Co-administration can be done simultaneously or sequentially, as will be appreciated by those in the art.

[0494] That is, a CTLA-4×LAG-3 bispecific checkpoint antibody disclosed herein, or such as any of those that incorporate anti-LAG-3 sequences and anti-CTLA-4 sequences from the sequence listing, and in particular XENP22602, XENP 22675, XENP22841 or XENP 22843, can be co-administered with an anti-PD-1 antibody.

[0495] Similarly, a BTLA×CTLA-4 bispecific checkpoint disclosed herein, or such as any of those that incorporate anti-BTLA sequences and anti-CTLA-4 sequences from the sequence listing, can be co-administered with an anti-PD-1 antibody.

[0496] A CTLA-4×TIM-3 bispecific checkpoint antibody such as any of those that incorporate anti-TIM-3 sequences and anti-CTLA-4 sequences from the sequence listing, can be co-administered with an anti-PD-1 antibody.

[0497] A CTLA-4 and TIGIT bispecific checkpoint antibody such as any of those that incorporate anti-CTLA-4 and anti-TIGIT sequences from the sequence listing, can be co-administered with an anti-PD-1 antibody.

[0498] A TIM-3 and LAG-3 bispecific checkpoint antibody such as any of those that incorporate anti-TIM-3 sequences and anti-LAG-3 sequences from the sequence listing, can be co-administered with an anti-PD-1 antibody.

[0499] A TIM-3 and TIGIT bispecific checkpoint antibody such as any of those that incorporate anti-TIM-3 sequences and anti-TIGIT sequences from the sequence listing, can be co-administered with an anti-PD-1 antibody.

[0500] A TIM-3 and BTLA bispecific checkpoint antibody such as any of those that incorporate anti-TIM-3 and anti-BTLA sequences from the sequence listing, can be co-administered with an anti-PD-1 antibody.

[0501] A LAG-3 and TIGIT bispecific checkpoint antibody such as any of those that incorporate anti-LAG-3 sequences and anti-TIGIT sequences from the sequence listing, can be co-administered with an anti-PD-1 antibody.

[0502] A LAG-3 and BTLA bispecific checkpoint antibody such as any of those that incorporate anti-LAG-3 sequences and anti-BTLA sequences from the sequence listing, can be co-administered with an anti-PD-1 antibody.

[0503] A TIGIT and BTLA bispecific checkpoint antibody such as any of those that incorporate anti-TIGIT sequences and anti-BTLA sequences from the sequence listing, can be co-administered with an anti-PD-1 antibody.

### XII. ANTIBODY COMPOSITIONS FOR IN VIVO ADMINISTRATION

[0504] Formulations of the antibodies used in accordance with the present invention are prepared for storage by mixing an antibody having the desired degree of purity with optional pharmaceutically acceptable carriers, excipients or stabilizers (as generally outlined in Remington's Pharmaceutical Sciences 16th edition, Osol, A. Ed. [1980]), in the form of lyophilized formulations or aqueous solutions. Acceptable carriers, buffers, excipients, or stabilizers are nontoxic to recipients at the dosages and concentrations employed, and include buffers such as phosphate, citrate, and other organic acids; antioxidants including ascorbic acid and methionine; preservatives (such as octadecyldimethylbenzyl ammonium chloride; hexamethonium chloride; benzalkonium chloride, benzethonium chloride; phenol, butyl or benzyl alcohol; alkyl parabens such as methyl or propyl paraben; catechol; resorcinol; cyclohexanol; 3-pentanol; and m-cresol); low molecular weight (less than about 10 residues) polypeptides; proteins, such as serum albumin, gelatin, or immunoglobulins; hydrophilic polymers such as polyvinylpyrrolidone; amino acids such as glycine, glutamine, asparagine, histidine, arginine, or lysine; monosaccharides, disaccharides, and other carbohydrates including glucose, mannose, or dextrins; chelating agents such as EDTA; sugars such as sucrose, mannitol, trehalose or sorbitol; salt-forming counter-ions such as sodium; metal complexes (e.g. Zn-protein complexes); and/or non-ionic surfactants such as TWEEN™, PLURONICS™ or polyethylene glycol (PEG).

### Administrative Modalities

[0505] The antibodies and chemotherapeutic agents of the invention are administered to a subject, in accord with known methods, such as intravenous administration as a bolus or by continuous infusion over a period of time.

[0506] Treatment Modalities

[0507] In the methods of the invention, therapy is used to provide a positive therapeutic response with respect to a disease or condition. By “positive therapeutic response” is intended an improvement in the disease or condition, and/or an improvement in the symptoms associated with the disease or condition. For example, a positive therapeutic response would refer to one or more of the following improvements in the disease: (1) a reduction in the number of neoplastic cells; (2) an increase in neoplastic cell death; (3) inhibition of neoplastic cell survival; (5) inhibition (i.e., slowing to some extent, preferably halting) of tumor growth; (6) an increased patient survival rate; and (7) some relief from one or more symptoms associated with the disease or condition.

[0508] Positive therapeutic responses in any given disease or condition can be determined by standardized response criteria specific to that disease or condition. Tumor response can be assessed for changes in tumor morphology (i.e., overall tumor burden, tumor size, and the like) using screening techniques such as magnetic resonance imaging (MM) scan, x-radiographic imaging, computed tomographic (CT) scan, bone scan imaging, endoscopy, and tumor biopsy sampling including bone marrow aspiration (BMA) and counting of tumor cells in the circulation.

[0509] In addition to these positive therapeutic responses, the subject undergoing therapy may experience the beneficial effect of an improvement in the symptoms associated with the disease.

[0510] Treatment according to the present invention includes a “therapeutically effective amount” of the medicaments used. A “therapeutically effective amount” refers to an amount effective, at dosages and for periods of time necessary, to achieve a desired therapeutic result.

[0511] A therapeutically effective amount may vary according to factors such as the disease state, age, sex, and weight of the individual, and the ability of the medicaments to elicit a desired response in the individual. A therapeutically effective amount is also one in which any toxic or detrimental effects of the antibody or antibody portion are outweighed by the therapeutically beneficial effects.

[0512] A “therapeutically effective amount” for tumor therapy may also be measured by its ability to stabilize the progression of disease. The ability of a compound to inhibit cancer may be evaluated in an animal model system predictive of efficacy in human tumors.

[0513] Alternatively, this property of a composition may be evaluated by examining the ability of the compound to inhibit cell growth or to induce apoptosis by in vitro assays known to the skilled practitioner. A therapeutically effective amount of a therapeutic compound may decrease tumor size, or otherwise ameliorate symptoms in a subject. One of ordinary skill in the art would be able to determine such amounts based on such factors as the subject's size, the severity of the subject's symptoms, and the particular composition or route of administration selected.

[0514] Dosage regimens are adjusted to provide the optimum desired response (e.g., a therapeutic response). For example, a single bolus may be administered, several divided doses may be administered over time or the dose may be proportionally reduced or increased as indicated by the exigencies of the therapeutic situation. Parenteral compositions may be formulated in dosage unit form for ease of administration and uniformity of dosage. Dosage unit form as used herein refers to physically discrete units suited as unitary dosages for the subjects to be treated; each unit contains a predetermined quantity of active compound calculated to produce the desired therapeutic effect in association with the required pharmaceutical carrier.

[0515] The specification for the dosage unit forms of the present invention are dictated by and directly dependent on (a) the unique characteristics of the active compound and the particular therapeutic effect to be achieved, and (b) the limitations inherent in the art of compounding such an active compound for the treatment of sensitivity in individuals.

[0516] The efficient dosages and the dosage regimens for the bispecific antibodies used in the present invention depend on the disease or condition to be treated and may be determined by the persons skilled in the art.

[0517] An exemplary, non-limiting range for a therapeutically effective amount of an bispecific antibody used in the present invention is about 0.1-100 mg/kg.

[0518] All cited references are herein expressly incorporated by reference in their entirety.

[0519] Whereas particular embodiments of the invention have been described above for purposes of illustration, it will be appreciated by those skilled in the art that numerous variations of the details may be made without departing from the invention as described in the appended claims.

### EXAMPLES

[0520] Examples are provided below to illustrate the present invention. These examples are not meant to constrain the present invention to any particular application or theory of operation. For all constant region positions discussed in the present invention, numbering is according to the EU index as in Kabat (Kabat et al., 1991, Sequences of Proteins of Immunological Interest, 5th Ed., United States Public Health Service, National Institutes of Health, Bethesda, entirely incorporated by reference). Those skilled in the art of antibodies will appreciate that this convention consists of nonsequential numbering in specific regions of an immunoglobulin sequence, enabling a normalized reference to conserved positions in immunoglobulin families. Accordingly, the positions of any given immunoglobulin as defined by the EU index will not necessarily correspond to its sequential sequence.

[0521] General and specific scientific techniques are outlined in US Publications 2015/0307629, 2014/0288275 and WO2014/145806, all of which are expressly incorporated by reference in their entirety and particularly for the techniques outlined therein.

### A. Example 1: TILs from Multiple Cancer Types Co-Express Immune Checkpoint Receptors

[0522] To investigate potential associations between PD-1, CTLA-4, LAG-3, and BTLA, RNA sequencing data from The Cancer Genome Atlas project (TCGA) were used for analysis. V2 RSEM data were downloaded from FireBrowse (http://firebrowse.org/). Analysis was performed using R with custom routines. The correlation between PD-1 and CTLA-4 expression is depicted in FIG. 66, along with calculated R2 values (FIG. 1; square of the Pearson correlation coefficient). FIG. 66 further shows the correlation between PD-1 and LAG-3 expression, PD-1 and BTLA expression, and LAG-3 and CTLA-4 expression.

[0523] FIG. 44 shows that PD-1 and CTLA-4 were co-expressed in cancers including bladder, breast, colon, prostate, melanoma, ovarian and lung cancer. shows that the sets PD-1 and CTLA-4, PD-1 and LAG-3, PD-1 and BTLA, and LAG-3 and CTLA-4 were co-expressed in cancers including bladder, breast, colon, head & neck, kidney, lung-adeno, lung squamous, ovarian, pancreatic, prostate, and melanoma cancer.

### B. Example 2: Bispecific Immune Checkpoint Antibodies are Superior to Monospecific Immune Checkpoint Antibodies

[0524] Prototype immune checkpoint antibodies (e.g. nivolumab and ipilimumab) and bispecific immune checkpoint antibodies based on the prototype antibodies were produced to demonstrate the effect of dual checkpoint blockades. Unless otherwise stated, bispecifics are named herein using the Fab variable region first and the scFv variable region second. Amino acid sequences for the prototype antibodies are listed in the sequence listing. DNA encoding the heavy and light chains were generated by gene synthesis (BLUE HERON BIOTECHNOLOGY, Bothell, Wash.), subcloned using standard molecular biology techniques into the expression vector pTT5 containing bivalent or bispecific constant regions and transiently transfected in HEK293E cells. Antibodies were purified by Protein A chromatography (and cation exchange chromatography for bispecific antibodies). Purity was assessed by size exclusion chromatography, analytical cation exchange chromatography and capillary isoelectric focusing.

[0525] 1. Double-Positive Cells are Selectively Occupied by Bispecific Immune Checkpoint Antibodies

[0526] Selective targeting of tumor-reactive TILs expressing multiple immune checkpoint receptors (as shown in Example 1) over non-tumor reactive T cells expressing single immune checkpoint receptors could enhance anti-tumor activity while avoiding peripheral toxicity (as depicted in FIG. 42).

[0527] An SEB-stimulated PBMC assay was used to investigate binding of bispecific immune checkpoint antibodies to T cells. The SEB-stimulated PBMC assay is an in vitro method for assaying T helper (TH) cell proliferation and for generating a population of cytotoxic T lymphocytes (CTLs). When PBMCs are stimulated with staphylococcal enterotoxin B (SEB), TH cell populations expand, followed by expansion of a CTL population. PBMCs were stimulated with 100 ng/mL SEB for 3 days and then treated with a prototype anti-LAG-3×anti-PD-1 bispecific antibody and a negative control (NUMAX® bivalent) for 30 minutes at 4° C. Following treatment, cells were incubated with APC-labelled one-arm anti-LAG-3 antibody, FITC-labelled one-arm anti-PD-1 antibody and BV605-labelled anti-CD3 antibody for 30 minutes at 4° C. Scatter plots of the CD3⁺ T cells are depicted in FIG. 67. The data show that double-positive cells expressing both PD-1 and LAG-3 are selectively occupied by the anti-LAG-3×anti-PD-1 bispecific demonstrating that bispecific immune checkpoint antibodies selectively target T cells expressing multiple checkpoint receptors.

[0528] 2. Anti-CTLA-4×Anti-PD-1 Bispecific Enhances IL-2 Response in a Mixed Lymphocyte Reaction
[0529] Prototype immune checkpoint antibodies XENP16432 (nivolumab) and XENP16433 (ipilimumab), bispecific immune checkpoint antibody XENP16004 based on nivolumab and ipilimumab, and a one-arm (monospecific, monovalent) combination control were tested in a mixed-lymphocyte reaction (also known as a mixed-leukocyte reaction or MLR). The MLR is another in vitro method for assaying T helper (TH) cell proliferation and for generating a population of cytotoxic T lymphocytes (CTLs). When allogeneic (different MHC haplotype) lymphocytes are cultured together, TH cell populations expand, followed by expansion of a CTL population. Interleukin-2 (IL-2) secretion was used to monitor T cell activation.

[0530] Different sets of human PBMCs were purified from leukapheresis of different anonymous healthy volunteers (HemaCare, VanNuys, Calif.) using Ficoll-Paque™ Plus density gradients. PBMCs from two donors were mixed and then treated with 20 μg/mL of the indicated test articles. Supernatant was collected and concentration of IL-2 was measured using an IL-2 ELISA and data are shown in

[0531] depicts the results of some anti-CTLA-4 Fab screening. This depicts the XENP code for the Fab and scFv embodiments, the designation of the vh and vl engineered domains, the KD binding constant against human and cyno CTLA-4 as measured by OCTET®, and the Tm of the scFv and Fab. Additionally, the number of sequence 9-mers that were an exact match to at least one human VH or VL germline are depicted as a measure of humanness for the variable regions of both Fabs and scFvs.
[0532] FIG. 25A. For each column, each data point is a separate reaction with a different donor-donor combination.
[0533] The data show that the prototype anti-PD-1×anti-CTLA-4 bispecific antibody enhanced IL-2 response to a greater extent than nivolumab and ipilimumab alone. Notably, the one-arm combination (each monovalent arm of the bispecific added separately) is inferior to the anti-PD-1×anti-CTLA-4 bispecific, suggesting more avid binding of the bispecific to double-positive PD-1+CTLA-4+ cells which is consistent with the finding depicted in FIG. 67 for an anti-LAG-3×anti-PD-1 bispecific antibody.

[0534] 3. Additional Bispecific Immune Checkpoint Antibodies Enhance IL-2 Response in a Mixed Lymphocyte Reaction

[0535] Additional prototype immune checkpoint antibodies and bispecific immune checkpoint antibodies directed towards additional immune checkpoint receptors were tested in a MLR assay as described above. Two sets of MLRs were created where 20 donors were targeting 1 recipient donor and another set of 20 donors targeting another 1 recipient donor totaling 40 MLR reactions. Reactions were incubated with 20 μg/mL of indicated test articles for 6 days. Data depicting fold increase of IL-2 and IFNγ (as assayed by ELISA) following treatment with the indicated test articles over treatment with anti-PD-1 bivalent (XENP16432) are shown in FIG. 32. The data show that additional bispecific immune checkpoint antibodies were also superior to nivolumab alone in activating T cells.

[0536] 4. Triple Immune Checkpoint Blockade—Anti-PD-1 Bivalent and Anti-LAG-3×Anti-CTLA-4 Bispecific Antibodies are Synergistic in Enhancing IL-2 Response in an SEB-Stimulated PBMC Assay

[0537] It was hypothesized that a triple immune checkpoint blockade such as with an anti-PD-1 bivalent and an anti-LAG-3×anti-CTLA-4 bispecific as depicted in FIG. 43 would provide additional benefit in enhancing T cell activation. To test the hypothesis, prototype immune checkpoint antibodies XENP16432 (nivolumab), prototype bispecific anti-LAG-3×anti-CTLA-4 immune checkpoint antibody XENP16430 based on 25F7 and ipilimumab, and a combination of XENP16432 and XENP16430 were tested in a SEB-stimulated PBMC assay.

[0538] Human PBMCs from multiple donors were stimulated with 10 ng/ml of SEB for 72 h with 20 μg/mL of indicated test articles. Following treatment, cell supernatants were assayed for IL-2 by ELISA. Data are shown in FIG. 33 for fold increase in IL-2 over NUMAX® bivalent. Each point indicates a donor represented in technical singlet.

[0539] The data show that the anti-LAG-3×anti-CTLA-4 bispecific checkpoint antibody (XENP16430) alone enhanced the IL-2 response relative to control (NUMAX® bivalent), although enhancement is lower than nivolumab (XENP16432) alone. However, the anti-CTLA-4×anti-LAG-3 bispecific in combination with nivolumab leads to significantly higher IL-2 response than either alone.

[0540] 5. Blocking of Checkpoint Receptor/Ligand Interaction is Necessary for T Cell Activation

[0541] Prototype anti-BTLA antibodies 4A7, E8D9 and 8D5 were screened for their ability to block BTLA interaction with its ligand HVEM using OCTET®, a BioLayer Interferometry (BLI)-based method. Experimental steps for OCTET® generally included the following: Immobilization (capture of ligand or test article onto a biosensor); Association (dipping of ligand- or test article-coated biosensors into wells containing serial dilutions of the corresponding test article or ligand); and Dissociation (returning of biosensors to well containing buffer) in order to determine the monovalent affinity of the test articles. A reference well containing buffer alone was also included in the method for background correction during data processing. 500 nM of each anti-BTLA antibody and 100 nM BTLA-Fc were incubated for over an hour. Anti-Penta-HIS (HIS1K) biosensors were used to capture HVEM-Fc-His and then dipped into antibody/BTLA mixture to measure residual BTLA/HVEM binding. As depicted in FIG. 35B, 8D5 did not block BTLA/HVEM interaction while 4A7 and E8D9 blocked BTLA/HVEM interaction.

[0542] The prototype anti-BTLA antibodies and anti-BTLA×anti-PD-1 bispecific antibodies with anti-BTLA Fab arms based on the prototype antibodies were tested in an SEB-stimulated PBMC assay. Specifically, human PBMCs were stimulated with 20 ng/mL of SEB for 72 hours with 20 μg/mL of indicated test articles. Following treatment, cell supernatant were assayed for IL-2 by ELISA. Data are shown in FIG. 35A for fold increase of IL-2 over NUMAX® bivalent (each point represents an individual PBMC donor tested in singlet). The data show that bispecific antibody with the non-blocking 8D5 anti-BTLA Fab arm induced IL-2 significantly less than nivolumab indicating that blocking the BTLA/HVEM interaction is necessary for enhancing T cell activation.

[0543] 6. Bispecific Immune Checkpoint Antibodies Enhance Engraftment and Disease Activity in Human PBMC-Engrafted NSG Mice

[0544] Bispecific checkpoint antibodies were evaluated in a Graft-versus-Host Disease (GVHD) model conducted in NSG (NOD-SCID-gamma) immunodeficient mice. When the NSG mice were injected with human PBMCs, the human PBMCs developed an autoimmune response against mouse cells. Treatment of NSG mice injected with human PBMCs followed by treatment with immune checkpoint inhibitors de-repress the engrafted T cells and enhances engraftment.

[0545] 10 million human PBMCs were engrafted into NSG mice via IV-OSP on Day 0 followed by dosing with the indicated test articles (5 mg/kg or as indicated) on Day 1. CD45+ events were measured on Day 14 (FIG. 34). While the GVHD can be measured directly, increased CD45+ cell levels correlate with decreased body weight (depict a mixed lymphocyte reaction looking enhancement of IL-2 release by nivolumab (anti-PD-1 monoclonal antibody, marketed as Opdivo®) alone, ipilimumab alone (anti-CTLA-4 monoclonal antibody, marketed as Yervoy®), a prototype anti-CTLA-4×anti-PD-1 bispecific based on the nivolumab and ipilimumab arms, and a “one-armed” combination control.
[0546] FIG. 26B) and are predictive of disease.
[0547] The data show that the bispecific checkpoint antibodies of the invention enhance proliferation of CD45+ cells in human PBMC-engrafted NSG mice as compared to control (PBS+PBMC). Further, enhancement is greater using antibodies of the invention than that seen with nivolumab (XENP16432) alone. Furthermore, the anti-CTLA-4×anti-LAG-3 bispecific (XENP16430) in combination with nivolumab yielded the highest engraftment levels consistent with the data in Example 2D.

### C. Example 3: Hybridomas

[0548] 1. Hybridoma Generation
[0549] To develop PD-1, LAG-3 and BTLA targeting arms for bispecific immune checkpoint antibodies of the invention, monoclonal antibodies were first generated by hybridoma technology through IMMUNOPRECISE®, either through their STANDARD METHOD or RAPID PRIME® METHOD.
[0550] For the Standard Method, antigen(s) was injected into 3 BALB/c mice. 7-10 days before being sacrificed for hybridoma generation, the immunized mice received an antigen boost. Antibody titre is evaluated by ELISA on the antigen and the best responding mice are chosen for fusion. A final antigen boost is given 4 days prior to fusion. Lymphocytes from the mice are pooled, purified then fused with SP2/0 myeloma cells. Fused cells are grown on HAT selective Single-Step cloning media for 10-12 days at which point the hybridomas were ready for screening.
[0551] For the RAPID PRIME®method, antigen(s) was injected into 3 BALB/c mice. After 19 days, lymphocytes from all the mice are pooled, purified then fused with SP2/0 myeloma cells. Fused cells are grown on HAT selective Single-Step cloning media for 10-12 days at which point the hybridomas were ready for screening.
[0552] For generation of anti-PD-1 hybridomas, the STANDARD and RAPID PRIME® methods were used and the antigen(s) used were mouse Fc fusion of human PD-1 (huPD-1-mFc), mouse Fc fusion of cyno PD-1 (cynoPD-1-mFc), His-tagged human PD-1 (huPD-1-His), His-tagged cyno PD-1 (cynoPD-1-His) or mixtures thereof.
[0553] For generation of anti-BTLA hybridomas, the Standard and RAPID PRIME® methods were used and antigen used were mouse Fc fusion of human BTLA (huBTLA-mFc), mouse Fc fusion of cyno BTLA (cynoBTLA-mFc), His-tagged human BTLA (huBTLA-His), or mixture of huBTLA-mFc and cynoBTLA-mFc.
[0554] For generation of anti-LAG-3 hybridomas, the RAPID PRIME® method was used and antigen used were mouse Fc fusion of human LAG-3 (huLAG-3-mFc), mouse Fc fusion of cyno LAG-3 (cynoLAG-3-mFc), His-tagged human LAG-3 (huLAG-3-His), mixture of huLAG-3-mFc and cynoLAG-3-mFc, or mixture huLAG-3-His and cynoLAG-3-His.
[0555] For generation of anti-TIM-3 hybridomas, the Standard and RAPID PRIME® methods were used and antigen(s) used were mouse Fc fusion of human TIM-3 (huTIM-3-mFc), mouse Fc fusion of cyno TIM-3 (cynoTIM-3-mFc), His-tagged human TIM-3 (huTIM-3-His), His-tagged cyno TIM-3 (cynoTIM-3-His) or mixtures thereof.

[0556] 2. Screening Anti-PD-1 Hybridoma Clones
[0557] Anti-PD-1 hybridoma clones generated as described above were subject to two rounds of screening using OCTET®. For the first round, anti-mouse Fc (AMC) biosensors were used to capture the clones with dips into 500 nM of bivalent human and cyno PD-1-Fc-His. For the second round, clones identified in the first round that were positive for both human and cyno PD-1 were captured onto AMC biosensors and dipped into 500 nM monovalent human and cyno PD-1-His. Sequences for exemplary anti-PD-1 antibodies are in the sequence listing.

[0558] 3. Screening Anti-BTLA Hybridoma Clones
[0559] Anti-BTLA hybridoma clones generated as described above were subject to two rounds of screening using OCTET®. For the first round, AMC biosensors were used to capture the clones with dips into multiple concentrations of human and cyno BTLA-His to determine KD. For the second round, a blocking assay was used to identify clones which blocked BTLA/HVEM interaction. Anti-Penta-HIS (HIS1K) biosensors were used to capture HVEM-Fc-His and dipped into 25 nM BTLA-Fc alone or 25 nM BTLA-Fc+1:1 dilution of hybridoma samples to measure residual BTLA/HVEM binding. Sequences for exemplary anti-BTLA antibodies are in the sequence listing.

[0560] 4. Screening Anti-LAG-3 Hybridoma Clones
[0561] Anti-LAG-3 hybridoma clones generated as described above were subject to several rounds of screening to identify clones with high affinity, which block LAG-3 binding to Ramos cells endogenously expressing and which bind a different epitope than 25F7 mAb.
[0562] Affinity was determined using OCTET®. AMC biosensors were used to capture clones with dips into single concentration of human LAG-3-Fc and cyno LAG-3-Fc. To identify clones which block LAG-3/MHC-II interaction, 1 μg of human LAG-3-hIg in 10 μL was mixed with 50 μL of hybridoma supernatant (diluted 2-fold, 8 times in RPMI media with 10% FBS) for 20 minutes at room temperature. 40 μL of Daudi or Ramos cells (which endogenously express MHC-II) were added and incubated at 4° C. for 30 minutes. The cells were then washed and incubated with anti-human-Fc-Alexa647 secondary antibody for 30 minutes. Cells were then washed and analyzed by FACS for Alexa647. The data is depicted in FIG. 62. To identify clones which bind a different epitope than 25F7 mAb, AMC biosensors were used to capture clones with dips into 100 nM human LAG-3-hFc or 100 nM LAG-3-hFc with 500 nM 25F7 to measure residual binding. Sequences for exemplary anti-LAG-3 antibodies are in the sequence listing.

[0563] 5. Screening Anti-TIM-3 Hybridoma Clones
[0564] Anti-TIM-3 hybridoma clones generated as described above were subject to two rounds of screening. The first round was divided into screens for IgG samples and IgM clones. For IgG clones, AMC biosensors were used to capture the clones and were dipped into multiple concentrations of human and cyno TIM-3-His. For IgM clones, anti-IgM mAbs were coupled using AR2G onto biosensors which were dipped into multiple concentrations of human and cyno TIM-3-His. None of the IgM samples produced binding singals higher than baseline. Following the first round of screening, IgG clones which bound both human and cyno TIM-3 were rescreened with bivalent versions of bivalent human and cyno TIM-3-Fc. Sequences for exemplary anti-TIM-3 antibodies are in the sequence listing.
[0565] Several of the clones were chimerized and assessed for T cell binding in an SEB-stimulated PBMC assay. Human PBMCs were stimulated with 100 ng/mL SEB for 3 days. Following stimulation, cells were treated with indicated test articles for 30 minutes at 4 degrees. Binding on CD3⁺ cells was detected with an anti-human-Fc secondary antibody and depicted in FIG. 21.

[0566] 6. Component Antibody Domains Derived from Hybridomas Block Checkpoint Receptor/Ligand Interactions

[0567] As described in Example 2E, blocking of checkpoint receptor/ligand interaction is necessary for T cell activation. The blocking ability of exemplary antibodies comprising domains derived from hybridomas were investigated using either cell binding assays or OCTET® as depicted in are graphs showing that component antibody domains of the subject antibodies provided herein are capable of blocking checkpoint receptor/ligand interactions. In particular, a bispecific antibody comprising a 1G6 anti-PD-1 scFv arm is capable of blocking PD-1/PD-L1 and PD-1/PD-L2 interactions; 7G8 anti-LAG-3 one arm is capable of blocking LAG-3/MHC II interaction; a bispecific antibody comprising an exemplary anti-PD-1 Fab arm is capable of blocking CTLA-4/CD80 and CTLA-4/CD86 interactions; and a bispecific antibody comprising a 9C6 anti-BTLA Fab arm is capable of blocking BTLA/HVEM interaction.
[0568] FIG. 68.
[0569] Incubation of HEK293T exogenously expressing PD-1 with XENP20717 prevented binding by PD-L1 and PD-L2 to PD-1 in a dose dependent manner. Incubation of LAG-3 with XENP22606 prevented its binding to Daudi cells endogenously expressing MHC-II. Incubation of CTLA-4 with XENP20066 prevented residual binding to CD80 and CD86. Incubation of BTLA with XENP20895 prevented residual binding to HVEM.

### D. Example 4: Affinity and Stability Optimization

[0570] 1. Anti-PD-1 mAbs 1G6 and 2E9
[0571] The anti-PD-1 hybridoma clones 1G6 and 2E9 generated in Example 3 were engineered to have optimal affinity and stability in the context of scFv or Fab for use in a bispecific immune checkpoint inhibitor. The clones were first humanized using string content optimization (see, e.g., U.S. Pat. No. 7,657,380, issued Feb. 2, 2010). DNA encoding the heavy and light chains were generated by gene synthesis (Blue Heron Biotechnology, Bothell, Wash.) and subcloned using standard molecular biology techniques into the expression vector pTT5. The C-terminus of the scFv included a polyhistidine tag. A library of Fv variants was constructed by standard mutagenesis (QUIKCHANGE®, STRATAGENE®, Cedar Creek, Tex.) in the full-length bivalent, Fab-His and/or scFv-His formats. Bivalent mAbs were purified by standard protein A chromatography and Fab-His and scFv-His were purified by Ni-NTA chromatography. Sequences for exemplary 1G6 and 2E9 bivalent antibodies, Fabs and scFvs of the invention are listed in the sequence listing (although the polyhistidine tags have been removed for Fabs and scFvs). After the initial screen, combinations were made of variants of interest, and these were expressed, purified, and re-examined for affinity and stability.
[0572] Affinity screens of bivalent antibodies were performed using OCTET®. Anti-human Fc (AHC) biosensors were used to capture the test articles and dipped in multiple concentrations of PD-1-His for KD determination. Stability of scFv-His were evaluated using Differential Scanning Fluorimetry (DSF). DSF experiments were performed using a BIO-RAD® CFX CONNECT™ REAL-TIME PCR DETECTION SYSTEM. Proteins were mixed with SYPRO® Orange fluorescent dye and diluted to 0.2 mg/mL in PBS. The final concentration of SYPRO® Orange was 10×. After an initial 10 minute incubation period of 25° C., proteins were heated from 25 to 95° C. using a heating rate of 1° C./min. A fluorescence measurement was taken every 30 sec. Melting temperatures (Tₘ) were calculated using the instrument software. The affinity and stability results are shown in FIG. 23.

[0573] 2. Anti-CTLA-4 mAb
[0574] The parental variable region of an anti-CTLA-4 antibody was engineered for use as a component of various bispecifics. Two approaches were taken to attempt to identify variants with improved properties: (1) single, double, and triple amino acids substitutions were made via QUIKCHANGE® (STRATAGENE®, Cedar Creek, Tx.) mutagenesis, and (2) re-grafted sequences with their framework exchanged with alternative human germlines (IGHV3-7, IGHV3-13, IGHV3-21, IGHV3-64, IGKV3D-20, IGKV3-15) were constructed by DNA synthesis and subcloning. Variant Fabs and scFvs were designed, expressed, and purified. Affinities for human and cyno CTLA-4 were measured for Fabs using OCTET®. AHC biosensors were used to capture Fc fusions of human or cyno CTLA-4 and dipped into multiple concentrations of Fab test articles for KD determination. Thermal stabilities were measured for both Fabs and scFvs using DSF. Additionally, the number of sequence 9-mers that were an exact match to at least one human VH or VL germline were counted as a measure of humanness (see, e.g., U.S. Pat. No. 7,657,380, issued Feb. 2, 2010) for the variable regions of both Fabs and scFvs. After the initial screen, combinations were made of variants of interest, and these were expressed, purified, and re-examined for affinity and stability. Results are summarized in FIG. 24. Several variants possessed increased thermal stability over that of the parental variable region while retaining a similar affinity for both human and cyno CTLA-4. Additionally, increases in sequence humanness as measured by the number of human germline matching sequence 9-mers were identified for several variants. Preferred variants include: H0.25_L0, H0.26_L0, H0.27_L0, H0.29_L0, H0.38_L0, H0.39_L0, H0.40_L0, H0.70_L0, H0_L0.22, H2_L0, H3_L0, H3_L0.22, H3_L0.67, H3_L0.74, H3_L0.44, H3.4_L0.118, H3.4_L0.119, H3.4_L0.120, H3.4_L0.121, H3.4_L0.122, H3.4_L0.123, H3.4_L0.124, H3.4_L0.125, H3.4_L0.126, H3.4_L0.127, H3.4_L0.128, H3.4_L0.129, H3.4_L0.130, H3.4_L0.131, H3.4_L0.132, H3.5_L2.1, H3.5_L2.2, H3.5_L2.3, H3.21_L0.124, H3.21_L0.129, H3.21_L0.132, H3.23_L0.124, H3.23_L0.129, H3.23_L0.132, H3.25_L0.124, H3.25_L0.129, and H3.25_L0.132.

[0575] 3. Anti-BTLA mAb 9C6
[0576] The anti-BTLA hybridoma clone 9C6 generated in Example 3 was humanized and engineered to have optimal affinity and stability in bivalent antibody format as generally described above in Example 4A. Sequences for exemplary anti-BTLA bivalent antibodies of the invention are listed in the sequence listing.

[0577] Affinity screens for the variant bivalent antibodies were performed using OCTET®. AHC biosensors were used to capture the test articles and dipped into wells with multiple concentrations of BTLA-His for KD determination (shown in A and B show that anti-BTLA×anti-PD-1 chimeric bispecific promotes IFNγ secretion from SEB stimulated PBMCs. PBMCs were stimulated with 10 ng/mL SEB for 3 days with indicated test articles. Cell supernatants were collected and assayed with MSD for indicated analyte. A: 20 μg/mL test article; B 5 μg/mL test article.
[0578] FIG. 52).

[0579] 4. Anti-LAG-3 mAbs 7G8 and 2A11
[0580] The anti-LAG-3 hybridoma clones 7G8 and 2A11 generated in Example 3 were humanized and engineered to have optimal affinity and stability in the context of a Fab for use in a bispecific immune checkpoint inhibitor as generally described above in Example 4A. Sequences for exemplary anti-LAG-3 bivalent antibodies and Fabs of the invention are listed in the sequence listing.
[0581] Affinity and stability for variant anti-LAG-3 Fabs were determined as generally described above in Example 4A. AMC biosensors were used to capture mouse Fc fusions of human LAG-3 and dipped into wells containing multiple concentrations of the test articles to determine KD. The results are shown in FIG. 53 for 2A11 variants and FIG. 54 for 7G8 variants.
[0582] Exemplary variant 2A11 and 7G8 anti-LAG-3 bivalent antibodies were further screened for their ability to block LAG-3 binding to Daudi cells endogenously expressing MHC-II. 1 μg of LAG-3-mFc was mixed with indicated concentrations of mAb for 30 minutes at room temperature. Daudi cells were then added and incubated for 30 minutes at 4° C. LAG-3-mFc binding was detected with an anti-murine-Fc secondary antibody. The data is depicted in FIG. 63.

[0583] 5. Anti-TIM-3 mAbs
[0584] Anti-TIM-3 hybridoma clones generated in Example 3 were humanized and engineered to have optimal affinity and stability in bivalent antibody format as generally described above in Example 4A. Sequences for exemplary anti-TIM-3 bivalent antibodies of the invention are listed in the sequence listing.
[0585] Affinity screens for the variant bivalent antibodies were performed using OCTET®. AHC biosensors were used to capture the test articles and dipped into wells with multiple concentrations of TIM-3-His for KD determination (shown in FIG. 22).
[0586] Optimized variants were also tested for T cell binding in an SEB-stimulated PBMC assay. Human PBMCs were stimulated with 100 ng/mL SEB for 72 hours. Following stimulation, cells were treated with the indicated test articles. Binding of 3H3_H1_L2.1 (XENP21189) on CD3⁺ cells was detected with an anti-human-Fc secondary antibody and depicted in FIG. 21. Binding of 7B11_HJ1_L1.1 (XENP21196) on CD3⁺ cells was detected with an anti-human-IgG-APC secondary antibody and depicted in FIG. 21.

[0587] 6. Affinity Screens of Variant Anti-LAG-3×Anti-CTLA-4 Fab-scFv Bispecific Antibodies
[0588] Bispecific antibodies comprising anti-LAG-3 Fabs derived from the optimized anti-LAG-3 bivalent antibodies described in Example 4D and an exemplary anti-CTLA-4 scFv described in Example 4B were screened for affinity using OCTET® as generally described above. Specifically, AMC or HIS1K biosensors were used to capture mouse Fc fusion of human LAG-3 or His-Avi tagged TEV-Fc fusion of human LAG-3 and dipped into well containing the test articles to determine KD. Results are shown in FIG. 55.

[0589] 7. Affinity Screens of Variant Anti-LAG-3×Anti-PD-1 Fab-scFv Bispecific Antibodies.
[0590] Bispecific antibodies comprising anti-LAG-3 Fabs derived from the optimized anti-LAG-3 bivalent antibodies described in Example 4D and an exemplary anti-PD-1 scFv described in Example 4A were screened for affinity using OCTET® as generally described above. Specifically, AMC or HIS1K biosensors were used to capture mouse Fc fusion of human LAG-3 or His-Avi tagged TEV-Fc fusion of human LAG-3 and dipped into well containing the test articles to determine KD. Results are shown in FIG. 61.

### E. Example 5: In Vitro Assessment of Bispecific Immune Checkpoint Antibodies with Affinity and Stability Optimized Arms

[0591] 1. Anti-PD-1×Anti-CTLA-4 Bispecific Antibodies

[0592] a. Bispecific Anti-PD-1×Anti-CTLA-4 Bispecific Antibody Blocks PD-1 Interaction with PD-L1 and PD-L2

[0593] HEK293T cells expressing PD-1 were incubated with incubated with XENP20717 (anti-PD-1×anti-CTLA-4) and one-arm anti-PD-1 and anti-CTLA-4 controls (respectively XENP20111 and XENP20059) for 30 minutes at 4° C. Following incubation, PD-L1-mFc or PD-L2-mFc was added and allowed to further incubate for 30 minutes at 4° C. PD-L1-mFc and PD-L2-mFc were detected with anti-murine-IgG secondary antibody.
[0594] FIG. 45 show that XENP20717 was able to block the binding of PD-1 to ligands PD-L1 and PD-L2 in a dose dependent manner. XENP20111 was also able to block the binding of PD-1 to ligands PD-L1 and PD-L2, while XENP20559 did not block PD-1 binding to its ligands.

[0595] b. T Cell Binding of Bispecific Anti-CTLA-4×Anti-PD-1 Bispecific Antibody on CD3⁺ Cells
[0596] Human PBMCs were stimulated with 500 ng/mL SEB for 3 days, washed twice in culture medium and then re-stimulated with 500 ng/mL SEB for an additional 24 hours. The PBMCs were then treated with XENP20717 (anti-CTLA-4×anti-PD-1) for 30 minutes at 4° C. Following treatment, PBMCs were washed and incubated with anti-human-Fc-(Fab fragment specific)-APC secondary antibody (Jackson Labs) on CD3⁺ cells with an anti-CD3-FITC (UCHT1) mAb. PBMCs were then washed twice and analyzed by flow cytometry. FIG. 45 depicts the average MFI of 7 unique PBMC donors and shows binding of XENP20717 on CD3+ T cells and that binding was in a dose-dependent manner.

[0597] c. Assessment of Variant Anti-CTLA-4×Anti-PD-1 Bispecifics on T Cell Activation

[0598] Anti-CTLA-4×anti-PD-1 bispecific antibodies with variant anti-CTLA-4 Fab arms were tested in an MLR assay. Mixed PBMCs were treated with 69.5 nM of bivalent antibodies (e.g. nivolumab) or 139 nM of bispecific antibodies (e.g. XENP16004) for equimolar PD-1 binding concentrations. The data depicted in depicts the results of some anti-CTLA-4 Fab screening. This depicts the XENP code for the Fab and scFv embodiments, the designation of the vh and vl engineered domains, the KD binding constant against human and cyno CTLA-4 as measured by OCTET®, and the Tm of the scFv and Fab. Additionally, the number of sequence 9-mers that were an exact match to at least one human VH or VL germline are depicted as a measure of humanness for the variable regions of both Fabs and scFvs.
[0599] FIG. 25B show that a number of the bispecific antibodies enable IL-2 induction superior to nivolumab alone.
[0600] In an SEB-stimulated PBMC assay, PBMCs were treated with 500 ng/mL SEB for 2 days. Cells were then washed and treated with 20 μg/mL of XENP16432 (nivolumab) or XENP20717 and 500 ng/mL SEB. Supernatant was assayed for IL-2 as an indicator of T cell activation. The data depicted in FIG. 69 show that the anti-CTLA-4×anti-PD-1 bispecific induces significantly more IL-2 release than nivolumab alone.
[0601] In another study, XENP16432, XENP20717 and one-arm combination control were tested in an SEB-stimulated PBMC assay. PBMCs were stimulated with 500 ng/mL SEB for 2 days. Cells were then washed once with PBS and then culture medium with 20 μg/mL of indicated test articles and 500 ng/mL SEB was added. Supernatants were collected after 24 hours and assayed for IL-2. In a control experiment without SEB stimulation, PBMCs were treated with indicated test articles for 3 days before supernatant was assayed for IL-2. The fold-change in IL-2 concentration is depicted in FIG. 45A-C. As shown in FIG. 45B, XENP20717 enhanced IL-2 secretion significantly more than nivolumab did. The data show that XENP20717 activates T cells more potently than both anti-PD-1 bivalent alone as well as a combination of one-arm anti-PD-1 and one-arm anti-CTLA-4 demonstrating the advantage of selectively activating T cells expressing multiple immune checkpoint receptors. Notably, and consistent with the findings described in Example 2B, the bispecific XENP20717 enhanced IL-2 secretion to a greater extent than did the combination of one-arm antibodies derived from XENP20717.
[0602] An additional bispecific antibody targeting CTLA-4 and PD-1 with an anti-CTLA-4 scFv arm and a variant 2E9 anti-PD-1 Fab arm and control test articles were tested in an SEB-stimulated PBMC assay. Human PBMCs were stimulated with 100 ng/mL SEB for 2 days. Cells were washed and restimulated with 100 ng/mL SEB in combination with 20 μg/mL of the indicated test articles. Supernatants were assayed for IL-2 and IFNγ 24 hours after treatment (depicted respectively in FIGS. 19A and B).

[0603] 2. In Vitro Assessment of Anti-LAG-3×Anti-PD-1 Bispecific Checkpoint Antibodies

[0604] a. Assessment of Variant Anti-LAG-3×Anti-PD-1 Bispecifics on T Cell Activation
[0605] In an SEB-stimulated PBMC assay, PBMCs were treated with 500 ng/mL SEB for 2 days. Cells were then washed and treated with 20 μg/mL of XENP16432 (nivolumab) or XENP22604 and 500 ng/mL SEB. Supernatant was assayed for IL-2 as an indicator of T cell activation (depicted in FIG. 69).
[0606] Additional anti-LAG-3×anti-PD-1 bispecific antibodies with optimized 2A11 anti-LAG-3 Fab arms (derived from variant mAbs generated as described in Example 4) were also assessed for T cell activation in an SEB-stimulated PBMC assay. Human PBMCs from multiple donors were stimulated with 500 ng/ml of SEB for 2 days. Cells were then washed twice in culture medium and stimulated with 500 ng/mL SEB in combination with 10 μg/mL of indicated test articles. 24 hours after treatment, cell supernatants were assayed for IL-2 and IFNγ. Data are shown in FIG. 64 for fold increase in IL-2 and IFNγ over NUMAX® bivalent. Each point indicates a donor represented in technical singlet.
[0607] The data shows that a number of the anti-LAG-3×anti-PD-1 bispecific antibodies activate T cells more potently than either nivolumab alone or anti-LAG-3 bivalent alone.

[0608] 3. In Vitro Assessment of Anti-BTLA×Anti-PD-1 Bispecific Checkpoint Antibodies

[0609] a. T Cell Binding of Bispecific Anti-BTLA×Anti-PD-1 Bispecific Antibodies on CD3⁺ Cells
[0610] Anti-BTLA×anti-PD-1 bispecific antibodies with optimized anti-BTLA Fab arms (derived from variants mAbs generated as described in Example 4) were assessed for binding on T cells. Human PBMCs were stimulated with 100 ng/mL SEB for 3 days, after which the PBMCs were treated with the indicated test articles for 30 minutes at 4° C. PBMCs were then incubated with anti-human-Fc secondary antibody for 30 minutes at 4° C. FIG. 47 shows the binding of the indicated test articles on CD3⁺ cells.
[0611] The data show that the anti-PD-1×anti-BTLA bispecific checkpoint antibodies of the invention (e.g. XENP20895, XENP21220 and XENP21221) bind more avidly to T-cells compared to one-armed controls (e.g. XENP21446 and XENP16011). This demonstrates that binding to human T cells is generally better with bispecific antibodies, each arm monovalently binding a different antigen, than monovalent, monospecific antibodies such as the one-armed controls.

[0612] b. Assessment of Variant Anti-BTLA×Anti-PD-1 Bispecifics on T Cell Activation
[0613] Anti-BTLA×anti-PD-1 bispecific antibodies with prototype anti-BTLA (e.g. 4C7, 8D5 and E8D9) and 9C6 Fab arms were assessed for T cell activation in an SEB-stimulated PBMC assay. Human PBMCs from multiple donors were stimulated with 10 ng/ml of SEB for 72 h with 5 μg/mL or 20 μg/mL as indicated of test articles. Following treatment, cell supernatants were assayed for IL-2 and IFNγ by ELISA, depicted respectively in FIGS. 1J and 1K. The data show that bispecific antibodies comprising the 9C6 hybridoma derived arm enhanced T cell activation not only greater than anti-PD-1 bivalent alone did but also greater than did the bispecifics with the prototype anti-BTLA Fab arms.
[0614] An exemplary anti-BTLA×anti-PD-1 XENP21220 and XENP16432 (nivolumab) were assessed in an SEB-stimulated PBMC assay. PBMCs were treated with 500 ng/mL SEB for 2 days. Cells were then washed and treated with 20 μg/mL of XENP16432 or XENP21220 and 500 ng/mL SEB. Supernatant was assayed for IL-2 as an indicator of T cell activation (depicted in FIG. 69).
[0615] Additional anti-BTLA×anti-PD-1 bispecifics with variant 9C6 anti-BTLA Fab arms and one-arm variant 9C6 antibodies (alone and in combination with one-arm anti-PD-1 antibody) were assessed for T cell activation in an SEB-stimulated PBMC assay as described above. Data are shown in FIG. 1L for fold increase in IL-2 and IFNγ secretion over treatment with PBS.

[0616] 4. In Vitro Assessment of Anti-LAG-3×Anti-CTLA-4 Bispecific Checkpoint Antibodies

[0617] a. T Cell Binding of Bispecific Anti-BTLA×Anti-PD-1 Bispecific Antibodies on CD3⁺ Cells
[0618] Anti-LAG-3×anti-CTLA-4 bispecifics with variant anti-LAG-3 Fab arms and one-arm variant anti-LAG-3 antibodies were assessed for binding on T cells. Human PBMCs were stimulated with 100 ng/mL SEB for 3 days, after which the PBMCs were treated with the indicated test articles for 30 minutes at 4° C. Following treatment, PBMCs were incubated with anti-CD3-FITC and anti-human-Fc-APC antibodies for 30 minutes at 4° C. PBMCs were then washed twice and analyzed by flow cytometry. FIG. 56 shows the binding of the indicated test articles on CD3⁺ T cells.
[0619] The data show that a number of the anti-LAG-3×anti-CTLA-4 bispecific checkpoint antibodies of the invention (e.g. XENP22505 and XENP21896) bind more avidly to T-cells compared to one-armed controls (e.g. XENP22516). This demonstrates that binding to human T cells can be better with bispecific antibodies, each arm monovalently binding a different antigen, than monovalent, monospecific antibodies such as the one-armed controls.

[0620] b. T Cell Activation by Anti-LAG-3×Anti-CTLA-4 Bispecific Antibodies
[0621] Anti-LAG-3×anti-CTLA-4 bispecific antibodies were assessed for T cell activation in MLR and SEB-stimulated PBMC assays.
[0622] 40 MLR reactions were made in the presence of 20 μg/mL of the indicated test articles, and cell supernatant were assayed 6 days after treatment for IL-2 and IFNγ. FIG. 59 depicts fold induction in IL-2 and IFNγ over anti-RSV bivalent (XENP15074).
[0623] In an SEB-stimulated PBMC assay, PBMCs were treated with 500 ng/mL SEB for 2 days. Cells were then washed and treated with 20 μg/mL of XENP16432 (nivolumab), XENP22602 or a combination of XENP16432 and XENP22602 and 500 ng/mL SEB. Supernatant was assayed for IL-2 as an indicator of T cell activation (depicted in FIG. 69).
[0624] In another SEB-stimulated PBMC assays, additional anti-LAG-3×anti-CTLA-4 bispecific were assessed. Human PBMCs from multiple donors were stimulated with 500 ng/ml of SEB for 2 days. Cells were then washed twice in culture medium and stimulated with 500 ng/mL SEB in combination with 20 μg/mL of indicated test articles. 24 hours after treatment, cell supernatants were assayed for IL-2 and IFNγ. Data are shown in FIG. 57 and FIG. 58 and FIG. 60 for fold increase in IL-2 and IFNγ over NUMAX® bivalent. Each point indicates a donor represented in technical singlet.
[0625] The data is consistent with Example 2D in showing that a combination of anti-PD-1 bivalent and anti-LAG-3×anti-CTLA-4 bispecific exerts synergistic effect in T cell activation. Further, the data show that 7G8 based anti-LAG-3×anti-CTLA-4 bispecific antibodies exhibit more selective function on PBMCs than 2A11 based anti-LAG-3×anti-CTLA-4 bispecific antibodies

### F. Example 6: In Vivo Assessment of Bispecific Immune Checkpoint Antibodies

[0626] 1. Anti-CTLA-4×Anti-PD-1 Bispecifics Enhance Engraftment and Disease Activity in Human PBMC-Engrafted NSG Mice
[0627] In several GVHD studies, exemplary anti-CTLA-4×anti-PD-1 bispecific antibodies of the invention were shown to enhance engraftment and disease activity in human PBMC-engrafted NSG mice.
[0628] In a first study, 10 million human PBMCs were engrafted into NSG mice via IV-OSP on Day 0. On day 1, the mice were dosed with XENP16432 (2.89 mg/kg), XENP20053 (2 mg/kg) and a combination of XENP16432 and XENP16433 (2.89+2.92 mg/kg). CD45+ cell counts were measured on Day 14 (depicted in FIG. 70).

[0629] Additional anti-CTLA-4×anti-PD-1 bispecifics with variant anti-CTLA-4 Fab and anti-PD-1 scFv arms were assessed. 10 million human PBMCs were engrafted into NSG mice via IV-OSP on Day 0 followed by dosing with the indicated test articles (5 mg/kg or as indicated) on Day 1. CD45+ cell counts were measured on Day 14 (FIG. 1QA, FIG. 1RA and FIG. 1S). IFNγ levels were also measured as an additional indicator of GVHD and plotted against CD45+ cell levels (depicts mixed lymphocyte reaction looking at enhancement of IL-2 release by anti-CTLA-4×anti-PD-1 bispecific antibodies with variant anti-CTLA-4 Fab arms and variant anti-PD-1 scFv arms, as well as nivolumab alone, ipilimumab alone, and a prototype anti-CTLA-4×anti-PD-1 bispecific based on the nivolumab and ipilimumab arms as controls (depicted in FIG. 27 and FIG. 30).

[0630] The data show that the anti-PD-1×anti-CTLA-4 bispecific checkpoint antibodies of the invention enhance proliferation of CD45+ cells in human PBMC-engrafted NSG mice as compared to control (PBS+PBMC). Further, enhancement is greater using antibodies of the invention than that seen with nivolumab (XENP16432) alone. FIG. 31 shows the comparison of test article effect on CD45+ cell proliferation between studies 160314 (presented in FIG. 26) and 160331 (presented in FIG. 29). Both studies consistently demonstrate superiority of anti-PD-1×anti-CTLA-4 bispecific checkpoint antibodies over nivolumab alone.

[0631] In another study, an anti-CTLA-4×anti-PD-1 bispecific antibody with Xtend Fc was assessed. PBMC-engrafted mice were dosed with indicated test articles at indicated concentrations and CD45+, CD4+ and CD8+ events were measured on Day 14 (depicted in FIG. 20).

[0632] 2. Anti-BTLA×Anti-PD-1 Bispecifics Enhance Engraftment and Disease Activity in Human PBMC-Engrafted NSG Mice

[0633] In a first study, 10 million human PBMCs were engrafted into NSG mice via IV-OSP on Day 0. On day 1, the mice were dosed with XENP16432 (2.89 mg/kg) and XENP20895 (5 mg/kg). CD45+ cell counts were measured on Day 14 (depicted in FIG. 70).

[0634] Anti-BTLA×anti-PD-1 bispecific XENP20895 was assessed in a second GVHD study. 10 million human PBMCs were engrafted into NSG mice via IV-OSP on Day 0 followed by dosing with the indicated test articles (at concentrations as indicated) on Day 1. CD45+ cell counts and IFNγ were measured on Days 10, 14 and 22 (depicted respectively in FIG. 51).

[0635] 3. Anti-LAG-3×Anti-PD-1 Bispecifics Enhance Engraftment and Disease Activity in Human PBMC-Engrafted NSG Mice

[0636] In a GVHD, 10 million human PBMCs were engrafted into NSG mice via IV-OSP on Day 0. On day 1, the mice were dosed with XENP16432 (2.89 mg/kg) and XENP22672 (5 mg/kg). CD45+ cell counts were measured on Day 14 (depicted in FIG. 70).

[0637] In the second study described in Example 6A, another exemplary anti-LAG-3×anti-PD-1 (XENP22847) was also assessed (FIG. 20C).

[0638] 4. Anti-LAG-3×Anti-CTLA-4 Bispecifics Enhance Engraftment and Disease Activity in Human PBMC-Engrafted NSG Mice

[0639] In a GVHD, 10 million human PBMCs were engrafted into NSG mice via IV-OSP on Day 0. On day 1, the mice were dosed with XENP16432 (2.89 mg/kg), XENP22675 (5 mg/kg) and a combination of XENP16432 and XENP22675 (5+5 mg/kg). CD45+ cell counts were measured on Day 14 (depicted in FIG. 70).

[0640] The data shows that XENP22675 enhances engraftment and disease activity over dosing with nivolumab alone. Notably, XENP22675 in combination with nivolumab acts synergistically to further enhance engraftment.

### G. Example 7: Anti-PD-1×Anti-CTLA-4 Bispecific Antibodies Exhibit Anti-Tumor Activity in NSG Mice Engrafted with KG1A-Luc Cancer Cells and Human PBMCs

[0641] NOD SCID gamma (NSG) mice were engrafted with KG1A-luc cancer cells on Day 0. On Day 21, human PBMCs were engrafted into the intraperitoneally into the mice. After PBMC engraftment, indicated test articles were dosed weekly by intraperitoneal injection (control mice were dosed with PBS). Tumor growth was monitored by measuring total flux per mouse using an in vivo imaging system (IVIS® Lumina III) and data are shown (days post 1st dose) in FIG. 71.

### XIII. INCORPORATION BY REFERENCE

[0642] The claim sets from “Anti-CTLA-4”, claim set A1 to A30, “Anti-PD-1”, claim set B1 to B30, “Anti-LAG-3”, claim set C1 to C28, “Anti-TIM-3”, claim set D1 to D28, “Anti-TIGIT”, claim set E1 to E28, “Anti-BTLA” claim set F1 to F28, “Backbone plus Fvs”, claim set Y1 to Y5, and “Specific molecules”, claim set X1 to X16, from U.S. Ser. No. 62/420,500 are expressly incorporated by reference in their entirety.

The application's sequence listing, which the Patent Office published only in electronic form, follows.

SEQUENCE LISTING (39181 sequences)

SEQ ID NO: 1 - protein, 288 aa, Homo sapiens
MQIPQAPWPVVWAVLQLGWRPGWFLDSPDRPWNPPTFSPALLVVTEGDNATFTCSFSNTSESFVLNWYRMSPSNQTDKLAAFPEDRSQPGQDCRFRVTQLPNGRDFHMSVVRARRNDSGTYLCGAISLAPKAQIKESLRAELRVTERRAEVPTAHPSPSPRPAGQFQTLVVGVVGGLLGSLVLLVWVLAVICSRAARGTIGARRTGQPLKEDPSAVPVFSVDYGELDFQWREKTPEPPVPCVPEQTEYATIVFPSGMGTSSPARRGSADGPRSAQPLRPEDGHCSWPL

SEQ ID NO: 2 - protein, 150 aa, Homo sapiens [sequence omitted]

SEQ ID NO: 3 - protein, 288 aa, Macaca fascicularis
MQIPQAPWPVVWAVLQLGWRPGWFLESPDRPWNAPTFSPALLLVTEGDNATFTCSFSNASESFVLNWYRMSPSNQTDKLAAFPEDRSQPGQDCRFRVTRLPNGRDFHMSVVRARRNDSGTYLCGAISLAPKAQIKESLRAELRVTERRAEVPTAHPSPSPRPAGQFQALVVGVVGGLLGSLVLLVWVLAVICSRAAQGTIEARRTGQPLKEDPSAVPVFSVDYGELDFQWREKTPEPPAPCVPEQTEYATIVFPSGLGTSSPARRGSADGPRSPRPLRPEDGHCSWPL

SEQ ID NO: 4 - protein, 150 aa, Macaca fascicularis
PGWFLESPDRPWNAPTFSPALLLVTEGDNATFTCSFSNASESFVLNWYRMSPSNQTDKLAAFPEDRSQPGQDCRFRVTRLPNGRDFHMSVVRARRNDSGTYLCGAISLAPKAQIKESLRAELRVTERRAEVPTAHPSPSPRPAGQFQALV

SEQ ID NO: 5 - protein, 223 aa, Homo sapiens
MACLGFQRHKAQLNLATRTWPCTLLFFLLFIPVFCKAMHVAQPAVVLASSRGIASFVCEYASPGKATEVRVTVLRQADSQVTEVCAATYMMGNELTFLDDSICTGTSSGNQVNLTIQGLRAMDTGLYICKVELMYPPPYYLGIGNGTQIYVIDPEPCPDSDFLLWILAAVSSGLFFYSFLLTAVSLSKMLKKRSPLTTGVYVKMPPTEPECEKQFQPYFIPIN

SEQ ID NO: 6 - protein, 126 aa, Homo sapiens [sequence omitted]

SEQ ID NO: 7 - protein, 223 aa, Macaca fascicularis
MACLGFQRHKARLNLATRTRPYTLLFSLLFIPVFSKAMHVAQPAVVLANSRGIASFVCEYASPGKATEVRVTVLRQADSQVTEVCAATYMMGNELTFLDDSICTGTSSGNQVNLTIQGLRAMDTGLYICKVELMYPPPYYMGIGNGTQIYVIDPEPCPDSDFLLWILAAVSSGLFFYSFLLTAVSLSKMLKKRSPLTTGVYVKMPPTEPECEKQFQPYFIPIN

SEQ ID NO: 8 - protein, 126 aa, Macaca fascicularis
KAMHVAQPAVVLANSRGIASFVCEYASPGKATEVRVTVLRQADSQVTEVCAATYMMGNELTFLDDSICTGTSSGNQVNLTIQGLRAMDTGLYICKVELMYPPPYYMGIGNGTQIYVIDPEPCPDSD

SEQ ID NO: 9 - protein, 525 aa, Homo sapiens
MWEAQFLGLLFLQPLWVAPVKPLQPGAEVPVVWAQEGAPAQLPCSPTIPLQDLSLLRRAGVTWQHQPDSGPPAAAPGHPLAPGPHPAAPSSWGPRPRRYTVLSVGPGGLRSGRLPLQPRVQLDERGRQRGDFSLWLRPARRADAGEYRAAVHLRDRALSCRLRLRLGQASMTASPPGSLRASDWVILNCSFSRPDRPASVHWFRNRGQGRVPVRESPHHHLAESFLFLPQVSPMDSGPWGCILTYRDGFNVSIMYNLTVLGLEPPTPLTVYAGAGSRVGLPCRLPAGVGTRSFLTAKWTPPGGGPDLLVTGDNGDFTLRLEDVSQAQAGTYTCHIHLQEQQLNATVTLAIITVTPKSFGSPGSLGKLLCEVTPVSGQERFVWSSLDTPSQRSFSGPWLEAQEAQLLSQPWQCQLYQGERLLGAAVYFTELSSPGAQRSGRAPGALPAGHLLLFLILGVLSLLLLVTGAFGFHLWRRQWRPRRFSALEQGIHPPQAQSKIEELEQEPEPEPEPEPEPEPEPEPEQL

SEQ ID NO: 10 - protein, 422 aa, Homo sapiens
VPVVWAQEGAPAQLPCSPTIPLQDLSLLRRAGVTWQHQPDSGPPAAAPGHPLAPGPHPAAPSSWGPRPRRYTVLSVGPGGLRSGRLPLQPRVQLDERGRQRGDFSLWLRPARRADAGEYRAAVHLRDRALSCRLRLRLGQASMTASPPGSLRASDWVILNCSFSRPDRPASVHWFRNRGQGRVPVRESPHHHLAESFLFLPQVSPMDSGPWGCILTYRDGFNVSIMYNLTVLGLEPPTPLTVYAGAGSRVGLPCRLPAGVGTRSFLTAKWTPPGGGPDLLVTGDNGDFTLRLEDVSQAQAGTYTCHIHLQEQQLNATVTLAIITVTPKSFGSPGSLGKLLCEVTPVSGQERFVWSSLDTPSQRSFSGPWLEAQEAQLLSQPWQCQLYQGERLLGAAVYFTELSSPGAQRSGRAPGALPAGHL

SEQ ID NO: 11 - protein, 533 aa, Macaca fascicularis
  VARIANT 74: note = Any amino acid
MWEAQFLGLLFLQPLWVAPVKPPQPGAEISVVWAQEGAPAQLPCSPTIPLQDLSLLRRAGVTWQHQPDSGPPAXAPGHPPVPGHRPAAPYSWGPRPRRYTVLSVGPGGLRSGRLPLQPRVQLDERGRQRGDFSLWLRPARRADAGEYRATVHLRDRALSCRLRLRVGQASMTASPPGSLRTSDWVILNCSFSRPDRPASVHWFRSRGQGRVPVQGSPHHHLAESFLFLPHVGPMDSGLWGCILTYRDGFNVSIMYNLTVLGLEPATPLTVYAGAGSRVELPCRLPPAVGTQSFLTAKWAPPGGGPDLLVAGDNGDFTLRLEDVSQAQAGTYICHIRLQGQQLNATVTLAIITVTPKSFGSPGSLGKLLCEVTPASGQEHFVWSPLNTPSQRSFSGPWLEAQEAQLLSQPWQCQLHQGERLLGAAVYFTELSSPGAQRSGRAPGALRAGHLPLFLILGVLFLLLLVTGAFGFHLWRRQWRPRRFSALEQGIHPPQAQSKIEELEQEPELEPEPELERELGPEPEPGPEPEPEQL

SEQ ID NO: 12 - protein, 422 aa, Macaca fascicularis
  VARIANT 46: note = Any amino acid
ISVVWAQEGAPAQLPCSPTIPLQDLSLLRRAGVTWQHQPDSGPPAXAPGHPPVPGHRPAAPYSWGPRPRRYTVLSVGPGGLRSGRLPLQPRVQLDERGRQRGDFSLWLRPARRADAGEYRATVHLRDRALSCRLRLRVGQASMTASPPGSLRTSDWVILNCSFSRPDRPASVHWFRSRGQGRVPVQGSPHHHLAESFLFLPHVGPMDSGLWGCILTYRDGFNVSIMYNLTVLGLEPATPLTVYAGAGSRVELPCRLPPAVGTQSFLTAKWAPPGGGPDLLVAGDNGDFTLRLEDVSQAQAGTYICHIRLQGQQLNATVTLAIITVTPKSFGSPGSLGKLLCEVTPASGQEHFVWSPLNTPSQRSFSGPWLEAQEAQLLSQPWQCQLHQGERLLGAAVYFTELSSPGAQRSGRAPGALRAGHL

SEQ ID NO: 13 - protein, 289 aa, Homo sapiens
MKTLPAMLGTGKLFWVFFLIPYLDIWNIHGKESCDVQLYIKRQSEHSILAGDPFELECPVKYCANRPHVTWCKLNGTTCVKLEDRQTSWKEEKNISFFILHFEPVLPNDNGSYRCSANFQSNLIESHSTTLYVTDVKSASERPSKDEMASRPWLLYRLLPLGGLPLLITTCFCLFCCLRRHQGKQNELSDTAGREINLVDAHLKSEQTEASTRQNSQVLLSETGIYDNDPDLCFRMQEGSEVYSNPCLEENKPGIVYASLNHSVIGPNSRLARNVKEAPTEYASICVRS

SEQ ID NO: 14 - protein, 127 aa, Homo sapiens
KESCDVQLYIKRQSEHSILAGDPFELECPVKYCANRPHVTWCKLNGTTCVKLEDRQTSWKEEKNISFFILHFEPVLPNDNGSYRCSANFQSNLIESHSTTLYVTDVKSASERPSKDEMASRPWLLYR

SEQ ID NO: 15 - protein, 289 aa, Macaca fascicularis
MKTLPAMLGSGRLFWVVFLIPYLDIWNIHGKESCDVQLYIKRQSYHSIFAGDRFKLECPVKYCAHRPQVTWCKLNGTTCVKLEGRHTSWKQEKNLSFFILHFEPVLPSDNGSYRCSANFLSAIIESHSTTLYVTDVKSASERPSKDEMASRPWLLYSLLPLGGLPLLITTCFCLFCFLRRHQGKQNELSDTTRREITLVDVPFKSEQTEASTRQNSQVLLSETGIYDNEPDFCFRMQEGSEVYSNPCLEENKPGIIYASLNHSIIGLNARQARNVKEAPTEYASICVRS

SEQ ID NO: 16 - protein, 127 aa, Macaca fascicularis
KESCDVQLYIKRQSYHSIFAGDRFKLECPVKYCAHRPQVTWCKLNGTTCVKLEGRHTSWKQEKNLSFFILHFEPVLPSDNGSYRCSANFLSAIIESHSTTLYVTDVKSASERPSKDEMASRPWLLYS

SEQ ID NO: 17 - protein, 300 aa, Homo sapiens
MFSHLPFDCVLLLLLLLLTRSSEVEYRAEVGQNAYLPCFYTPAAPGNLVPVCWGKGACPVFECGNVVLRTDERDVNYWTSRYWLNGDFRKGDVSLTIENVTLADSGIYCCRIQIPGIMNDEKFNLKLVIKPAKVTPAPTRQRDFTAAFPRMLTTRGHGPAETQTLGSLPDINLTQISTLANELRDSRLANDLRDSGATIRIGIYIGAGICAGLALALIFGALIFKWYSHSKEKIQNLSLISLANLPPSGLANAVAEGIRSEENIYTIEENVYEVEEPNEYYCYVSSRQQPSQPLGCRFAM

SEQ ID NO: 18 - protein, 181 aa, Homo sapiens
SEVEYRAEVGQNAYLPCFYTPAAPGNLVPVCWGKGACPVFECGNVVLRTDERDVNYWTSRYWLNGDFRKGDVSLTIENVTLADSGIYCCRIQIPGIMNDEKFNLKLVIKPAKVTPAPTRQRDFTAAFPRMLTTRGHGPAETQTLGSLPDINLTQISTLANELRDSRLANDLRDSGATIRIG

SEQ ID NO: 19 - protein, 302 aa, Macaca fascicularis
MFSHLPFDCVLLLLLLLLTRSSEVEYIAEVGQNAYLPCSYTPAPPGNLVPVCWGKGACPVFDCSNVVLRTDNRDVNDRTSGRYWLKGDFHKGDVSLTIENVTLADSGVYCCRIQIPGIMNDEKHNVKLVVIKPAKVTPAPTLQRDLTSAFPRMLTTGEHGPAETQTPGSLPDVNLTVSNFFCELQIFTLTNELRDSGATIRTAIYIAAGISAGLALALIFGALIFKWYSHSKEKTQNLSLISLANIPPSGLANAVAEGIRSEENIYTIEEDVYEVEEPNEYYCYVSSGQQPSQPLGCRVAMP

SEQ ID NO: 20 - protein, 182 aa, Macaca fascicularis
SEVEYIAEVGQNAYLPCSYTPAPPGNLVPVCWGKGACPVFDCSNVVLRTDNRDVNDRTSGRYWLKGDFHKGDVSLTIENVTLADSGVYCCRIQIPGIMNDEKHNVKLVVIKPAKVTPAPTLQRDLTSAFPRMLTTGEHGPAETQTPGSLPDVNLTVSNFFCELQIFTLTNELRDSGATIRTA

SEQ ID NO: 21 - protein, 246 aa, synthetic construct
  source 1..246: note = Description of Artificial Sequence: Synthetic polypeptide; note = XENP019533 [CTLA-4]_H0_L0_scFv(GKPGS)4
QVQLVESGGGVVQPGRSLRLSCAASGFTFSSYTMHWVRQAPGKGLEWVTFISYDGNNKYYADSVKGRFTISRDNSKNTLYLQMNSLRAEDTAIYYCARTGWLGPFDYWGQGTLVTVSSGKPGSGKPGSGKPGSGKPGSEIVLTQSPGTLSLSPGERATLSCRASQSVGSSYLAWYQQKPGQAPRLLIYGAFSRATGIPDRFSGSGSGTDFTLTISRLEPEDFAVYYCQQYGSSPWTFGQGTKVEIK

SEQ ID NO: 22 - protein, 118 aa, synthetic construct
  source 1..118: note = Description of Artificial Sequence: Synthetic polypeptide; note = VH of XENP019533
QVQLVESGGGVVQPGRSLRLSCAASGFTFSSYTMHWVRQAPGKGLEWVTFISYDGNNKYYADSVKGRFTISRDNSKNTLYLQMNSLRAEDTAIYYCARTGWLGPFDYWGQGTLVTVSS

SEQ ID NO: 23 - protein, 108 aa, synthetic construct
  source 1..108: note = Description of Artificial Sequence: Synthetic polypeptide; note = VL of XENP019533
EIVLTQSPGTLSLSPGERATLSCRASQSVGSSYLAWYQQKPGQAPRLLIYGAFSRATGIPDRFSGSGSGTDFTLTISRLEPEDFAVYYCQQYGSSPWTFGQGTKVEIK

SEQ ID NO: 24 - protein, 5 aa, synthetic construct
  source 1..5: note = Description of Artificial Sequence: Synthetic peptide; note = XENP019533 vhCDR1
SYTMH

SEQ ID NO: 25 - protein, 17 aa, synthetic construct
  source 1..17: note = Description of Artificial Sequence: Synthetic peptide; note = XENP019533 vhCDR2
FISYDGNNKYYADSVKG

SEQ ID NO: 26 - protein, 9 aa, synthetic construct
  source 1..9: note = Description of Artificial Sequence: Synthetic peptide; note = XENP019533 vhCDR3
TGWLGPFDY

SEQ ID NO: 27 - protein, 12 aa, synthetic construct
  source 1..12: note = Description of Artificial Sequence: Synthetic peptide; note = XENP019533 vlCDR1
RASQSVGSSYLA

SEQ ID NO: 28 - protein, 7 aa, synthetic construct
  source 1..7: note = Description of Artificial Sequence: Synthetic peptide; note = XENP019533 vlCDR2
GAFSRAT

SEQ ID NO: 29 - protein, 9 aa, synthetic construct
  source 1..9: note = Description of Artificial Sequence: Synthetic peptide; note = XENP019533 vlCDR3
QQYGSSPWT

SEQ ID NO: 30 - protein, 246 aa, synthetic construct
  source 1..246: note = Description of Artificial Sequence: Synthetic polypeptide; note = XENP019534 [CTLA-4]_H0.36_L0.50_scFv(GKPGS)4
QVQLVESGGGVVQPGRSLRLSCAASGFTFSSYTMHWVRKAPGKGLEWVTFISYDGNNKYYADSVKGRFTISRDNSKNTLYLQMNSLRAEDTAIYYCARTGWLGPFDYWGQGTLVTVSSGKPGSGKPGSGKPGSGKPGSEIVLTQSPGTLSLSPGERATLSCRASQSVGSSYLAWYQEKPGQAPRLLIYGAFSRATGIPDRFSGSGSGTDFTLTISRLEPEDFAVYYCQQYGSSPWTFGQGTKVEIK

SEQ ID NO: 31 - protein, 118 aa, synthetic construct
  source 1..118: note = Description of Artificial Sequence: Synthetic polypeptide; note = VH of XENP019534
QVQLVESGGGVVQPGRSLRLSCAASGFTFSSYTMHWVRKAPGKGLEWVTFISYDGNNKYYADSVKGRFTISRDNSKNTLYLQMNSLRAEDTAIYYCARTGWLGPFDYWGQGTLVTVSS

SEQ ID NO: 32 - protein, 108 aa, synthetic construct
  source 1..108: note = Description of Artificial Sequence: Synthetic polypeptide; note = VL of XENP019534
EIVLTQSPGTLSLSPGERATLSCRASQSVGSSYLAWYQEKPGQAPRLLIYGAFSRATGIPDRFSGSGSGTDFTLTISRLEPEDFAVYYCQQYGSSPWTFGQGTKVEIK

SEQ ID NO: 33 - protein, 5 aa, synthetic construct
  source 1..5: note = Description of Artificial Sequence: Synthetic peptide; note = XENP019534 vhCDR1
SYTMH

SEQ ID NO: 34 - protein, 17 aa, synthetic construct
  source 1..17: note = Description of Artificial Sequence: Synthetic peptide; note = XENP019534 vhCDR2
FISYDGNNKYYADSVKG

SEQ ID NO: 35 - protein, 9 aa, synthetic construct
  source 1..9: note = Description of Artificial Sequence: Synthetic peptide; note = XENP019534 vhCDR3
TGWLGPFDY

SEQ ID NO: 36 - protein, 12 aa, synthetic construct
  source 1..12: note = Description of Artificial Sequence: Synthetic peptide; note = XENP019534 vlCDR1
RASQSVGSSYLA

SEQ ID NO: 37 - protein, 7 aa, synthetic construct
  source 1..7: note = Description of Artificial Sequence: Synthetic peptide; note = XENP019534 vlCDR2
GAFSRAT

SEQ ID NO: 38 - protein, 9 aa, synthetic construct
  source 1..9: note = Description of Artificial Sequence: Synthetic peptide; note = XENP019534 vlCDR3
QQYGSSPWT

SEQ ID NO: 39 - protein, 246 aa, synthetic construct
  source 1..246: note = Description of Artificial Sequence: Synthetic polypeptide; note = XENP019535 [CTLA-4]_H0.36_L0.51_scFv(GKPGS)4
QVQLVESGGGVVQPGRSLRLSCAASGFTFSSYTMHWVRKAPGKGLEWVTFISYDGNNKYYADSVKGRFTISRDNSKNTLYLQMNSLRAEDTAIYYCARTGWLGPFDYWGQGTLVTVSSGKPGSGKPGSGKPGSGKPGSEIVLTQSPGTLSLSPGERATLSCRASQSVGSSYLAWYQQKPDQAPRLLIYGAFSRATGIPDRFSGSGSGTDFTLTISRLEPEDFAVYYCQQYGSSPWTFGQGTKVEIK

SEQ ID NO: 40 - protein, 118 aa, synthetic construct; identical to SEQ ID NO: 31
  source 1..118: note = Description of Artificial Sequence: Synthetic polypeptide; note = VH of XENP019535

SEQ ID NO: 41 - protein, 108 aa, synthetic construct
  source 1..108: note = Description of Artificial Sequence: Synthetic polypeptide; note = VL of XENP019535
EIVLTQSPGTLSLSPGERATLSCRASQSVGSSYLAWYQQKPDQAPRLLIYGAFSRATGIPDRFSGSGSGTDFTLTISRLEPEDFAVYYCQQYGSSPWTFGQGTKVEIK

SEQ ID NO: 42 - protein, 5 aa, synthetic construct
  source 1..5: note = Description of Artificial Sequence: Synthetic peptide; note = XENP019535 vhCDR1
SYTMH

SEQ ID NO: 43 - protein, 17 aa, synthetic construct
  source 1..17: note = Description of Artificial Sequence: Synthetic peptide; note = XENP019535 vhCDR2
FISYDGNNKYYADSVKG

SEQ ID NO: 44 - protein, 9 aa, synthetic construct
  source 1..9: note = Description of Artificial Sequence: Synthetic peptide; note = XENP019535 vhCDR3
TGWLGPFDY

SEQ ID NO: 45 - protein, 12 aa, synthetic construct
  source 1..12: note = Description of Artificial Sequence: Synthetic peptide; note = XENP019535 vlCDR1
RASQSVGSSYLA

SEQ ID NO: 46 - protein, 7 aa, synthetic construct
  source 1..7: note = Description of Artificial Sequence: Synthetic peptide; note = XENP019535 vlCDR2
GAFSRAT

SEQ ID NO: 47 - protein, 9 aa, synthetic construct
  source 1..9: note = Description of Artificial Sequence: Synthetic peptide; note = XENP019535 vlCDR3
QQYGSSPWT

SEQ ID NO: 48 - protein, 246 aa, synthetic construct
  source 1..246: note = Description of Artificial Sequence: Synthetic polypeptide; note = XENP019536 [CTLA-4]_H0.37_L0.50_scFv(GKPGS)4
QVQLVESGGGVVQPGRSLRLSCAASGFTFSSYTMHWVRQAPGKRLEWVTFISYDGNNKYYADSVKGRFTISRDNSKNTLYLQMNSLRAEDTAIYYCARTGWLGPFDYWGQGTLVTVSSGKPGSGKPGSGKPGSGKPGSEIVLTQSPGTLSLSPGERATLSCRASQSVGSSYLAWYQEKPGQAPRLLIYGAFSRATGIPDRFSGSGSGTDFTLTISRLEPEDFAVYYCQQYGSSPWTFGQGTKVEIK

SEQ ID NO: 49 - protein, 118 aa, synthetic construct
  source 1..118: note = Description of Artificial Sequence: Synthetic polypeptide; note = VH of XENP019536
QVQLVESGGGVVQPGRSLRLSCAASGFTFSSYTMHWVRQAPGKRLEWVTFISYDGNNKYYADSVKGRFTISRDNSKNTLYLQMNSLRAEDTAIYYCARTGWLGPFDYWGQGTLVTVSS

SEQ ID NO: 50 - protein, 108 aa, synthetic construct; identical to SEQ ID NO: 32
  source 1..108: note = Description of Artificial Sequence: Synthetic polypeptide; note = VL of XENP019536

SEQ ID NO: 51 - protein, 5 aa, synthetic construct
  source 1..5: note = Description of Artificial Sequence: Synthetic peptide; note = XENP019536 vhCDR1
SYTMH

SEQ ID NO: 52 - protein, 17 aa, synthetic construct
  source 1..17: note = Description of Artificial Sequence: Synthetic peptide; note = XENP019536 vhCDR2
FISYDGNNKYYADSVKG

SEQ ID NO: 53 - protein, 9 aa, synthetic construct
  source 1..9: note = Description of Artificial Sequence: Synthetic peptide; note = XENP019536 vhCDR3
TGWLGPFDY

SEQ ID NO: 54 - protein, 12 aa, synthetic construct
  source 1..12: note = Description of Artificial Sequence: Synthetic peptide; note = XENP019536 vlCDR1
RASQSVGSSYLA

SEQ ID NO: 55 - protein, 7 aa, synthetic construct
  source 1..7: note = Description of Artificial Sequence: Synthetic peptide; note = XENP019536 vlCDR2
GAFSRAT

SEQ ID NO: 56 - protein, 9 aa, synthetic construct
  source 1..9: note = Description of Artificial Sequence: Synthetic peptide; note = XENP019536 vlCDR3
QQYGSSPWT

SEQ ID NO: 57 - protein, 246 aa, synthetic construct
  source 1..246: note = Description of Artificial Sequence: Synthetic polypeptide; note = XENP019537 [CTLA-4]_H0.37_L0.113_scFv(GKPGS)4
QVQLVESGGGVVQPGRSLRLSCAASGFTFSSYTMHWVRQAPGKRLEWVTFISYDGNNKYYADSVKGRFTISRDNSKNTLYLQMNSLRAEDTAIYYCARTGWLGPFDYWGQGTLVTVSSGKPGSGKPGSGKPGSGKPGSEIVLTQSPGTLSLSPGERATLSCRASQSVGSSYLAWYQQKPGQAPRLLIYGAFSRATGIPDRFSGSGSGTDFTLTISRLEPEDFAVYYCQQYGSSPWTFGEGTKVEIK

SEQ ID NO: 58 - protein, 118 aa, synthetic construct; identical to SEQ ID NO: 49
  source 1..118: note = Description of Artificial Sequence: Synthetic polypeptide; note = VH of XENP019537

SEQ ID NO: 59 - protein, 108 aa, synthetic construct
  source 1..108: note = Description of Artificial Sequence: Synthetic polypeptide; note = VL of XENP019537
EIVLTQSPGTLSLSPGERATLSCRASQSVGSSYLAWYQQKPGQAPRLLIYGAFSRATGIPDRFSGSGSGTDFTLTISRLEPEDFAVYYCQQYGSSPWTFGEGTKVEIK

SEQ ID NO: 60 - protein, 5 aa, synthetic construct
  source 1..5: note = Description of Artificial Sequence: Synthetic peptide; note = XENP019537 vhCDR1
SYTMH

SEQ ID NO: 61 - protein, 17 aa, synthetic construct
  source 1..17: note = Description of Artificial Sequence: Synthetic peptide; note = XENP019537 vhCDR2
FISYDGNNKYYADSVKG

SEQ ID NO: 62 - protein, 9 aa, synthetic construct
  source 1..9: note = Description of Artificial Sequence: Synthetic peptide; note = XENP019537 vhCDR3
TGWLGPFDY

SEQ ID NO: 63 - protein, 12 aa, synthetic construct
  source 1..12: note = Description of Artificial Sequence: Synthetic peptide; note = XENP019537 vlCDR1
RASQSVGSSYLA

SEQ ID NO: 64 - protein, 7 aa, synthetic construct
  source 1..7: note = Description of Artificial Sequence: Synthetic peptide; note = XENP019537 vlCDR2
GAFSRAT

SEQ ID NO: 65 - protein, 9 aa, synthetic construct
  source 1..9: note = Description of Artificial Sequence: Synthetic peptide; note = XENP019537 vlCDR3
QQYGSSPWT

SEQ ID NO: 66 - protein, 246 aa, synthetic construct
  source 1..246: note = Description of Artificial Sequence: Synthetic polypeptide; note = XENP019538 [CTLA-4]_H0.134_L0.51_scFv(GKPGS)4
QVQLVESGGGVVQPGRSLRLSCAASGFTFSSYTMHWVRQAPGKGLEWVTFISYDGNNKYYADSVKGRFTISRDNSKNTLYLQMNSLRAEDTAIYYCARTGWLGPFDYWGRGTLVTVSSGKPGSGKPGSGKPGSGKPGSEIVLTQSPGTLSLSPGERATLSCRASQSVGSSYLAWYQQKPDQAPRLLIYGAFSRATGIPDRFSGSGSGTDFTLTISRLEPEDFAVYYCQQYGSSPWTFGQGTKVEIK

SEQ ID NO: 67 - protein, 118 aa, synthetic construct
  source 1..118: note = Description of Artificial Sequence: Synthetic polypeptide; note = VH of XENP019538
QVQLVESGGGVVQPGRSLRLSCAASGFTFSSYTMHWVRQAPGKGLEWVTFISYDGNNKYYADSVKGRFTISRDNSKNTLYLQMNSLRAEDTAIYYCARTGWLGPFDYWGRGTLVTVSS

SEQ ID NO: 68 - protein, 108 aa, synthetic construct; identical to SEQ ID NO: 41
  source 1..108: note = Description of Artificial Sequence: Synthetic polypeptide; note = VL of XENP019538

SEQ ID NO: 69 - protein, 5 aa, synthetic construct
  source 1..5: note = Description of Artificial Sequence: Synthetic peptide; note = XENP019538 vhCDR1
SYTMH

SEQ ID NO: 70 - protein, 17 aa, synthetic construct
  source 1..17: note = Description of Artificial Sequence: Synthetic peptide; note = XENP019538 vhCDR2
FISYDGNNKYYADSVKG

SEQ ID NO: 71 - protein, 9 aa, synthetic construct
  source 1..9: note = Description of Artificial Sequence: Synthetic peptide; note = XENP019538 vhCDR3
TGWLGPFDY

SEQ ID NO: 72 - protein, 12 aa, synthetic construct
  source 1..12: note = Description of Artificial Sequence: Synthetic peptide; note = XENP019538 vlCDR1
RASQSVGSSYLA

SEQ ID NO: 73 - protein, 7 aa, synthetic construct
  source 1..7: note = Description of Artificial Sequence: Synthetic peptide; note = XENP019538 vlCDR2
GAFSRAT

SEQ ID NO: 74 - protein, 9 aa, synthetic construct
  source 1..9: note = Description of Artificial Sequence: Synthetic peptide; note = XENP019538 vlCDR3
QQYGSSPWT

SEQ ID NO: 75 - protein, 246 aa, synthetic construct
  source 1..246: note = Description of Artificial Sequence: Synthetic polypeptide; note = XENP019539 [CTLA-4]_H0.134_L0.53_scFv(GKPGS)4
QVQLVESGGGVVQPGRSLRLSCAASGFTFSSYTMHWVRQAPGKGLEWVTFISYDGNNKYYADSVKGRFTISRDNSKNTLYLQMNSLRAEDTAIYYCARTGWLGPFDYWGRGTLVTVSSGKPGSGKPGSGKPGSGKPGSEIVLTQSPGTLSLSPGERATLSCRASQSVGSSYLAWYQQKPGEAPRLLIYGAFSRATGIPDRFSGSGSGTDFTLTISRLEPEDFAVYYCQQYGSSPWTFGQGTKVEIK

SEQ ID NO: 76 - protein, 118 aa, synthetic construct; identical to SEQ ID NO: 67
  source 1..118: note = Description of Artificial Sequence: Synthetic polypeptide; note = VH of XENP019539

SEQ ID NO: 77 - protein, 108 aa, synthetic construct
  source 1..108: note = Description of Artificial Sequence: Synthetic polypeptide; note = VL of XENP019539
EIVLTQSPGTLSLSPGERATLSCRASQSVGSSYLAWYQQKPGEAPRLLIYGAFSRATGIPDRFSGSGSGTDFTLTISRLEPEDFAVYYCQQYGSSPWTFGQGTKVEIK

SEQ ID NO: 78 - protein, 5 aa, synthetic construct
  source 1..5: note = Description of Artificial Sequence: Synthetic peptide; note = XENP019539 vhCDR1
SYTMH

SEQ ID NO: 79 - protein, 17 aa, synthetic construct
  source 1..17: note = Description of Artificial Sequence: Synthetic peptide; note = XENP019539 vhCDR2
FISYDGNNKYYADSVKG

SEQ ID NO: 80 - protein, 9 aa, synthetic construct
  source 1..9: note = Description of Artificial Sequence: Synthetic peptide; note = XENP019539 vhCDR3
TGWLGPFDY

SEQ ID NO: 81 - protein, 12 aa, synthetic construct
  source 1..12: note = Description of Artificial Sequence: Synthetic peptide; note = XENP019539 vlCDR1
RASQSVGSSYLA

SEQ ID NO: 82 - protein, 7 aa, synthetic construct
  source 1..7: note = Description of Artificial Sequence: Synthetic peptide; note = XENP019539 vlCDR2
GAFSRAT

SEQ ID NO: 83 - protein, 9 aa, synthetic construct
  source 1..9: note = Description of Artificial Sequence: Synthetic peptide; note = XENP019539 vlCDR3
QQYGSSPWT

SEQ ID NO: 84 - protein, 246 aa, synthetic construct
  source 1..246: note = Description of Artificial Sequence: Synthetic polypeptide; note = XENP019540 [CTLA-4]_H0.134_L0.57_scFv(GKPGS)4
QVQLVESGGGVVQPGRSLRLSCAASGFTFSSYTMHWVRQAPGKGLEWVTFISYDGNNKYYADSVKGRFTISRDNSKNTLYLQMNSLRAEDTAIYYCARTGWLGPFDYWGRGTLVTVSSGKPGSGKPGSGKPGSGKPGSEIVLTQSPGTLSLSPGERATLSCRASQSVGSSYLAWYQQKPGQAPELLIYGAFSRATGIPDRFSGSGSGTDFTLTISRLEPEDFAVYYCQQYGSSPWTFGQGTKVEIK

SEQ ID NO: 85 - protein, 118 aa, synthetic construct; identical to SEQ ID NO: 67
  source 1..118: note = Description of Artificial Sequence: Synthetic polypeptide; note = VH of XENP019540

SEQ ID NO: 86 - protein, 108 aa, synthetic construct
  source 1..108: note = Description of Artificial Sequence: Synthetic polypeptide; note = VL of XENP019540
EIVLTQSPGTLSLSPGERATLSCRASQSVGSSYLAWYQQKPGQAPELLIYGAFSRATGIPDRFSGSGSGTDFTLTISRLEPEDFAVYYCQQYGSSPWTFGQGTKVEIK

SEQ ID NO: 87 - protein, 5 aa, synthetic construct
  source 1..5: note = Description of Artificial Sequence: Synthetic peptide; note = XENP019540 vhCDR1
SYTMH

SEQ ID NO: 88 - protein, 17 aa, synthetic construct
  source 1..17: note = Description of Artificial Sequence: Synthetic peptide; note = XENP019540 vhCDR2
FISYDGNNKYYADSVKG

SEQ ID NO: 89 - protein, 9 aa, synthetic construct
  source 1..9: note = Description of Artificial Sequence: Synthetic peptide; note = XENP019540 vhCDR3
TGWLGPFDY

SEQ ID NO: 90 - protein, 12 aa, synthetic construct
  source 1..12: note = Description of Artificial Sequence: Synthetic peptide; note = XENP019540 vlCDR1
RASQSVGSSYLA

SEQ ID NO: 91 - protein, 7 aa, synthetic construct
  source 1..7: note = Description of Artificial Sequence: Synthetic peptide; note = XENP019540 vlCDR2
GAFSRAT

SEQ ID NO: 92 - protein, 9 aa, synthetic construct
  source 1..9: note = Description of Artificial Sequence: Synthetic peptide; note = XENP019540 vlCDR3
QQYGSSPWT

SEQ ID NO: 93 - protein, 246 aa, synthetic construct
  source 1..246: note = Description of Artificial Sequence: Synthetic polypeptide; note = XENP019541 [CTLA-4]_H0.137_L0.114_scFv(GKPGS)4
QVQLVESGGGVVQPGRSLRLSCAASGFTFSSYTMHWVRQAPGKCLEWVTFISYDGNNKYYADSVKGRFTISRDNSKNTLYLQMNSLRAEDTAIYYCARTGWLGPFDYWGQGTLVTVSSGKPGSGKPGSGKPGSGKPGSEIVLTQSPGTLSLSPGERATLSCRASQSVGSSYLAWYQQKPGQAPRLLIYGAFSRATGIPDRFSGSGSGTDFTLTISRLEPEDFAVYYCQQYGSSPWTFGCGTKVEIK

SEQ ID NO: 94 - protein, 118 aa, synthetic construct
  source 1..118: note = Description of Artificial Sequence: Synthetic polypeptide; note = VH of XENP019541
QVQLVESGGGVVQPGRSLRLSCAASGFTFSSYTMHWVRQAPGKCLEWVTFISYDGNNKYYADSVKGRFTISRDNSKNTLYLQMNSLRAEDTAIYYCARTGWLGPFDYWGQGTLVTVSS

SEQ ID NO: 95 - protein, 108 aa, synthetic construct
  source 1..108: note = Description of Artificial Sequence: Synthetic polypeptide; note = VL of XENP019541
EIVLTQSPGTLSLSPGERATLSCRASQSVGSSYLAWYQQKPGQAPRLLIYGAFSRATGIPDRFSGSGSGTDFTLTISRLEPEDFAVYYCQQYGSSPWTFGCGTKVEIK

SEQ ID NO: 96 - protein, 5 aa, synthetic construct
  source 1..5: note = Description of Artificial Sequence: Synthetic peptide; note = XENP019541 vhCDR1
SYTMH

SEQ ID NO: 97 - protein, 17 aa, synthetic construct
  source 1..17: note = Description of Artificial Sequence: Synthetic peptide; note = XENP019541 vhCDR2
FISYDGNNKYYADSVKG

SEQ ID NO: 98 - protein, 9 aa, synthetic construct
  source 1..9: note = Description of Artificial Sequence: Synthetic peptide; note = XENP019541 vhCDR3
TGWLGPFDY

SEQ ID NO: 99 - protein, 12 aa, synthetic construct
  source 1..12: note = Description of Artificial Sequence: Synthetic peptide; note = XENP019541 vlCDR1
RASQSVGSSYLA

SEQ ID NO: 100 - protein, 7 aa, synthetic construct
  source 1..7: note = Description of Artificial Sequence: Synthetic peptide; note = XENP019541 vlCDR2
GAFSRAT

SEQ ID NO: 101 - protein, 9 aa, synthetic construct
  source 1..9: note = Description of Artificial Sequence: Synthetic peptide; note = XENP019541 vlCDR3
QQYGSSPWT

SEQ ID NO: 102 - protein, 246 aa, synthetic construct
  source 1..246: note = Description of Artificial Sequence: Synthetic polypeptide; note = XENP019542 [CTLA-4]_H0.138_L0.115_scFv(GKPGS)4
QVQLVESGGGVVQPGRSLRLSCAASGFTFSSYTMHWVRQAPGKGLEWVTFISYDGNNKYYADSVKGRFTISRDNSKNTLYLQMNSLRAEDTAIYYCARTGWLGPFDYWGCGTLVTVSSGKPGSGKPGSGKPGSGKPGSEIVLTQSPGTLSLSPGERATLSCRASQSVGSSYLAWYQQKPCQAPRLLIYGAFSRATGIPDRFSGSGSGTDFTLTISRLEPEDFAVYYCQQYGSSPWTFGQGTKVEIK

SEQ ID NO: 103 - protein, 118 aa, synthetic construct
  source 1..118: note = Description of Artificial Sequence: Synthetic polypeptide; note = VH of XENP019542
QVQLVESGGGVVQPGRSLRLSCAASGFTFSSYTMHWVRQAPGKGLEWVTFISYDGNNKYYADSVKGRFTISRDNSKNTLYLQMNSLRAEDTAIYYCARTGWLGPFDYWGCGTLVTVSS

SEQ ID NO: 104 - protein, 108 aa, synthetic construct
  source 1..108: note = Description of Artificial Sequence: Synthetic polypeptide; note = VL of XENP019542
EIVLTQSPGTLSLSPGERATLSCRASQSVGSSYLAWYQQKPCQAPRLLIYGAFSRATGIPDRFSGSGSGTDFTLTISRLEPEDFAVYYCQQYGSSPWTFGQGTKVEIK

SEQ ID NO: 105 - protein, 5 aa, synthetic construct
  source 1..5: note = Description of Artificial Sequence: Synthetic peptide; note = XENP019542 vhCDR1
SYTMH

SEQ ID NO: 106 - protein, 17 aa, synthetic construct
  source 1..17: note = Description of Artificial Sequence: Synthetic peptide; note = XENP019542 vhCDR2
FISYDGNNKYYADSVKG

SEQ ID NO: 107 - protein, 9 aa, synthetic construct
  source 1..9: note = Description of Artificial Sequence: Synthetic peptide; note = XENP019542 vhCDR3
TGWLGPFDY

SEQ ID NO: 108 - protein, 12 aa, synthetic construct
  source 1..12: note = Description of Artificial Sequence: Synthetic peptide; note = XENP019542 vlCDR1
RASQSVGSSYLA

SEQ ID NO: 109 - protein, 7 aa, synthetic construct
  source 1..7: note = Description of Artificial Sequence: Synthetic peptide; note = XENP019542 vlCDR2
GAFSRAT

SEQ ID NO: 110 - protein, 9 aa, synthetic construct
  source 1..9: note = Description of Artificial Sequence: Synthetic peptide; note = XENP019542 vlCDR3
QQYGSSPWT

SEQ ID NO: 111 - protein, 246 aa, synthetic construct
  source 1..246: note = Description of Artificial Sequence: Synthetic polypeptide; note = XENP019543 [CTLA-4]_H0.139_L0.116_scFv(GKPGS)4
QVQLVESGGGVVQPGRSLRLSCAASGFTFSSYTMHWVRQAPGKGLEWVTFISYDGNNKYYADSVKGRFTISRDNSKNTLYLQMNSLRAEDTAIYYCARTGWLGPFDYWGCGTLVTVSSGKPGSGKPGSGKPGSGKPGSEIVLTQSPGTLSLSPGERATLSCRASQSVGSSYLAWYQQKPGCAPRLLIYGAFSRATGIPDRFSGSGSGTDFTLTISRLEPEDFAVYYCQQYGSSPWTFGQGTKVEIK

SEQ ID NO: 112 - protein, 118 aa, synthetic construct; identical to SEQ ID NO: 103
  source 1..118: note = Description of Artificial Sequence: Synthetic polypeptide; note = VH of XENP019543

SEQ ID NO: 113 - protein, 108 aa, synthetic construct
  source 1..108: note = Description of Artificial Sequence: Synthetic polypeptide; note = VL of XENP019543
EIVLTQSPGTLSLSPGERATLSCRASQSVGSSYLAWYQQKPGCAPRLLIYGAFSRATGIPDRFSGSGSGTDFTLTISRLEPEDFAVYYCQQYGSSPWTFGQGTKVEIK

SEQ ID NO: 114 - protein, 5 aa, synthetic construct
  source 1..5: note = Description of Artificial Sequence: Synthetic peptide; note = XENP019543 vhCDR1
SYTMH

SEQ ID NO: 115 - protein, 17 aa, synthetic construct
  source 1..17: note = Description of Artificial Sequence: Synthetic peptide; note = XENP019543 vhCDR2
FISYDGNNKYYADSVKG

SEQ ID NO: 116 - protein, 9 aa, synthetic construct
  source 1..9: note = Description of Artificial Sequence: Synthetic peptide; note = XENP019543 vhCDR3
TGWLGPFDY

SEQ ID NO: 117 - protein, 12 aa, synthetic construct
  source 1..12: note = Description of Artificial Sequence: Synthetic peptide; note = XENP019543 vlCDR1
RASQSVGSSYLA

SEQ ID NO: 118 - protein, 7 aa, synthetic construct
  source 1..7: note = Description of Artificial Sequence: Synthetic peptide; note = XENP019543 vlCDR2
GAFSRAT

SEQ ID NO: 119 - protein, 9 aa, synthetic construct
  source 1..9: note = Description of Artificial Sequence: Synthetic peptide; note = XENP019543 vlCDR3
QQYGSSPWT

SEQ ID NO: 120 - protein, 246 aa, synthetic construct
  source 1..246: note = Description of Artificial Sequence: Synthetic polypeptide; note = XENP019551 [CTLA-4]_H1_L0_scFv(GKPGS)4
EVQLVESGGGLVQPGGSLRLSCAASGFTFSSYTMHWVRQAPGKGLEWVTFISYDGNNKYYVDSVKGRFTISRDNAKNSLYLQMNSLRAEDTAVYYCARTGWLGPFDYWGQGTLVTVSSGKPGSGKPGSGKPGSGKPGSEIVLTQSPGTLSLSPGERATLSCRASQSVGSSYLAWYQQKPGQAPRLLIYGAFSRATGIPDRFSGSGSGTDFTLTISRLEPEDFAVYYCQQYGSSPWTFGQGTKVEIK

SEQ ID NO: 121 - protein, 118 aa, synthetic construct
  source 1..118: note = Description of Artificial Sequence: Synthetic polypeptide; note = VH of XENP019551
EVQLVESGGGLVQPGGSLRLSCAASGFTFSSYTMHWVRQAPGKGLEWVTFISYDGNNKYYVDSVKGRFTISRDNAKNSLYLQMNSLRAEDTAVYYCARTGWLGPFDYWGQGTLVTVSS

SEQ ID NO: 122 - protein, 108 aa, synthetic construct; identical to SEQ ID NO: 23
  source 1..108: note = Description of Artificial Sequence: Synthetic polypeptide; note = VL of XENP019551

SEQ ID NO: 123 - protein, 5 aa, synthetic construct
  source 1..5: note = Description of Artificial Sequence: Synthetic peptide; note = XENP019551 vhCDR1
SYTMH

SEQ ID NO: 124 - protein, 17 aa, synthetic construct
  source 1..17: note = Description of Artificial Sequence: Synthetic peptide; note = XENP019551 vhCDR2
FISYDGNNKYYVDSVKG

SEQ ID NO: 125 - protein, 9 aa, synthetic construct
  source 1..9: note = Description of Artificial Sequence: Synthetic peptide; note = XENP019551 vhCDR3
TGWLGPFDY

SEQ ID NO: 126 - protein, 12 aa, synthetic construct
  source 1..12: note = Description of Artificial Sequence: Synthetic peptide; note = XENP019551 vlCDR1
RASQSVGSSYLA

SEQ ID NO: 127 - protein, 7 aa, synthetic construct
  source 1..7: note = Description of Artificial Sequence: Synthetic peptide; note = XENP019551 vlCDR2
GAFSRAT

SEQ ID NO: 128 - protein, 9 aa, synthetic construct
  source 1..9: note = Description of Artificial Sequence: Synthetic peptide; note = XENP019551 vlCDR3
QQYGSSPWT

SEQ ID NO: 129 - protein, 246 aa, synthetic construct
  source 1..246: note = Description of Artificial Sequence: Synthetic polypeptide; note = XENP019552 [CTLA-4]_H2_L0_scFv(GKPGS)4
EVQLVESGGGLVQPGGSLRLSCAASGFTFSSYTMHWVRQAPGKGLEWVTFISYDGNNKYYPGSVKGRFTISRENAKNSLYLQMNSLRAGDTAVYYCARTGWLGPFDYWGQGTLVTVSSGKPGSGKPGSGKPGSGKPGSEIVLTQSPGTLSLSPGERATLSCRASQSVGSSYLAWYQQKPGQAPRLLIYGAFSRATGIPDRFSGSGSGTDFTLTISRLEPEDFAVYYCQQYGSSPWTFGQGTKVEIK

SEQ ID NO: 130 - protein, 118 aa, synthetic construct
  source 1..118: note = Description of Artificial Sequence: Synthetic polypeptide; note = VH of XENP019552
EVQLVESGGGLVQPGGSLRLSCAASGFTFSSYTMHWVRQAPGKGLEWVTFISYDGNNKYYPGSVKGRFTISRENAKNSLYLQMNSLRAGDTAVYYCARTGWLGPFDYWGQGTLVTVSS

SEQ ID NO: 131 - protein, 108 aa, synthetic construct; identical to SEQ ID NO: 23
  source 1..108: note = Description of Artificial Sequence: Synthetic polypeptide; note = VL of XENP019552

SEQ ID NO: 132 - protein, 5 aa, synthetic construct
  source 1..5: note = Description of Artificial Sequence: Synthetic peptide; note = XENP019552 vhCDR1
SYTMH

SEQ ID NO: 133 - protein, 17 aa, synthetic construct
  source 1..17: note = Description of Artificial Sequence: Synthetic peptide; note = XENP019552 vhCDR2
FISYDGNNKYYPGSVKG

SEQ ID NO: 134 - protein, 9 aa, synthetic construct
  source 1..9: note = Description of Artificial Sequence: Synthetic peptide; note = XENP019552 vhCDR3
TGWLGPFDY

SEQ ID NO: 135 - protein, 12 aa, synthetic construct
  source 1..12: note = Description of Artificial Sequence: Synthetic peptide; note = XENP019552 vlCDR1
RASQSVGSSYLA

SEQ ID NO: 136 - protein, 7 aa, synthetic construct
  source 1..7: note = Description of Artificial Sequence: Synthetic peptide; note = XENP019552 vlCDR2
GAFSRAT

SEQ ID NO: 137 - protein, 9 aa, synthetic construct
  source 1..9: note = Description of Artificial Sequence: Synthetic peptide; note = XENP019552 vlCDR3
QQYGSSPWT

SEQ ID NO: 138 - protein, 246 aa, synthetic construct
  source 1..246: note = Description of Artificial Sequence: Synthetic polypeptide; note = XENP019553 [CTLA-4]_H3_L0_scFv(GKPGS)4
EVQLVESGGGLVKPGGSLRLSCAASGFTFSSYTMHWVRQAPGKGLEWVSFISYDGNNKYYADSVKGRFTISRDNAKNSLYLQMNSLRAEDTAVYYCARTGWLGPFDYWGQGTLVTVSSGKPGSGKPGSGKPGSGKPGSEIVLTQSPGTLSLSPGERATLSCRASQSVGSSYLAWYQQKPGQAPRLLIYGAFSRATGIPDRFSGSGSGTDFTLTISRLEPEDFAVYYCQQYGSSPWTFGQGTKVEIK

SEQ ID NO: 139 - protein, 118 aa, synthetic construct
  source 1..118: note = Description of Artificial Sequence: Synthetic polypeptide; note = VH of XENP019553
EVQLVESGGGLVKPGGSLRLSCAASGFTFSSYTMHWVRQAPGKGLEWVSFISYDGNNKYYADSVKGRFTISRDNAKNSLYLQMNSLRAEDTAVYYCARTGWLGPFDYWGQGTLVTVSS

SEQ ID NO: 140 - protein, 108 aa, synthetic construct; identical to SEQ ID NO: 23
  source 1..108: note = Description of Artificial Sequence: Synthetic polypeptide; note = VL of XENP019553

SEQ ID NO: 141 - protein, 5 aa, synthetic construct
  source 1..5: note = Description of Artificial Sequence: Synthetic peptide; note = XENP019553 vhCDR1
SYTMH

SEQ ID NO: 142 - protein, 17 aa, synthetic construct
  source 1..17: note = Description of Artificial Sequence: Synthetic peptide; note = XENP019553 vhCDR2
FISYDGNNKYYADSVKG

SEQ ID NO: 143 - protein, 9 aa, synthetic construct
  source 1..9: note = Description of Artificial Sequence: Synthetic peptide; note = XENP019553 vhCDR3
TGWLGPFDY

SEQ ID NO: 144 - protein, 12 aa, synthetic construct
  source 1..12: note = Description of Artificial Sequence: Synthetic peptide; note = XENP019553 vlCDR1
RASQSVGSSYLA

SEQ ID NO: 145 - protein, 7 aa, synthetic construct
  source 1..7: note = Description of Artificial Sequence: Synthetic peptide; note = XENP019553 vlCDR2
GAFSRAT

SEQ ID NO: 146 - protein, 9 aa, synthetic construct
  source 1..9: note = Description of Artificial Sequence: Synthetic peptide; note = XENP019553 vlCDR3
QQYGSSPWT

SEQ ID NO: 147 - protein, 246 aa, synthetic construct
  source 1..246: note = Description of Artificial Sequence: Synthetic polypeptide; note = XENP019554 [CTLA-4]_H4_L0_scFv(GKPGS)4
EVQLVESGGGLVQPGGSLRLSCAASGFTFSSYTMHWVRQAPGKGLEYVTFISYDGNNKYYADSVKGRFTISRDNSKNTLYLQMGSLRAEDMAVYYCARTGWLGPFDYWGQGTLVTVSSGKPGSGKPGSGKPGSGKPGSEIVLTQSPGTLSLSPGERATLSCRASQSVGSSYLAWYQQKPGQAPRLLIYGAFSRATGIPDRFSGSGSGTDFTLTISRLEPEDFAVYYCQQYGSSPWTFGQGTKVEIK

SEQ ID NO: 148 - protein, 118 aa, synthetic construct
  source 1..118: note = Description of Artificial Sequence: Synthetic polypeptide; note = VH of XENP019554
EVQLVESGGGLVQPGGSLRLSCAASGFTFSSYTMHWVRQAPGKGLEYVTFISYDGNNKYYADSVKGRFTISRDNSKNTLYLQMGSLRAEDMAVYYCARTGWLGPFDYWGQGTLVTVSS

SEQ ID NO: 149 - protein, 108 aa, synthetic construct; identical to SEQ ID NO: 23
  source 1..108: note = Description of Artificial Sequence: Synthetic polypeptide; note = VL of XENP019554

SEQ ID NO: 150 - protein, 5 aa, synthetic construct
  source 1..5: note = Description of Artificial Sequence: Synthetic peptide; note = XENP019554 vhCDR1
SYTMH

SEQ ID NO: 151 - protein, 17 aa, synthetic construct
  source 1..17: note = Description of Artificial Sequence: Synthetic peptide; note = XENP019554 vhCDR2
FISYDGNNKYYADSVKG

SEQ ID NO: 152 - protein, 9 aa, synthetic construct
  source 1..9: note = Description of Artificial Sequence: Synthetic peptide; note = XENP019554 vhCDR3
TGWLGPFDY

SEQ ID NO: 153 - protein, 12 aa, synthetic construct
  source 1..12: note = Description of Artificial Sequence: Synthetic peptide; note = XENP019554 vlCDR1
RASQSVGSSYLA

SEQ ID NO: 154 - protein, 7 aa, synthetic construct
  source 1..7: note = Description of Artificial Sequence: Synthetic peptide; note = XENP019554 vlCDR2
GAFSRAT

SEQ ID NO: 155 - protein, 9 aa, synthetic construct
  source 1..9: note = Description of Artificial Sequence: Synthetic peptide; note = XENP019554 vlCDR3
QQYGSSPWT

SEQ ID NO: 156 - protein, 246 aa, synthetic construct
  source 1..246: note = Description of Artificial Sequence: Synthetic polypeptide; note = XENP019555 [CTLA-4]_H0_L1_scFv(GKPGS)4
QVQLVESGGGVVQPGRSLRLSCAASGFTFSSYTMHWVRQAPGKGLEWVTFISYDGNNKYYADSVKGRFTISRDNSKNTLYLQMNSLRAEDTAIYYCARTGWLGPFDYWGQGTLVTVSSGKPGSGKPGSGKPGSGKPGSEIVLTQSPATLSLSPGERATLSCGASQSVGSSYLAWYQQKPGLAPRLLIYGAFSRATGIPDRFSGSGSGTDFTLTISRLEPEDFAVYYCQQYGSSPWTFGQGTKVEIK

SEQ ID NO: 157 - protein, 118 aa, synthetic construct; identical to SEQ ID NO: 22
  source 1..118: note = Description of Artificial Sequence: Synthetic polypeptide; note = VH of XENP019555

SEQ ID NO: 158 - protein, 108 aa, synthetic construct
  source 1..108: note = Description of Artificial Sequence: Synthetic polypeptide; note = VL of XENP019555
EIVLTQSPATLSLSPGERATLSCGASQSVGSSYLAWYQQKPGLAPRLLIYGAFSRATGIPDRFSGSGSGTDFTLTISRLEPEDFAVYYCQQYGSSPWTFGQGTKVEIK

SEQ ID NO: 159 - protein, 5 aa, synthetic construct
  source 1..5: note = Description of Artificial Sequence: Synthetic peptide; note = XENP019555 vhCDR1
SYTMH

SEQ ID NO: 160 - protein, 17 aa, synthetic construct
  source 1..17: note = Description of Artificial Sequence: Synthetic peptide; note = XENP019555 vhCDR2
FISYDGNNKYYADSVKG

SEQ ID NO: 161 - protein, 9 aa, synthetic construct
  source 1..9: note = Description of Artificial Sequence: Synthetic peptide; note = XENP019555 vhCDR3
TGWLGPFDY

SEQ ID NO: 162 - protein, 12 aa, synthetic construct
  source 1..12: note = Description of Artificial Sequence: Synthetic peptide; note = XENP019555 vlCDR1
GASQSVGSSYLA

SEQ ID NO: 163 - protein, 7 aa, synthetic construct
  source 1..7: note = Description of Artificial Sequence: Synthetic peptide; note = XENP019555 vlCDR2
GAFSRAT

SEQ ID NO: 164 - protein, 9 aa, synthetic construct
  source 1..9: note = Description of Artificial Sequence: Synthetic peptide; note = XENP019555 vlCDR3
QQYGSSPWT

SEQ ID NO: 165 - protein, 246 aa, synthetic construct
  source 1..246: note = Description of Artificial Sequence: Synthetic polypeptide; note = XENP019556 [CTLA-4]_H0_L2_scFv(GKPGS)4
QVQLVESGGGVVQPGRSLRLSCAASGFTFSSYTMHWVRQAPGKGLEWVTFISYDGNNKYYADSVKGRFTISRDNSKNTLYLQMNSLRAEDTAIYYCARTGWLGPFDYWGQGTLVTVSSGKPGSGKPGSGKPGSGKPGSEIVMTQSPATLSVSPGERATLSCRASQSVGSSYLAWYQQKPGQAPRLLIYGAFSRATGIPARFSGSGSGTEFTLTISSLQSEDFAVYYCQQYGSSPWTFGQGTKVEIK

SEQ ID NO: 166 - protein, 118 aa, synthetic construct; identical to SEQ ID NO: 22
  source 1..118: note = Description of Artificial Sequence: Synthetic polypeptide; note = VH of XENP019556

SEQ ID NO: 167 - protein, 108 aa, synthetic construct
  source 1..108: note = Description of Artificial Sequence: Synthetic polypeptide; note = VL of XENP019556
EIVMTQSPATLSVSPGERATLSCRASQSVGSSYLAWYQQKPGQAPRLLIYGAFSRATGIPARFSGSGSGTEFTLTISSLQSEDFAVYYCQQYGSSPWTFGQGTKVEIK

SEQ ID NO: 168 - protein, 5 aa, synthetic construct
  source 1..5: note = Description of Artificial Sequence: Synthetic peptide; note = XENP019556 vhCDR1
SYTMH

SEQ ID NO: 169 - protein, 17 aa, synthetic construct
  source 1..17: note = Description of Artificial Sequence: Synthetic peptide; note = XENP019556 vhCDR2
FISYDGNNKYYADSVKG

SEQ ID NO: 170 - protein, 9 aa, synthetic construct
  source 1..9: note = Description of Artificial Sequence: Synthetic peptide; note = XENP019556 vhCDR3
TGWLGPFDY

SEQ ID NO: 171 - protein, 12 aa, synthetic construct
  source 1..12: note = Description of Artificial Sequence: Synthetic peptide; note = XENP019556 vlCDR1
RASQSVGSSYLA

SEQ ID NO: 172 - protein, 7 aa, synthetic construct
  source 1..7: note = Description of Artificial Sequence: Synthetic peptide; note = XENP019556 vlCDR2
GAFSRAT

SEQ ID NO: 173 - protein, 9 aa, synthetic construct
  source 1..9: note = Description of Artificial Sequence: Synthetic peptide; note = XENP019556 vlCDR3
QQYGSSPWT

SEQ ID NO: 174 - protein, 246 aa, synthetic construct
  source 1..246: note = Description of Artificial Sequence: Synthetic polypeptide; note = XENP019587 [CTLA-4]_H0.140_L0_scFv(GKPGS)4
QVQLVESGGGVVQPGRSLRLSCAASGFTFSSYTMHWVRQAPGKGLEWVCFISYDGNNKYYADSVKGRFTCSRDNSKNTLYLQMNSLRAEDTAIYYCARTGWLGPFDYWGQGTLVTVSSGKPGSGKPGSGKPGSGKPGSEIVLTQSPGTLSLSPGERATLSCRASQSVGSSYLAWYQQKPGQAPRLLIYGAFSRATGIPDRFSGSGSGTDFTLTISRLEPEDFAVYYCQQYGSSPWTFGQGTKVEIK

SEQ ID NO: 175 - protein, 118 aa, synthetic construct
  source 1..118: note = Description of Artificial Sequence: Synthetic polypeptide; note = VH of XENP019587
QVQLVESGGGVVQPGRSLRLSCAASGFTFSSYTMHWVRQAPGKGLEWVCFISYDGNNKYYADSVKGRFTCSRDNSKNTLYLQMNSLRAEDTAIYYCARTGWLGPFDYWGQGTLVTVSS

SEQ ID NO: 176 - protein, 108 aa, synthetic construct; identical to SEQ ID NO: 23
  source 1..108: note = Description of Artificial Sequence: Synthetic polypeptide; note = VL of XENP019587

SEQ ID NO: 177 - protein, 5 aa, synthetic construct
  source 1..5: note = Description of Artificial Sequence: Synthetic peptide; note = XENP019587 vhCDR1
SYTMH

SEQ ID NO: 178 - protein, 17 aa, synthetic construct
  source 1..17: note = Description of Artificial Sequence: Synthetic peptide; note = XENP019587 vhCDR2
FISYDGNNKYYADSVKG

SEQ ID NO: 179 - protein, 9 aa, synthetic construct
  source 1..9: note = Description of Artificial Sequence: Synthetic peptide; note = XENP019587 vhCDR3
TGWLGPFDY

SEQ ID NO: 180 - protein, 12 aa, synthetic construct
  source 1..12: note = Description of Artificial Sequence: Synthetic peptide; note = XENP019587 vlCDR1
RASQSVGSSYLA

SEQ ID NO: 181 - protein, 7 aa, synthetic construct
  source 1..7: note = Description of Artificial Sequence: Synthetic peptide; note = XENP019587 vlCDR2
GAFSRAT

SEQ ID NO: 182 - protein, 9 aa, synthetic construct
  source 1..9: note = Description of Artificial Sequence: Synthetic peptide; note = XENP019587 vlCDR3
QQYGSSPWT

SEQ ID NO: 183 - protein, 246 aa, synthetic construct
  source 1..246: note = Description of Artificial Sequence: Synthetic polypeptide; note = XENP019588 [CTLA-4]_H0_L0.117_scFv(GKPGS)4
QVQLVESGGGVVQPGRSLRLSCAASGFTFSSYTMHWVRQAPGKGLEWVTFISYDGNNKYYADSVKGRFTISRDNSKNTLYLQMNSLRAEDTAIYYCARTGWLGPFDYWGQGTLVTVSSGKPGSGKPGSGKPGSGKPGSEIVLTQSPGTLSLSPGERATLSCRASQSVGSSYLAWYQQKPGQAPRLLCYGAFSRATGIPDRFSCSGSGTDFTLTISRLEPEDFAVYYCQQYGSSPWTFGQGTKVEIK

SEQ ID NO: 184 - protein, 118 aa, synthetic construct; identical to SEQ ID NO: 22
  source 1..118: note = Description of Artificial Sequence: Synthetic polypeptide; note = VH of XENP019588

SEQ ID NO: 185 - protein, 108 aa, synthetic construct
  source 1..108: note = Description of Artificial Sequence: Synthetic polypeptide; note = VL of XENP019588
EIVLTQSPGTLSLSPGERATLSCRASQSVGSSYLAWYQQKPGQAPRLLCYGAFSRATGIPDRFSCSGSGTDFTLTISRLEPEDFAVYYCQQYGSSPWTFGQGTKVEIK

SEQ ID NO: 186 - protein, 5 aa, synthetic construct
  source 1..5: note = Description of Artificial Sequence: Synthetic peptide; note = XENP019588 vhCDR1
SYTMH

SEQ ID NO: 187 - protein, 17 aa, synthetic construct
  source 1..17: note = Description of Artificial Sequence: Synthetic peptide; note = XENP019588 vhCDR2
FISYDGNNKYYADSVKG

SEQ ID NO: 188 - protein, 9 aa, synthetic construct
  source 1..9: note = Description of Artificial Sequence: Synthetic peptide; note = XENP019588 vhCDR3
TGWLGPFDY

SEQ ID NO: 189 - protein, 12 aa, synthetic construct
  source 1..12: note = Description of Artificial Sequence: Synthetic peptide; note = XENP019588 vlCDR1
RASQSVGSSYLA

SEQ ID NO: 190 - protein, 7 aa, synthetic construct
  source 1..7: note = Description of Artificial Sequence: Synthetic peptide; note = XENP019588 vlCDR2
GAFSRAT

SEQ ID NO: 191 - protein, 9 aa, synthetic construct
  source 1..9: note = Description of Artificial Sequence: Synthetic peptide; note = XENP019588 vlCDR3
QQYGSSPWT

SEQ ID NO: 192 - protein, 246 aa, synthetic construct
  source 1..246: note = Description of Artificial Sequence: Synthetic polypeptide; note = XENP019745 [CTLA-4]_H0.1_L0_scFv(GKPGS)4
EVQLVESGGGVVQPGRSLRLSCAASGFTFSSYTMHWVRQAPGKGLEWVTFISYDGNNKYYADSVKGRFTISRDNSKNTLYLQMNSLRAEDTAIYYCARTGWLGPFDYWGQGTLVTVSSGKPGSGKPGSGKPGSGKPGSEIVLTQSPGTLSLSPGERATLSCRASQSVGSSYLAWYQQKPGQAPRLLIYGAFSRATGIPDRFSGSGSGTDFTLTISRLEPEDFAVYYCQQYGSSPWTFGQGTKVEIK

SEQ ID NO: 193 - protein, 118 aa, synthetic construct
  source 1..118: note = Description of Artificial Sequence: Synthetic polypeptide; note = VH of XENP019745
EVQLVESGGGVVQPGRSLRLSCAASGFTFSSYTMHWVRQAPGKGLEWVTFISYDGNNKYYADSVKGRFTISRDNSKNTLYLQMNSLRAEDTAIYYCARTGWLGPFDYWGQGTLVTVSS

SEQ ID NO: 194 - protein, 108 aa, synthetic construct; identical to SEQ ID NO: 23
  source 1..108: note = Description of Artificial Sequence: Synthetic polypeptide; note = VL of XENP019745

SEQ ID NO: 195 - protein, 5 aa, synthetic construct
  source 1..5: note = Description of Artificial Sequence: Synthetic peptide; note = XENP019745 vhCDR1
SYTMH

SEQ ID NO: 196 - protein, 17 aa, synthetic construct
  source 1..17: note = Description of Artificial Sequence: Synthetic peptide; note = XENP019745 vhCDR2
FISYDGNNKYYADSVKG

SEQ ID NO: 197 - protein, 9 aa, synthetic construct
  source 1..9: note = Description of Artificial Sequence: Synthetic peptide; note = XENP019745 vhCDR3
TGWLGPFDY

SEQ ID NO: 198 - protein, 12 aa, synthetic construct
  source 1..12: note = Description of Artificial Sequence: Synthetic peptide; note = XENP019745 vlCDR1
RASQSVGSSYLA

SEQ ID NO: 199 - protein, 7 aa, synthetic construct
  source 1..7: note = Description of Artificial Sequence: Synthetic peptide; note = XENP019745 vlCDR2
GAFSRAT

SEQ ID NO: 200 - protein, 9 aa, synthetic construct
  source 1..9: note = Description of Artificial Sequence: Synthetic peptide; note = XENP019745 vlCDR3
QQYGSSPWT

SEQ ID NO: 201 - protein, 246 aa, synthetic construct
  source 1..246: note = Description of Artificial Sequence: Synthetic polypeptide; note = XENP019746 [CTLA-4]_H0.2_L0_scFv(GKPGS)4
QVQLLESGGGVVQPGRSLRLSCAASGFTFSSYTMHWVRQAPGKGLEWVTFISYDGNNKYYADSVKGRFTISRDNSKNTLYLQMNSLRAEDTAIYYCARTGWLGPFDYWGQGTLVTVSSGKPGSGKPGSGKPGSGKPGSEIVLTQSPGTLSLSPGERATLSCRASQSVGSSYLAWYQQKPGQAPRLLIYGAFSRATGIPDRFSGSGSGTDFTLTISRLEPEDFAVYYCQQYGSSPWTFGQGTKVEIK

SEQ ID NO: 202 - protein, 118 aa, synthetic construct
  source 1..118: note = Description of Artificial Sequence: Synthetic polypeptide; note = VH of XENP019746
QVQLLESGGGVVQPGRSLRLSCAASGFTFSSYTMHWVRQAPGKGLEWVTFISYDGNNKYYADSVKGRFTISRDNSKNTLYLQMNSLRAEDTAIYYCARTGWLGPFDYWGQGTLVTVSS

SEQ ID NO: 203 - protein, 108 aa, synthetic construct; identical to SEQ ID NO: 23
  source 1..108: note = Description of Artificial Sequence: Synthetic polypeptide; note = VL of XENP019746

SEQ ID NO: 204 - protein, 5 aa, synthetic construct
  source 1..5: note = Description of Artificial Sequence: Synthetic peptide; note = XENP019746 vhCDR1
SYTMH

SEQ ID NO: 205 - protein, 17 aa, synthetic construct
  source 1..17: note = Description of Artificial Sequence: Synthetic peptide; note = XENP019746 vhCDR2
FISYDGNNKYYADSVKG

SEQ ID NO: 206 - protein, 9 aa, synthetic construct
  source 1..9: note = Description of Artificial Sequence: Synthetic peptide; note = XENP019746 vhCDR3
TGWLGPFDY

SEQ ID NO: 207 - protein, 12 aa, synthetic construct
  source 1..12: note = Description of Artificial Sequence: Synthetic peptide; note = XENP019746 vlCDR1
RASQSVGSSYLA

SEQ ID NO: 208 - protein, 7 aa, synthetic construct
  source 1..7: note = Description of Artificial Sequence: Synthetic peptide; note = XENP019746 vlCDR2
GAFSRAT

SEQ ID NO: 209 - protein, 9 aa, synthetic construct
  source 1..9: note = Description of Artificial Sequence: Synthetic peptide; note = XENP019746 vlCDR3
QQYGSSPWT

SEQ ID NO: 210 - protein, 246 aa, synthetic construct
  source 1..246: note = Description of Artificial Sequence: Synthetic polypeptide; note = XENP019747 [CTLA-4]_H0.3_L0_scFv(GKPGS)4
QVQLVESGGGLVQPGRSLRLSCAASGFTFSSYTMHWVRQAPGKGLEWVTFISYDGNNKYYADSVKGRFTISRDNSKNTLYLQMNSLRAEDTAIYYCARTGWLGPFDYWGQGTLVTVSSGKPGSGKPGSGKPGSGKPGSEIVLTQSPGTLSLSPGERATLSCRASQSVGSSYLAWYQQKPGQAPRLLIYGAFSRATGIPDRFSGSGSGTDFTLTISRLEPEDFAVYYCQQYGSSPWTFGQGTKVEIK

SEQ ID NO: 211 - protein, 118 aa, synthetic construct
  source 1..118: note = Description of Artificial Sequence: Synthetic polypeptide; note = VH of XENP019747
QVQLVESGGGLVQPGRSLRLSCAASGFTFSSYTMHWVRQAPGKGLEWVTFISYDGNNKYYADSVKGRFTISRDNSKNTLYLQMNSLRAEDTAIYYCARTGWLGPFDYWGQGTLVTVSS

SEQ ID NO: 212 - protein, 108 aa, synthetic construct; identical to SEQ ID NO: 23
  source 1..108: note = Description of Artificial Sequence: Synthetic polypeptide; note = VL of XENP019747

SEQ ID NO: 213 - protein, 5 aa, synthetic construct
  source 1..5: note = Description of Artificial Sequence: Synthetic peptide; note = XENP019747 vhCDR1
SYTMH

SEQ ID NO: 214 - protein, 17 aa, synthetic construct
  source 1..17: note = Description of Artificial Sequence: Synthetic peptide; note = XENP019747 vhCDR2
FISYDGNNKYYADSVKG

SEQ ID NO: 215 - protein, 9 aa, synthetic construct
  source 1..9: note = Description of Artificial Sequence: Synthetic peptide; note = XENP019747 vhCDR3
TGWLGPFDY

SEQ ID NO: 216 - protein, 12 aa, synthetic construct
  source 1..12: note = Description of Artificial Sequence: Synthetic peptide; note = XENP019747 vlCDR1
RASQSVGSSYLA

SEQ ID NO: 217 - protein, 7 aa, synthetic construct
  source 1..7: note = Description of Artificial Sequence: Synthetic peptide; note = XENP019747 vlCDR2
GAFSRAT

SEQ ID NO: 218 - protein, 9 aa, synthetic construct
  source 1..9: note = Description of Artificial Sequence: Synthetic peptide; note = XENP019747 vlCDR3
QQYGSSPWT

SEQ ID NO: 219 - protein, 246 aa, synthetic construct
  source 1..246: note = Description of Artificial Sequence: Synthetic polypeptide; note = XENP019748 [CTLA-4]_H0.4_L0_scFv(GKPGS)4
QVQLVESGGGVKQPGRSLRLSCAASGFTFSSYTMHWVRQAPGKGLEWVTFISYDGNNKYYADSVKGRFTISRDNSKNTLYLQMNSLRAEDTAIYYCARTGWLGPFDYWGQGTLVTVSSGKPGSGKPGSGKPGSGKPGSEIVLTQSPGTLSLSPGERATLSCRASQSVGSSYLAWYQQKPGQAPRLLIYGAFSRATGIPDRFSGSGSGTDFTLTISRLEPEDFAVYYCQQYGSSPWTFGQGTKVEIK

SEQ ID NO: 220 - protein, 118 aa, synthetic construct
  source 1..118: note = Description of Artificial Sequence: Synthetic polypeptide; note = VH of XENP019748
QVQLVESGGGVKQPGRSLRLSCAASGFTFSSYTMHWVRQAPGKGLEWVTFISYDGNNKYYADSVKGRFTISRDNSKNTLYLQMNSLRAEDTAIYYCARTGWLGPFDYWGQGTLVTVSS

SEQ ID NO: 221 - protein, 108 aa, synthetic construct; identical to SEQ ID NO: 23
  source 1..108: note = Description of Artificial Sequence: Synthetic polypeptide; note = VL of XENP019748

SEQ ID NO: 222 - protein, 5 aa, synthetic construct
  source 1..5: note = Description of Artificial Sequence: Synthetic peptide; note = XENP019748 vhCDR1
SYTMH

SEQ ID NO: 223 - protein, 17 aa, synthetic construct
  source 1..17: note = Description of Artificial Sequence: Synthetic peptide; note = XENP019748 vhCDR2
FISYDGNNKYYADSVKG

SEQ ID NO: 224 - protein, 9 aa, synthetic construct
  source 1..9: note = Description of Artificial Sequence: Synthetic peptide; note = XENP019748 vhCDR3
TGWLGPFDY

SEQ ID NO: 225 - protein, 12 aa, synthetic construct
  source 1..12: note = Description of Artificial Sequence: Synthetic peptide; note = XENP019748 vlCDR1
RASQSVGSSYLA

SEQ ID NO: 226 - protein, 7 aa, synthetic construct
  source 1..7: note = Description of Artificial Sequence: Synthetic peptide; note = XENP019748 vlCDR2
GAFSRAT

SEQ ID NO: 227 - protein, 9 aa, synthetic construct
  source 1..9: note = Description of Artificial Sequence: Synthetic peptide; note = XENP019748 vlCDR3
QQYGSSPWT

SEQ ID NO: 228 - protein, 246 aa, synthetic construct
  source 1..246: note = Description of Artificial Sequence: Synthetic polypeptide; note = XENP019749 [CTLA-4]_H0.5_L0_scFv(GKPGS)4
QVQLVESGGGVKQPGESLRLSCAASGFTFSSYTMHWVRQAPGKGLEWVTFISYDGNNKYYADSVKGRFTISRDNSKNTLYLQMNSLRAEDTAIYYCARTGWLGPFDYWGQGTLVTVSSGKPGSGKPGSGKPGSGKPGSEIVLTQSPGTLSLSPGERATLSCRASQSVGSSYLAWYQQKPGQAPRLLIYGAFSRATGIPDRFSGSGSGTDFTLTISRLEPEDFAVYYCQQYGSSPWTFGQGTKVEIK

SEQ ID NO: 229 - protein, 118 aa, synthetic construct
  source 1..118: note = Description of Artificial Sequence: Synthetic polypeptide; note = VH of XENP019749
QVQLVESGGGVKQPGESLRLSCAASGFTFSSYTMHWVRQAPGKGLEWVTFISYDGNNKYYADSVKGRFTISRDNSKNTLYLQMNSLRAEDTAIYYCARTGWLGPFDYWGQGTLVTVSS

SEQ ID NO: 230 - protein, 108 aa, synthetic construct; identical to SEQ ID NO: 23
  source 1..108: note = Description of Artificial Sequence: Synthetic polypeptide; note = VL of XENP019749

SEQ ID NO: 231 - protein, 5 aa, synthetic construct
  source 1..5: note = Description of Artificial Sequence: Synthetic peptide; note = XENP019749 vhCDR1
SYTMH

SEQ ID NO: 232 - protein, 17 aa, synthetic construct
  source 1..17: note = Description of Artificial Sequence: Synthetic peptide; note = XENP019749 vhCDR2
FISYDGNNKYYADSVKG

SEQ ID NO: 233 - protein, 9 aa, synthetic construct
  source 1..9: note = Description of Artificial Sequence: Synthetic peptide; note = XENP019749 vhCDR3
TGWLGPFDY

SEQ ID NO: 234 - protein, 12 aa, synthetic construct
  source 1..12: note = Description of Artificial Sequence: Synthetic peptide; note = XENP019749 vlCDR1
RASQSVGSSYLA

SEQ ID NO: 235 - protein, 7 aa, synthetic construct
  source 1..7: note = Description of Artificial Sequence: Synthetic peptide; note = XENP019749 vlCDR2
GAFSRAT

SEQ ID NO: 236 - protein, 9 aa, synthetic construct
  source 1..9: note = Description of Artificial Sequence: Synthetic peptide; note = XENP019749 vlCDR3
QQYGSSPWT

SEQ ID NO: 237 - protein, 246 aa, synthetic construct
  source 1..246: note = Description of Artificial Sequence: Synthetic polypeptide; note = XENP019750 [CTLA-4]_H0.6_L0_scFv(GKPGS)4
QVQLVESGGGVVKPGRSLRLSCAASGFTFSSYTMHWVRQAPGKGLEWVTFISYDGNNKYYADSVKGRFTISRDNSKNTLYLQMNSLRAEDTAIYYCARTGWLGPFDYWGQGTLVTVSSGKPGSGKPGSGKPGSGKPGSEIVLTQSPGTLSLSPGERATLSCRASQSVGSSYLAWYQQKPGQAPRLLIYGAFSRATGIPDRFSGSGSGTDFTLTISRLEPEDFAVYYCQQYGSSPWTFGQGTKVEIK

SEQ ID NO: 238 - protein, 118 aa, synthetic construct
  source 1..118: note = Description of Artificial Sequence: Synthetic polypeptide; note = VH of XENP019750
QVQLVESGGGVVKPGRSLRLSCAASGFTFSSYTMHWVRQAPGKGLEWVTFISYDGNNKYYADSVKGRFTISRDNSKNTLYLQMNSLRAEDTAIYYCARTGWLGPFDYWGQGTLVTVSS

SEQ ID NO: 239 - protein, 108 aa, synthetic construct; identical to SEQ ID NO: 23
  source 1..108: note = Description of Artificial Sequence: Synthetic polypeptide; note = VL of XENP019750

SEQ ID NO: 240 - protein, 5 aa, synthetic construct
  source 1..5: note = Description of Artificial Sequence: Synthetic peptide; note = XENP019750 vhCDR1
SYTMH

SEQ ID NO: 241 - protein, 17 aa, synthetic construct
  source 1..17: note = Description of Artificial Sequence: Synthetic peptide; note = XENP019750 vhCDR2
FISYDGNNKYYADSVKG

SEQ ID NO: 242 - protein, 9 aa, synthetic construct
  source 1..9: note = Description of Artificial Sequence: Synthetic peptide; note = XENP019750 vhCDR3
TGWLGPFDY

SEQ ID NO: 243 - protein, 12 aa, synthetic construct
  source 1..12: note = Description of Artificial Sequence: Synthetic peptide; note = XENP019750 vlCDR1
RASQSVGSSYLA

SEQ ID NO: 244 - protein, 7 aa, synthetic construct
  source 1..7: note = Description of Artificial Sequence: Synthetic peptide; note = XENP019750 vlCDR2
GAFSRAT

SEQ ID NO: 245 - protein, 9 aa, synthetic construct
  source 1..9: note = Description of Artificial Sequence: Synthetic peptide; note = XENP019750 vlCDR3
QQYGSSPWT

SEQ ID NO: 246 - protein, 246 aa, synthetic construct
  source 1..246: note = Description of Artificial Sequence: Synthetic polypeptide; note = XENP019751 [CTLA-4]_H0.7_L0_scFv(GKPGS)4
QVQLVESGGGVVEPGRSLRLSCAASGFTFSSYTMHWVRQAPGKGLEWVTFISYDGNNKYYADSVKGRFTISRDNSKNTLYLQMNSLRAEDTAIYYCARTGWLGPFDYWGQGTLVTVSSGKPGSGKPGSGKPGSGKPGSEIVLTQSPGTLSLSPGERATLSCRASQSVGSSYLAWYQQKPGQAPRLLIYGAFSRATGIPDRFSGSGSGTDFTLTISRLEPEDFAVYYCQQYGSSPWTFGQGTKVEIK

SEQ ID NO: 247 - protein, 118 aa, synthetic construct
  source 1..118: note = Description of Artificial Sequence: Synthetic polypeptide; note = VH of XENP019751
QVQLVESGGGVVEPGRSLRLSCAASGFTFSSYTMHWVRQAPGKGLEWVTFISYDGNNKYYADSVKGRFTISRDNSKNTLYLQMNSLRAEDTAIYYCARTGWLGPFDYWGQGTLVTVSS

SEQ ID NO: 248 - protein, 108 aa, synthetic construct; identical to SEQ ID NO: 23
  source 1..108: note = Description of Artificial Sequence: Synthetic polypeptide; note = VL of XENP019751

SEQ ID NO: 249 - protein, 5 aa, synthetic construct
  source 1..5: note = Description of Artificial Sequence: Synthetic peptide; note = XENP019751 vhCDR1
SYTMH

SEQ ID NO: 250 - protein, 17 aa, synthetic construct
  source 1..17: note = Description of Artificial Sequence: Synthetic peptide; note = XENP019751 vhCDR2
FISYDGNNKYYADSVKG

SEQ ID NO: 251 - protein, 9 aa, synthetic construct
  source 1..9: note = Description of Artificial Sequence: Synthetic peptide; note = XENP019751 vhCDR3
TGWLGPFDY

SEQ ID NO: 252 - protein, 12 aa, synthetic construct
  source 1..12: note = Description of Artificial Sequence: Synthetic peptide; note = XENP019751 vlCDR1
RASQSVGSSYLA

SEQ ID NO: 253 - protein, 7 aa, synthetic construct
  source 1..7: note = Description of Artificial Sequence: Synthetic peptide; note = XENP019751 vlCDR2
GAFSRAT

SEQ ID NO: 254 - protein, 9 aa, synthetic construct
  source 1..9: note = Description of Artificial Sequence: Synthetic peptide; note = XENP019751 vlCDR3
QQYGSSPWT

SEQ ID NO: 255 - protein, 246 aa, synthetic construct
  source 1..246: note = Description of Artificial Sequence: Synthetic polypeptide; note = XENP019752 [CTLA-4]_H0.8_L0_scFv(GKPGS)4
QVQLVESGGGVVQPGGSLRLSCAASGFTFSSYTMHWVRQAPGKGLEWVTFISYDGNNKYYADSVKGRFTISRDNSKNTLYLQMNSLRAEDTAIYYCARTGWLGPFDYWGQGTLVTVSSGKPGSGKPGSGKPGSGKPGSEIVLTQSPGTLSLSPGERATLSCRASQSVGSSYLAWYQQKPGQAPRLLIYGAFSRATGIPDRFSGSGSGTDFTLTISRLEPEDFAVYYCQQYGSSPWTFGQGTKVEIK

SEQ ID NO: 256 - protein, 118 aa, synthetic construct
  source 1..118: note = Description of Artificial Sequence: Synthetic polypeptide; note = VH of XENP019752
QVQLVESGGGVVQPGGSLRLSCAASGFTFSSYTMHWVRQAPGKGLEWVTFISYDGNNKYYADSVKGRFTISRDNSKNTLYLQMNSLRAEDTAIYYCARTGWLGPFDYWGQGTLVTVSS

SEQ ID NO: 257 - protein, 108 aa, synthetic construct; identical to SEQ ID NO: 23
  source 1..108: note = Description of Artificial Sequence: Synthetic polypeptide; note = VL of XENP019752

SEQ ID NO: 258 - protein, 5 aa, synthetic construct
  source 1..5: note = Description of Artificial Sequence: Synthetic peptide; note = XENP019752 vhCDR1
SYTMH

SEQ ID NO: 259 - protein, 17 aa, synthetic construct
  source 1..17: note = Description of Artificial Sequence: Synthetic peptide; note = XENP019752 vhCDR2
FISYDGNNKYYADSVKG

SEQ ID NO: 260 - protein, 9 aa, synthetic construct
  source 1..9: note = Description of Artificial Sequence: Synthetic peptide; note = XENP019752 vhCDR3
TGWLGPFDY

SEQ ID NO: 261 - protein, 12 aa, synthetic construct
  source 1..12: note = Description of Artificial Sequence: Synthetic peptide; note = XENP019752 vlCDR1
RASQSVGSSYLA

SEQ ID NO: 262 - protein, 7 aa, synthetic construct
  source 1..7: note = Description of Artificial Sequence: Synthetic peptide; note = XENP019752 vlCDR2
GAFSRAT

SEQ ID NO: 263 - protein, 9 aa, synthetic construct
  source 1..9: note = Description of Artificial Sequence: Synthetic peptide; note = XENP019752 vlCDR3
QQYGSSPWT

SEQ ID NO: 264 - protein, 246 aa, synthetic construct
  source 1..246: note = Description of Artificial Sequence: Synthetic polypeptide; note = XENP019753 [CTLA-4]_H0.9_L0_scFv(GKPGS)4
QVQLVESGGGVVQPGESLRLSCAASGFTFSSYTMHWVRQAPGKGLEWVTFISYDGNNKYYADSVKGRFTISRDNSKNTLYLQMNSLRAEDTAIYYCARTGWLGPFDYWGQGTLVTVSSGKPGSGKPGSGKPGSGKPGSEIVLTQSPGTLSLSPGERATLSCRASQSVGSSYLAWYQQKPGQAPRLLIYGAFSRATGIPDRFSGSGSGTDFTLTISRLEPEDFAVYYCQQYGSSPWTFGQGTKVEIK

SEQ ID NO: 265 - protein, 118 aa, synthetic construct
  source 1..118: note = Description of Artificial Sequence: Synthetic polypeptide; note = VH of XENP019753
QVQLVESGGGVVQPGESLRLSCAASGFTFSSYTMHWVRQAPGKGLEWVTFISYDGNNKYYADSVKGRFTISRDNSKNTLYLQMNSLRAEDTAIYYCARTGWLGPFDYWGQGTLVTVSS

SEQ ID NO: 266 - protein, 108 aa, synthetic construct; identical to SEQ ID NO: 23
  source 1..108: note = Description of Artificial Sequence: Synthetic polypeptide; note = VL of XENP019753

SEQ ID NO: 267 - protein, 5 aa, synthetic construct
  source 1..5: note = Description of Artificial Sequence: Synthetic peptide; note = XENP019753 vhCDR1
SYTMH

SEQ ID NO: 268 - protein, 17 aa, synthetic construct
  source 1..17: note = Description of Artificial Sequence: Synthetic peptide; note = XENP019753 vhCDR2
FISYDGNNKYYADSVKG

SEQ ID NO: 269 - protein, 9 aa, synthetic construct
  source 1..9: note = Description of Artificial Sequence: Synthetic peptide; note = XENP019753 vhCDR3
TGWLGPFDY

SEQ ID NO: 270 - protein, 12 aa, synthetic construct
  source 1..12: note = Description of Artificial Sequence: Synthetic peptide; note = XENP019753 vlCDR1
RASQSVGSSYLA

SEQ ID NO: 271 - protein, 7 aa, synthetic construct
  source 1..7: note = Description of Artificial Sequence: Synthetic peptide; note = XENP019753 vlCDR2
GAFSRAT

SEQ ID NO: 272 - protein, 9 aa, synthetic construct
  source 1..9: note = Description of Artificial Sequence: Synthetic peptide; note = XENP019753 vlCDR3
QQYGSSPWT

SEQ ID NO: 273 - protein, 246 aa, synthetic construct
  source 1..246: note = Description of Artificial Sequence: Synthetic polypeptide; note = XENP019754 [CTLA-4]_H0.10_L0_scFv(GKPGS)4
QVQLVESGGGVVQPGRSLKLSCAASGFTFSSYTMHWVRQAPGKGLEWVTFISYDGNNKYYADSVKGRFTISRDNSKNTLYLQMNSLRAEDTAIYYCARTGWLGPFDYWGQGTLVTVSSGKPGSGKPGSGKPGSGKPGSEIVLTQSPGTLSLSPGERATLSCRASQSVGSSYLAWYQQKPGQAPRLLIYGAFSRATGIPDRFSGSGSGTDFTLTISRLEPEDFAVYYCQQYGSSPWTFGQGTKVEIK

SEQ ID NO: 274 - protein, 118 aa, synthetic construct
  source 1..118: note = Description of Artificial Sequence: Synthetic polypeptide; note = VH of XENP019754
QVQLVESGGGVVQPGRSLKLSCAASGFTFSSYTMHWVRQAPGKGLEWVTFISYDGNNKYYADSVKGRFTISRDNSKNTLYLQMNSLRAEDTAIYYCARTGWLGPFDYWGQGTLVTVSS

SEQ ID NO: 275 - protein, 108 aa, synthetic construct; identical to SEQ ID NO: 23
  source 1..108: note = Description of Artificial Sequence: Synthetic polypeptide; note = VL of XENP019754

SEQ ID NO: 276 - protein, 5 aa, synthetic construct
  source 1..5: note = Description of Artificial Sequence: Synthetic peptide; note = XENP019754 vhCDR1
SYTMH

SEQ ID NO: 277 - protein, 17 aa, synthetic construct
  source 1..17: note = Description of Artificial Sequence: Synthetic peptide; note = XENP019754 vhCDR2
FISYDGNNKYYADSVKG

SEQ ID NO: 278 - protein, 9 aa, synthetic construct
  source 1..9: note = Description of Artificial Sequence: Synthetic peptide; note = XENP019754 vhCDR3
TGWLGPFDY

SEQ ID NO: 279 - protein, 12 aa, synthetic construct
  source 1..12: note = Description of Artificial Sequence: Synthetic peptide; note = XENP019754 vlCDR1
RASQSVGSSYLA

SEQ ID NO: 280 - protein, 7 aa, synthetic construct
  source 1..7: note = Description of Artificial Sequence: Synthetic peptide; note = XENP019754 vlCDR2
GAFSRAT

SEQ ID NO: 281 - protein, 9 aa, synthetic construct
  source 1..9: note = Description of Artificial Sequence: Synthetic peptide; note = XENP019754 vlCDR3
QQYGSSPWT

SEQ ID NO: 282 - protein, 246 aa, synthetic construct
  source 1..246: note = Description of Artificial Sequence: Synthetic polypeptide; note = XENP019755 [CTLA-4]_H0.11_L0_scFv(GKPGS)4
QVQLVESGGGVVQPGRSLRLSCAASGFTVSSYTMHWVRQAPGKGLEWVTFISYDGNNKYYADSVKGRFTISRDNSKNTLYLQMNSLRAEDTAIYYCARTGWLGPFDYWGQGTLVTVSSGKPGSGKPGSGKPGSGKPGSEIVLTQSPGTLSLSPGERATLSCRASQSVGSSYLAWYQQKPGQAPRLLIYGAFSRATGIPDRFSGSGSGTDFTLTISRLEPEDFAVYYCQQYGSSPWTFGQGTKVEIK

SEQ ID NO: 283 - protein, 118 aa, synthetic construct
  source 1..118: note = Description of Artificial Sequence: Synthetic polypeptide; note = VH of XENP019755
QVQLVESGGGVVQPGRSLRLSCAASGFTVSSYTMHWVRQAPGKGLEWVTFISYDGNNKYYADSVKGRFTISRDNSKNTLYLQMNSLRAEDTAIYYCARTGWLGPFDYWGQGTLVTVSS

SEQ ID NO: 284 - protein, 108 aa, synthetic construct; identical to SEQ ID NO: 23
  source 1..108: note = Description of Artificial Sequence: Synthetic polypeptide; note = VL of XENP019755

SEQ ID NO: 285 - protein, 5 aa, synthetic construct
  source 1..5: note = Description of Artificial Sequence: Synthetic peptide; note = XENP019755 vhCDR1
SYTMH

SEQ ID NO: 286 - protein, 17 aa, synthetic construct
  source 1..17: note = Description of Artificial Sequence: Synthetic peptide; note = XENP019755 vhCDR2
FISYDGNNKYYADSVKG

SEQ ID NO: 287 - protein, 9 aa, synthetic construct
  source 1..9: note = Description of Artificial Sequence: Synthetic peptide; note = XENP019755 vhCDR3
TGWLGPFDY

SEQ ID NO: 288 - protein, 12 aa, synthetic construct
  source 1..12: note = Description of Artificial Sequence: Synthetic peptide; note = XENP019755 vlCDR1
RASQSVGSSYLA

SEQ ID NO: 289 - protein, 7 aa, synthetic construct
  source 1..7: note = Description of Artificial Sequence: Synthetic peptide; note = XENP019755 vlCDR2
GAFSRAT

SEQ ID NO: 290 - protein, 9 aa, synthetic construct
  source 1..9: note = Description of Artificial Sequence: Synthetic peptide; note = XENP019755 vlCDR3
QQYGSSPWT

SEQ ID NO: 291 - protein, 246 aa, synthetic construct
  source 1..246: note = Description of Artificial Sequence: Synthetic polypeptide; note = XENP019756 [CTLA-4]_H0.12_L0_scFv(GKPGS)4
QVQLVESGGGVVQPGRSLRLSCAASGFTFSAYTMHWVRQAPGKGLEWVTFISYDGNNKYYADSVKGRFTISRDNSKNTLYLQMNSLRAEDTAIYYCARTGWLGPFDYWGQGTLVTVSSGKPGSGKPGSGKPGSGKPGSEIVLTQSPGTLSLSPGERATLSCRASQSVGSSYLAWYQQKPGQAPRLLIYGAFSRATGIPDRFSGSGSGTDFTLTISRLEPEDFAVYYCQQYGSSPWTFGQGTKVEIK

SEQ ID NO: 292 - protein, 118 aa, synthetic construct
  source 1..118: note = Description of Artificial Sequence: Synthetic polypeptide; note = VH of XENP019756
QVQLVESGGGVVQPGRSLRLSCAASGFTFSAYTMHWVRQAPGKGLEWVTFISYDGNNKYYADSVKGRFTISRDNSKNTLYLQMNSLRAEDTAIYYCARTGWLGPFDYWGQGTLVTVSS

SEQ ID NO: 293 - protein, 108 aa, synthetic construct; identical to SEQ ID NO: 23
  source 1..108: note = Description of Artificial Sequence: Synthetic polypeptide; note = VL of XENP019756

SEQ ID NO: 294 - protein, 5 aa, synthetic construct
  source 1..5: note = Description of Artificial Sequence: Synthetic peptide; note = XENP019756 vhCDR1
AYTMH

SEQ ID NO: 295 - protein, 17 aa, synthetic construct
  source 1..17: note = Description of Artificial Sequence: Synthetic peptide; note = XENP019756 vhCDR2
FISYDGNNKYYADSVKG

SEQ ID NO: 296 - protein, 9 aa, synthetic construct
  source 1..9: note = Description of Artificial Sequence: Synthetic peptide; note = XENP019756 vhCDR3
TGWLGPFDY

SEQ ID NO: 297 - protein, 12 aa, synthetic construct
  source 1..12: note = Description of Artificial Sequence: Synthetic peptide; note = XENP019756 vlCDR1
RASQSVGSSYLA

SEQ ID NO: 298 - protein, 7 aa, synthetic construct
  source 1..7: note = Description of Artificial Sequence: Synthetic peptide; note = XENP019756 vlCDR2
GAFSRAT

SEQ ID NO: 299 - protein, 9 aa, synthetic construct
  source 1..9: note = Description of Artificial Sequence: Synthetic peptide; note = XENP019756 vlCDR3
QQYGSSPWT

SEQ ID NO: 300 - protein, 246 aa, synthetic construct
  source 1..246: note = Description of Artificial Sequence: Synthetic polypeptide; note = XENP019757 [CTLA-4]_H0.13_L0_scFv(GKPGS)4
QVQLVESGGGVVQPGRSLRLSCAASGFTFSDYTMHWVRQAPGKGLEWVTFISYDGNNKYYADSVKGRFTISRDNSKNTLYLQMNSLRAEDTAIYYCARTGWLGPFDYWGQGTLVTVSSGKPGSGKPGSGKPGSGKPGSEIVLTQSPGTLSLSPGERATLSCRASQSVGSSYLAWYQQKPGQAPRLLIYGAFSRATGIPDRFSGSGSGTDFTLTISRLEPEDFAVYYCQQYGSSPWTFGQGTKVEIK

SEQ ID NO: 301 - protein, 118 aa, synthetic construct
  source 1..118: note = Description of Artificial Sequence: Synthetic polypeptide; note = VH of XENP019757
QVQLVESGGGVVQPGRSLRLSCAASGFTFSDYTMHWVRQAPGKGLEWVTFISYDGNNKYYADSVKGRFTISRDNSKNTLYLQMNSLRAEDTAIYYCARTGWLGPFDYWGQGTLVTVSS

SEQ ID NO: 302 - protein, 108 aa, synthetic construct; identical to SEQ ID NO: 23
  source 1..108: note = Description of Artificial Sequence: Synthetic polypeptide; note = VL of XENP019757

SEQ ID NO: 303 - protein, 5 aa, synthetic construct
  source 1..5: note = Description of Artificial Sequence: Synthetic peptide; note = XENP019757 vhCDR1
DYTMH

SEQ ID NO: 304 - protein, 17 aa, synthetic construct
  source 1..17: note = Description of Artificial Sequence: Synthetic peptide; note = XENP019757 vhCDR2
FISYDGNNKYYADSVKG

SEQ ID NO: 305 - protein, 9 aa, synthetic construct
  source 1..9: note = Description of Artificial Sequence: Synthetic peptide; note = XENP019757 vhCDR3
TGWLGPFDY

SEQ ID NO: 306 - protein, 12 aa, synthetic construct
  source 1..12: note = Description of Artificial Sequence: Synthetic peptide; note = XENP019757 vlCDR1
RASQSVGSSYLA

SEQ ID NO: 307 - protein, 7 aa, synthetic construct
  source 1..7: note = Description of Artificial Sequence: Synthetic peptide; note = XENP019757 vlCDR2
GAFSRAT

SEQ ID NO: 308 - protein, 9 aa, synthetic construct
  source 1..9: note = Description of Artificial Sequence: Synthetic peptide; note = XENP019757 vlCDR3
QQYGSSPWT

SEQ ID NO: 309 - protein, 246 aa, synthetic construct
  source 1..246: note = Description of Artificial Sequence: Synthetic polypeptide; note = XENP019758 [CTLA-4]_H0.14_L0_scFv(GKPGS)4
QVQLVESGGGVVQPGRSLRLSCAASGFTFSGYTMHWVRQAPGKGLEWVTFISYDGNNKYYADSVKGRFTISRDNSKNTLYLQMNSLRAEDTAIYYCARTGWLGPFDYWGQGTLVTVSSGKPGSGKPGSGKPGSGKPGSEIVLTQSPGTLSLSPGERATLSCRASQSVGSSYLAWYQQKPGQAPRLLIYGAFSRATGIPDRFSGSGSGTDFTLTISRLEPEDFAVYYCQQYGSSPWTFGQGTKVEIK

SEQ ID NO: 310 - protein, 118 aa, synthetic construct
  source 1..118: note = Description of Artificial Sequence: Synthetic polypeptide; note = VH of XENP019758
QVQLVESGGGVVQPGRSLRLSCAASGFTFSGYTMHWVRQAPGKGLEWVTFISYDGNNKYYADSVKGRFTISRDNSKNTLYLQMNSLRAEDTAIYYCARTGWLGPFDYWGQGTLVTVSS

SEQ ID NO: 311 - protein, 108 aa, synthetic construct; identical to SEQ ID NO: 23
  source 1..108: note = Description of Artificial Sequence: Synthetic polypeptide; note = VL of XENP019758

SEQ ID NO: 312 - protein, 5 aa, synthetic construct
  source 1..5: note = Description of Artificial Sequence: Synthetic peptide; note = XENP019758 vhCDR1
GYTMH

SEQ ID NO: 313 - protein, 17 aa, synthetic construct
  source 1..17: note = Description of Artificial Sequence: Synthetic peptide; note = XENP019758 vhCDR2
FISYDGNNKYYADSVKG

SEQ ID NO: 314 - protein, 9 aa, synthetic construct
  source 1..9: note = Description of Artificial Sequence: Synthetic peptide; note = XENP019758 vhCDR3
TGWLGPFDY

SEQ ID NO: 315 - protein, 12 aa, synthetic construct
  source 1..12: note = Description of Artificial Sequence: Synthetic peptide; note = XENP019758 vlCDR1
RASQSVGSSYLA

SEQ ID NO: 316 - protein, 7 aa, synthetic construct
  source 1..7: note = Description of Artificial Sequence: Synthetic peptide; note = XENP019758 vlCDR2
GAFSRAT

SEQ ID NO: 317 - protein, 9 aa, synthetic construct
  source 1..9: note = Description of Artificial Sequence: Synthetic peptide; note = XENP019758 vlCDR3
QQYGSSPWT

SEQ ID NO: 318 - protein, 246 aa, synthetic construct
  source 1..246: note = Description of Artificial Sequence: Synthetic polypeptide; note = XENP019759 [CTLA-4]_H0.15_L0_scFv(GKPGS)4
QVQLVESGGGVVQPGRSLRLSCAASGFTFSNYTMHWVRQAPGKGLEWVTFISYDGNNKYYADSVKGRFTISRDNSKNTLYLQMNSLRAEDTAIYYCARTGWLGPFDYWGQGTLVTVSSGKPGSGKPGSGKPGSGKPGSEIVLTQSPGTLSLSPGERATLSCRASQSVGSSYLAWYQQKPGQAPRLLIYGAFSRATGIPDRFSGSGSGTDFTLTISRLEPEDFAVYYCQQYGSSPWTFGQGTKVEIK

SEQ ID NO: 319 - protein, 118 aa, synthetic construct
  source 1..118: note = Description of Artificial Sequence: Synthetic polypeptide; note = VH of XENP019759
QVQLVESGGGVVQPGRSLRLSCAASGFTFSNYTMHWVRQAPGKGLEWVTFISYDGNNKYYADSVKGRFTISRDNSKNTLYLQMNSLRAEDTAIYYCARTGWLGPFDYWGQGTLVTVSS

SEQ ID NO: 320 - protein, 108 aa, synthetic construct; identical to SEQ ID NO: 23
  source 1..108: note = Description of Artificial Sequence: Synthetic polypeptide; note = VL of XENP019759

SEQ ID NO: 321 - protein, 5 aa, synthetic construct
  source 1..5: note = Description of Artificial Sequence: Synthetic peptide; note = XENP019759 vhCDR1
NYTMH

SEQ ID NO: 322 - protein, 17 aa, synthetic construct
  source 1..17: note = Description of Artificial Sequence: Synthetic peptide; note = XENP019759 vhCDR2
FISYDGNNKYYADSVKG

SEQ ID NO: 323 - protein, 9 aa, synthetic construct
  source 1..9: note = Description of Artificial Sequence: Synthetic peptide; note = XENP019759 vhCDR3
TGWLGPFDY

SEQ ID NO: 324 - protein, 12 aa, synthetic construct
  source 1..12: note = Description of Artificial Sequence: Synthetic peptide; note = XENP019759 vlCDR1
RASQSVGSSYLA

SEQ ID NO: 325 - protein, 7 aa, synthetic construct
  source 1..7: note = Description of Artificial Sequence: Synthetic peptide; note = XENP019759 vlCDR2
GAFSRAT

SEQ ID NO: 326 - protein, 9 aa, synthetic construct
  source 1..9: note = Description of Artificial Sequence: Synthetic peptide; note = XENP019759 vlCDR3
QQYGSSPWT

SEQ ID NO: 327 - protein, 246 aa, synthetic construct
  source 1..246: note = Description of Artificial Sequence: Synthetic polypeptide; note = XENP019760 [CTLA-4]_H0.16_L0_scFv(GKPGS)4
QVQLVESGGGVVQPGRSLRLSCAASGFTFSQYTMHWVRQAPGKGLEWVTFISYDGNNKYYADSVKGRFTISRDNSKNTLYLQMNSLRAEDTAIYYCARTGWLGPFDYWGQGTLVTVSSGKPGSGKPGSGKPGSGKPGSEIVLTQSPGTLSLSPGERATLSCRASQSVGSSYLAWYQQKPGQAPRLLIYGAFSRATGIPDRFSGSGSGTDFTLTISRLEPEDFAVYYCQQYGSSPWTFGQGTKVEIK

SEQ ID NO: 328 - protein, 118 aa, synthetic construct
  source 1..118: note = Description of Artificial Sequence: Synthetic polypeptide; note = VH of XENP019760
QVQLVESGGGVVQPGRSLRLSCAASGFTFSQYTMHWVRQAPGKGLEWVTFISYDGNNKYYADSVKGRFTISRDNSKNTLYLQMNSLRAEDTAIYYCARTGWLGPFDYWGQGTLVTVSS

SEQ ID NO: 329 - protein, 108 aa, synthetic construct; identical to SEQ ID NO: 23
  source 1..108: note = Description of Artificial Sequence: Synthetic polypeptide; note = VL of XENP019760

SEQ ID NO: 330 - protein, 5 aa, synthetic construct
  source 1..5: note = Description of Artificial Sequence: Synthetic peptide; note = XENP019760 vhCDR1
QYTMH

SEQ ID NO: 331 - protein, 17 aa, synthetic construct
  source 1..17: note = Description of Artificial Sequence: Synthetic peptide; note = XENP019760 vhCDR2
FISYDGNNKYYADSVKG

SEQ ID NO: 332 - protein, 9 aa, synthetic construct
  source 1..9: note = Description of Artificial Sequence: Synthetic peptide; note = XENP019760 vhCDR3
TGWLGPFDY

SEQ ID NO: 333 - protein, 12 aa, synthetic construct
  source 1..12: note = Description of Artificial Sequence: Synthetic peptide; note = XENP019760 vlCDR1
RASQSVGSSYLA

SEQ ID NO: 334 - protein, 7 aa, synthetic construct
  source 1..7: note = Description of Artificial Sequence: Synthetic peptide; note = XENP019760 vlCDR2
GAFSRAT

SEQ ID NO: 335 - protein, 9 aa, synthetic construct
  source 1..9: note = Description of Artificial Sequence: Synthetic peptide; note = XENP019760 vlCDR3
QQYGSSPWT

SEQ ID NO: 336 - protein, 246 aa, synthetic construct
  source 1..246: note = Description of Artificial Sequence: Synthetic polypeptide; note = XENP019761 [CTLA-4]_H0.17_L0_scFv(GKPGS)4
QVQLVESGGGVVQPGRSLRLSCAASGFTFSTYTMHWVRQAPGKGLEWVTFISYDGNNKYYADSVKGRFTISRDNSKNTLYLQMNSLRAEDTAIYYCARTGWLGPFDYWGQGTLVTVSSGKPGSGKPGSGKPGSGKPGSEIVLTQSPGTLSLSPGERATLSCRASQSVGSSYLAWYQQKPGQAPRLLIYGAFSRATGIPDRFSGSGSGTDFTLTISRLEPEDFAVYYCQQYGSSPWTFGQGTKVEIK

SEQ ID NO: 337 - protein, 118 aa, synthetic construct
  source 1..118: note = Description of Artificial Sequence: Synthetic polypeptide; note = VH of XENP019761
QVQLVESGGGVVQPGRSLRLSCAASGFTFSTYTMHWVRQAPGKGLEWVTFISYDGNNKYYADSVKGRFTISRDNSKNTLYLQMNSLRAEDTAIYYCARTGWLGPFDYWGQGTLVTVSS

SEQ ID NO: 338 - protein, 108 aa, synthetic construct; identical to SEQ ID NO: 23
  source 1..108: note = Description of Artificial Sequence: Synthetic polypeptide; note = VL of XENP019761

SEQ ID NO: 339 - protein, 5 aa, synthetic construct
  source 1..5: note = Description of Artificial Sequence: Synthetic peptide; note = XENP019761 vhCDR1
TYTMH

SEQ ID NO: 340 - protein, 17 aa, synthetic construct
  source 1..17: note = Description of Artificial Sequence: Synthetic peptide; note = XENP019761 vhCDR2
FISYDGNNKYYADSVKG

SEQ ID NO: 341 - protein, 9 aa, synthetic construct
  source 1..9: note = Description of Artificial Sequence: Synthetic peptide; note = XENP019761 vhCDR3
TGWLGPFDY

SEQ ID NO: 342 - protein, 12 aa, synthetic construct
  source 1..12: note = Description of Artificial Sequence: Synthetic peptide; note = XENP019761 vlCDR1
RASQSVGSSYLA

SEQ ID NO: 343 - protein, 7 aa, synthetic construct
  source 1..7: note = Description of Artificial Sequence: Synthetic peptide; note = XENP019761 vlCDR2
GAFSRAT

SEQ ID NO: 344 - protein, 9 aa, synthetic construct
  source 1..9: note = Description of Artificial Sequence: Synthetic peptide; note = XENP019761 vlCDR3
QQYGSSPWT

SEQ ID NO: 345 - protein, 246 aa, synthetic construct
  source 1..246: note = Description of Artificial Sequence: Synthetic polypeptide; note = XENP019762 [CTLA-4]_H0.18_L0_scFv(GKPGS)4
QVQLVESGGGVVQPGRSLRLSCAASGFTFSSATMHWVRQAPGKGLEWVTFISYDGNNKYYADSVKGRFTISRDNSKNTLYLQMNSLRAEDTAIYYCARTGWLGPFDYWGQGTLVTVSSGKPGSGKPGSGKPGSGKPGSEIVLTQSPGTLSLSPGERATLSCRASQSVGSSYLAWYQQKPGQAPRLLIYGAFSRATGIPDRFSGSGSGTDFTLTISRLEPEDFAVYYCQQYGSSPWTFGQGTKVEIK

SEQ ID NO: 346 - protein, 118 aa, synthetic construct
  source 1..118: note = Description of Artificial Sequence: Synthetic polypeptide; note = VH of XENP019762
QVQLVESGGGVVQPGRSLRLSCAASGFTFSSATMHWVRQAPGKGLEWVTFISYDGNNKYYADSVKGRFTISRDNSKNTLYLQMNSLRAEDTAIYYCARTGWLGPFDYWGQGTLVTVSS

SEQ ID NO: 347 - protein, 108 aa, synthetic construct; identical to SEQ ID NO: 23
  source 1..108: note = Description of Artificial Sequence: Synthetic polypeptide; note = VL of XENP019762

SEQ ID NO: 348 - protein, 5 aa, synthetic construct
  source 1..5: note = Description of Artificial Sequence: Synthetic peptide; note = XENP019762 vhCDR1
SATMH

SEQ ID NO: 349 - protein, 17 aa, synthetic construct
  source 1..17: note = Description of Artificial Sequence: Synthetic peptide; note = XENP019762 vhCDR2
FISYDGNNKYYADSVKG

SEQ ID NO: 350 - protein, 9 aa, synthetic construct
  source 1..9: note = Description of Artificial Sequence: Synthetic peptide; note = XENP019762 vhCDR3
TGWLGPFDY

SEQ ID NO: 351 - protein, 12 aa, synthetic construct
  source 1..12: note = Description of Artificial Sequence: Synthetic peptide; note = XENP019762 vlCDR1
RASQSVGSSYLA

SEQ ID NO: 352 - protein, 7 aa, synthetic construct
  source 1..7: note = Description of Artificial Sequence: Synthetic peptide; note = XENP019762 vlCDR2
GAFSRAT

SEQ ID NO: 353 - protein, 9 aa, synthetic construct
  source 1..9: note = Description of Artificial Sequence: Synthetic peptide; note = XENP019762 vlCDR3
QQYGSSPWT

SEQ ID NO: 354 - protein, 246 aa, synthetic construct
  source 1..246: note = Description of Artificial Sequence: Synthetic polypeptide; note = XENP019763 [CTLA-4]_H0.19_L0_scFv(GKPGS)4
QVQLVESGGGVVQPGRSLRLSCAASGFTFSSHTMHWVRQAPGKGLEWVTFISYDGNNKYYADSVKGRFTISRDNSKNTLYLQMNSLRAEDTAIYYCARTGWLGPFDYWGQGTLVTVSSGKPGSGKPGSGKPGSGKPGSEIVLTQSPGTLSLSPGERATLSCRASQSVGSSYLAWYQQKPGQAPRLLIYGAFSRATGIPDRFSGSGSGTDFTLTISRLEPEDFAVYYCQQYGSSPWTFGQGTKVEIK

SEQ ID NO: 355 - protein, 118 aa, synthetic construct
  source 1..118: note = Description of Artificial Sequence: Synthetic polypeptide; note = VH of XENP019763
QVQLVESGGGVVQPGRSLRLSCAASGFTFSSHTMHWVRQAPGKGLEWVTFISYDGNNKYYADSVKGRFTISRDNSKNTLYLQMNSLRAEDTAIYYCARTGWLGPFDYWGQGTLVTVSS

SEQ ID NO: 356 - protein, 108 aa, synthetic construct; identical to SEQ ID NO: 23
  source 1..108: note = Description of Artificial Sequence: Synthetic polypeptide; note = VL of XENP019763

SEQ ID NO: 357 - protein, 5 aa, synthetic construct
  source 1..5: note = Description of Artificial Sequence: Synthetic peptide; note = XENP019763 vhCDR1
SHTMH

SEQ ID NO: 358 - protein, 17 aa, synthetic construct
  source 1..17: note = Description of Artificial Sequence: Synthetic peptide; note = XENP019763 vhCDR2
FISYDGNNKYYADSVKG

SEQ ID NO: 359 - protein, 9 aa, synthetic construct
  source 1..9: note = Description of Artificial Sequence: Synthetic peptide; note = XENP019763 vhCDR3
TGWLGPFDY

SEQ ID NO: 360 - protein, 12 aa, synthetic construct
  source 1..12: note = Description of Artificial Sequence: Synthetic peptide; note = XENP019763 vlCDR1
RASQSVGSSYLA

SEQ ID NO: 361 - protein, 7 aa, synthetic construct
  source 1..7: note = Description of Artificial Sequence: Synthetic peptide; note = XENP019763 vlCDR2
GAFSRAT

SEQ ID NO: 362 - protein, 9 aa, synthetic construct
  source 1..9: note = Description of Artificial Sequence: Synthetic peptide; note = XENP019763 vlCDR3
QQYGSSPWT

SEQ ID NO: 363 - protein, 246 aa, synthetic construct
  source 1..246: note = Description of Artificial Sequence: Synthetic polypeptide; note = XENP019764 [CTLA-4]_H0.20_L0_scFv(GKPGS)4
QVQLVESGGGVVQPGRSLRLSCAASGFTFSSFTMHWVRQAPGKGLEWVTFISYDGNNKYYADSVKGRFTISRDNSKNTLYLQMNSLRAEDTAIYYCARTGWLGPFDYWGQGTLVTVSSGKPGSGKPGSGKPGSGKPGSEIVLTQSPGTLSLSPGERATLSCRASQSVGSSYLAWYQQKPGQAPRLLIYGAFSRATGIPDRFSGSGSGTDFTLTISRLEPEDFAVYYCQQYGSSPWTFGQGTKVEIK

SEQ ID NO: 364 - protein, 118 aa, synthetic construct
  source 1..118: note = Description of Artificial Sequence: Synthetic polypeptide; note = VH of XENP019764
QVQLVESGGGVVQPGRSLRLSCAASGFTFSSFTMHWVRQAPGKGLEWVTFISYDGNNKYYADSVKGRFTISRDNSKNTLYLQMNSLRAEDTAIYYCARTGWLGPFDYWGQGTLVTVSS

SEQ ID NO: 365 - protein, 108 aa, synthetic construct; identical to SEQ ID NO: 23
  source 1..108: note = Description of Artificial Sequence: Synthetic polypeptide; note = VL of XENP019764

SEQ ID NO: 366 - protein, 5 aa, synthetic construct
  source 1..5: note = Description of Artificial Sequence: Synthetic peptide; note = XENP019764 vhCDR1
SFTMH

SEQ ID NO: 367 - protein, 17 aa, synthetic construct
  source 1..17: note = Description of Artificial Sequence: Synthetic peptide; note = XENP019764 vhCDR2
FISYDGNNKYYADSVKG

SEQ ID NO: 368 - protein, 9 aa, synthetic construct
  source 1..9: note = Description of Artificial Sequence: Synthetic peptide; note = XENP019764 vhCDR3
TGWLGPFDY

SEQ ID NO: 369 - protein, 12 aa, synthetic construct
  source 1..12: note = Description of Artificial Sequence: Synthetic peptide; note = XENP019764 vlCDR1
RASQSVGSSYLA

SEQ ID NO: 370 - protein, 7 aa, synthetic construct
  source 1..7: note = Description of Artificial Sequence: Synthetic peptide; note = XENP019764 vlCDR2
GAFSRAT

SEQ ID NO: 371 - protein, 9 aa, synthetic construct
  source 1..9: note = Description of Artificial Sequence: Synthetic peptide; note = XENP019764 vlCDR3
QQYGSSPWT

SEQ ID NO: 372 - protein, 246 aa, synthetic construct
  source 1..246: note = Description of Artificial Sequence: Synthetic polypeptide; note = XENP019765 [CTLA-4]_H0.21_L0_scFv(GKPGS)4
QVQLVESGGGVVQPGRSLRLSCAASGFTFSSLTMHWVRQAPGKGLEWVTFISYDGNNKYYADSVKGRFTISRDNSKNTLYLQMNSLRAEDTAIYYCARTGWLGPFDYWGQGTLVTVSSGKPGSGKPGSGKPGSGKPGSEIVLTQSPGTLSLSPGERATLSCRASQSVGSSYLAWYQQKPGQAPRLLIYGAFSRATGIPDRFSGSGSGTDFTLTISRLEPEDFAVYYCQQYGSSPWTFGQGTKVEIK

SEQ ID NO: 373 - protein, 118 aa, synthetic construct
  source 1..118: note = Description of Artificial Sequence: Synthetic polypeptide; note = VH of XENP019765
QVQLVESGGGVVQPGRSLRLSCAASGFTFSSLTMHWVRQAPGKGLEWVTFISYDGNNKYYADSVKGRFTISRDNSKNTLYLQMNSLRAEDTAIYYCARTGWLGPFDYWGQGTLVTVSS

SEQ ID NO: 374 - protein, 108 aa, synthetic construct; identical to SEQ ID NO: 23
  source 1..108: note = Description of Artificial Sequence: Synthetic polypeptide; note = VL of XENP019765

SEQ ID NO: 375 - protein, 5 aa, synthetic construct
  source 1..5: note = Description of Artificial Sequence: Synthetic peptide; note = XENP019765 vhCDR1
SLTMH

SEQ ID NO: 376 - protein, 17 aa, synthetic construct
  source 1..17: note = Description of Artificial Sequence: Synthetic peptide; note = XENP019765 vhCDR2
FISYDGNNKYYADSVKG

SEQ ID NO: 377 - protein, 9 aa, synthetic construct
  source 1..9: note = Description of Artificial Sequence: Synthetic peptide; note = XENP019765 vhCDR3
TGWLGPFDY

SEQ ID NO: 378 - protein, 12 aa, synthetic construct
  source 1..12: note = Description of Artificial Sequence: Synthetic peptide; note = XENP019765 vlCDR1
RASQSVGSSYLA

SEQ ID NO: 379 - protein, 7 aa, synthetic construct
  source 1..7: note = Description of Artificial Sequence: Synthetic peptide; note = XENP019765 vlCDR2
GAFSRAT

SEQ ID NO: 380 - protein, 9 aa, synthetic construct
  source 1..9: note = Description of Artificial Sequence: Synthetic peptide; note = XENP019765 vlCDR3
QQYGSSPWT

SEQ ID NO: 381 - protein, 246 aa, synthetic construct
  source 1..246: note = Description of Artificial Sequence: Synthetic polypeptide; note = XENP019766 [CTLA-4]_H0.22_L0_scFv(GKPGS)4
QVQLVESGGGVVQPGRSLRLSCAASGFTFSSNTMHWVRQAPGKGLEWVTFISYDGNNKYYADSVKGRFTISRDNSKNTLYLQMNSLRAEDTAIYYCARTGWLGPFDYWGQGTLVTVSSGKPGSGKPGSGKPGSGKPGSEIVLTQSPGTLSLSPGERATLSCRASQSVGSSYLAWYQQKPGQAPRLLIYGAFSRATGIPDRFSGSGSGTDFTLTISRLEPEDFAVYYCQQYGSSPWTFGQGTKVEIK

SEQ ID NO: 382 - protein, 118 aa, synthetic construct
  source 1..118: note = Description of Artificial Sequence: Synthetic polypeptide; note = VH of XENP019766
QVQLVESGGGVVQPGRSLRLSCAASGFTFSSNTMHWVRQAPGKGLEWVTFISYDGNNKYYADSVKGRFTISRDNSKNTLYLQMNSLRAEDTAIYYCARTGWLGPFDYWGQGTLVTVSS

SEQ ID NO: 383 - protein, 108 aa, synthetic construct; identical to SEQ ID NO: 23
  source 1..108: note = Description of Artificial Sequence: Synthetic polypeptide; note = VL of XENP019766

SEQ ID NO: 384 - protein, 5 aa, synthetic construct
  source 1..5: note = Description of Artificial Sequence: Synthetic peptide; note = XENP019766 vhCDR1
SNTMH

SEQ ID NO: 385 - protein, 17 aa, synthetic construct
  source 1..17: note = Description of Artificial Sequence: Synthetic peptide; note = XENP019766 vhCDR2
FISYDGNNKYYADSVKG

SEQ ID NO: 386 - protein, 9 aa, synthetic construct
  source 1..9: note = Description of Artificial Sequence: Synthetic peptide; note = XENP019766 vhCDR3
TGWLGPFDY

SEQ ID NO: 387 - protein, 12 aa, synthetic construct
  source 1..12: note = Description of Artificial Sequence: Synthetic peptide; note = XENP019766 vlCDR1
RASQSVGSSYLA

SEQ ID NO: 388 - protein, 7 aa, synthetic construct
  source 1..7: note = Description of Artificial Sequence: Synthetic peptide; note = XENP019766 vlCDR2
GAFSRAT

SEQ ID NO: 389 - protein, 9 aa, synthetic construct
  source 1..9: note = Description of Artificial Sequence: Synthetic peptide; note = XENP019766 vlCDR3
QQYGSSPWT

SEQ ID NO: 390 - protein, 246 aa, synthetic construct
  source 1..246: note = Description of Artificial Sequence: Synthetic polypeptide; note = XENP019767 [CTLA-4]_H0.23_L0_scFv(GKPGS)4
QVQLVESGGGVVQPGRSLRLSCAASGFTFSSSTMHWVRQAPGKGLEWVTFISYDGNNKYYADSVKGRFTISRDNSKNTLYLQMNSLRAEDTAIYYCARTGWLGPFDYWGQGTLVTVSSGKPGSGKPGSGKPGSGKPGSEIVLTQSPGTLSLSPGERATLSCRASQSVGSSYLAWYQQKPGQAPRLLIYGAFSRATGIPDRFSGSGSGTDFTLTISRLEPEDFAVYYCQQYGSSPWTFGQGTKVEIK

SEQ ID NO: 391 - protein, 118 aa, synthetic construct
  source 1..118: note = Description of Artificial Sequence: Synthetic polypeptide; note = VH of XENP019767
QVQLVESGGGVVQPGRSLRLSCAASGFTFSSSTMHWVRQAPGKGLEWVTFISYDGNNKYYADSVKGRFTISRDNSKNTLYLQMNSLRAEDTAIYYCARTGWLGPFDYWGQGTLVTVSS

SEQ ID NO: 392 - protein, 108 aa, synthetic construct; identical to SEQ ID NO: 23
  source 1..108: note = Description of Artificial Sequence: Synthetic polypeptide; note = VL of XENP019767

SEQ ID NO: 393 - protein, 5 aa, synthetic construct
  source 1..5: note = Description of Artificial Sequence: Synthetic peptide; note = XENP019767 vhCDR1
SSTMH

SEQ ID NO: 394 - protein, 17 aa, synthetic construct
  source 1..17: note = Description of Artificial Sequence: Synthetic peptide; note = XENP019767 vhCDR2
FISYDGNNKYYADSVKG

SEQ ID NO: 395 - protein, 9 aa, synthetic construct
  source 1..9: note = Description of Artificial Sequence: Synthetic peptide; note = XENP019767 vhCDR3
TGWLGPFDY

SEQ ID NO: 396 - protein, 12 aa, synthetic construct
  source 1..12: note = Description of Artificial Sequence: Synthetic peptide; note = XENP019767 vlCDR1
RASQSVGSSYLA

SEQ ID NO: 397 - protein, 7 aa, synthetic construct
  source 1..7: note = Description of Artificial Sequence: Synthetic peptide; note = XENP019767 vlCDR2
GAFSRAT

SEQ ID NO: 398 - protein, 9 aa, synthetic construct
  source 1..9: note = Description of Artificial Sequence: Synthetic peptide; note = XENP019767 vlCDR3
QQYGSSPWT

SEQ ID NO: 399 - protein, 246 aa, synthetic construct
  source 1..246: note = Description of Artificial Sequence: Synthetic polypeptide; note = XENP019768 [CTLA-4]_H0.24_L0_scFv(GKPGS)4
QVQLVESGGGVVQPGRSLRLSCAASGFTFSSVTMHWVRQAPGKGLEWVTFISYDGNNKYYADSVKGRFTISRDNSKNTLYLQMNSLRAEDTAIYYCARTGWLGPFDYWGQGTLVTVSSGKPGSGKPGSGKPGSGKPGSEIVLTQSPGTLSLSPGERATLSCRASQSVGSSYLAWYQQKPGQAPRLLIYGAFSRATGIPDRFSGSGSGTDFTLTISRLEPEDFAVYYCQQYGSSPWTFGQGTKVEIK

SEQ ID NO: 400 - protein, 118 aa, synthetic construct
  source 1..118: note = Description of Artificial Sequence: Synthetic polypeptide; note = VH of XENP019768
QVQLVESGGGVVQPGRSLRLSCAASGFTFSSVTMHWVRQAPGKGLEWVTFISYDGNNKYYADSVKGRFTISRDNSKNTLYLQMNSLRAEDTAIYYCARTGWLGPFDYWGQGTLVTVSS

SEQ ID NO: 401 - protein, 108 aa, synthetic construct; identical to SEQ ID NO: 23
  source 1..108: note = Description of Artificial Sequence: Synthetic polypeptide; note = VL of XENP019768

SEQ ID NO: 402 - protein, 5 aa, synthetic construct
  source 1..5: note = Description of Artificial Sequence: Synthetic peptide; note = XENP019768 vhCDR1
SVTMH

SEQ ID NO: 403 - protein, 17 aa, synthetic construct
  source 1..17: note = Description of Artificial Sequence: Synthetic peptide; note = XENP019768 vhCDR2
FISYDGNNKYYADSVKG

SEQ ID NO: 404 - protein, 9 aa, synthetic construct
  source 1..9: note = Description of Artificial Sequence: Synthetic peptide; note = XENP019768 vhCDR3
TGWLGPFDY

SEQ ID NO: 405 - protein, 12 aa, synthetic construct
  source 1..12: note = Description of Artificial Sequence: Synthetic peptide; note = XENP019768 vlCDR1
RASQSVGSSYLA

SEQ ID NO: 406 - protein, 7 aa, synthetic construct
  source 1..7: note = Description of Artificial Sequence: Synthetic peptide; note = XENP019768 vlCDR2
GAFSRAT

SEQ ID NO: 407 - protein, 9 aa, synthetic construct
  source 1..9: note = Description of Artificial Sequence: Synthetic peptide; note = XENP019768 vlCDR3
QQYGSSPWT

SEQ ID NO: 408 - protein, 246 aa, synthetic construct
  source 1..246: note = Description of Artificial Sequence: Synthetic polypeptide; note = XENP019769 [CTLA-4]_H0.25_L0_scFv(GKPGS)4
QVQLVESGGGVVQPGRSLRLSCAASGFTFSSYAMHWVRQAPGKGLEWVTFISYDGNNKYYADSVKGRFTISRDNSKNTLYLQMNSLRAEDTAIYYCARTGWLGPFDYWGQGTLVTVSSGKPGSGKPGSGKPGSGKPGSEIVLTQSPGTLSLSPGERATLSCRASQSVGSSYLAWYQQKPGQAPRLLIYGAFSRATGIPDRFSGSGSGTDFTLTISRLEPEDFAVYYCQQYGSSPWTFGQGTKVEIK

SEQ ID NO: 409 - protein, 118 aa, synthetic construct
  source 1..118: note = Description of Artificial Sequence: Synthetic polypeptide; note = VH of XENP019769
QVQLVESGGGVVQPGRSLRLSCAASGFTFSSYAMHWVRQAPGKGLEWVTFISYDGNNKYYADSVKGRFTISRDNSKNTLYLQMNSLRAEDTAIYYCARTGWLGPFDYWGQGTLVTVSS

SEQ ID NO: 410 - protein, 108 aa, synthetic construct; identical to SEQ ID NO: 23
  source 1..108: note = Description of Artificial Sequence: Synthetic polypeptide; note = VL of XENP019769

SEQ ID NO: 411 - protein, 5 aa, synthetic construct
  source 1..5: note = Description of Artificial Sequence: Synthetic peptide; note = XENP019769 vhCDR1
SYAMH

SEQ ID NO: 412 - protein, 17 aa, synthetic construct
  source 1..17: note = Description of Artificial Sequence: Synthetic peptide; note = XENP019769 vhCDR2
FISYDGNNKYYADSVKG

SEQ ID NO: 413 - protein, 9 aa, synthetic construct
  source 1..9: note = Description of Artificial Sequence: Synthetic peptide; note = XENP019769 vhCDR3
TGWLGPFDY

SEQ ID NO: 414 - protein, 12 aa, synthetic construct
  source 1..12: note = Description of Artificial Sequence: Synthetic peptide; note = XENP019769 vlCDR1
RASQSVGSSYLA

SEQ ID NO: 415 - protein, 7 aa, synthetic construct
  source 1..7: note = Description of Artificial Sequence: Synthetic peptide; note = XENP019769 vlCDR2
GAFSRAT

SEQ ID NO: 416 - protein, 9 aa, synthetic construct
  source 1..9: note = Description of Artificial Sequence: Synthetic peptide; note = XENP019769 vlCDR3
QQYGSSPWT

SEQ ID NO: 417 - protein, 246 aa, synthetic construct
  source 1..246: note = Description of Artificial Sequence: Synthetic polypeptide; note = XENP019770 [CTLA-4]_H0.26_L0_scFv(GKPGS)4
QVQLVESGGGVVQPGRSLRLSCAASGFTFSSYGMHWVRQAPGKGLEWVTFISYDGNNKYYADSVKGRFTISRDNSKNTLYLQMNSLRAEDTAIYYCARTGWLGPFDYWGQGTLVTVSSGKPGSGKPGSGKPGSGKPGSEIVLTQSPGTLSLSPGERATLSCRASQSVGSSYLAWYQQKPGQAPRLLIYGAFSRATGIPDRFSGSGSGTDFTLTISRLEPEDFAVYYCQQYGSSPWTFGQGTKVEIK

SEQ ID NO: 418 - protein, 118 aa, synthetic construct
  source 1..118: note = Description of Artificial Sequence: Synthetic polypeptide; note = VH of XENP019770
QVQLVESGGGVVQPGRSLRLSCAASGFTFSSYGMHWVRQAPGKGLEWVTFISYDGNNKYYADSVKGRFTISRDNSKNTLYLQMNSLRAEDTAIYYCARTGWLGPFDYWGQGTLVTVSS

SEQ ID NO: 419 - protein, 108 aa, synthetic construct; identical to SEQ ID NO: 23
  source 1..108: note = Description of Artificial Sequence: Synthetic polypeptide; note = VL of XENP019770

SEQ ID NO: 420 - protein, 5 aa, synthetic construct
  source 1..5: note = Description of Artificial Sequence: Synthetic peptide; note = XENP019770 vhCDR1
SYGMH

SEQ ID NO: 421 - protein, 17 aa, synthetic construct
  source 1..17: note = Description of Artificial Sequence: Synthetic peptide; note = XENP019770 vhCDR2
FISYDGNNKYYADSVKG

SEQ ID NO: 422 - protein, 9 aa, synthetic construct
  source 1..9: note = Description of Artificial Sequence: Synthetic peptide; note = XENP019770 vhCDR3
TGWLGPFDY

SEQ ID NO: 423 - protein, 12 aa, synthetic construct
  source 1..12: note = Description of Artificial Sequence: Synthetic peptide; note = XENP019770 vlCDR1
RASQSVGSSYLA

SEQ ID NO: 424 - protein, 7 aa, synthetic construct
  source 1..7: note = Description of Artificial Sequence: Synthetic peptide; note = XENP019770 vlCDR2
GAFSRAT

SEQ ID NO: 425 - protein, 9 aa, synthetic construct
  source 1..9: note = Description of Artificial Sequence: Synthetic peptide; note = XENP019770 vlCDR3
QQYGSSPWT

SEQ ID NO: 426 - protein, 246 aa, synthetic construct
  source 1..246: note = Description of Artificial Sequence: Synthetic polypeptide; note = XENP019771 [CTLA-4]_H0.27_L0_scFv(GKPGS)4
QVQLVESGGGVVQPGRSLRLSCAASGFTFSSYSMHWVRQAPGKGLEWVTFISYDGNNKYYADSVKGRFTISRDNSKNTLYLQMNSLRAEDTAIYYCARTGWLGPFDYWGQGTLVTVSSGKPGSGKPGSGKPGSGKPGSEIVLTQSPGTLSLSPGERATLSCRASQSVGSSYLAWYQQKPGQAPRLLIYGAFSRATGIPDRFSGSGSGTDFTLTISRLEPEDFAVYYCQQYGSSPWTFGQGTKVEIK

SEQ ID NO: 427 - protein, 118 aa, synthetic construct
  source 1..118: note = Description of Artificial Sequence: Synthetic polypeptide; note = VH of XENP019771
QVQLVESGGGVVQPGRSLRLSCAASGFTFSSYSMHWVRQAPGKGLEWVTFISYDGNNKYYADSVKGRFTISRDNSKNTLYLQMNSLRAEDTAIYYCARTGWLGPFDYWGQGTLVTVSS

SEQ ID NO: 428 - protein, 108 aa, synthetic construct; identical to SEQ ID NO: 23
  source 1..108: note = Description of Artificial Sequence: Synthetic polypeptide; note = VL of XENP019771

SEQ ID NO: 429 - protein, 5 aa, synthetic construct
  source 1..5: note = Description of Artificial Sequence: Synthetic peptide; note = XENP019771 vhCDR1
SYSMH

SEQ ID NO: 430 - protein, 17 aa, synthetic construct
  source 1..17: note = Description of Artificial Sequence: Synthetic peptide; note = XENP019771 vhCDR2
FISYDGNNKYYADSVKG

SEQ ID NO: 431 - protein, 9 aa, synthetic construct
  source 1..9: note = Description of Artificial Sequence: Synthetic peptide; note = XENP019771 vhCDR3
TGWLGPFDY

SEQ ID NO: 432 - protein, 12 aa, synthetic construct
  source 1..12: note = Description of Artificial Sequence: Synthetic peptide; note = XENP019771 vlCDR1
RASQSVGSSYLA

SEQ ID NO: 433 - protein, 7 aa, synthetic construct
  source 1..7: note = Description of Artificial Sequence: Synthetic peptide; note = XENP019771 vlCDR2
GAFSRAT

SEQ ID NO: 434 - protein, 9 aa, synthetic construct
  source 1..9: note = Description of Artificial Sequence: Synthetic peptide; note = XENP019771 vlCDR3
QQYGSSPWT

SEQ ID NO: 435 - protein, 246 aa, synthetic construct
  source 1..246: note = Description of Artificial Sequence: Synthetic polypeptide; note = XENP019772 [CTLA-4]_H0.28_L0_scFv(GKPGS)4
QVQLVESGGGVVQPGRSLRLSCAASGFTFSSYVMHWVRQAPGKGLEWVTFISYDGNNKYYADSVKGRFTISRDNSKNTLYLQMNSLRAEDTAIYYCARTGWLGPFDYWGQGTLVTVSSGKPGSGKPGSGKPGSGKPGSEIVLTQSPGTLSLSPGERATLSCRASQSVGSSYLAWYQQKPGQAPRLLIYGAFSRATGIPDRFSGSGSGTDFTLTISRLEPEDFAVYYCQQYGSSPWTFGQGTKVEIK

SEQ ID NO: 436 - protein, 118 aa, synthetic construct
  source 1..118: note = Description of Artificial Sequence: Synthetic polypeptide; note = VH of XENP019772
QVQLVESGGGVVQPGRSLRLSCAASGFTFSSYVMHWVRQAPGKGLEWVTFISYDGNNKYYADSVKGRFTISRDNSKNTLYLQMNSLRAEDTAIYYCARTGWLGPFDYWGQGTLVTVSS

SEQ ID NO: 437 - protein, 108 aa, synthetic construct; identical to SEQ ID NO: 23
  source 1..108: note = Description of Artificial Sequence: Synthetic polypeptide; note = VL of XENP019772

SEQ ID NO: 438 - protein, 5 aa, synthetic construct
  source 1..5: note = Description of Artificial Sequence: Synthetic peptide; note = XENP019772 vhCDR1
SYVMH

SEQ ID NO: 439 - protein, 17 aa, synthetic construct
  source 1..17: note = Description of Artificial Sequence: Synthetic peptide; note = XENP019772 vhCDR2
FISYDGNNKYYADSVKG

SEQ ID NO: 440 - protein, 9 aa, synthetic construct
  source 1..9: note = Description of Artificial Sequence: Synthetic peptide; note = XENP019772 vhCDR3
TGWLGPFDY

SEQ ID NO: 441 - protein, 12 aa, synthetic construct
  source 1..12: note = Description of Artificial Sequence: Synthetic peptide; note = XENP019772 vlCDR1
RASQSVGSSYLA

SEQ ID NO: 442 - protein, 7 aa, synthetic construct
  source 1..7: note = Description of Artificial Sequence: Synthetic peptide; note = XENP019772 vlCDR2
GAFSRAT

SEQ ID NO: 443 - protein, 9 aa, synthetic construct
  source 1..9: note = Description of Artificial Sequence: Synthetic peptide; note = XENP019772 vlCDR3
QQYGSSPWT

SEQ ID NO: 444 - protein, 246 aa, synthetic construct
  source 1..246: note = Description of Artificial Sequence: Synthetic polypeptide; note = XENP019773 [CTLA-4]_H0.29_L0_scFv(GKPGS)4
QVQLVESGGGVVQPGRSLRLSCAASGFTFSSYYMHWVRQAPGKGLEWVTFISYDGNNKYYADSVKGRFTISRDNSKNTLYLQMNSLRAEDTAIYYCARTGWLGPFDYWGQGTLVTVSSGKPGSGKPGSGKPGSGKPGSEIVLTQSPGTLSLSPGERATLSCRASQSVGSSYLAWYQQKPGQAPRLLIYGAFSRATGIPDRFSGSGSGTDFTLTISRLEPEDFAVYYCQQYGSSPWTFGQGTKVEIK

SEQ ID NO: 445 - protein, 118 aa, synthetic construct
  source 1..118: note = Description of Artificial Sequence: Synthetic polypeptide; note = VH of XENP019773
QVQLVESGGGVVQPGRSLRLSCAASGFTFSSYYMHWVRQAPGKGLEWVTFISYDGNNKYYADSVKGRFTISRDNSKNTLYLQMNSLRAEDTAIYYCARTGWLGPFDYWGQGTLVTVSS

SEQ ID NO: 446 - protein, 108 aa, synthetic construct; identical to SEQ ID NO: 23
  source 1..108: note = Description of Artificial Sequence: Synthetic polypeptide; note = VL of XENP019773

SEQ ID NO: 447 - protein, 5 aa, synthetic construct
  source 1..5: note = Description of Artificial Sequence: Synthetic peptide; note = XENP019773 vhCDR1
SYYMH

SEQ ID NO: 448 - protein, 17 aa, synthetic construct
  source 1..17: note = Description of Artificial Sequence: Synthetic peptide; note = XENP019773 vhCDR2
FISYDGNNKYYADSVKG

SEQ ID NO: 449 - protein, 9 aa, synthetic construct
  source 1..9: note = Description of Artificial Sequence: Synthetic peptide; note = XENP019773 vhCDR3
TGWLGPFDY

SEQ ID NO: 450 - protein, 12 aa, synthetic construct
  source 1..12: note = Description of Artificial Sequence: Synthetic peptide; note = XENP019773 vlCDR1
RASQSVGSSYLA

SEQ ID NO: 451 - protein, 7 aa, synthetic construct
  source 1..7: note = Description of Artificial Sequence: Synthetic peptide; note = XENP019773 vlCDR2
GAFSRAT

SEQ ID NO: 452 - protein, 9 aa, synthetic construct
  source 1..9: note = Description of Artificial Sequence: Synthetic peptide; note = XENP019773 vlCDR3
QQYGSSPWT

SEQ ID NO: 453 - protein, 246 aa, synthetic construct
  source 1..246: note = Description of Artificial Sequence: Synthetic polypeptide; note = XENP019774 [CTLA-4]_H0.30_L0_scFv(GKPGS)4
QVQLVESGGGVVQPGRSLRLSCAASGFTFSSYTMDWVRQAPGKGLEWVTFISYDGNNKYYADSVKGRFTISRDNSKNTLYLQMNSLRAEDTAIYYCARTGWLGPFDYWGQGTLVTVSSGKPGSGKPGSGKPGSGKPGSEIVLTQSPGTLSLSPGERATLSCRASQSVGSSYLAWYQQKPGQAPRLLIYGAFSRATGIPDRFSGSGSGTDFTLTISRLEPEDFAVYYCQQYGSSPWTFGQGTKVEIK

SEQ ID NO: 454 - protein, 118 aa, synthetic construct
  source 1..118: note = Description of Artificial Sequence: Synthetic polypeptide; note = VH of XENP019774
QVQLVESGGGVVQPGRSLRLSCAASGFTFSSYTMDWVRQAPGKGLEWVTFISYDGNNKYYADSVKGRFTISRDNSKNTLYLQMNSLRAEDTAIYYCARTGWLGPFDYWGQGTLVTVSS

SEQ ID NO: 455 - protein, 108 aa, synthetic construct; identical to SEQ ID NO: 23
  source 1..108: note = Description of Artificial Sequence: Synthetic polypeptide; note = VL of XENP019774

SEQ ID NO: 456 - protein, 5 aa, synthetic construct
  source 1..5: note = Description of Artificial Sequence: Synthetic peptide; note = XENP019774 vhCDR1
SYTMD

SEQ ID NO: 457 - protein, 17 aa, synthetic construct
  source 1..17: note = Description of Artificial Sequence: Synthetic peptide; note = XENP019774 vhCDR2
FISYDGNNKYYADSVKG

SEQ ID NO: 458 - protein, 9 aa, synthetic construct
  source 1..9: note = Description of Artificial Sequence: Synthetic peptide; note = XENP019774 vhCDR3
TGWLGPFDY

SEQ ID NO: 459 - protein, 12 aa, synthetic construct
  source 1..12: note = Description of Artificial Sequence: Synthetic peptide; note = XENP019774 vlCDR1
RASQSVGSSYLA

SEQ ID NO: 460 - protein, 7 aa, synthetic construct
  source 1..7: note = Description of Artificial Sequence: Synthetic peptide; note = XENP019774 vlCDR2
GAFSRAT

SEQ ID NO: 461 - protein, 9 aa, synthetic construct
  source 1..9: note = Description of Artificial Sequence: Synthetic peptide; note = XENP019774 vlCDR3
QQYGSSPWT

SEQ ID NO: 462 - protein, 246 aa, synthetic construct
  source 1..246: note = Description of Artificial Sequence: Synthetic polypeptide; note = XENP019775 [CTLA-4]_H0.31_L0_scFv(GKPGS)4
QVQLVESGGGVVQPGRSLRLSCAASGFTFSSYTMFWVRQAPGKGLEWVTFISYDGNNKYYADSVKGRFTISRDNSKNTLYLQMNSLRAEDTAIYYCARTGWLGPFDYWGQGTLVTVSSGKPGSGKPGSGKPGSGKPGSEIVLTQSPGTLSLSPGERATLSCRASQSVGSSYLAWYQQKPGQAPRLLIYGAFSRATGIPDRFSGSGSGTDFTLTISRLEPEDFAVYYCQQYGSSPWTFGQGTKVEIK

SEQ ID NO: 463 - protein, 118 aa, synthetic construct
  source 1..118: note = Description of Artificial Sequence: Synthetic polypeptide; note = VH of XENP019775
QVQLVESGGGVVQPGRSLRLSCAASGFTFSSYTMFWVRQAPGKGLEWVTFISYDGNNKYYADSVKGRFTISRDNSKNTLYLQMNSLRAEDTAIYYCARTGWLGPFDYWGQGTLVTVSS

SEQ ID NO: 464 - protein, 108 aa, synthetic construct; identical to SEQ ID NO: 23
  source 1..108: note = Description of Artificial Sequence: Synthetic polypeptide; note = VL of XENP019775

SEQ ID NO: 465 - protein, 5 aa, synthetic construct
  source 1..5: note = Description of Artificial Sequence: Synthetic peptide; note = XENP019775 vhCDR1
SYTMF

SEQ ID NO: 466 - protein, 17 aa, synthetic construct
  source 1..17: note = Description of Artificial Sequence: Synthetic peptide; note = XENP019775 vhCDR2
FISYDGNNKYYADSVKG

SEQ ID NO: 467 - protein, 9 aa, synthetic construct
  source 1..9: note = Description of Artificial Sequence: Synthetic peptide; note = XENP019775 vhCDR3
TGWLGPFDY

SEQ ID NO: 468 - protein, 12 aa, synthetic construct
  source 1..12: note = Description of Artificial Sequence: Synthetic peptide; note = XENP019775 vlCDR1
RASQSVGSSYLA

SEQ ID NO: 469 - protein, 7 aa, synthetic construct
  source 1..7: note = Description of Artificial Sequence: Synthetic peptide; note = XENP019775 vlCDR2
GAFSRAT

SEQ ID NO: 470 - protein, 9 aa, synthetic construct
  source 1..9: note = Description of Artificial Sequence: Synthetic peptide; note = XENP019775 vlCDR3
QQYGSSPWT

SEQ ID NO: 471 - protein, 246 aa, synthetic construct
  source 1..246: note = Description of Artificial Sequence: Synthetic polypeptide; note = XENP019776 [CTLA-4]_H0.32_L0_scFv(GKPGS)4
QVQLVESGGGVVQPGRSLRLSCAASGFTFSSYTMNWVRQAPGKGLEWVTFISYDGNNKYYADSVKGRFTISRDNSKNTLYLQMNSLRAEDTAIYYCARTGWLGPFDYWGQGTLVTVSSGKPGSGKPGSGKPGSGKPGSEIVLTQSPGTLSLSPGERATLSCRASQSVGSSYLAWYQQKPGQAPRLLIYGAFSRATGIPDRFSGSGSGTDFTLTISRLEPEDFAVYYCQQYGSSPWTFGQGTKVEIK

SEQ ID NO: 472 - protein, 118 aa, synthetic construct
  source 1..118: note = Description of Artificial Sequence: Synthetic polypeptide; note = VH of XENP019776
QVQLVESGGGVVQPGRSLRLSCAASGFTFSSYTMNWVRQAPGKGLEWVTFISYDGNNKYYADSVKGRFTISRDNSKNTLYLQMNSLRAEDTAIYYCARTGWLGPFDYWGQGTLVTVSS

SEQ ID NO: 473 - protein, 108 aa, synthetic construct; identical to SEQ ID NO: 23
  source 1..108: note = Description of Artificial Sequence: Synthetic polypeptide; note = VL of XENP019776

SEQ ID NO: 474 - protein, 5 aa, synthetic construct
  source 1..5: note = Description of Artificial Sequence: Synthetic peptide; note = XENP019776 vhCDR1
SYTMN

SEQ ID NO: 475 - protein, 17 aa, synthetic construct
  source 1..17: note = Description of Artificial Sequence: Synthetic peptide; note = XENP019776 vhCDR2
FISYDGNNKYYADSVKG

SEQ ID NO: 476 - protein, 9 aa, synthetic construct
  source 1..9: note = Description of Artificial Sequence: Synthetic peptide; note = XENP019776 vhCDR3
TGWLGPFDY

SEQ ID NO: 477 - protein, 12 aa, synthetic construct
  source 1..12: note = Description of Artificial Sequence: Synthetic peptide; note = XENP019776 vlCDR1
RASQSVGSSYLA

SEQ ID NO: 478 - protein, 7 aa, synthetic construct
  source 1..7: note = Description of Artificial Sequence: Synthetic peptide; note = XENP019776 vlCDR2
GAFSRAT

SEQ ID NO: 479 - protein, 9 aa, synthetic construct
  source 1..9: note = Description of Artificial Sequence: Synthetic peptide; note = XENP019776 vlCDR3
QQYGSSPWT

SEQ ID NO: 480 - protein, 246 aa, synthetic construct
  source 1..246: note = Description of Artificial Sequence: Synthetic polypeptide; note = XENP019777 [CTLA-4]_H0.33_L0_scFv(GKPGS)4
QVQLVESGGGVVQPGRSLRLSCAASGFTFSSYTMSWVRQAPGKGLEWVTFISYDGNNKYYADSVKGRFTISRDNSKNTLYLQMNSLRAEDTAIYYCARTGWLGPFDYWGQGTLVTVSSGKPGSGKPGSGKPGSGKPGSEIVLTQSPGTLSLSPGERATLSCRASQSVGSSYLAWYQQKPGQAPRLLIYGAFSRATGIPDRFSGSGSGTDFTLTISRLEPEDFAVYYCQQYGSSPWTFGQGTKVEIK

SEQ ID NO: 481 - protein, 118 aa, synthetic construct
  source 1..118: note = Description of Artificial Sequence: Synthetic polypeptide; note = VH of XENP019777
QVQLVESGGGVVQPGRSLRLSCAASGFTFSSYTMSWVRQAPGKGLEWVTFISYDGNNKYYADSVKGRFTISRDNSKNTLYLQMNSLRAEDTAIYYCARTGWLGPFDYWGQGTLVTVSS

SEQ ID NO: 482 - protein, 108 aa, synthetic construct; identical to SEQ ID NO: 23
  source 1..108: note = Description of Artificial Sequence: Synthetic polypeptide; note = VL of XENP019777

SEQ ID NO: 483 - protein, 5 aa, synthetic construct
  source 1..5: note = Description of Artificial Sequence: Synthetic peptide; note = XENP019777 vhCDR1
SYTMS

SEQ ID NO: 484 - protein, 17 aa, synthetic construct
  source 1..17: note = Description of Artificial Sequence: Synthetic peptide; note = XENP019777 vhCDR2
FISYDGNNKYYADSVKG

SEQ ID NO: 485 - protein, 9 aa, synthetic construct
  source 1..9: note = Description of Artificial Sequence: Synthetic peptide; note = XENP019777 vhCDR3
TGWLGPFDY

SEQ ID NO: 486 - protein, 12 aa, synthetic construct
  source 1..12: note = Description of Artificial Sequence: Synthetic peptide; note = XENP019777 vlCDR1
RASQSVGSSYLA

SEQ ID NO: 487 - protein, 7 aa, synthetic construct
  source 1..7: note = Description of Artificial Sequence: Synthetic peptide; note = XENP019777 vlCDR2
GAFSRAT

SEQ ID NO: 488 - protein, 9 aa, synthetic construct
  source 1..9: note = Description of Artificial Sequence: Synthetic peptide; note = XENP019777 vlCDR3
QQYGSSPWT

SEQ ID NO: 489 - protein, 246 aa, synthetic construct
  source 1..246: note = Description of Artificial Sequence: Synthetic polypeptide; note = XENP019778 [CTLA-4]_H0.34_L0_scFv(GKPGS)4
QVQLVESGGGVVQPGRSLRLSCAASGFTFSSYTMYWVRQAPGKGLEWVTFISYDGNNKYYADSVKGRFTISRDNSKNTLYLQMNSLRAEDTAIYYCARTGWLGPFDYWGQGTLVTVSSGKPGSGKPGSGKPGSGKPGSEIVLTQSPGTLSLSPGERATLSCRASQSVGSSYLAWYQQKPGQAPRLLIYGAFSRATGIPDRFSGSGSGTDFTLTISRLEPEDFAVYYCQQYGSSPWTFGQGTKVEIK

SEQ ID NO: 490 - protein, 118 aa, synthetic construct
  source 1..118: note = Description of Artificial Sequence: Synthetic polypeptide; note = VH of XENP019778
QVQLVESGGGVVQPGRSLRLSCAASGFTFSSYTMYWVRQAPGKGLEWVTFISYDGNNKYYADSVKGRFTISRDNSKNTLYLQMNSLRAEDTAIYYCARTGWLGPFDYWGQGTLVTVSS

SEQ ID NO: 491 - protein, 108 aa, synthetic construct; identical to SEQ ID NO: 23
  source 1..108: note = Description of Artificial Sequence: Synthetic polypeptide; note = VL of XENP019778

SEQ ID NO: 492 - protein, 5 aa, synthetic construct
  source 1..5: note = Description of Artificial Sequence: Synthetic peptide; note = XENP019778 vhCDR1
SYTMY

SEQ ID NO: 493 - protein, 17 aa, synthetic construct
  source 1..17: note = Description of Artificial Sequence: Synthetic peptide; note = XENP019778 vhCDR2
FISYDGNNKYYADSVKG

SEQ ID NO: 494 - protein, 9 aa, synthetic construct
  source 1..9: note = Description of Artificial Sequence: Synthetic peptide; note = XENP019778 vhCDR3
TGWLGPFDY

SEQ ID NO: 495 - protein, 12 aa, synthetic construct
  source 1..12: note = Description of Artificial Sequence: Synthetic peptide; note = XENP019778 vlCDR1
RASQSVGSSYLA

SEQ ID NO: 496 - protein, 7 aa, synthetic construct
  source 1..7: note = Description of Artificial Sequence: Synthetic peptide; note = XENP019778 vlCDR2
GAFSRAT

SEQ ID NO: 497 - protein, 9 aa, synthetic construct
  source 1..9: note = Description of Artificial Sequence: Synthetic peptide; note = XENP019778 vlCDR3
QQYGSSPWT

SEQ ID NO: 498 - protein, 246 aa, synthetic construct
  source 1..246: note = Description of Artificial Sequence: Synthetic polypeptide; note = XENP019779 [CTLA-4]_H0.35_L0_scFv(GKPGS)4
QVQLVESGGGVVQPGRSLRLSCAASGFTFSSYTMHWIRQAPGKGLEWVTFISYDGNNKYYADSVKGRFTISRDNSKNTLYLQMNSLRAEDTAIYYCARTGWLGPFDYWGQGTLVTVSSGKPGSGKPGSGKPGSGKPGSEIVLTQSPGTLSLSPGERATLSCRASQSVGSSYLAWYQQKPGQAPRLLIYGAFSRATGIPDRFSGSGSGTDFTLTISRLEPEDFAVYYCQQYGSSPWTFGQGTKVEIK

SEQ ID NO: 499 - protein, 118 aa, synthetic construct
  source 1..118: note = Description of Artificial Sequence: Synthetic polypeptide; note = VH of XENP019779
QVQLVESGGGVVQPGRSLRLSCAASGFTFSSYTMHWIRQAPGKGLEWVTFISYDGNNKYYADSVKGRFTISRDNSKNTLYLQMNSLRAEDTAIYYCARTGWLGPFDYWGQGTLVTVSS

SEQ ID NO: 500 - protein, 108 aa, synthetic construct; identical to SEQ ID NO: 23
  source 1..108: note = Description of Artificial Sequence: Synthetic polypeptide; note = VL of XENP019779

SEQ ID NO: 501 - protein, 5 aa, synthetic construct
  source 1..5: note = Description of Artificial Sequence: Synthetic peptide; note = XENP019779 vhCDR1
SYTMH

SEQ ID NO: 502 - protein, 17 aa, synthetic construct
  source 1..17: note = Description of Artificial Sequence: Synthetic peptide; note = XENP019779 vhCDR2
FISYDGNNKYYADSVKG

SEQ ID NO: 503 - protein, 9 aa, synthetic construct
  source 1..9: note = Description of Artificial Sequence: Synthetic peptide; note = XENP019779 vhCDR3
TGWLGPFDY

SEQ ID NO: 504 - protein, 12 aa, synthetic construct
  source 1..12: note = Description of Artificial Sequence: Synthetic peptide; note = XENP019779 vlCDR1
RASQSVGSSYLA

SEQ ID NO: 505 - protein, 7 aa, synthetic construct
  source 1..7: note = Description of Artificial Sequence: Synthetic peptide; note = XENP019779 vlCDR2
GAFSRAT

SEQ ID NO: 506 - protein, 9 aa, synthetic construct
  source 1..9: note = Description of Artificial Sequence: Synthetic peptide; note = XENP019779 vlCDR3
QQYGSSPWT

SEQ ID NO: 507 - protein, 246 aa, synthetic construct
  source 1..246: note = Description of Artificial Sequence: Synthetic polypeptide; note = XENP019780 [CTLA-4]_H0.36_L0_scFv(GKPGS)4
QVQLVESGGGVVQPGRSLRLSCAASGFTFSSYTMHWVRKAPGKGLEWVTFISYDGNNKYYADSVKGRFTISRDNSKNTLYLQMNSLRAEDTAIYYCARTGWLGPFDYWGQGTLVTVSSGKPGSGKPGSGKPGSGKPGSEIVLTQSPGTLSLSPGERATLSCRASQSVGSSYLAWYQQKPGQAPRLLIYGAFSRATGIPDRFSGSGSGTDFTLTISRLEPEDFAVYYCQQYGSSPWTFGQGTKVEIK

SEQ ID NO: 508 - protein, 118 aa, synthetic construct; identical to SEQ ID NO: 31
  source 1..118: note = Description of Artificial Sequence: Synthetic polypeptide; note = VH of XENP019780

SEQ ID NO: 509 - protein, 108 aa, synthetic construct; identical to SEQ ID NO: 23
  source 1..108: note = Description of Artificial Sequence: Synthetic polypeptide; note = VL of XENP019780

SEQ ID NO: 510 - protein, 5 aa, synthetic construct
  source 1..5: note = Description of Artificial Sequence: Synthetic peptide; note = XENP019780 vhCDR1
SYTMH

SEQ ID NO: 511 - protein, 17 aa, synthetic construct
  source 1..17: note = Description of Artificial Sequence: Synthetic peptide; note = XENP019780 vhCDR2
FISYDGNNKYYADSVKG

SEQ ID NO: 512 - protein, 9 aa, synthetic construct
  source 1..9: note = Description of Artificial Sequence: Synthetic peptide; note = XENP019780 vhCDR3
TGWLGPFDY

SEQ ID NO: 513 - protein, 12 aa, synthetic construct
  source 1..12: note = Description of Artificial Sequence: Synthetic peptide; note = XENP019780 vlCDR1
RASQSVGSSYLA

SEQ ID NO: 514 - protein, 7 aa, synthetic construct
  source 1..7: note = Description of Artificial Sequence: Synthetic peptide; note = XENP019780 vlCDR2
GAFSRAT

SEQ ID NO: 515 - protein, 9 aa, synthetic construct
  source 1..9: note = Description of Artificial Sequence: Synthetic peptide; note = XENP019780 vlCDR3
QQYGSSPWT

SEQ ID NO: 516 - protein, 246 aa, synthetic construct
  source 1..246: note = Description of Artificial Sequence: Synthetic polypeptide; note = XENP019781 [CTLA-4]_H0.37_L0_scFv(GKPGS)4
QVQLVESGGGVVQPGRSLRLSCAASGFTFSSYTMHWVRQAPGKRLEWVTFISYDGNNKYYADSVKGRFTISRDNSKNTLYLQMNSLRAEDTAIYYCARTGWLGPFDYWGQGTLVTVSSGKPGSGKPGSGKPGSGKPGSEIVLTQSPGTLSLSPGERATLSCRASQSVGSSYLAWYQQKPGQAPRLLIYGAFSRATGIPDRFSGSGSGTDFTLTISRLEPEDFAVYYCQQYGSSPWTFGQGTKVEIK

SEQ ID NO: 517 - protein, 118 aa, synthetic construct; identical to SEQ ID NO: 49
  source 1..118: note = Description of Artificial Sequence: Synthetic polypeptide; note = VH of XENP019781

SEQ ID NO: 518 - protein, 108 aa, synthetic construct; identical to SEQ ID NO: 23
  source 1..108: note = Description of Artificial Sequence: Synthetic polypeptide; note = VL of XENP019781

SEQ ID NO: 519 - protein, 5 aa, synthetic construct
  source 1..5: note = Description of Artificial Sequence: Synthetic peptide; note = XENP019781 vhCDR1
SYTMH

SEQ ID NO: 520 - protein, 17 aa, synthetic construct
  source 1..17: note = Description of Artificial Sequence: Synthetic peptide; note = XENP019781 vhCDR2
FISYDGNNKYYADSVKG

SEQ ID NO: 521 - protein, 9 aa, synthetic construct
  source 1..9: note = Description of Artificial Sequence: Synthetic peptide; note = XENP019781 vhCDR3
TGWLGPFDY

SEQ ID NO: 522 - protein, 12 aa, synthetic construct
  source 1..12: note = Description of Artificial Sequence: Synthetic peptide; note = XENP019781 vlCDR1
RASQSVGSSYLA

SEQ ID NO: 523 - protein, 7 aa, synthetic construct
  source 1..7: note = Description of Artificial Sequence: Synthetic peptide; note = XENP019781 vlCDR2
GAFSRAT

SEQ ID NO: 524 - protein, 9 aa, synthetic construct
  source 1..9: note = Description of Artificial Sequence: Synthetic peptide; note = XENP019781 vlCDR3
QQYGSSPWT

SEQ ID NO: 525 - protein, 246 aa, synthetic construct
  source 1..246: note = Description of Artificial Sequence: Synthetic polypeptide; note = XENP019782 [CTLA-4]_H0.38_L0_scFv(GKPGS)4
QVQLVESGGGVVQPGRSLRLSCAASGFTFSSYTMHWVRQAPGKGLEWVAFISYDGNNKYYADSVKGRFTISRDNSKNTLYLQMNSLRAEDTAIYYCARTGWLGPFDYWGQGTLVTVSSGKPGSGKPGSGKPGSGKPGSEIVLTQSPGTLSLSPGERATLSCRASQSVGSSYLAWYQQKPGQAPRLLIYGAFSRATGIPDRFSGSGSGTDFTLTISRLEPEDFAVYYCQQYGSSPWTFGQGTKVEIK

SEQ ID NO: 526 - protein, 118 aa, synthetic construct
  source 1..118: note = Description of Artificial Sequence: Synthetic polypeptide; note = VH of XENP019782
QVQLVESGGGVVQPGRSLRLSCAASGFTFSSYTMHWVRQAPGKGLEWVAFISYDGNNKYYADSVKGRFTISRDNSKNTLYLQMNSLRAEDTAIYYCARTGWLGPFDYWGQGTLVTVSS

SEQ ID NO: 527 - protein, 108 aa, synthetic construct; identical to SEQ ID NO: 23
  source 1..108: note = Description of Artificial Sequence: Synthetic polypeptide; note = VL of XENP019782

SEQ ID NO: 528 - protein, 5 aa, synthetic construct
  source 1..5: note = Description of Artificial Sequence: Synthetic peptide; note = XENP019782 vhCDR1
SYTMH

SEQ ID NO: 529 - protein, 17 aa, synthetic construct
  source 1..17: note = Description of Artificial Sequence: Synthetic peptide; note = XENP019782 vhCDR2
FISYDGNNKYYADSVKG

SEQ ID NO: 530 - protein, 9 aa, synthetic construct
  source 1..9: note = Description of Artificial Sequence: Synthetic peptide; note = XENP019782 vhCDR3
TGWLGPFDY

SEQ ID NO: 531 - protein, 12 aa, synthetic construct
  source 1..12: note = Description of Artificial Sequence: Synthetic peptide; note = XENP019782 vlCDR1
RASQSVGSSYLA

SEQ ID NO: 532 - protein, 7 aa, synthetic construct
  source 1..7: note = Description of Artificial Sequence: Synthetic peptide; note = XENP019782 vlCDR2
GAFSRAT

SEQ ID NO: 533 - protein, 9 aa, synthetic construct
  source 1..9: note = Description of Artificial Sequence: Synthetic peptide; note = XENP019782 vlCDR3
QQYGSSPWT

SEQ ID NO: 534 - protein, 246 aa, synthetic construct
  source 1..246: note = Description of Artificial Sequence: Synthetic polypeptide; note = XENP019783 [CTLA-4]_H0.39_L0_scFv(GKPGS)4
QVQLVESGGGVVQPGRSLRLSCAASGFTFSSYTMHWVRQAPGKGLEWVGFISYDGNNKYYADSVKGRFTISRDNSKNTLYLQMNSLRAEDTAIYYCARTGWLGPFDYWGQGTLVTVSSGKPGSGKPGSGKPGSGKPGSEIVLTQSPGTLSLSPGERATLSCRASQSVGSSYLAWYQQKPGQAPRLLIYGAFSRATGIPDRFSGSGSGTDFTLTISRLEPEDFAVYYCQQYGSSPWTFGQGTKVEIK

SEQ ID NO: 535 - protein, 118 aa, synthetic construct
  source 1..118: note = Description of Artificial Sequence: Synthetic polypeptide; note = VH of XENP019783
QVQLVESGGGVVQPGRSLRLSCAASGFTFSSYTMHWVRQAPGKGLEWVGFISYDGNNKYYADSVKGRFTISRDNSKNTLYLQMNSLRAEDTAIYYCARTGWLGPFDYWGQGTLVTVSS

SEQ ID NO: 536 - protein, 108 aa, synthetic construct; identical to SEQ ID NO: 23
  source 1..108: note = Description of Artificial Sequence: Synthetic polypeptide; note = VL of XENP019783

SEQ ID NO: 537 - protein, 5 aa, synthetic construct
  source 1..5: note = Description of Artificial Sequence: Synthetic peptide; note = XENP019783 vhCDR1
SYTMH

SEQ ID NO: 538 - protein, 17 aa, synthetic construct
  source 1..17: note = Description of Artificial Sequence: Synthetic peptide; note = XENP019783 vhCDR2
FISYDGNNKYYADSVKG

SEQ ID NO: 539 - protein, 9 aa, synthetic construct
  source 1..9: note = Description of Artificial Sequence: Synthetic peptide; note = XENP019783 vhCDR3
TGWLGPFDY

SEQ ID NO: 540 - protein, 12 aa, synthetic construct
  source 1..12: note = Description of Artificial Sequence: Synthetic peptide; note = XENP019783 vlCDR1
RASQSVGSSYLA

SEQ ID NO: 541 - protein, 7 aa, synthetic construct
  source 1..7: note = Description of Artificial Sequence: Synthetic peptide; note = XENP019783 vlCDR2
GAFSRAT

SEQ ID NO: 542 - protein, 9 aa, synthetic construct
  source 1..9: note = Description of Artificial Sequence: Synthetic peptide; note = XENP019783 vlCDR3
QQYGSSPWT

SEQ ID NO: 543 - protein, 246 aa, synthetic construct
  source 1..246: note = Description of Artificial Sequence: Synthetic polypeptide; note = XENP019784 [CTLA-4]_H0.40_L0_scFv(GKPGS)4
QVQLVESGGGVVQPGRSLRLSCAASGFTFSSYTMHWVRQAPGKGLEWVSFISYDGNNKYYADSVKGRFTISRDNSKNTLYLQMNSLRAEDTAIYYCARTGWLGPFDYWGQGTLVTVSSGKPGSGKPGSGKPGSGKPGSEIVLTQSPGTLSLSPGERATLSCRASQSVGSSYLAWYQQKPGQAPRLLIYGAFSRATGIPDRFSGSGSGTDFTLTISRLEPEDFAVYYCQQYGSSPWTFGQGTKVEIK

SEQ ID NO: 544 - protein, 118 aa, synthetic construct
  source 1..118: note = Description of Artificial Sequence: Synthetic polypeptide; note = VH of XENP019784
QVQLVESGGGVVQPGRSLRLSCAASGFTFSSYTMHWVRQAPGKGLEWVSFISYDGNNKYYADSVKGRFTISRDNSKNTLYLQMNSLRAEDTAIYYCARTGWLGPFDYWGQGTLVTVSS

SEQ ID NO: 545 - protein, 108 aa, synthetic construct; identical to SEQ ID NO: 23
  source 1..108: note = Description of Artificial Sequence: Synthetic polypeptide; note = VL of XENP019784

SEQ ID NO: 546 - protein, 5 aa, synthetic construct
  source 1..5: note = Description of Artificial Sequence: Synthetic peptide; note = XENP019784 vhCDR1
SYTMH

SEQ ID NO: 547 - protein, 17 aa, synthetic construct
  source 1..17: note = Description of Artificial Sequence: Synthetic peptide; note = XENP019784 vhCDR2
FISYDGNNKYYADSVKG

SEQ ID NO: 548 - protein, 9 aa, synthetic construct
  source 1..9: note = Description of Artificial Sequence: Synthetic peptide; note = XENP019784 vhCDR3
TGWLGPFDY

SEQ ID NO: 549 - protein, 12 aa, synthetic construct
  source 1..12: note = Description of Artificial Sequence: Synthetic peptide; note = XENP019784 vlCDR1
RASQSVGSSYLA

SEQ ID NO: 550 - protein, 7 aa, synthetic construct
  source 1..7: note = Description of Artificial Sequence: Synthetic peptide; note = XENP019784 vlCDR2
GAFSRAT

SEQ ID NO: 551 - protein, 9 aa, synthetic construct
  source 1..9: note = Description of Artificial Sequence: Synthetic peptide; note = XENP019784 vlCDR3
QQYGSSPWT

SEQ ID NO: 552 - protein, 246 aa, synthetic construct
  source 1..246: note = Description of Artificial Sequence: Synthetic polypeptide; note = XENP019785 [CTLA-4]_H0.41_L0_scFv(GKPGS)4
QVQLVESGGGVVQPGRSLRLSCAASGFTFSSYTMHWVRQAPGKGLEWVVFISYDGNNKYYADSVKGRFTISRDNSKNTLYLQMNSLRAEDTAIYYCARTGWLGPFDYWGQGTLVTVSSGKPGSGKPGSGKPGSGKPGSEIVLTQSPGTLSLSPGERATLSCRASQSVGSSYLAWYQQKPGQAPRLLIYGAFSRATGIPDRFSGSGSGTDFTLTISRLEPEDFAVYYCQQYGSSPWTFGQGTKVEIK

SEQ ID NO: 553 - protein, 118 aa, synthetic construct
  source 1..118: note = Description of Artificial Sequence: Synthetic polypeptide; note = VH of XENP019785
QVQLVESGGGVVQPGRSLRLSCAASGFTFSSYTMHWVRQAPGKGLEWVVFISYDGNNKYYADSVKGRFTISRDNSKNTLYLQMNSLRAEDTAIYYCARTGWLGPFDYWGQGTLVTVSS

SEQ ID NO: 554 - protein, 108 aa, synthetic construct; identical to SEQ ID NO: 23
  source 1..108: note = Description of Artificial Sequence: Synthetic polypeptide; note = VL of XENP019785

SEQ ID NO: 555 - protein, 5 aa, synthetic construct
  source 1..5: note = Description of Artificial Sequence: Synthetic peptide; note = XENP019785 vhCDR1
SYTMH

SEQ ID NO: 556 - protein, 17 aa, synthetic construct
  source 1..17: note = Description of Artificial Sequence: Synthetic peptide; note = XENP019785 vhCDR2
FISYDGNNKYYADSVKG

SEQ ID NO: 557 - protein, 9 aa, synthetic construct
  source 1..9: note = Description of Artificial Sequence: Synthetic peptide; note = XENP019785 vhCDR3
TGWLGPFDY

SEQ ID NO: 558 - protein, 12 aa, synthetic construct
  source 1..12: note = Description of Artificial Sequence: Synthetic peptide; note = XENP019785 vlCDR1
RASQSVGSSYLA

SEQ ID NO: 559 - protein, 7 aa, synthetic construct
  source 1..7: note = Description of Artificial Sequence: Synthetic peptide; note = XENP019785 vlCDR2
GAFSRAT

SEQ ID NO: 560 - protein, 9 aa, synthetic construct
  source 1..9: note = Description of Artificial Sequence: Synthetic peptide; note = XENP019785 vlCDR3
QQYGSSPWT

SEQ ID NO: 561 - protein, 246 aa, synthetic construct
  source 1..246: note = Description of Artificial Sequence: Synthetic polypeptide; note = XENP019786 [CTLA-4]_H0.42_L0_scFv(GKPGS)4
QVQLVESGGGVVQPGRSLRLSCAASGFTFSSYTMHWVRQAPGKGLEWVTAISYDGNNKYYADSVKGRFTISRDNSKNTLYLQMNSLRAEDTAIYYCARTGWLGPFDYWGQGTLVTVSSGKPGSGKPGSGKPGSGKPGSEIVLTQSPGTLSLSPGERATLSCRASQSVGSSYLAWYQQKPGQAPRLLIYGAFSRATGIPDRFSGSGSGTDFTLTISRLEPEDFAVYYCQQYGSSPWTFGQGTKVEIK

SEQ ID NO: 562 - protein, 118 aa, synthetic construct
  source 1..118: note = Description of Artificial Sequence: Synthetic polypeptide; note = VH of XENP019786
QVQLVESGGGVVQPGRSLRLSCAASGFTFSSYTMHWVRQAPGKGLEWVTAISYDGNNKYYADSVKGRFTISRDNSKNTLYLQMNSLRAEDTAIYYCARTGWLGPFDYWGQGTLVTVSS

SEQ ID NO: 563 - protein, 108 aa, synthetic construct; identical to SEQ ID NO: 23
  source 1..108: note = Description of Artificial Sequence: Synthetic polypeptide; note = VL of XENP019786

SEQ ID NO: 564 - protein, 5 aa, synthetic construct
  source 1..5: note = Description of Artificial Sequence: Synthetic peptide; note = XENP019786 vhCDR1
SYTMH

SEQ ID NO: 565 - protein, 17 aa, synthetic construct
  source 1..17: note = Description of Artificial Sequence: Synthetic peptide; note = XENP019786 vhCDR2
AISYDGNNKYYADSVKG

SEQ ID NO: 566 - protein, 9 aa, synthetic construct
  source 1..9: note = Description of Artificial Sequence: Synthetic peptide; note = XENP019786 vhCDR3
TGWLGPFDY

SEQ ID NO: 567 - protein, 12 aa, synthetic construct
  source 1..12: note = Description of Artificial Sequence: Synthetic peptide; note = XENP019786 vlCDR1
RASQSVGSSYLA

SEQ ID NO: 568 - protein, 7 aa, synthetic construct
  source 1..7: note = Description of Artificial Sequence: Synthetic peptide; note = XENP019786 vlCDR2
GAFSRAT

SEQ ID NO: 569 - protein, 9 aa, synthetic construct
  source 1..9: note = Description of Artificial Sequence: Synthetic peptide; note = XENP019786 vlCDR3
QQYGSSPWT

SEQ ID NO: 570 - protein, 246 aa, synthetic construct
  source 1..246: note = Description of Artificial Sequence: Synthetic polypeptide; note = XENP019787 [CTLA-4]_H0.43_L0_scFv(GKPGS)4
QVQLVESGGGVVQPGRSLRLSCAASGFTFSSYTMHWVRQAPGKGLEWVTGISYDGNNKYYADSVKGRFTISRDNSKNTLYLQMNSLRAEDTAIYYCARTGWLGPFDYWGQGTLVTVSSGKPGSGKPGSGKPGSGKPGSEIVLTQSPGTLSLSPGERATLSCRASQSVGSSYLAWYQQKPGQAPRLLIYGAFSRATGIPDRFSGSGSGTDFTLTISRLEPEDFAVYYCQQYGSSPWTFGQGTKVEIK

SEQ ID NO: 571 - protein, 118 aa, synthetic construct
  source 1..118: note = Description of Artificial Sequence: Synthetic polypeptide; note = VH of XENP019787
QVQLVESGGGVVQPGRSLRLSCAASGFTFSSYTMHWVRQAPGKGLEWVTGISYDGNNKYYADSVKGRFTISRDNSKNTLYLQMNSLRAEDTAIYYCARTGWLGPFDYWGQGTLVTVSS

SEQ ID NO: 572 - protein, 108 aa, synthetic construct; identical to SEQ ID NO: 23
  source 1..108: note = Description of Artificial Sequence: Synthetic polypeptide; note = VL of XENP019787

SEQ ID NO: 573 - protein, 5 aa, synthetic construct
  source 1..5: note = Description of Artificial Sequence: Synthetic peptide; note = XENP019787 vhCDR1
SYTMH

SEQ ID NO: 574 - protein, 17 aa, synthetic construct
  source 1..17: note = Description of Artificial Sequence: Synthetic peptide; note = XENP019787 vhCDR2
GISYDGNNKYYADSVKG

SEQ ID NO: 575 - protein, 9 aa, synthetic construct
  source 1..9: note = Description of Artificial Sequence: Synthetic peptide; note = XENP019787 vhCDR3
TGWLGPFDY

SEQ ID NO: 576 - protein, 12 aa, synthetic construct
  source 1..12: note = Description of Artificial Sequence: Synthetic peptide; note = XENP019787 vlCDR1
RASQSVGSSYLA

SEQ ID NO: 577 - protein, 7 aa, synthetic construct
  source 1..7: note = Description of Artificial Sequence: Synthetic peptide; note = XENP019787 vlCDR2
GAFSRAT

SEQ ID NO: 578 - protein, 9 aa, synthetic construct
  source 1..9: note = Description of Artificial Sequence: Synthetic peptide; note = XENP019787 vlCDR3
QQYGSSPWT

SEQ ID NO: 579 - protein, 246 aa, synthetic construct
  source 1..246: note = Description of Artificial Sequence: Synthetic polypeptide; note = XENP019788 [CTLA-4]_H0.44_L0_scFv(GKPGS)4
QVQLVESGGGVVQPGRSLRLSCAASGFTFSSYTMHWVRQAPGKGLEWVTLISYDGNNKYYADSVKGRFTISRDNSKNTLYLQMNSLRAEDTAIYYCARTGWLGPFDYWGQGTLVTVSSGKPGSGKPGSGKPGSGKPGSEIVLTQSPGTLSLSPGERATLSCRASQSVGSSYLAWYQQKPGQAPRLLIYGAFSRATGIPDRFSGSGSGTDFTLTISRLEPEDFAVYYCQQYGSSPWTFGQGTKVEIK

SEQ ID NO: 580 - protein, 118 aa, synthetic construct
  source 1..118: note = Description of Artificial Sequence: Synthetic polypeptide; note = VH of XENP019788
QVQLVESGGGVVQPGRSLRLSCAASGFTFSSYTMHWVRQAPGKGLEWVTLISYDGNNKYYADSVKGRFTISRDNSKNTLYLQMNSLRAEDTAIYYCARTGWLGPFDYWGQGTLVTVSS

SEQ ID NO: 581 - protein, 108 aa, synthetic construct; identical to SEQ ID NO: 23
  source 1..108: note = Description of Artificial Sequence: Synthetic polypeptide; note = VL of XENP019788

SEQ ID NO: 582 - protein, 5 aa, synthetic construct
  source 1..5: note = Description of Artificial Sequence: Synthetic peptide; note = XENP019788 vhCDR1
SYTMH

SEQ ID NO: 583 - protein, 17 aa, synthetic construct
  source 1..17: note = Description of Artificial Sequence: Synthetic peptide; note = XENP019788 vhCDR2
LISYDGNNKYYADSVKG

SEQ ID NO: 584 - protein, 9 aa, synthetic construct
  source 1..9: note = Description of Artificial Sequence: Synthetic peptide; note = XENP019788 vhCDR3
TGWLGPFDY

SEQ ID NO: 585 - protein, 12 aa, synthetic construct
  source 1..12: note = Description of Artificial Sequence: Synthetic peptide; note = XENP019788 vlCDR1
RASQSVGSSYLA

SEQ ID NO: 586 - protein, 7 aa, synthetic construct
  source 1..7: note = Description of Artificial Sequence: Synthetic peptide; note = XENP019788 vlCDR2
GAFSRAT

SEQ ID NO: 587 - protein, 9 aa, synthetic construct
  source 1..9: note = Description of Artificial Sequence: Synthetic peptide; note = XENP019788 vlCDR3
QQYGSSPWT

SEQ ID NO: 588 - protein, 246 aa, synthetic construct
  source 1..246: note = Description of Artificial Sequence: Synthetic polypeptide; note = XENP019789 [CTLA-4]_H0.45_L0_scFv(GKPGS)4
QVQLVESGGGVVQPGRSLRLSCAASGFTFSSYTMHWVRQAPGKGLEWVTIISYDGNNKYYADSVKGRFTISRDNSKNTLYLQMNSLRAEDTAIYYCARTGWLGPFDYWGQGTLVTVSSGKPGSGKPGSGKPGSGKPGSEIVLTQSPGTLSLSPGERATLSCRASQSVGSSYLAWYQQKPGQAPRLLIYGAFSRATGIPDRFSGSGSGTDFTLTISRLEPEDFAVYYCQQYGSSPWTFGQGTKVEIK

SEQ ID NO: 589 - protein, 118 aa, synthetic construct
  source 1..118: note = Description of Artificial Sequence: Synthetic polypeptide; note = VH of XENP019789
QVQLVESGGGVVQPGRSLRLSCAASGFTFSSYTMHWVRQAPGKGLEWVTIISYDGNNKYYADSVKGRFTISRDNSKNTLYLQMNSLRAEDTAIYYCARTGWLGPFDYWGQGTLVTVSS

SEQ ID NO: 590 - protein, 108 aa, synthetic construct; identical to SEQ ID NO: 23
  source 1..108: note = Description of Artificial Sequence: Synthetic polypeptide; note = VL of XENP019789

SEQ ID NO: 591 - protein, 5 aa, synthetic construct
  source 1..5: note = Description of Artificial Sequence: Synthetic peptide; note = XENP019789 vhCDR1
SYTMH

SEQ ID NO: 592 - protein, 17 aa, synthetic construct
  source 1..17: note = Description of Artificial Sequence: Synthetic peptide; note = XENP019789 vhCDR2
IISYDGNNKYYADSVKG

SEQ ID NO: 593 - protein, 9 aa, synthetic construct
  source 1..9: note = Description of Artificial Sequence: Synthetic peptide; note = XENP019789 vhCDR3
TGWLGPFDY

SEQ ID NO: 594 - protein, 12 aa, synthetic construct
  source 1..12: note = Description of Artificial Sequence: Synthetic peptide; note = XENP019789 vlCDR1
RASQSVGSSYLA

SEQ ID NO: 595 - protein, 7 aa, synthetic construct
  source 1..7: note = Description of Artificial Sequence: Synthetic peptide; note = XENP019789 vlCDR2
GAFSRAT

SEQ ID NO: 596 - protein, 9 aa, synthetic construct
  source 1..9: note = Description of Artificial Sequence: Synthetic peptide; note = XENP019789 vlCDR3
QQYGSSPWT

SEQ ID NO: 597 - protein, 246 aa, synthetic construct
  source 1..246: note = Description of Artificial Sequence: Synthetic polypeptide; note = XENP019790 [CTLA-4]_H0.46_L0_scFv(GKPGS)4
QVQLVESGGGVVQPGRSLRLSCAASGFTFSSYTMHWVRQAPGKGLEWVTRISYDGNNKYYADSVKGRFTISRDNSKNTLYLQMNSLRAEDTAIYYCARTGWLGPFDYWGQGTLVTVSSGKPGSGKPGSGKPGSGKPGSEIVLTQSPGTLSLSPGERATLSCRASQSVGSSYLAWYQQKPGQAPRLLIYGAFSRATGIPDRFSGSGSGTDFTLTISRLEPEDFAVYYCQQYGSSPWTFGQGTKVEIK

SEQ ID NO: 598 - protein, 118 aa, synthetic construct
  source 1..118: note = Description of Artificial Sequence: Synthetic polypeptide; note = VH of XENP019790
QVQLVESGGGVVQPGRSLRLSCAASGFTFSSYTMHWVRQAPGKGLEWVTRISYDGNNKYYADSVKGRFTISRDNSKNTLYLQMNSLRAEDTAIYYCARTGWLGPFDYWGQGTLVTVSS

SEQ ID NO: 599 - protein, 108 aa, synthetic construct; identical to SEQ ID NO: 23
  source 1..108: note = Description of Artificial Sequence: Synthetic polypeptide; note = VL of XENP019790

SEQ ID NO: 600 - protein, 5 aa, synthetic construct
  source 1..5: note = Description of Artificial Sequence: Synthetic peptide; note = XENP019790 vhCDR1
SYTMH

SEQ ID NO: 601 - protein, 17 aa, synthetic construct
  source 1..17: note = Description of Artificial Sequence: Synthetic peptide; note = XENP019790 vhCDR2
RISYDGNNKYYADSVKG

SEQ ID NO: 602 - protein, 9 aa, synthetic construct
  source 1..9: note = Description of Artificial Sequence: Synthetic peptide; note = XENP019790 vhCDR3
TGWLGPFDY

SEQ ID NO: 603 - protein, 12 aa, synthetic construct
  source 1..12: note = Description of Artificial Sequence: Synthetic peptide; note = XENP019790 vlCDR1
RASQSVGSSYLA

SEQ ID NO: 604 - protein, 7 aa, synthetic construct
  source 1..7: note = Description of Artificial Sequence: Synthetic peptide; note = XENP019790 vlCDR2
GAFSRAT

SEQ ID NO: 605 - protein, 9 aa, synthetic construct
  source 1..9: note = Description of Artificial Sequence: Synthetic peptide; note = XENP019790 vlCDR3
QQYGSSPWT

SEQ ID NO: 606 - protein, 246 aa, synthetic construct
  source 1..246: note = Description of Artificial Sequence: Synthetic polypeptide; note = XENP019791 [CTLA-4]_H0.47_L0_scFv(GKPGS)4
QVQLVESGGGVVQPGRSLRLSCAASGFTFSSYTMHWVRQAPGKGLEWVTVISYDGNNKYYADSVKGRFTISRDNSKNTLYLQMNSLRAEDTAIYYCARTGWLGPFDYWGQGTLVTVSSGKPGSGKPGSGKPGSGKPGSEIVLTQSPGTLSLSPGERATLSCRASQSVGSSYLAWYQQKPGQAPRLLIYGAFSRATGIPDRFSGSGSGTDFTLTISRLEPEDFAVYYCQQYGSSPWTFGQGTKVEIK

SEQ ID NO: 607 - protein, 118 aa, synthetic construct
  source 1..118: note = Description of Artificial Sequence: Synthetic polypeptide; note = VH of XENP019791
QVQLVESGGGVVQPGRSLRLSCAASGFTFSSYTMHWVRQAPGKGLEWVTVISYDGNNKYYADSVKGRFTISRDNSKNTLYLQMNSLRAEDTAIYYCARTGWLGPFDYWGQGTLVTVSS

SEQ ID NO: 608 - protein, 108 aa, synthetic construct; identical to SEQ ID NO: 23
  source 1..108: note = Description of Artificial Sequence: Synthetic polypeptide; note = VL of XENP019791

SEQ ID NO: 609 - protein, 5 aa, synthetic construct
  source 1..5: note = Description of Artificial Sequence: Synthetic peptide; note = XENP019791 vhCDR1
SYTMH

SEQ ID NO: 610 - protein, 17 aa, synthetic construct
  source 1..17: note = Description of Artificial Sequence: Synthetic peptide; note = XENP019791 vhCDR2
VISYDGNNKYYADSVKG

SEQ ID NO: 611 - protein, 9 aa, synthetic construct
  source 1..9: note = Description of Artificial Sequence: Synthetic peptide; note = XENP019791 vhCDR3
TGWLGPFDY

SEQ ID NO: 612 - protein, 12 aa, synthetic construct
  source 1..12: note = Description of Artificial Sequence: Synthetic peptide; note = XENP019791 vlCDR1
RASQSVGSSYLA

SEQ ID NO: 613 - protein, 7 aa, synthetic construct
  source 1..7: note = Description of Artificial Sequence: Synthetic peptide; note = XENP019791 vlCDR2
GAFSRAT

SEQ ID NO: 614 - protein, 9 aa, synthetic construct
  source 1..9: note = Description of Artificial Sequence: Synthetic peptide; note = XENP019791 vlCDR3
QQYGSSPWT

SEQ ID NO: 615 - protein, 246 aa, synthetic construct
  source 1..246: note = Description of Artificial Sequence: Synthetic polypeptide; note = XENP019792 [CTLA-4]_H0.48_L0_scFv(GKPGS)4
QVQLVESGGGVVQPGRSLRLSCAASGFTFSSYTMHWVRQAPGKGLEWVTYISYDGNNKYYADSVKGRFTISRDNSKNTLYLQMNSLRAEDTAIYYCARTGWLGPFDYWGQGTLVTVSSGKPGSGKPGSGKPGSGKPGSEIVLTQSPGTLSLSPGERATLSCRASQSVGSSYLAWYQQKPGQAPRLLIYGAFSRATGIPDRFSGSGSGTDFTLTISRLEPEDFAVYYCQQYGSSPWTFGQGTKVEIK

SEQ ID NO: 616 - protein, 118 aa, synthetic construct
  source 1..118: note = Description of Artificial Sequence: Synthetic polypeptide; note = VH of XENP019792
QVQLVESGGGVVQPGRSLRLSCAASGFTFSSYTMHWVRQAPGKGLEWVTYISYDGNNKYYADSVKGRFTISRDNSKNTLYLQMNSLRAEDTAIYYCARTGWLGPFDYWGQGTLVTVSS

SEQ ID NO: 617 - protein, 108 aa, synthetic construct; identical to SEQ ID NO: 23
  source 1..108: note = Description of Artificial Sequence: Synthetic polypeptide; note = VL of XENP019792

SEQ ID NO: 618 - protein, 5 aa, synthetic construct
  source 1..5: note = Description of Artificial Sequence: Synthetic peptide; note = XENP019792 vhCDR1
SYTMH

SEQ ID NO: 619 - protein, 17 aa, synthetic construct
  source 1..17: note = Description of Artificial Sequence: Synthetic peptide; note = XENP019792 vhCDR2
YISYDGNNKYYADSVKG

SEQ ID NO: 620 - protein, 9 aa, synthetic construct
  source 1..9: note = Description of Artificial Sequence: Synthetic peptide; note = XENP019792 vhCDR3
TGWLGPFDY

SEQ ID NO: 621 - protein, 12 aa, synthetic construct
  source 1..12: note = Description of Artificial Sequence: Synthetic peptide; note = XENP019792 vlCDR1
RASQSVGSSYLA

SEQ ID NO: 622 - protein, 7 aa, synthetic construct
  source 1..7: note = Description of Artificial Sequence: Synthetic peptide; note = XENP019792 vlCDR2
GAFSRAT

SEQ ID NO: 623 - protein, 9 aa, synthetic construct
  source 1..9: note = Description of Artificial Sequence: Synthetic peptide; note = XENP019792 vlCDR3
QQYGSSPWT

SEQ ID NO: 624 - protein, 246 aa, synthetic construct
  source 1..246: note = Description of Artificial Sequence: Synthetic polypeptide; note = XENP019793 [CTLA-4]_H0.49_L0_scFv(GKPGS)4
QVQLVESGGGVVQPGRSLRLSCAASGFTFSSYTMHWVRQAPGKGLEWVTFESYDGNNKYYADSVKGRFTISRDNSKNTLYLQMNSLRAEDTAIYYCARTGWLGPFDYWGQGTLVTVSSGKPGSGKPGSGKPGSGKPGSEIVLTQSPGTLSLSPGERATLSCRASQSVGSSYLAWYQQKPGQAPRLLIYGAFSRATGIPDRFSGSGSGTDFTLTISRLEPEDFAVYYCQQYGSSPWTFGQGTKVEIK

SEQ ID NO: 625 - protein, 118 aa, synthetic construct
  source 1..118: note = Description of Artificial Sequence: Synthetic polypeptide; note = VH of XENP019793
QVQLVESGGGVVQPGRSLRLSCAASGFTFSSYTMHWVRQAPGKGLEWVTFESYDGNNKYYADSVKGRFTISRDNSKNTLYLQMNSLRAEDTAIYYCARTGWLGPFDYWGQGTLVTVSS

SEQ ID NO: 626 - protein, 108 aa, synthetic construct; identical to SEQ ID NO: 23
  source 1..108: note = Description of Artificial Sequence: Synthetic polypeptide; note = VL of XENP019793

SEQ ID NO: 627 - protein, 5 aa, synthetic construct
  source 1..5: note = Description of Artificial Sequence: Synthetic peptide; note = XENP019793 vhCDR1
SYTMH

SEQ ID NO: 628 - protein, 17 aa, synthetic construct
  source 1..17: note = Description of Artificial Sequence: Synthetic peptide; note = XENP019793 vhCDR2
FESYDGNNKYYADSVKG

SEQ ID NO: 629 - protein, 9 aa, synthetic construct
  source 1..9: note = Description of Artificial Sequence: Synthetic peptide; note = XENP019793 vhCDR3
TGWLGPFDY

SEQ ID NO: 630 - protein, 12 aa, synthetic construct
  source 1..12: note = Description of Artificial Sequence: Synthetic peptide; note = XENP019793 vlCDR1
RASQSVGSSYLA

SEQ ID NO: 631 - protein, 7 aa, synthetic construct
  source 1..7: note = Description of Artificial Sequence: Synthetic peptide; note = XENP019793 vlCDR2
GAFSRAT

SEQ ID NO: 632 - protein, 9 aa, synthetic construct
  source 1..9: note = Description of Artificial Sequence: Synthetic peptide; note = XENP019793 vlCDR3
QQYGSSPWT

SEQ ID NO: 633 - protein, 246 aa, synthetic construct
  source 1..246: note = Description of Artificial Sequence: Synthetic polypeptide; note = XENP019794 [CTLA-4]_H0.50_L0_scFv(GKPGS)4
QVQLVESGGGVVQPGRSLRLSCAASGFTFSSYTMHWVRQAPGKGLEWVTFHSYDGNNKYYADSVKGRFTISRDNSKNTLYLQMNSLRAEDTAIYYCARTGWLGPFDYWGQGTLVTVSSGKPGSGKPGSGKPGSGKPGSEIVLTQSPGTLSLSPGERATLSCRASQSVGSSYLAWYQQKPGQAPRLLIYGAFSRATGIPDRFSGSGSGTDFTLTISRLEPEDFAVYYCQQYGSSPWTFGQGTKVEIK

SEQ ID NO: 634 - protein, 118 aa, synthetic construct
  source 1..118: note = Description of Artificial Sequence: Synthetic polypeptide; note = VH of XENP019794
QVQLVESGGGVVQPGRSLRLSCAASGFTFSSYTMHWVRQAPGKGLEWVTFHSYDGNNKYYADSVKGRFTISRDNSKNTLYLQMNSLRAEDTAIYYCARTGWLGPFDYWGQGTLVTVSS

SEQ ID NO: 635 - protein, 108 aa, synthetic construct; identical to SEQ ID NO: 23
  source 1..108: note = Description of Artificial Sequence: Synthetic polypeptide; note = VL of XENP019794

SEQ ID NO: 636 - protein, 5 aa, synthetic construct
  source 1..5: note = Description of Artificial Sequence: Synthetic peptide; note = XENP019794 vhCDR1
SYTMH

SEQ ID NO: 637 - protein, 17 aa, synthetic construct
  source 1..17: note = Description of Artificial Sequence: Synthetic peptide; note = XENP019794 vhCDR2
FHSYDGNNKYYADSVKG

SEQ ID NO: 638 - protein, 9 aa, synthetic construct
  source 1..9: note = Description of Artificial Sequence: Synthetic peptide; note = XENP019794 vhCDR3
TGWLGPFDY

SEQ ID NO: 639 - protein, 12 aa, synthetic construct
  source 1..12: note = Description of Artificial Sequence: Synthetic peptide; note = XENP019794 vlCDR1
RASQSVGSSYLA

SEQ ID NO: 640 - protein, 7 aa, synthetic construct
  source 1..7: note = Description of Artificial Sequence: Synthetic peptide; note = XENP019794 vlCDR2
GAFSRAT

SEQ ID NO: 641 - protein, 9 aa, synthetic construct
  source 1..9: note = Description of Artificial Sequence: Synthetic peptide; note = XENP019794 vlCDR3
QQYGSSPWT

SEQ ID NO: 642 - protein, 246 aa, synthetic construct
  source 1..246: note = Description of Artificial Sequence: Synthetic polypeptide; note = XENP019795 [CTLA-4]_H0.51_L0_scFv(GKPGS)4
QVQLVESGGGVVQPGRSLRLSCAASGFTFSSYTMHWVRQAPGKGLEWVTFTSYDGNNKYYADSVKGRFTISRDNSKNTLYLQMNSLRAEDTAIYYCARTGWLGPFDYWGQGTLVTVSSGKPGSGKPGSGKPGSGKPGSEIVLTQSPGTLSLSPGERATLSCRASQSVGSSYLAWYQQKPGQAPRLLIYGAFSRATGIPDRFSGSGSGTDFTLTISRLEPEDFAVYYCQQYGSSPWTFGQGTKVEIK

SEQ ID NO: 643 - protein, 118 aa, synthetic construct
  source 1..118: note = Description of Artificial Sequence: Synthetic polypeptide; note = VH of XENP019795
QVQLVESGGGVVQPGRSLRLSCAASGFTFSSYTMHWVRQAPGKGLEWVTFTSYDGNNKYYADSVKGRFTISRDNSKNTLYLQMNSLRAEDTAIYYCARTGWLGPFDYWGQGTLVTVSS

SEQ ID NO: 644 - protein, 108 aa, synthetic construct; identical to SEQ ID NO: 23
  source 1..108: note = Description of Artificial Sequence: Synthetic polypeptide; note = VL of XENP019795

SEQ ID NO: 645 - protein, 5 aa, synthetic construct
  source 1..5: note = Description of Artificial Sequence: Synthetic peptide; note = XENP019795 vhCDR1
SYTMH

SEQ ID NO: 646 - protein, 17 aa, synthetic construct
  source 1..17: note = Description of Artificial Sequence: Synthetic peptide; note = XENP019795 vhCDR2
FTSYDGNNKYYADSVKG

SEQ ID NO: 647 - protein, 9 aa, synthetic construct
  source 1..9: note = Description of Artificial Sequence: Synthetic peptide; note = XENP019795 vhCDR3
TGWLGPFDY

SEQ ID NO: 648 - protein, 12 aa, synthetic construct
  source 1..12: note = Description of Artificial Sequence: Synthetic peptide; note = XENP019795 vlCDR1
RASQSVGSSYLA

SEQ ID NO: 649 - protein, 7 aa, synthetic construct
  source 1..7: note = Description of Artificial Sequence: Synthetic peptide; note = XENP019795 vlCDR2
GAFSRAT

SEQ ID NO: 650 - protein, 9 aa, synthetic construct
  source 1..9: note = Description of Artificial Sequence: Synthetic peptide; note = XENP019795 vlCDR3
QQYGSSPWT

SEQ ID NO: 651 - protein, 246 aa, synthetic construct
  source 1..246: note = Description of Artificial Sequence: Synthetic polypeptide; note = XENP019796 [CTLA-4]_H0.52_L0_scFv(GKPGS)4
QVQLVESGGGVVQPGRSLRLSCAASGFTFSSYTMHWVRQAPGKGLEWVTFVSYDGNNKYYADSVKGRFTISRDNSKNTLYLQMNSLRAEDTAIYYCARTGWLGPFDYWGQGTLVTVSSGKPGSGKPGSGKPGSGKPGSEIVLTQSPGTLSLSPGERATLSCRASQSVGSSYLAWYQQKPGQAPRLLIYGAFSRATGIPDRFSGSGSGTDFTLTISRLEPEDFAVYYCQQYGSSPWTFGQGTKVEIK

SEQ ID NO: 652 - protein, 118 aa, synthetic construct
  source 1..118: note = Description of Artificial Sequence: Synthetic polypeptide; note = VH of XENP019796
QVQLVESGGGVVQPGRSLRLSCAASGFTFSSYTMHWVRQAPGKGLEWVTFVSYDGNNKYYADSVKGRFTISRDNSKNTLYLQMNSLRAEDTAIYYCARTGWLGPFDYWGQGTLVTVSS

SEQ ID NO: 653 - protein, 108 aa, synthetic construct; identical to SEQ ID NO: 23
  source 1..108: note = Description of Artificial Sequence: Synthetic polypeptide; note = VL of XENP019796

SEQ ID NO: 654 - protein, 5 aa, synthetic construct
  source 1..5: note = Description of Artificial Sequence: Synthetic peptide; note = XENP019796 vhCDR1
SYTMH

SEQ ID NO: 655 - protein, 17 aa, synthetic construct
  source 1..17: note = Description of Artificial Sequence: Synthetic peptide; note = XENP019796 vhCDR2
FVSYDGNNKYYADSVKG

SEQ ID NO: 656 - protein, 9 aa, synthetic construct
  source 1..9: note = Description of Artificial Sequence: Synthetic peptide; note = XENP019796 vhCDR3
TGWLGPFDY

SEQ ID NO: 657 - protein, 12 aa, synthetic construct
  source 1..12: note = Description of Artificial Sequence: Synthetic peptide; note = XENP019796 vlCDR1
RASQSVGSSYLA

SEQ ID NO: 658 - protein, 7 aa, synthetic construct
  source 1..7: note = Description of Artificial Sequence: Synthetic peptide; note = XENP019796 vlCDR2
GAFSRAT

SEQ ID NO: 659 - protein, 9 aa, synthetic construct
  source 1..9: note = Description of Artificial Sequence: Synthetic peptide; note = XENP019796 vlCDR3
QQYGSSPWT

SEQ ID NO: 660 - protein, 246 aa, synthetic construct
  source 1..246: note = Description of Artificial Sequence: Synthetic polypeptide; note = XENP019801 [CTLA-4]_H0.53_L0_scFv(GKPGS)4
QVQLVESGGGVVQPGRSLRLSCAASGFTFSSYTMHWVRQAPGKGLEWVTFYSYDGNNKYYADSVKGRFTISRDNSKNTLYLQMNSLRAEDTAIYYCARTGWLGPFDYWGQGTLVTVSSGKPGSGKPGSGKPGSGKPGSEIVLTQSPGTLSLSPGERATLSCRASQSVGSSYLAWYQQKPGQAPRLLIYGAFSRATGIPDRFSGSGSGTDFTLTISRLEPEDFAVYYCQQYGSSPWTFGQGTKVEIK

SEQ ID NO: 661 - protein, 118 aa, synthetic construct
  source 1..118: note = Description of Artificial Sequence: Synthetic polypeptide; note = VH of XENP019801
QVQLVESGGGVVQPGRSLRLSCAASGFTFSSYTMHWVRQAPGKGLEWVTFYSYDGNNKYYADSVKGRFTISRDNSKNTLYLQMNSLRAEDTAIYYCARTGWLGPFDYWGQGTLVTVSS

SEQ ID NO: 662 - protein, 108 aa, synthetic construct; identical to SEQ ID NO: 23
  source 1..108: note = Description of Artificial Sequence: Synthetic polypeptide; note = VL of XENP019801

SEQ ID NO: 663 - protein, 5 aa, synthetic construct
  source 1..5: note = Description of Artificial Sequence: Synthetic peptide; note = XENP019801 vhCDR1
SYTMH

SEQ ID NO: 664 - protein, 17 aa, synthetic construct
  source 1..17: note = Description of Artificial Sequence: Synthetic peptide; note = XENP019801 vhCDR2
FYSYDGNNKYYADSVKG

SEQ ID NO: 665 - protein, 9 aa, synthetic construct
  source 1..9: note = Description of Artificial Sequence: Synthetic peptide; note = XENP019801 vhCDR3
TGWLGPFDY

SEQ ID NO: 666 - protein, 12 aa, synthetic construct
  source 1..12: note = Description of Artificial Sequence: Synthetic peptide; note = XENP019801 vlCDR1
RASQSVGSSYLA

SEQ ID NO: 667 - protein, 7 aa, synthetic construct
  source 1..7: note = Description of Artificial Sequence: Synthetic peptide; note = XENP019801 vlCDR2
GAFSRAT

SEQ ID NO: 668 - protein, 9 aa, synthetic construct
  source 1..9: note = Description of Artificial Sequence: Synthetic peptide; note = XENP019801 vlCDR3
QQYGSSPWT

SEQ ID NO: 669 - protein, 246 aa, synthetic construct
  source 1..246: note = Description of Artificial Sequence: Synthetic polypeptide; note = XENP019802 [CTLA-4]_H0.54_L0_scFv(GKPGS)4
QVQLVESGGGVVQPGRSLRLSCAASGFTFSSYTMHWVRQAPGKGLEWVTFISGDGNNKYYADSVKGRFTISRDNSKNTLYLQMNSLRAEDTAIYYCARTGWLGPFDYWGQGTLVTVSSGKPGSGKPGSGKPGSGKPGSEIVLTQSPGTLSLSPGERATLSCRASQSVGSSYLAWYQQKPGQAPRLLIYGAFSRATGIPDRFSGSGSGTDFTLTISRLEPEDFAVYYCQQYGSSPWTFGQGTKVEIK

SEQ ID NO: 670 - protein, 118 aa, synthetic construct
  source 1..118: note = Description of Artificial Sequence: Synthetic polypeptide; note = VH of XENP019802
QVQLVESGGGVVQPGRSLRLSCAASGFTFSSYTMHWVRQAPGKGLEWVTFISGDGNNKYYADSVKGRFTISRDNSKNTLYLQMNSLRAEDTAIYYCARTGWLGPFDYWGQGTLVTVSS

SEQ ID NO: 671 - protein, 108 aa, synthetic construct; identical to SEQ ID NO: 23
  source 1..108: note = Description of Artificial Sequence: Synthetic polypeptide; note = VL of XENP019802

SEQ ID NO: 672 - protein, 5 aa, synthetic construct
  source 1..5: note = Description of Artificial Sequence: Synthetic peptide; note = XENP019802 vhCDR1
SYTMH

SEQ ID NO: 673 - protein, 17 aa, synthetic construct
  source 1..17: note = Description of Artificial Sequence: Synthetic peptide; note = XENP019802 vhCDR2
FISGDGNNKYYADSVKG

SEQ ID NO: 674 - protein, 9 aa, synthetic construct
  source 1..9: note = Description of Artificial Sequence: Synthetic peptide; note = XENP019802 vhCDR3
TGWLGPFDY

SEQ ID NO: 675 - protein, 12 aa, synthetic construct
  source 1..12: note = Description of Artificial Sequence: Synthetic peptide; note = XENP019802 vlCDR1
RASQSVGSSYLA

SEQ ID NO: 676 - protein, 7 aa, synthetic construct
  source 1..7: note = Description of Artificial Sequence: Synthetic peptide; note = XENP019802 vlCDR2
GAFSRAT

SEQ ID NO: 677 - protein, 9 aa, synthetic construct
  source 1..9: note = Description of Artificial Sequence: Synthetic peptide; note = XENP019802 vlCDR3
QQYGSSPWT

SEQ ID NO: 678 - protein, 246 aa, synthetic construct
  source 1..246: note = Description of Artificial Sequence: Synthetic polypeptide; note = XENP019803 [CTLA-4]_H0.55_L0_scFv(GKPGS)4
QVQLVESGGGVVQPGRSLRLSCAASGFTFSSYTMHWVRQAPGKGLEWVTFISNDGNNKYYADSVKGRFTISRDNSKNTLYLQMNSLRAEDTAIYYCARTGWLGPFDYWGQGTLVTVSSGKPGSGKPGSGKPGSGKPGSEIVLTQSPGTLSLSPGERATLSCRASQSVGSSYLAWYQQKPGQAPRLLIYGAFSRATGIPDRFSGSGSGTDFTLTISRLEPEDFAVYYCQQYGSSPWTFGQGTKVEIK

SEQ ID NO: 679 - protein, 118 aa, synthetic construct
  source 1..118: note = Description of Artificial Sequence: Synthetic polypeptide; note = VH of XENP019803
QVQLVESGGGVVQPGRSLRLSCAASGFTFSSYTMHWVRQAPGKGLEWVTFISNDGNNKYYADSVKGRFTISRDNSKNTLYLQMNSLRAEDTAIYYCARTGWLGPFDYWGQGTLVTVSS

SEQ ID NO: 680 - protein, 108 aa, synthetic construct; identical to SEQ ID NO: 23
  source 1..108: note = Description of Artificial Sequence: Synthetic polypeptide; note = VL of XENP019803

SEQ ID NO: 681 - protein, 5 aa, synthetic construct
  source 1..5: note = Description of Artificial Sequence: Synthetic peptide; note = XENP019803 vhCDR1
SYTMH

SEQ ID NO: 682 - protein, 17 aa, synthetic construct
  source 1..17: note = Description of Artificial Sequence: Synthetic peptide; note = XENP019803 vhCDR2
FISNDGNNKYYADSVKG

SEQ ID NO: 683 - protein, 9 aa, synthetic construct
  source 1..9: note = Description of Artificial Sequence: Synthetic peptide; note = XENP019803 vhCDR3
TGWLGPFDY

SEQ ID NO: 684 - protein, 12 aa, synthetic construct
  source 1..12: note = Description of Artificial Sequence: Synthetic peptide; note = XENP019803 vlCDR1
RASQSVGSSYLA

SEQ ID NO: 685 - protein, 7 aa, synthetic construct
  source 1..7: note = Description of Artificial Sequence: Synthetic peptide; note = XENP019803 vlCDR2
GAFSRAT

SEQ ID NO: 686 - protein, 9 aa, synthetic construct
  source 1..9: note = Description of Artificial Sequence: Synthetic peptide; note = XENP019803 vlCDR3
QQYGSSPWT

SEQ ID NO: 687 - protein, 246 aa, synthetic construct
  source 1..246: note = Description of Artificial Sequence: Synthetic polypeptide; note = XENP019804 [CTLA-4]_H0.56_L0_scFv(GKPGS)4
QVQLVESGGGVVQPGRSLRLSCAASGFTFSSYTMHWVRQAPGKGLEWVTFISSDGNNKYYADSVKGRFTISRDNSKNTLYLQMNSLRAEDTAIYYCARTGWLGPFDYWGQGTLVTVSSGKPGSGKPGSGKPGSGKPGSEIVLTQSPGTLSLSPGERATLSCRASQSVGSSYLAWYQQKPGQAPRLLIYGAFSRATGIPDRFSGSGSGTDFTLTISRLEPEDFAVYYCQQYGSSPWTFGQGTKVEIK

SEQ ID NO: 688 - protein, 118 aa, synthetic construct
  source 1..118: note = Description of Artificial Sequence: Synthetic polypeptide; note = VH of XENP019804
QVQLVESGGGVVQPGRSLRLSCAASGFTFSSYTMHWVRQAPGKGLEWVTFISSDGNNKYYADSVKGRFTISRDNSKNTLYLQMNSLRAEDTAIYYCARTGWLGPFDYWGQGTLVTVSS

SEQ ID NO: 689 - protein, 108 aa, synthetic construct; identical to SEQ ID NO: 23
  source 1..108: note = Description of Artificial Sequence: Synthetic polypeptide; note = VL of XENP019804

SEQ ID NO: 690 - protein, 5 aa, synthetic construct
  source 1..5: note = Description of Artificial Sequence: Synthetic peptide; note = XENP019804 vhCDR1
SYTMH

SEQ ID NO: 691 - protein, 17 aa, synthetic construct
  source 1..17: note = Description of Artificial Sequence: Synthetic peptide; note = XENP019804 vhCDR2
FISSDGNNKYYADSVKG

SEQ ID NO: 692 - protein, 9 aa, synthetic construct
  source 1..9: note = Description of Artificial Sequence: Synthetic peptide; note = XENP019804 vhCDR3
TGWLGPFDY

SEQ ID NO: 693 - protein, 12 aa, synthetic construct
  source 1..12: note = Description of Artificial Sequence: Synthetic peptide; note = XENP019804 vlCDR1
RASQSVGSSYLA

SEQ ID NO: 694 - protein, 7 aa, synthetic construct
  source 1..7: note = Description of Artificial Sequence: Synthetic peptide; note = XENP019804 vlCDR2
GAFSRAT

SEQ ID NO: 695 - protein, 9 aa, synthetic construct
  source 1..9: note = Description of Artificial Sequence: Synthetic peptide; note = XENP019804 vlCDR3
QQYGSSPWT

SEQ ID NO: 696 - protein, 246 aa, synthetic construct
  source 1..246: note = Description of Artificial Sequence: Synthetic polypeptide; note = XENP019805 [CTLA-4]_H0.57_L0_scFv(GKPGS)4
QVQLVESGGGVVQPGRSLRLSCAASGFTFSSYTMHWVRQAPGKGLEWVTFISYNGNNKYYADSVKGRFTISRDNSKNTLYLQMNSLRAEDTAIYYCARTGWLGPFDYWGQGTLVTVSSGKPGSGKPGSGKPGSGKPGSEIVLTQSPGTLSLSPGERATLSCRASQSVGSSYLAWYQQKPGQAPRLLIYGAFSRATGIPDRFSGSGSGTDFTLTISRLEPEDFAVYYCQQYGSSPWTFGQGTKVEIK

SEQ ID NO: 697 - protein, 118 aa, synthetic construct
  source 1..118: note = Description of Artificial Sequence: Synthetic polypeptide; note = VH of XENP019805
QVQLVESGGGVVQPGRSLRLSCAASGFTFSSYTMHWVRQAPGKGLEWVTFISYNGNNKYYADSVKGRFTISRDNSKNTLYLQMNSLRAEDTAIYYCARTGWLGPFDYWGQGTLVTVSS

SEQ ID NO: 698 - protein, 108 aa, synthetic construct; identical to SEQ ID NO: 23
  source 1..108: note = Description of Artificial Sequence: Synthetic polypeptide; note = VL of XENP019805

SEQ ID NO: 699 - protein, 5 aa, synthetic construct
  source 1..5: note = Description of Artificial Sequence: Synthetic peptide; note = XENP019805 vhCDR1
SYTMH

SEQ ID NO: 700 - protein, 17 aa, synthetic construct
  source 1..17: note = Description of Artificial Sequence: Synthetic peptide; note = XENP019805 vhCDR2
FISYNGNNKYYADSVKG

SEQ ID NO: 701 - protein, 9 aa, synthetic construct
  source 1..9: note = Description of Artificial Sequence: Synthetic peptide; note = XENP019805 vhCDR3
TGWLGPFDY

SEQ ID NO: 702 - protein, 12 aa, synthetic construct
  source 1..12: note = Description of Artificial Sequence: Synthetic peptide; note = XENP019805 vlCDR1
RASQSVGSSYLA

SEQ ID NO: 703 - protein, 7 aa, synthetic construct
  source 1..7: note = Description of Artificial Sequence: Synthetic peptide; note = XENP019805 vlCDR2
GAFSRAT

SEQ ID NO: 704 - protein, 9 aa, synthetic construct
  source 1..9: note = Description of Artificial Sequence: Synthetic peptide; note = XENP019805 vlCDR3
QQYGSSPWT

SEQ ID NO: 705 - protein, 246 aa, synthetic construct
  source 1..246: note = Description of Artificial Sequence: Synthetic polypeptide; note = XENP019806 [CTLA-4]_H0.58_L0_scFv(GKPGS)4
QVQLVESGGGVVQPGRSLRLSCAASGFTFSSYTMHWVRQAPGKGLEWVTFISYSGNNKYYADSVKGRFTISRDNSKNTLYLQMNSLRAEDTAIYYCARTGWLGPFDYWGQGTLVTVSSGKPGSGKPGSGKPGSGKPGSEIVLTQSPGTLSLSPGERATLSCRASQSVGSSYLAWYQQKPGQAPRLLIYGAFSRATGIPDRFSGSGSGTDFTLTISRLEPEDFAVYYCQQYGSSPWTFGQGTKVEIK

SEQ ID NO: 706 - protein, 118 aa, synthetic construct
  source 1..118: note = Description of Artificial Sequence: Synthetic polypeptide; note = VH of XENP019806
QVQLVESGGGVVQPGRSLRLSCAASGFTFSSYTMHWVRQAPGKGLEWVTFISYSGNNKYYADSVKGRFTISRDNSKNTLYLQMNSLRAEDTAIYYCARTGWLGPFDYWGQGTLVTVSS

SEQ ID NO: 707 - protein, 108 aa, synthetic construct; identical to SEQ ID NO: 23
  source 1..108: note = Description of Artificial Sequence: Synthetic polypeptide; note = VL of XENP019806

SEQ ID NO: 708 - protein, 5 aa, synthetic construct
  source 1..5: note = Description of Artificial Sequence: Synthetic peptide; note = XENP019806 vhCDR1
SYTMH

SEQ ID NO: 709 - protein, 17 aa, synthetic construct
  source 1..17: note = Description of Artificial Sequence: Synthetic peptide; note = XENP019806 vhCDR2
FISYSGNNKYYADSVKG

SEQ ID NO: 710 - protein, 9 aa, synthetic construct
  source 1..9: note = Description of Artificial Sequence: Synthetic peptide; note = XENP019806 vhCDR3
TGWLGPFDY

SEQ ID NO: 711 - protein, 12 aa, synthetic construct
  source 1..12: note = Description of Artificial Sequence: Synthetic peptide; note = XENP019806 vlCDR1
RASQSVGSSYLA

SEQ ID NO: 712 - protein, 7 aa, synthetic construct
  source 1..7: note = Description of Artificial Sequence: Synthetic peptide; note = XENP019806 vlCDR2
GAFSRAT

SEQ ID NO: 713 - protein, 9 aa, synthetic construct
  source 1..9: note = Description of Artificial Sequence: Synthetic peptide; note = XENP019806 vlCDR3
QQYGSSPWT

SEQ ID NO: 714 - protein, 246 aa, synthetic construct
  source 1..246: note = Description of Artificial Sequence: Synthetic polypeptide; note = XENP019807 [CTLA-4]_H0.59_L0_scFv(GKPGS)4
QVQLVESGGGVVQPGRSLRLSCAASGFTFSSYTMHWVRQAPGKGLEWVTFISYEGNNKYYADSVKGRFTISRDNSKNTLYLQMNSLRAEDTAIYYCARTGWLGPFDYWGQGTLVTVSSGKPGSGKPGSGKPGSGKPGSEIVLTQSPGTLSLSPGERATLSCRASQSVGSSYLAWYQQKPGQAPRLLIYGAFSRATGIPDRFSGSGSGTDFTLTISRLEPEDFAVYYCQQYGSSPWTFGQGTKVEIK

SEQ ID NO: 715 - protein, 118 aa, synthetic construct
  source 1..118: note = Description of Artificial Sequence: Synthetic polypeptide; note = VH of XENP019807
QVQLVESGGGVVQPGRSLRLSCAASGFTFSSYTMHWVRQAPGKGLEWVTFISYEGNNKYYADSVKGRFTISRDNSKNTLYLQMNSLRAEDTAIYYCARTGWLGPFDYWGQGTLVTVSS

SEQ ID NO: 716 - protein, 108 aa, synthetic construct; identical to SEQ ID NO: 23
  source 1..108: note = Description of Artificial Sequence: Synthetic polypeptide; note = VL of XENP019807

SEQ ID NO: 717 - protein, 5 aa, synthetic construct
  source 1..5: note = Description of Artificial Sequence: Synthetic peptide; note = XENP019807 vhCDR1
SYTMH

SEQ ID NO: 718 - protein, 17 aa, synthetic construct
  source 1..17: note = Description of Artificial Sequence: Synthetic peptide; note = XENP019807 vhCDR2
FISYEGNNKYYADSVKG

SEQ ID NO: 719 - protein, 9 aa, synthetic construct
  source 1..9: note = Description of Artificial Sequence: Synthetic peptide; note = XENP019807 vhCDR3
TGWLGPFDY

SEQ ID NO: 720 - protein, 12 aa, synthetic construct
  source 1..12: note = Description of Artificial Sequence: Synthetic peptide; note = XENP019807 vlCDR1
RASQSVGSSYLA

SEQ ID NO: 721 - protein, 7 aa, synthetic construct
  source 1..7: note = Description of Artificial Sequence: Synthetic peptide; note = XENP019807 vlCDR2
GAFSRAT

SEQ ID NO: 722 - protein, 9 aa, synthetic construct
  source 1..9: note = Description of Artificial Sequence: Synthetic peptide; note = XENP019807 vlCDR3
QQYGSSPWT

SEQ ID NO: 723 - protein, 246 aa, synthetic construct
  source 1..246: note = Description of Artificial Sequence: Synthetic polypeptide; note = XENP019808 [CTLA-4]_H0.60_L0_scFv(GKPGS)4
QVQLVESGGGVVQPGRSLRLSCAASGFTFSSYTMHWVRQAPGKGLEWVTFISYHGNNKYYADSVKGRFTISRDNSKNTLYLQMNSLRAEDTAIYYCARTGWLGPFDYWGQGTLVTVSSGKPGSGKPGSGKPGSGKPGSEIVLTQSPGTLSLSPGERATLSCRASQSVGSSYLAWYQQKPGQAPRLLIYGAFSRATGIPDRFSGSGSGTDFTLTISRLEPEDFAVYYCQQYGSSPWTFGQGTKVEIK

SEQ ID NO: 724 - protein, 118 aa, synthetic construct
  source 1..118: note = Description of Artificial Sequence: Synthetic polypeptide; note = VH of XENP019808
QVQLVESGGGVVQPGRSLRLSCAASGFTFSSYTMHWVRQAPGKGLEWVTFISYHGNNKYYADSVKGRFTISRDNSKNTLYLQMNSLRAEDTAIYYCARTGWLGPFDYWGQGTLVTVSS

SEQ ID NO: 725 - protein, 108 aa, synthetic construct; identical to SEQ ID NO: 23
  source 1..108: note = Description of Artificial Sequence: Synthetic polypeptide; note = VL of XENP019808

SEQ ID NO: 726 - protein, 5 aa, synthetic construct
  source 1..5: note = Description of Artificial Sequence: Synthetic peptide; note = XENP019808 vhCDR1
SYTMH

SEQ ID NO: 727 - protein, 17 aa, synthetic construct
  source 1..17: note = Description of Artificial Sequence: Synthetic peptide; note = XENP019808 vhCDR2
FISYHGNNKYYADSVKG

SEQ ID NO: 728 - protein, 9 aa, synthetic construct
  source 1..9: note = Description of Artificial Sequence: Synthetic peptide; note = XENP019808 vhCDR3
TGWLGPFDY

SEQ ID NO: 729 - protein, 12 aa, synthetic construct
  source 1..12: note = Description of Artificial Sequence: Synthetic peptide; note = XENP019808 vlCDR1
RASQSVGSSYLA

SEQ ID NO: 730 - protein, 7 aa, synthetic construct
  source 1..7: note = Description of Artificial Sequence: Synthetic peptide; note = XENP019808 vlCDR2
GAFSRAT

SEQ ID NO: 731 - protein, 9 aa, synthetic construct
  source 1..9: note = Description of Artificial Sequence: Synthetic peptide; note = XENP019808 vlCDR3
QQYGSSPWT

SEQ ID NO: 732 - protein, 246 aa, synthetic construct
  source 1..246: note = Description of Artificial Sequence: Synthetic polypeptide; note = XENP019809 [CTLA-4]_H0.61_L0_scFv(GKPGS)4
QVQLVESGGGVVQPGRSLRLSCAASGFTFSSYTMHWVRQAPGKGLEWVTFISYKGNNKYYADSVKGRFTISRDNSKNTLYLQMNSLRAEDTAIYYCARTGWLGPFDYWGQGTLVTVSSGKPGSGKPGSGKPGSGKPGSEIVLTQSPGTLSLSPGERATLSCRASQSVGSSYLAWYQQKPGQAPRLLIYGAFSRATGIPDRFSGSGSGTDFTLTISRLEPEDFAVYYCQQYGSSPWTFGQGTKVEIK

SEQ ID NO: 733 - protein, 118 aa, synthetic construct
  source 1..118: note = Description of Artificial Sequence: Synthetic polypeptide; note = VH of XENP019809
QVQLVESGGGVVQPGRSLRLSCAASGFTFSSYTMHWVRQAPGKGLEWVTFISYKGNNKYYADSVKGRFTISRDNSKNTLYLQMNSLRAEDTAIYYCARTGWLGPFDYWGQGTLVTVSS

SEQ ID NO: 734 - protein, 108 aa, synthetic construct; identical to SEQ ID NO: 23
  source 1..108: note = Description of Artificial Sequence: Synthetic polypeptide; note = VL of XENP019809

SEQ ID NO: 735 - protein, 5 aa, synthetic construct
  source 1..5: note = Description of Artificial Sequence: Synthetic peptide; note = XENP019809 vhCDR1
SYTMH

SEQ ID NO: 736 - protein, 17 aa, synthetic construct
  source 1..17: note = Description of Artificial Sequence: Synthetic peptide; note = XENP019809 vhCDR2
FISYKGNNKYYADSVKG

SEQ ID NO: 737 - protein, 9 aa, synthetic construct
  source 1..9: note = Description of Artificial Sequence: Synthetic peptide; note = XENP019809 vhCDR3
TGWLGPFDY

SEQ ID NO: 738 - protein, 12 aa, synthetic construct
  source 1..12: note = Description of Artificial Sequence: Synthetic peptide; note = XENP019809 vlCDR1
RASQSVGSSYLA

SEQ ID NO: 739 - protein, 7 aa, synthetic construct
  source 1..7: note = Description of Artificial Sequence: Synthetic peptide; note = XENP019809 vlCDR2
GAFSRAT

SEQ ID NO: 740 - protein, 9 aa, synthetic construct
  source 1..9: note = Description of Artificial Sequence: Synthetic peptide; note = XENP019809 vlCDR3
QQYGSSPWT

SEQ ID NO: 741 - protein, 246 aa, synthetic construct
  source 1..246: note = Description of Artificial Sequence: Synthetic polypeptide; note = XENP019810 [CTLA-4]_H0.62_L0_scFv(GKPGS)4
QVQLVESGGGVVQPGRSLRLSCAASGFTFSSYTMHWVRQAPGKGLEWVTFISYKGNNKYYADSVKGRFTISEDNSKNTLYLQMNSLRAEDTAIYYCARTGWLGPFDYWGQGTLVTVSSGKPGSGKPGSGKPGSGKPGSEIVLTQSPGTLSLSPGERATLSCRASQSVGSSYLAWYQQKPGQAPRLLIYGAFSRATGIPDRFSGSGSGTDFTLTISRLEPEDFAVYYCQQYGSSPWTFGQGTKVEIK

SEQ ID NO: 742 - protein, 118 aa, synthetic construct
  source 1..118: note = Description of Artificial Sequence: Synthetic polypeptide; note = VH of XENP019810
QVQLVESGGGVVQPGRSLRLSCAASGFTFSSYTMHWVRQAPGKGLEWVTFISYKGNNKYYADSVKGRFTISEDNSKNTLYLQMNSLRAEDTAIYYCARTGWLGPFDYWGQGTLVTVSS

SEQ ID NO: 743 - protein, 108 aa, synthetic construct; identical to SEQ ID NO: 23
  source 1..108: note = Description of Artificial Sequence: Synthetic polypeptide; note = VL of XENP019810

SEQ ID NO: 744 - protein, 5 aa, synthetic construct
  source 1..5: note = Description of Artificial Sequence: Synthetic peptide; note = XENP019810 vhCDR1
SYTMH

SEQ ID NO: 745 - protein, 17 aa, synthetic construct
  source 1..17: note = Description of Artificial Sequence: Synthetic peptide; note = XENP019810 vhCDR2
FISYKGNNKYYADSVKG

SEQ ID NO: 746 - protein, 9 aa, synthetic construct
  source 1..9: note = Description of Artificial Sequence: Synthetic peptide; note = XENP019810 vhCDR3
TGWLGPFDY

SEQ ID NO: 747 - protein, 12 aa, synthetic construct
  source 1..12: note = Description of Artificial Sequence: Synthetic peptide; note = XENP019810 vlCDR1
RASQSVGSSYLA

SEQ ID NO: 748 - protein, 7 aa, synthetic construct
  source 1..7: note = Description of Artificial Sequence: Synthetic peptide; note = XENP019810 vlCDR2
GAFSRAT

SEQ ID NO: 749 - protein, 9 aa, synthetic construct
  source 1..9: note = Description of Artificial Sequence: Synthetic peptide; note = XENP019810 vlCDR3
QQYGSSPWT

SEQ ID NO: 750 - protein, 246 aa, synthetic construct
  source 1..246: note = Description of Artificial Sequence: Synthetic polypeptide; note = XENP019811 [CTLA-4]_H0.63_L0_scFv(GKPGS)4
QVQLVESGGGVVQPGRSLRLSCAASGFTFSSYTMHWVRQAPGKGLEWVTFISYQGNNKYYADSVKGRFTISRDNSKNTLYLQMNSLRAEDTAIYYCARTGWLGPFDYWGQGTLVTVSSGKPGSGKPGSGKPGSGKPGSEIVLTQSPGTLSLSPGERATLSCRASQSVGSSYLAWYQQKPGQAPRLLIYGAFSRATGIPDRFSGSGSGTDFTLTISRLEPEDFAVYYCQQYGSSPWTFGQGTKVEIK

SEQ ID NO: 751 - protein, 118 aa, synthetic construct
  source 1..118: note = Description of Artificial Sequence: Synthetic polypeptide; note = VH of XENP019811
QVQLVESGGGVVQPGRSLRLSCAASGFTFSSYTMHWVRQAPGKGLEWVTFISYQGNNKYYADSVKGRFTISRDNSKNTLYLQMNSLRAEDTAIYYCARTGWLGPFDYWGQGTLVTVSS

SEQ ID NO: 752 - protein, 108 aa, synthetic construct; identical to SEQ ID NO: 23
  source 1..108: note = Description of Artificial Sequence: Synthetic polypeptide; note = VL of XENP019811

SEQ ID NO: 753 - protein, 5 aa, synthetic construct
  source 1..5: note = Description of Artificial Sequence: Synthetic peptide; note = XENP019811 vhCDR1
SYTMH

SEQ ID NO: 754 - protein, 17 aa, synthetic construct
  source 1..17: note = Description of Artificial Sequence: Synthetic peptide; note = XENP019811 vhCDR2
FISYQGNNKYYADSVKG

SEQ ID NO: 755 - protein, 9 aa, synthetic construct
  source 1..9: note = Description of Artificial Sequence: Synthetic peptide; note = XENP019811 vhCDR3
TGWLGPFDY

SEQ ID NO: 756 - protein, 12 aa, synthetic construct
  source 1..12: note = Description of Artificial Sequence: Synthetic peptide; note = XENP019811 vlCDR1
RASQSVGSSYLA

SEQ ID NO: 757 - protein, 7 aa, synthetic construct
  source 1..7: note = Description of Artificial Sequence: Synthetic peptide; note = XENP019811 vlCDR2
GAFSRAT

SEQ ID NO: 758 - protein, 9 aa, synthetic construct
  source 1..9: note = Description of Artificial Sequence: Synthetic peptide; note = XENP019811 vlCDR3
QQYGSSPWT

SEQ ID NO: 759 - protein, 246 aa, synthetic construct
  source 1..246: note = Description of Artificial Sequence: Synthetic polypeptide; note = XENP019812 [CTLA-4]_H0.64_L0_scFv(GKPGS)4
QVQLVESGGGVVQPGRSLRLSCAASGFTFSSYTMHWVRQAPGKGLEWVTFISYDKNNKYYADSVKGRFTISRDNSKNTLYLQMNSLRAEDTAIYYCARTGWLGPFDYWGQGTLVTVSSGKPGSGKPGSGKPGSGKPGSEIVLTQSPGTLSLSPGERATLSCRASQSVGSSYLAWYQQKPGQAPRLLIYGAFSRATGIPDRFSGSGSGTDFTLTISRLEPEDFAVYYCQQYGSSPWTFGQGTKVEIK

SEQ ID NO: 760 - protein, 118 aa, synthetic construct
  source 1..118: note = Description of Artificial Sequence: Synthetic polypeptide; note = VH of XENP019812
QVQLVESGGGVVQPGRSLRLSCAASGFTFSSYTMHWVRQAPGKGLEWVTFISYDKNNKYYADSVKGRFTISRDNSKNTLYLQMNSLRAEDTAIYYCARTGWLGPFDYWGQGTLVTVSS

SEQ ID NO: 761 - protein, 108 aa, synthetic construct; identical to SEQ ID NO: 23
  source 1..108: note = Description of Artificial Sequence: Synthetic polypeptide; note = VL of XENP019812

SEQ ID NO: 762 - protein, 5 aa, synthetic construct
  source 1..5: note = Description of Artificial Sequence: Synthetic peptide; note = XENP019812 vhCDR1
SYTMH

SEQ ID NO: 763 - protein, 17 aa, synthetic construct
  source 1..17: note = Description of Artificial Sequence: Synthetic peptide; note = XENP019812 vhCDR2
FISYDKNNKYYADSVKG

SEQ ID NO: 764 - protein, 9 aa, synthetic construct
  source 1..9: note = Description of Artificial Sequence: Synthetic peptide; note = XENP019812 vhCDR3
TGWLGPFDY

SEQ ID NO: 765 - protein, 12 aa, synthetic construct
  source 1..12: note = Description of Artificial Sequence: Synthetic peptide; note = XENP019812 vlCDR1
RASQSVGSSYLA

SEQ ID NO: 766 - protein, 7 aa, synthetic construct
  source 1..7: note = Description of Artificial Sequence: Synthetic peptide; note = XENP019812 vlCDR2
GAFSRAT

SEQ ID NO: 767 - protein, 9 aa, synthetic construct
  source 1..9: note = Description of Artificial Sequence: Synthetic peptide; note = XENP019812 vlCDR3
QQYGSSPWT

SEQ ID NO: 768 - protein, 246 aa, synthetic construct
  source 1..246: note = Description of Artificial Sequence: Synthetic polypeptide; note = XENP019813 [CTLA-4]_H0.65_L0_scFv(GKPGS)4
QVQLVESGGGVVQPGRSLRLSCAASGFTFSSYTMHWVRQAPGKGLEWVTFISYDKNNKYYADSVKGRFTISEDNSKNTLYLQMNSLRAEDTAIYYCARTGWLGPFDYWGQGTLVTVSSGKPGSGKPGSGKPGSGKPGSEIVLTQSPGTLSLSPGERATLSCRASQSVGSSYLAWYQQKPGQAPRLLIYGAFSRATGIPDRFSGSGSGTDFTLTISRLEPEDFAVYYCQQYGSSPWTFGQGTKVEIK

SEQ ID NO: 769 - protein, 118 aa, synthetic construct
  source 1..118: note = Description of Artificial Sequence: Synthetic polypeptide; note = VH of XENP019813
QVQLVESGGGVVQPGRSLRLSCAASGFTFSSYTMHWVRQAPGKGLEWVTFISYDKNNKYYADSVKGRFTISEDNSKNTLYLQMNSLRAEDTAIYYCARTGWLGPFDYWGQGTLVTVSS

SEQ ID NO: 770 - protein, 108 aa, synthetic construct; identical to SEQ ID NO: 23
  source 1..108: note = Description of Artificial Sequence: Synthetic polypeptide; note = VL of XENP019813

SEQ ID NO: 771 - protein, 5 aa, synthetic construct
  source 1..5: note = Description of Artificial Sequence: Synthetic peptide; note = XENP019813 vhCDR1
SYTMH

SEQ ID NO: 772 - protein, 17 aa, synthetic construct
  source 1..17: note = Description of Artificial Sequence: Synthetic peptide; note = XENP019813 vhCDR2
FISYDKNNKYYADSVKG

SEQ ID NO: 773 - protein, 9 aa, synthetic construct
  source 1..9: note = Description of Artificial Sequence: Synthetic peptide; note = XENP019813 vhCDR3
TGWLGPFDY

SEQ ID NO: 774 - protein, 12 aa, synthetic construct
  source 1..12: note = Description of Artificial Sequence: Synthetic peptide; note = XENP019813 vlCDR1
RASQSVGSSYLA

SEQ ID NO: 775 - protein, 7 aa, synthetic construct
  source 1..7: note = Description of Artificial Sequence: Synthetic peptide; note = XENP019813 vlCDR2
GAFSRAT

SEQ ID NO: 776 - protein, 9 aa, synthetic construct
  source 1..9: note = Description of Artificial Sequence: Synthetic peptide; note = XENP019813 vlCDR3
QQYGSSPWT

SEQ ID NO: 777 - protein, 246 aa, synthetic construct
  source 1..246: note = Description of Artificial Sequence: Synthetic polypeptide; note = XENP019814 [CTLA-4]_H0.66_L0_scFv(GKPGS)4
QVQLVESGGGVVQPGRSLRLSCAASGFTFSSYTMHWVRQAPGKGLEWVTFISYDGDNKYYADSVKGRFTISRDNSKNTLYLQMNSLRAEDTAIYYCARTGWLGPFDYWGQGTLVTVSSGKPGSGKPGSGKPGSGKPGSEIVLTQSPGTLSLSPGERATLSCRASQSVGSSYLAWYQQKPGQAPRLLIYGAFSRATGIPDRFSGSGSGTDFTLTISRLEPEDFAVYYCQQYGSSPWTFGQGTKVEIK

SEQ ID NO: 778 - protein, 118 aa, synthetic construct
  source 1..118: note = Description of Artificial Sequence: Synthetic polypeptide; note = VH of XENP019814
QVQLVESGGGVVQPGRSLRLSCAASGFTFSSYTMHWVRQAPGKGLEWVTFISYDGDNKYYADSVKGRFTISRDNSKNTLYLQMNSLRAEDTAIYYCARTGWLGPFDYWGQGTLVTVSS

SEQ ID NO: 779 - protein, 108 aa, synthetic construct; identical to SEQ ID NO: 23
  source 1..108: note = Description of Artificial Sequence: Synthetic polypeptide; note = VL of XENP019814

SEQ ID NO: 780 - protein, 5 aa, synthetic construct
  source 1..5: note = Description of Artificial Sequence: Synthetic peptide; note = XENP019814 vhCDR1
SYTMH

SEQ ID NO: 781 - protein, 17 aa, synthetic construct
  source 1..17: note = Description of Artificial Sequence: Synthetic peptide; note = XENP019814 vhCDR2
FISYDGDNKYYADSVKG

SEQ ID NO: 782 - protein, 9 aa, synthetic construct
  source 1..9: note = Description of Artificial Sequence: Synthetic peptide; note = XENP019814 vhCDR3
TGWLGPFDY

SEQ ID NO: 783 - protein, 12 aa, synthetic construct
  source 1..12: note = Description of Artificial Sequence: Synthetic peptide; note = XENP019814 vlCDR1
RASQSVGSSYLA

SEQ ID NO: 784 - protein, 7 aa, synthetic construct
  source 1..7: note = Description of Artificial Sequence: Synthetic peptide; note = XENP019814 vlCDR2
GAFSRAT

SEQ ID NO: 785 - protein, 9 aa, synthetic construct
  source 1..9: note = Description of Artificial Sequence: Synthetic peptide; note = XENP019814 vlCDR3
QQYGSSPWT

SEQ ID NO: 786 - protein, 246 aa, synthetic construct
  source 1..246: note = Description of Artificial Sequence: Synthetic polypeptide; note = XENP019815 [CTLA-4]_H0.67_L0_scFv(GKPGS)4
QVQLVESGGGVVQPGRSLRLSCAASGFTFSSYTMHWVRQAPGKGLEWVTFISYDGGNKYYADSVKGRFTISRDNSKNTLYLQMNSLRAEDTAIYYCARTGWLGPFDYWGQGTLVTVSSGKPGSGKPGSGKPGSGKPGSEIVLTQSPGTLSLSPGERATLSCRASQSVGSSYLAWYQQKPGQAPRLLIYGAFSRATGIPDRFSGSGSGTDFTLTISRLEPEDFAVYYCQQYGSSPWTFGQGTKVEIK

SEQ ID NO: 787 - protein, 118 aa, synthetic construct
  source 1..118: note = Description of Artificial Sequence: Synthetic polypeptide; note = VH of XENP019815
QVQLVESGGGVVQPGRSLRLSCAASGFTFSSYTMHWVRQAPGKGLEWVTFISYDGGNKYYADSVKGRFTISRDNSKNTLYLQMNSLRAEDTAIYYCARTGWLGPFDYWGQGTLVTVSS

SEQ ID NO: 788 - protein, 108 aa, synthetic construct; identical to SEQ ID NO: 23
  source 1..108: note = Description of Artificial Sequence: Synthetic polypeptide; note = VL of XENP019815

SEQ ID NO: 789 - protein, 5 aa, synthetic construct
  source 1..5: note = Description of Artificial Sequence: Synthetic peptide; note = XENP019815 vhCDR1
SYTMH

SEQ ID NO: 790 - protein, 17 aa, synthetic construct
  source 1..17: note = Description of Artificial Sequence: Synthetic peptide; note = XENP019815 vhCDR2
FISYDGGNKYYADSVKG

SEQ ID NO: 791 - protein, 9 aa, synthetic construct
  source 1..9: note = Description of Artificial Sequence: Synthetic peptide; note = XENP019815 vhCDR3
TGWLGPFDY

SEQ ID NO: 792 - protein, 12 aa, synthetic construct
  source 1..12: note = Description of Artificial Sequence: Synthetic peptide; note = XENP019815 vlCDR1
RASQSVGSSYLA

SEQ ID NO: 793 - protein, 7 aa, synthetic construct
  source 1..7: note = Description of Artificial Sequence: Synthetic peptide; note = XENP019815 vlCDR2
GAFSRAT

SEQ ID NO: 794 - protein, 9 aa, synthetic construct
  source 1..9: note = Description of Artificial Sequence: Synthetic peptide; note = XENP019815 vlCDR3
QQYGSSPWT

SEQ ID NO: 795 - protein, 246 aa, synthetic construct
  source 1..246: note = Description of Artificial Sequence: Synthetic polypeptide; note = XENP019816 [CTLA-4]_H0.68_L0_scFv(GKPGS)4
QVQLVESGGGVVQPGRSLRLSCAASGFTFSSYTMHWVRQAPGKGLEWVTFISYDGHNKYYADSVKGRFTISRDNSKNTLYLQMNSLRAEDTAIYYCARTGWLGPFDYWGQGTLVTVSSGKPGSGKPGSGKPGSGKPGSEIVLTQSPGTLSLSPGERATLSCRASQSVGSSYLAWYQQKPGQAPRLLIYGAFSRATGIPDRFSGSGSGTDFTLTISRLEPEDFAVYYCQQYGSSPWTFGQGTKVEIK

SEQ ID NO: 796 - protein, 118 aa, synthetic construct
  source 1..118: note = Description of Artificial Sequence: Synthetic polypeptide; note = VH of XENP019816
QVQLVESGGGVVQPGRSLRLSCAASGFTFSSYTMHWVRQAPGKGLEWVTFISYDGHNKYYADSVKGRFTISRDNSKNTLYLQMNSLRAEDTAIYYCARTGWLGPFDYWGQGTLVTVSS

SEQ ID NO: 797 - protein, 108 aa, synthetic construct; identical to SEQ ID NO: 23
  source 1..108: note = Description of Artificial Sequence: Synthetic polypeptide; note = VL of XENP019816

SEQ ID NO: 798 - protein, 5 aa, synthetic construct
  source 1..5: note = Description of Artificial Sequence: Synthetic peptide; note = XENP019816 vhCDR1
SYTMH

SEQ ID NO: 799 - protein, 17 aa, synthetic construct
  source 1..17: note = Description of Artificial Sequence: Synthetic peptide; note = XENP019816 vhCDR2
FISYDGHNKYYADSVKG

SEQ ID NO: 800 - protein, 9 aa, synthetic construct
  source 1..9: note = Description of Artificial Sequence: Synthetic peptide; note = XENP019816 vhCDR3
TGWLGPFDY

SEQ ID NO: 801 - protein, 12 aa, synthetic construct
  source 1..12: note = Description of Artificial Sequence: Synthetic peptide; note = XENP019816 vlCDR1
RASQSVGSSYLA

SEQ ID NO: 802 - protein, 7 aa, synthetic construct
  source 1..7: note = Description of Artificial Sequence: Synthetic peptide; note = XENP019816 vlCDR2
GAFSRAT

SEQ ID NO: 803 - protein, 9 aa, synthetic construct
  source 1..9: note = Description of Artificial Sequence: Synthetic peptide; note = XENP019816 vlCDR3
QQYGSSPWT

SEQ ID NO: 804 - protein, 246 aa, synthetic construct
  source 1..246: note = Description of Artificial Sequence: Synthetic polypeptide; note = XENP019817 [CTLA-4]_H0.69_L0_scFv(GKPGS)4
QVQLVESGGGVVQPGRSLRLSCAASGFTFSSYTMHWVRQAPGKGLEWVTFISYDGQNKYYADSVKGRFTISRDNSKNTLYLQMNSLRAEDTAIYYCARTGWLGPFDYWGQGTLVTVSSGKPGSGKPGSGKPGSGKPGSEIVLTQSPGTLSLSPGERATLSCRASQSVGSSYLAWYQQKPGQAPRLLIYGAFSRATGIPDRFSGSGSGTDFTLTISRLEPEDFAVYYCQQYGSSPWTFGQGTKVEIK

SEQ ID NO: 805 - protein, 118 aa, synthetic construct
  source 1..118: note = Description of Artificial Sequence: Synthetic polypeptide; note = VH of XENP019817
QVQLVESGGGVVQPGRSLRLSCAASGFTFSSYTMHWVRQAPGKGLEWVTFISYDGQNKYYADSVKGRFTISRDNSKNTLYLQMNSLRAEDTAIYYCARTGWLGPFDYWGQGTLVTVSS

SEQ ID NO: 806 - protein, 108 aa, synthetic construct; identical to SEQ ID NO: 23
  source 1..108: note = Description of Artificial Sequence: Synthetic polypeptide; note = VL of XENP019817

SEQ ID NO: 807 - protein, 5 aa, synthetic construct
  source 1..5: note = Description of Artificial Sequence: Synthetic peptide; note = XENP019817 vhCDR1
SYTMH

SEQ ID NO: 808 - protein, 17 aa, synthetic construct
  source 1..17: note = Description of Artificial Sequence: Synthetic peptide; note = XENP019817 vhCDR2
FISYDGQNKYYADSVKG

SEQ ID NO: 809 - protein, 9 aa, synthetic construct
  source 1..9: note = Description of Artificial Sequence: Synthetic peptide; note = XENP019817 vhCDR3
TGWLGPFDY

SEQ ID NO: 810 - protein, 12 aa, synthetic construct
  source 1..12: note = Description of Artificial Sequence: Synthetic peptide; note = XENP019817 vlCDR1
RASQSVGSSYLA

SEQ ID NO: 811 - protein, 7 aa, synthetic construct
  source 1..7: note = Description of Artificial Sequence: Synthetic peptide; note = XENP019817 vlCDR2
GAFSRAT

SEQ ID NO: 812 - protein, 9 aa, synthetic construct
  source 1..9: note = Description of Artificial Sequence: Synthetic peptide; note = XENP019817 vlCDR3
QQYGSSPWT

SEQ ID NO: 813 - protein, 246 aa, synthetic construct
  source 1..246: note = Description of Artificial Sequence: Synthetic polypeptide; note = XENP019818 [CTLA-4]_H0.70_L0_scFv(GKPGS)4
QVQLVESGGGVVQPGRSLRLSCAASGFTFSSYTMHWVRQAPGKGLEWVTFISYDGSNKYYADSVKGRFTISRDNSKNTLYLQMNSLRAEDTAIYYCARTGWLGPFDYWGQGTLVTVSSGKPGSGKPGSGKPGSGKPGSEIVLTQSPGTLSLSPGERATLSCRASQSVGSSYLAWYQQKPGQAPRLLIYGAFSRATGIPDRFSGSGSGTDFTLTISRLEPEDFAVYYCQQYGSSPWTFGQGTKVEIK

SEQ ID NO: 814 - protein, 118 aa, synthetic construct
  source 1..118: note = Description of Artificial Sequence: Synthetic polypeptide; note = VH of XENP019818
QVQLVESGGGVVQPGRSLRLSCAASGFTFSSYTMHWVRQAPGKGLEWVTFISYDGSNKYYADSVKGRFTISRDNSKNTLYLQMNSLRAEDTAIYYCARTGWLGPFDYWGQGTLVTVSS

SEQ ID NO: 815 - protein, 108 aa, synthetic construct; identical to SEQ ID NO: 23
  source 1..108: note = Description of Artificial Sequence: Synthetic polypeptide; note = VL of XENP019818

SEQ ID NO: 816 - protein, 5 aa, synthetic construct
  source 1..5: note = Description of Artificial Sequence: Synthetic peptide; note = XENP019818 vhCDR1
SYTMH

SEQ ID NO: 817 - protein, 17 aa, synthetic construct
  source 1..17: note = Description of Artificial Sequence: Synthetic peptide; note = XENP019818 vhCDR2
FISYDGSNKYYADSVKG

SEQ ID NO: 818 - protein, 9 aa, synthetic construct
  source 1..9: note = Description of Artificial Sequence: Synthetic peptide; note = XENP019818 vhCDR3
TGWLGPFDY

SEQ ID NO: 819 - protein, 12 aa, synthetic construct
  source 1..12: note = Description of Artificial Sequence: Synthetic peptide; note = XENP019818 vlCDR1
RASQSVGSSYLA

SEQ ID NO: 820 - protein, 7 aa, synthetic construct
  source 1..7: note = Description of Artificial Sequence: Synthetic peptide; note = XENP019818 vlCDR2
GAFSRAT

SEQ ID NO: 821 - protein, 9 aa, synthetic construct
  source 1..9: note = Description of Artificial Sequence: Synthetic peptide; note = XENP019818 vlCDR3
QQYGSSPWT

SEQ ID NO: 822 - protein, 246 aa, synthetic construct
  source 1..246: note = Description of Artificial Sequence: Synthetic polypeptide; note = XENP019819 [CTLA-4]_H0.71_L0_scFv(GKPGS)4
QVQLVESGGGVVQPGRSLRLSCAASGFTFSSYTMHWVRQAPGKGLEWVTFISYDGNDKYYADSVKGRFTISRDNSKNTLYLQMNSLRAEDTAIYYCARTGWLGPFDYWGQGTLVTVSSGKPGSGKPGSGKPGSGKPGSEIVLTQSPGTLSLSPGERATLSCRASQSVGSSYLAWYQQKPGQAPRLLIYGAFSRATGIPDRFSGSGSGTDFTLTISRLEPEDFAVYYCQQYGSSPWTFGQGTKVEIK

SEQ ID NO: 823 - protein, 118 aa, synthetic construct
  source 1..118: note = Description of Artificial Sequence: Synthetic polypeptide; note = VH of XENP019819
QVQLVESGGGVVQPGRSLRLSCAASGFTFSSYTMHWVRQAPGKGLEWVTFISYDGNDKYYADSVKGRFTISRDNSKNTLYLQMNSLRAEDTAIYYCARTGWLGPFDYWGQGTLVTVSS

SEQ ID NO: 824 - protein, 108 aa, synthetic construct; identical to SEQ ID NO: 23
  source 1..108: note = Description of Artificial Sequence: Synthetic polypeptide; note = VL of XENP019819

SEQ ID NO: 825 - protein, 5 aa, synthetic construct
  source 1..5: note = Description of Artificial Sequence: Synthetic peptide; note = XENP019819 vhCDR1
SYTMH

SEQ ID NO: 826 - protein, 17 aa, synthetic construct
  source 1..17: note = Description of Artificial Sequence: Synthetic peptide; note = XENP019819 vhCDR2
FISYDGNDKYYADSVKG

SEQ ID NO: 827 - protein, 9 aa, synthetic construct
  source 1..9: note = Description of Artificial Sequence: Synthetic peptide; note = XENP019819 vhCDR3
TGWLGPFDY

SEQ ID NO: 828 - protein, 12 aa, synthetic construct
  source 1..12: note = Description of Artificial Sequence: Synthetic peptide; note = XENP019819 vlCDR1
RASQSVGSSYLA

SEQ ID NO: 829 - protein, 7 aa, synthetic construct
  source 1..7: note = Description of Artificial Sequence: Synthetic peptide; note = XENP019819 vlCDR2
GAFSRAT

SEQ ID NO: 830 - protein, 9 aa, synthetic construct
  source 1..9: note = Description of Artificial Sequence: Synthetic peptide; note = XENP019819 vlCDR3
QQYGSSPWT

SEQ ID NO: 831 - protein, 246 aa, synthetic construct
  source 1..246: note = Description of Artificial Sequence: Synthetic polypeptide; note = XENP019820 [CTLA-4]_H0.72_L0_scFv(GKPGS)4
QVQLVESGGGVVQPGRSLRLSCAASGFTFSSYTMHWVRQAPGKGLEWVTFISYDGNEKYYADSVKGRFTISRDNSKNTLYLQMNSLRAEDTAIYYCARTGWLGPFDYWGQGTLVTVSSGKPGSGKPGSGKPGSGKPGSEIVLTQSPGTLSLSPGERATLSCRASQSVGSSYLAWYQQKPGQAPRLLIYGAFSRATGIPDRFSGSGSGTDFTLTISRLEPEDFAVYYCQQYGSSPWTFGQGTKVEIK

SEQ ID NO: 832 - protein, 118 aa, synthetic construct
  source 1..118: note = Description of Artificial Sequence: Synthetic polypeptide; note = VH of XENP019820
QVQLVESGGGVVQPGRSLRLSCAASGFTFSSYTMHWVRQAPGKGLEWVTFISYDGNEKYYADSVKGRFTISRDNSKNTLYLQMNSLRAEDTAIYYCARTGWLGPFDYWGQGTLVTVSS

SEQ ID NO: 833 - protein, 108 aa, synthetic construct; identical to SEQ ID NO: 23
  source 1..108: note = Description of Artificial Sequence: Synthetic polypeptide; note = VL of XENP019820

SEQ ID NO: 834 - protein, 5 aa, synthetic construct
  source 1..5: note = Description of Artificial Sequence: Synthetic peptide; note = XENP019820 vhCDR1
SYTMH

SEQ ID NO: 835 - protein, 17 aa, synthetic construct
  source 1..17: note = Description of Artificial Sequence: Synthetic peptide; note = XENP019820 vhCDR2
FISYDGNEKYYADSVKG

SEQ ID NO: 836 - protein, 9 aa, synthetic construct
  source 1..9: note = Description of Artificial Sequence: Synthetic peptide; note = XENP019820 vhCDR3
TGWLGPFDY

SEQ ID NO: 837 - protein, 12 aa, synthetic construct
  source 1..12: note = Description of Artificial Sequence: Synthetic peptide; note = XENP019820 vlCDR1
RASQSVGSSYLA

SEQ ID NO: 838 - protein, 7 aa, synthetic construct
  source 1..7: note = Description of Artificial Sequence: Synthetic peptide; note = XENP019820 vlCDR2
GAFSRAT

SEQ ID NO: 839 - protein, 9 aa, synthetic construct
  source 1..9: note = Description of Artificial Sequence: Synthetic peptide; note = XENP019820 vlCDR3
QQYGSSPWT

SEQ ID NO: 840 - protein, 246 aa, synthetic construct
  source 1..246: note = Description of Artificial Sequence: Synthetic polypeptide; note = XENP019821 [CTLA-4]_H0.73_L0_scFv(GKPGS)4
QVQLVESGGGVVQPGRSLRLSCAASGFTFSSYTMHWVRQAPGKGLEWVTFISYDGNHKYYADSVKGRFTISRDNSKNTLYLQMNSLRAEDTAIYYCARTGWLGPFDYWGQGTLVTVSSGKPGSGKPGSGKPGSGKPGSEIVLTQSPGTLSLSPGERATLSCRASQSVGSSYLAWYQQKPGQAPRLLIYGAFSRATGIPDRFSGSGSGTDFTLTISRLEPEDFAVYYCQQYGSSPWTFGQGTKVEIK

SEQ ID NO: 841 - protein, 118 aa, synthetic construct
  source 1..118: note = Description of Artificial Sequence: Synthetic polypeptide; note = VH of XENP019821
QVQLVESGGGVVQPGRSLRLSCAASGFTFSSYTMHWVRQAPGKGLEWVTFISYDGNHKYYADSVKGRFTISRDNSKNTLYLQMNSLRAEDTAIYYCARTGWLGPFDYWGQGTLVTVSS

SEQ ID NO: 842 - protein, 108 aa, synthetic construct; identical to SEQ ID NO: 23
  source 1..108: note = Description of Artificial Sequence: Synthetic polypeptide; note = VL of XENP019821

SEQ ID NO: 843 - protein, 5 aa, synthetic construct
  source 1..5: note = Description of Artificial Sequence: Synthetic peptide; note = XENP019821 vhCDR1
SYTMH

SEQ ID NO: 844 - protein, 17 aa, synthetic construct
  source 1..17: note = Description of Artificial Sequence: Synthetic peptide; note = XENP019821 vhCDR2
FISYDGNHKYYADSVKG

SEQ ID NO: 845 - protein, 9 aa, synthetic construct
  source 1..9: note = Description of Artificial Sequence: Synthetic peptide; note = XENP019821 vhCDR3
TGWLGPFDY

SEQ ID NO: 846 - protein, 12 aa, synthetic construct
  source 1..12: note = Description of Artificial Sequence: Synthetic peptide; note = XENP019821 vlCDR1
RASQSVGSSYLA

SEQ ID NO: 847 - protein, 7 aa, synthetic construct
  source 1..7: note = Description of Artificial Sequence: Synthetic peptide; note = XENP019821 vlCDR2
GAFSRAT

SEQ ID NO: 848 - protein, 9 aa, synthetic construct
  source 1..9: note = Description of Artificial Sequence: Synthetic peptide; note = XENP019821 vlCDR3
QQYGSSPWT

SEQ ID NO: 849 - protein, 246 aa, synthetic construct
  source 1..246: note = Description of Artificial Sequence: Synthetic polypeptide; note = XENP019822 [CTLA-4]_H0.74_L0_scFv(GKPGS)4
QVQLVESGGGVVQPGRSLRLSCAASGFTFSSYTMHWVRQAPGKGLEWVTFISYDGNSKYYADSVKGRFTISRDNSKNTLYLQMNSLRAEDTAIYYCARTGWLGPFDYWGQGTLVTVSSGKPGSGKPGSGKPGSGKPGSEIVLTQSPGTLSLSPGERATLSCRASQSVGSSYLAWYQQKPGQAPRLLIYGAFSRATGIPDRFSGSGSGTDFTLTISRLEPEDFAVYYCQQYGSSPWTFGQGTKVEIK

SEQ ID NO: 850 - protein, 118 aa, synthetic construct
  source 1..118: note = Description of Artificial Sequence: Synthetic polypeptide; note = VH of XENP019822
QVQLVESGGGVVQPGRSLRLSCAASGFTFSSYTMHWVRQAPGKGLEWVTFISYDGNSKYYADSVKGRFTISRDNSKNTLYLQMNSLRAEDTAIYYCARTGWLGPFDYWGQGTLVTVSS

SEQ ID NO: 851 - protein, 108 aa, synthetic construct; identical to SEQ ID NO: 23
  source 1..108: note = Description of Artificial Sequence: Synthetic polypeptide; note = VL of XENP019822

SEQ ID NO: 852 - protein, 5 aa, synthetic construct
  source 1..5: note = Description of Artificial Sequence: Synthetic peptide; note = XENP019822 vhCDR1
SYTMH

SEQ ID NO: 853 - protein, 17 aa, synthetic construct
  source 1..17: note = Description of Artificial Sequence: Synthetic peptide; note = XENP019822 vhCDR2
FISYDGNSKYYADSVKG

SEQ ID NO: 854 - protein, 9 aa, synthetic construct
  source 1..9: note = Description of Artificial Sequence: Synthetic peptide; note = XENP019822 vhCDR3
TGWLGPFDY

SEQ ID NO: 855 - protein, 12 aa, synthetic construct
  source 1..12: note = Description of Artificial Sequence: Synthetic peptide; note = XENP019822 vlCDR1
RASQSVGSSYLA

SEQ ID NO: 856 - protein, 7 aa, synthetic construct
  source 1..7: note = Description of Artificial Sequence: Synthetic peptide; note = XENP019822 vlCDR2
GAFSRAT

SEQ ID NO: 857 - protein, 9 aa, synthetic construct
  source 1..9: note = Description of Artificial Sequence: Synthetic peptide; note = XENP019822 vlCDR3
QQYGSSPWT

SEQ ID NO: 858 - protein, 246 aa, synthetic construct
  source 1..246: note = Description of Artificial Sequence: Synthetic polypeptide; note = XENP019823 [CTLA-4]_H0.75_L0_scFv(GKPGS)4
QVQLVESGGGVVQPGRSLRLSCAASGFTFSSYTMHWVRQAPGKGLEWVTFISYDGNTKYYADSVKGRFTISRDNSKNTLYLQMNSLRAEDTAIYYCARTGWLGPFDYWGQGTLVTVSSGKPGSGKPGSGKPGSGKPGSEIVLTQSPGTLSLSPGERATLSCRASQSVGSSYLAWYQQKPGQAPRLLIYGAFSRATGIPDRFSGSGSGTDFTLTISRLEPEDFAVYYCQQYGSSPWTFGQGTKVEIK

SEQ ID NO: 859 - protein, 118 aa, synthetic construct
  source 1..118: note = Description of Artificial Sequence: Synthetic polypeptide; note = VH of XENP019823
QVQLVESGGGVVQPGRSLRLSCAASGFTFSSYTMHWVRQAPGKGLEWVTFISYDGNTKYYADSVKGRFTISRDNSKNTLYLQMNSLRAEDTAIYYCARTGWLGPFDYWGQGTLVTVSS

SEQ ID NO: 860 - protein, 108 aa, synthetic construct; identical to SEQ ID NO: 23
  source 1..108: note = Description of Artificial Sequence: Synthetic polypeptide; note = VL of XENP019823

SEQ ID NO: 861 - protein, 5 aa, synthetic construct
  source 1..5: note = Description of Artificial Sequence: Synthetic peptide; note = XENP019823 vhCDR1
SYTMH

SEQ ID NO: 862 - protein, 17 aa, synthetic construct
  source 1..17: note = Description of Artificial Sequence: Synthetic peptide; note = XENP019823 vhCDR2
FISYDGNTKYYADSVKG

SEQ ID NO: 863 - protein, 9 aa, synthetic construct
  source 1..9: note = Description of Artificial Sequence: Synthetic peptide; note = XENP019823 vhCDR3
TGWLGPFDY

SEQ ID NO: 864 - protein, 12 aa, synthetic construct
  source 1..12: note = Description of Artificial Sequence: Synthetic peptide; note = XENP019823 vlCDR1
RASQSVGSSYLA

SEQ ID NO: 865 - protein, 7 aa, synthetic construct
  source 1..7: note = Description of Artificial Sequence: Synthetic peptide; note = XENP019823 vlCDR2
GAFSRAT

SEQ ID NO: 866 - protein, 9 aa, synthetic construct
  source 1..9: note = Description of Artificial Sequence: Synthetic peptide; note = XENP019823 vlCDR3
QQYGSSPWT

SEQ ID NO: 867 - protein, 246 aa, synthetic construct
  source 1..246: note = Description of Artificial Sequence: Synthetic polypeptide; note = XENP019824 [CTLA-4]_H0.76_L0_scFv(GKPGS)4
QVQLVESGGGVVQPGRSLRLSCAASGFTFSSYTMHWVRQAPGKGLEWVTFISYDGNQKYYADSVKGRFTISRDNSKNTLYLQMNSLRAEDTAIYYCARTGWLGPFDYWGQGTLVTVSSGKPGSGKPGSGKPGSGKPGSEIVLTQSPGTLSLSPGERATLSCRASQSVGSSYLAWYQQKPGQAPRLLIYGAFSRATGIPDRFSGSGSGTDFTLTISRLEPEDFAVYYCQQYGSSPWTFGQGTKVEIK

SEQ ID NO: 868 - protein, 118 aa, synthetic construct
  source 1..118: note = Description of Artificial Sequence: Synthetic polypeptide; note = VH of XENP019824
QVQLVESGGGVVQPGRSLRLSCAASGFTFSSYTMHWVRQAPGKGLEWVTFISYDGNQKYYADSVKGRFTISRDNSKNTLYLQMNSLRAEDTAIYYCARTGWLGPFDYWGQGTLVTVSS

SEQ ID NO: 869 - protein, 108 aa, synthetic construct; identical to SEQ ID NO: 23
  source 1..108: note = Description of Artificial Sequence: Synthetic polypeptide; note = VL of XENP019824

SEQ ID NO: 870 - protein, 5 aa, synthetic construct
  source 1..5: note = Description of Artificial Sequence: Synthetic peptide; note = XENP019824 vhCDR1
SYTMH

SEQ ID NO: 871 - protein, 17 aa, synthetic construct
  source 1..17: note = Description of Artificial Sequence: Synthetic peptide; note = XENP019824 vhCDR2
FISYDGNQKYYADSVKG

SEQ ID NO: 872 - protein, 9 aa, synthetic construct
  source 1..9: note = Description of Artificial Sequence: Synthetic peptide; note = XENP019824 vhCDR3
TGWLGPFDY

SEQ ID NO: 873 - protein, 12 aa, synthetic construct
  source 1..12: note = Description of Artificial Sequence: Synthetic peptide; note = XENP019824 vlCDR1
RASQSVGSSYLA

SEQ ID NO: 874 - protein, 7 aa, synthetic construct
  source 1..7: note = Description of Artificial Sequence: Synthetic peptide; note = XENP019824 vlCDR2
GAFSRAT

SEQ ID NO: 875 - protein, 9 aa, synthetic construct
  source 1..9: note = Description of Artificial Sequence: Synthetic peptide; note = XENP019824 vlCDR3
QQYGSSPWT

SEQ ID NO: 876 - protein, 246 aa, synthetic construct
  source 1..246: note = Description of Artificial Sequence: Synthetic polypeptide; note = XENP019825 [CTLA-4]_H0.77_L0_scFv(GKPGS)4
QVQLVESGGGVVQPGRSLRLSCAASGFTFSSYTMHWVRQAPGKGLEWVTFISYDGNNIYYADSVKGRFTISRDNSKNTLYLQMNSLRAEDTAIYYCARTGWLGPFDYWGQGTLVTVSSGKPGSGKPGSGKPGSGKPGSEIVLTQSPGTLSLSPGERATLSCRASQSVGSSYLAWYQQKPGQAPRLLIYGAFSRATGIPDRFSGSGSGTDFTLTISRLEPEDFAVYYCQQYGSSPWTFGQGTKVEIK

SEQ ID NO: 877 - protein, 118 aa, synthetic construct
  source 1..118: note = Description of Artificial Sequence: Synthetic polypeptide; note = VH of XENP019825
QVQLVESGGGVVQPGRSLRLSCAASGFTFSSYTMHWVRQAPGKGLEWVTFISYDGNNIYYADSVKGRFTISRDNSKNTLYLQMNSLRAEDTAIYYCARTGWLGPFDYWGQGTLVTVSS

SEQ ID NO: 878 - protein, 108 aa, synthetic construct; identical to SEQ ID NO: 23
  source 1..108: note = Description of Artificial Sequence: Synthetic polypeptide; note = VL of XENP019825

SEQ ID NO: 879 - protein, 5 aa, synthetic construct
  source 1..5: note = Description of Artificial Sequence: Synthetic peptide; note = XENP019825 vhCDR1
SYTMH

SEQ ID NO: 880 - protein, 17 aa, synthetic construct
  source 1..17: note = Description of Artificial Sequence: Synthetic peptide; note = XENP019825 vhCDR2
FISYDGNNIYYADSVKG

SEQ ID NO: 881 - protein, 9 aa, synthetic construct
  source 1..9: note = Description of Artificial Sequence: Synthetic peptide; note = XENP019825 vhCDR3
TGWLGPFDY

SEQ ID NO: 882 - protein, 12 aa, synthetic construct
  source 1..12: note = Description of Artificial Sequence: Synthetic peptide; note = XENP019825 vlCDR1
RASQSVGSSYLA

SEQ ID NO: 883 - protein, 7 aa, synthetic construct
  source 1..7: note = Description of Artificial Sequence: Synthetic peptide; note = XENP019825 vlCDR2
GAFSRAT

SEQ ID NO: 884 - protein, 9 aa, synthetic construct
  source 1..9: note = Description of Artificial Sequence: Synthetic peptide; note = XENP019825 vlCDR3
QQYGSSPWT

SEQ ID NO: 885 - protein, 246 aa, synthetic construct
  source 1..246: note = Description of Artificial Sequence: Synthetic polypeptide; note = XENP019826 [CTLA-4]_H0.78_L0_scFv(GKPGS)4
QVQLVESGGGVVQPGRSLRLSCAASGFTFSSYTMHWVRQAPGKGLEWVTFISYDGNNTYYADSVKGRFTISRDNSKNTLYLQMNSLRAEDTAIYYCARTGWLGPFDYWGQGTLVTVSSGKPGSGKPGSGKPGSGKPGSEIVLTQSPGTLSLSPGERATLSCRASQSVGSSYLAWYQQKPGQAPRLLIYGAFSRATGIPDRFSGSGSGTDFTLTISRLEPEDFAVYYCQQYGSSPWTFGQGTKVEIK

SEQ ID NO: 886 - protein, 118 aa, synthetic construct
  source 1..118: note = Description of Artificial Sequence: Synthetic polypeptide; note = VH of XENP019826
QVQLVESGGGVVQPGRSLRLSCAASGFTFSSYTMHWVRQAPGKGLEWVTFISYDGNNTYYADSVKGRFTISRDNSKNTLYLQMNSLRAEDTAIYYCARTGWLGPFDYWGQGTLVTVSS

SEQ ID NO: 887 - protein, 108 aa, synthetic construct; identical to SEQ ID NO: 23
  source 1..108: note = Description of Artificial Sequence: Synthetic polypeptide; note = VL of XENP019826

SEQ ID NO: 888 - protein, 5 aa, synthetic construct
  source 1..5: note = Description of Artificial Sequence: Synthetic peptide; note = XENP019826 vhCDR1
SYTMH

SEQ ID NO: 889 - protein, 17 aa, synthetic construct
  source 1..17: note = Description of Artificial Sequence: Synthetic peptide; note = XENP019826 vhCDR2
FISYDGNNTYYADSVKG

SEQ ID NO: 890 - protein, 9 aa, synthetic construct
  source 1..9: note = Description of Artificial Sequence: Synthetic peptide; note = XENP019826 vhCDR3
TGWLGPFDY

SEQ ID NO: 891 - protein, 12 aa, synthetic construct
  source 1..12: note = Description of Artificial Sequence: Synthetic peptide; note = XENP019826 vlCDR1
RASQSVGSSYLA

SEQ ID NO: 892 - protein, 7 aa, synthetic construct
  source 1..7: note = Description of Artificial Sequence: Synthetic peptide; note = XENP019826 vlCDR2
GAFSRAT

SEQ ID NO: 893 - protein, 9 aa, synthetic construct
  source 1..9: note = Description of Artificial Sequence: Synthetic peptide; note = XENP019826 vlCDR3
QQYGSSPWT

SEQ ID NO: 894 - protein, 246 aa, synthetic construct
  source 1..246: note = Description of Artificial Sequence: Synthetic polypeptide; note = XENP019827 [CTLA-4]_H0.79_L0_scFv(GKPGS)4
QVQLVESGGGVVQPGRSLRLSCAASGFTFSSYTMHWVRQAPGKGLEWVTFISYDGNNKAYADSVKGRFTISRDNSKNTLYLQMNSLRAEDTAIYYCARTGWLGPFDYWGQGTLVTVSSGKPGSGKPGSGKPGSGKPGSEIVLTQSPGTLSLSPGERATLSCRASQSVGSSYLAWYQQKPGQAPRLLIYGAFSRATGIPDRFSGSGSGTDFTLTISRLEPEDFAVYYCQQYGSSPWTFGQGTKVEIK

SEQ ID NO: 895 - protein, 118 aa, synthetic construct
  source 1..118: note = Description of Artificial Sequence: Synthetic polypeptide; note = VH of XENP019827
QVQLVESGGGVVQPGRSLRLSCAASGFTFSSYTMHWVRQAPGKGLEWVTFISYDGNNKAYADSVKGRFTISRDNSKNTLYLQMNSLRAEDTAIYYCARTGWLGPFDYWGQGTLVTVSS

SEQ ID NO: 896 - protein, 108 aa, synthetic construct; identical to SEQ ID NO: 23
  source 1..108: note = Description of Artificial Sequence: Synthetic polypeptide; note = VL of XENP019827

SEQ ID NO: 897 - protein, 5 aa, synthetic construct
  source 1..5: note = Description of Artificial Sequence: Synthetic peptide; note = XENP019827 vhCDR1
SYTMH

SEQ ID NO: 898 - protein, 17 aa, synthetic construct
  source 1..17: note = Description of Artificial Sequence: Synthetic peptide; note = XENP019827 vhCDR2
FISYDGNNKAYADSVKG

SEQ ID NO: 899 - protein, 9 aa, synthetic construct
  source 1..9: note = Description of Artificial Sequence: Synthetic peptide; note = XENP019827 vhCDR3
TGWLGPFDY

SEQ ID NO: 900 - protein, 12 aa, synthetic construct
  source 1..12: note = Description of Artificial Sequence: Synthetic peptide; note = XENP019827 vlCDR1
RASQSVGSSYLA

SEQ ID NO: 901 - protein, 7 aa, synthetic construct
  source 1..7: note = Description of Artificial Sequence: Synthetic peptide; note = XENP019827 vlCDR2
GAFSRAT

SEQ ID NO: 902 - protein, 9 aa, synthetic construct
  source 1..9: note = Description of Artificial Sequence: Synthetic peptide; note = XENP019827 vlCDR3
QQYGSSPWT

SEQ ID NO: 903 - protein, 246 aa, synthetic construct
  source 1..246: note = Description of Artificial Sequence: Synthetic polypeptide; note = XENP019828 [CTLA-4]_H0.80_L0_scFv(GKPGS)4
QVQLVESGGGVVQPGRSLRLSCAASGFTFSSYTMHWVRQAPGKGLEWVTFISYDGNNKYYAASVKGRFTISRDNSKNTLYLQMNSLRAEDTAIYYCARTGWLGPFDYWGQGTLVTVSSGKPGSGKPGSGKPGSGKPGSEIVLTQSPGTLSLSPGERATLSCRASQSVGSSYLAWYQQKPGQAPRLLIYGAFSRATGIPDRFSGSGSGTDFTLTISRLEPEDFAVYYCQQYGSSPWTFGQGTKVEIK

SEQ ID NO: 904 - protein, 118 aa, synthetic construct
  source 1..118: note = Description of Artificial Sequence: Synthetic polypeptide; note = VH of XENP019828
QVQLVESGGGVVQPGRSLRLSCAASGFTFSSYTMHWVRQAPGKGLEWVTFISYDGNNKYYAASVKGRFTISRDNSKNTLYLQMNSLRAEDTAIYYCARTGWLGPFDYWGQGTLVTVSS

SEQ ID NO: 905 - protein, 108 aa, synthetic construct; identical to SEQ ID NO: 23
  source 1..108: note = Description of Artificial Sequence: Synthetic polypeptide; note = VL of XENP019828

SEQ ID NO: 906 - protein, 5 aa, synthetic construct
  source 1..5: note = Description of Artificial Sequence: Synthetic peptide; note = XENP019828 vhCDR1
SYTMH

SEQ ID NO: 907 - protein, 17 aa, synthetic construct
  source 1..17: note = Description of Artificial Sequence: Synthetic peptide; note = XENP019828 vhCDR2
FISYDGNNKYYAASVKG

SEQ ID NO: 908 - protein, 9 aa, synthetic construct
  source 1..9: note = Description of Artificial Sequence: Synthetic peptide; note = XENP019828 vhCDR3
TGWLGPFDY

SEQ ID NO: 909 - protein, 12 aa, synthetic construct
  source 1..12: note = Description of Artificial Sequence: Synthetic peptide; note = XENP019828 vlCDR1
RASQSVGSSYLA

SEQ ID NO: 910 - protein, 7 aa, synthetic construct
  source 1..7: note = Description of Artificial Sequence: Synthetic peptide; note = XENP019828 vlCDR2
GAFSRAT

SEQ ID NO: 911 - protein, 9 aa, synthetic construct
  source 1..9: note = Description of Artificial Sequence: Synthetic peptide; note = XENP019828 vlCDR3
QQYGSSPWT

SEQ ID NO: 912 - protein, 246 aa, synthetic construct
  source 1..246: note = Description of Artificial Sequence: Synthetic polypeptide; note = XENP019829 [CTLA-4]_H0.81_L0_scFv(GKPGS)4
QVQLVESGGGVVQPGRSLRLSCAASGFTFSSYTMHWVRQAPGKGLEWVTFISYDGNNKYYAKSVKGRFTISRDNSKNTLYLQMNSLRAEDTAIYYCARTGWLGPFDYWGQGTLVTVSSGKPGSGKPGSGKPGSGKPGSEIVLTQSPGTLSLSPGERATLSCRASQSVGSSYLAWYQQKPGQAPRLLIYGAFSRATGIPDRFSGSGSGTDFTLTISRLEPEDFAVYYCQQYGSSPWTFGQGTKVEIK

SEQ ID NO: 913 - protein, 118 aa, synthetic construct
  source 1..118: note = Description of Artificial Sequence: Synthetic polypeptide; note = VH of XENP019829
QVQLVESGGGVVQPGRSLRLSCAASGFTFSSYTMHWVRQAPGKGLEWVTFISYDGNNKYYAKSVKGRFTISRDNSKNTLYLQMNSLRAEDTAIYYCARTGWLGPFDYWGQGTLVTVSS

SEQ ID NO: 914 - protein, 108 aa, synthetic construct; identical to SEQ ID NO: 23
  source 1..108: note = Description of Artificial Sequence: Synthetic polypeptide; note = VL of XENP019829

SEQ ID NO: 915 - protein, 5 aa, synthetic construct
  source 1..5: note = Description of Artificial Sequence: Synthetic peptide; note = XENP019829 vhCDR1
SYTMH

SEQ ID NO: 916 - protein, 17 aa, synthetic construct
  source 1..17: note = Description of Artificial Sequence: Synthetic peptide; note = XENP019829 vhCDR2
FISYDGNNKYYAKSVKG

SEQ ID NO: 917 - protein, 9 aa, synthetic construct
  source 1..9: note = Description of Artificial Sequence: Synthetic peptide; note = XENP019829 vhCDR3
TGWLGPFDY

SEQ ID NO: 918 - protein, 12 aa, synthetic construct
  source 1..12: note = Description of Artificial Sequence: Synthetic peptide; note = XENP019829 vlCDR1
RASQSVGSSYLA

SEQ ID NO: 919 - protein, 7 aa, synthetic construct
  source 1..7: note = Description of Artificial Sequence: Synthetic peptide; note = XENP019829 vlCDR2
GAFSRAT

SEQ ID NO: 920 - protein, 9 aa, synthetic construct
  source 1..9: note = Description of Artificial Sequence: Synthetic peptide; note = XENP019829 vlCDR3
QQYGSSPWT

SEQ ID NO: 921 - protein, 246 aa, synthetic construct
  source 1..246: note = Description of Artificial Sequence: Synthetic polypeptide; note = XENP019830 [CTLA-4]_H0.82_L0_scFv(GKPGS)4
QVQLVESGGGVVQPGRSLRLSCAASGFTFSSYTMHWVRQAPGKGLEWVTFISYDGNNKYYADSVKDRFTISRDNSKNTLYLQMNSLRAEDTAIYYCARTGWLGPFDYWGQGTLVTVSSGKPGSGKPGSGKPGSGKPGSEIVLTQSPGTLSLSPGERATLSCRASQSVGSSYLAWYQQKPGQAPRLLIYGAFSRATGIPDRFSGSGSGTDFTLTISRLEPEDFAVYYCQQYGSSPWTFGQGTKVEIK

SEQ ID NO: 922 - protein, 118 aa, synthetic construct
  source 1..118: note = Description of Artificial Sequence: Synthetic polypeptide; note = VH of XENP019830
QVQLVESGGGVVQPGRSLRLSCAASGFTFSSYTMHWVRQAPGKGLEWVTFISYDGNNKYYADSVKDRFTISRDNSKNTLYLQMNSLRAEDTAIYYCARTGWLGPFDYWGQGTLVTVSS

SEQ ID NO: 923 - protein, 108 aa, synthetic construct; identical to SEQ ID NO: 23
  source 1..108: note = Description of Artificial Sequence: Synthetic polypeptide; note = VL of XENP019830

SEQ ID NO: 924 - protein, 5 aa, synthetic construct
  source 1..5: note = Description of Artificial Sequence: Synthetic peptide; note = XENP019830 vhCDR1
SYTMH

SEQ ID NO: 925 - protein, 17 aa, synthetic construct
  source 1..17: note = Description of Artificial Sequence: Synthetic peptide; note = XENP019830 vhCDR2
FISYDGNNKYYADSVKD

SEQ ID NO: 926 - protein, 9 aa, synthetic construct
  source 1..9: note = Description of Artificial Sequence: Synthetic peptide; note = XENP019830 vhCDR3
TGWLGPFDY

SEQ ID NO: 927 - protein, 12 aa, synthetic construct
  source 1..12: note = Description of Artificial Sequence: Synthetic peptide; note = XENP019830 vlCDR1
RASQSVGSSYLA

SEQ ID NO: 928 - protein, 7 aa, synthetic construct
  source 1..7: note = Description of Artificial Sequence: Synthetic peptide; note = XENP019830 vlCDR2
GAFSRAT

SEQ ID NO: 929 - protein, 9 aa, synthetic construct
  source 1..9: note = Description of Artificial Sequence: Synthetic peptide; note = XENP019830 vlCDR3
QQYGSSPWT

SEQ ID NO: 930 - protein, 246 aa, synthetic construct
  source 1..246: note = Description of Artificial Sequence: Synthetic polypeptide; note = XENP019831 [CTLA-4]_H0.83_L0_scFv(GKPGS)4
QVQLVESGGGVVQPGRSLRLSCAASGFTFSSYTMHWVRQAPGKGLEWVTFISYDGNNKYYADSVKERFTISRDNSKNTLYLQMNSLRAEDTAIYYCARTGWLGPFDYWGQGTLVTVSSGKPGSGKPGSGKPGSGKPGSEIVLTQSPGTLSLSPGERATLSCRASQSVGSSYLAWYQQKPGQAPRLLIYGAFSRATGIPDRFSGSGSGTDFTLTISRLEPEDFAVYYCQQYGSSPWTFGQGTKVEIK

SEQ ID NO: 931 - protein, 118 aa, synthetic construct
  source 1..118: note = Description of Artificial Sequence: Synthetic polypeptide; note = VH of XENP019831
QVQLVESGGGVVQPGRSLRLSCAASGFTFSSYTMHWVRQAPGKGLEWVTFISYDGNNKYYADSVKERFTISRDNSKNTLYLQMNSLRAEDTAIYYCARTGWLGPFDYWGQGTLVTVSS

SEQ ID NO: 932 - protein, 108 aa, synthetic construct; identical to SEQ ID NO: 23
  source 1..108: note = Description of Artificial Sequence: Synthetic polypeptide; note = VL of XENP019831

SEQ ID NO: 933 - protein, 5 aa, synthetic construct
  source 1..5: note = Description of Artificial Sequence: Synthetic peptide; note = XENP019831 vhCDR1
SYTMH

SEQ ID NO: 934 - protein, 17 aa, synthetic construct
  source 1..17: note = Description of Artificial Sequence: Synthetic peptide; note = XENP019831 vhCDR2
FISYDGNNKYYADSVKE

SEQ ID NO: 935 - protein, 9 aa, synthetic construct
  source 1..9: note = Description of Artificial Sequence: Synthetic peptide; note = XENP019831 vhCDR3
TGWLGPFDY

SEQ ID NO: 936 - protein, 12 aa, synthetic construct
  source 1..12: note = Description of Artificial Sequence: Synthetic peptide; note = XENP019831 vlCDR1
RASQSVGSSYLA

SEQ ID NO: 937 - protein, 7 aa, synthetic construct
  source 1..7: note = Description of Artificial Sequence: Synthetic peptide; note = XENP019831 vlCDR2
GAFSRAT

SEQ ID NO: 938 - protein, 9 aa, synthetic construct
  source 1..9: note = Description of Artificial Sequence: Synthetic peptide; note = XENP019831 vlCDR3
QQYGSSPWT

SEQ ID NO: 939 - protein, 246 aa, synthetic construct
  source 1..246: note = Description of Artificial Sequence: Synthetic polypeptide; note = XENP019832 [CTLA-4]_H0.84_L0_scFv(GKPGS)4
QVQLVESGGGVVQPGRSLRLSCAASGFTFSSYTMHWVRQAPGKGLEWVTFISYDGNNKYYADSVKGQFTISRDNSKNTLYLQMNSLRAEDTAIYYCARTGWLGPFDYWGQGTLVTVSSGKPGSGKPGSGKPGSGKPGSEIVLTQSPGTLSLSPGERATLSCRASQSVGSSYLAWYQQKPGQAPRLLIYGAFSRATGIPDRFSGSGSGTDFTLTISRLEPEDFAVYYCQQYGSSPWTFGQGTKVEIK

SEQ ID NO: 940 - protein, 118 aa, synthetic construct
  source 1..118: note = Description of Artificial Sequence: Synthetic polypeptide; note = VH of XENP019832
QVQLVESGGGVVQPGRSLRLSCAASGFTFSSYTMHWVRQAPGKGLEWVTFISYDGNNKYYADSVKGQFTISRDNSKNTLYLQMNSLRAEDTAIYYCARTGWLGPFDYWGQGTLVTVSS

SEQ ID NO: 941 - protein, 108 aa, synthetic construct; identical to SEQ ID NO: 23
  source 1..108: note = Description of Artificial Sequence: Synthetic polypeptide; note = VL of XENP019832

SEQ ID NO: 942 - protein, 5 aa, synthetic construct
  source 1..5: note = Description of Artificial Sequence: Synthetic peptide; note = XENP019832 vhCDR1
SYTMH

SEQ ID NO: 943 - protein, 17 aa, synthetic construct
  source 1..17: note = Description of Artificial Sequence: Synthetic peptide; note = XENP019832 vhCDR2
FISYDGNNKYYADSVKG

SEQ ID NO: 944 - protein, 9 aa, synthetic construct
  source 1..9: note = Description of Artificial Sequence: Synthetic peptide; note = XENP019832 vhCDR3
TGWLGPFDY

SEQ ID NO: 945 - protein, 12 aa, synthetic construct
  source 1..12: note = Description of Artificial Sequence: Synthetic peptide; note = XENP019832 vlCDR1
RASQSVGSSYLA

SEQ ID NO: 946 - protein, 7 aa, synthetic construct
  source 1..7: note = Description of Artificial Sequence: Synthetic peptide; note = XENP019832 vlCDR2
GAFSRAT

SEQ ID NO: 947 - protein, 9 aa, synthetic construct
  source 1..9: note = Description of Artificial Sequence: Synthetic peptide; note = XENP019832 vlCDR3
QQYGSSPWT

SEQ ID NO: 948 - protein, 246 aa, synthetic construct
  source 1..246: note = Description of Artificial Sequence: Synthetic polypeptide; note = XENP019833 [CTLA-4]_H0.85_L0_scFv(GKPGS)4
QVQLVESGGGVVQPGRSLRLSCAASGFTFSSYTMHWVRQAPGKGLEWVTFISYDGNNKYYADSVKGRFTMSRDNSKNTLYLQMNSLRAEDTAIYYCARTGWLGPFDYWGQGTLVTVSSGKPGSGKPGSGKPGSGKPGSEIVLTQSPGTLSLSPGERATLSCRASQSVGSSYLAWYQQKPGQAPRLLIYGAFSRATGIPDRFSGSGSGTDFTLTISRLEPEDFAVYYCQQYGSSPWTFGQGTKVEIK

SEQ ID NO: 949 - protein, 118 aa, synthetic construct
  source 1..118: note = Description of Artificial Sequence: Synthetic polypeptide; note = VH of XENP019833
QVQLVESGGGVVQPGRSLRLSCAASGFTFSSYTMHWVRQAPGKGLEWVTFISYDGNNKYYADSVKGRFTMSRDNSKNTLYLQMNSLRAEDTAIYYCARTGWLGPFDYWGQGTLVTVSS

SEQ ID NO: 950 - protein, 108 aa, synthetic construct; identical to SEQ ID NO: 23
  source 1..108: note = Description of Artificial Sequence: Synthetic polypeptide; note = VL of XENP019833

SEQ ID NO: 951 - protein, 5 aa, synthetic construct
  source 1..5: note = Description of Artificial Sequence: Synthetic peptide; note = XENP019833 vhCDR1
SYTMH

SEQ ID NO: 952 - protein, 17 aa, synthetic construct
  source 1..17: note = Description of Artificial Sequence: Synthetic peptide; note = XENP019833 vhCDR2
FISYDGNNKYYADSVKG

SEQ ID NO: 953 - protein, 9 aa, synthetic construct
  source 1..9: note = Description of Artificial Sequence: Synthetic peptide; note = XENP019833 vhCDR3
TGWLGPFDY

SEQ ID NO: 954 - protein, 12 aa, synthetic construct
  source 1..12: note = Description of Artificial Sequence: Synthetic peptide; note = XENP019833 vlCDR1
RASQSVGSSYLA

SEQ ID NO: 955 - protein, 7 aa, synthetic construct
  source 1..7: note = Description of Artificial Sequence: Synthetic peptide; note = XENP019833 vlCDR2
GAFSRAT

SEQ ID NO: 956 - protein, 9 aa, synthetic construct
  source 1..9: note = Description of Artificial Sequence: Synthetic peptide; note = XENP019833 vlCDR3
QQYGSSPWT

SEQ ID NO: 957 - protein, 246 aa, synthetic construct
  source 1..246: note = Description of Artificial Sequence: Synthetic polypeptide; note = XENP019834 [CTLA-4]_H0.86_L0_scFv(GKPGS)4
QVQLVESGGGVVQPGRSLRLSCAASGFTFSSYTMHWVRQAPGKGLEWVTFISYDGNNKYYADSVKGRFTVSRDNSKNTLYLQMNSLRAEDTAIYYCARTGWLGPFDYWGQGTLVTVSSGKPGSGKPGSGKPGSGKPGSEIVLTQSPGTLSLSPGERATLSCRASQSVGSSYLAWYQQKPGQAPRLLIYGAFSRATGIPDRFSGSGSGTDFTLTISRLEPEDFAVYYCQQYGSSPWTFGQGTKVEIK

SEQ ID NO: 958 - protein, 118 aa, synthetic construct
  source 1..118: note = Description of Artificial Sequence: Synthetic polypeptide; note = VH of XENP019834
QVQLVESGGGVVQPGRSLRLSCAASGFTFSSYTMHWVRQAPGKGLEWVTFISYDGNNKYYADSVKGRFTVSRDNSKNTLYLQMNSLRAEDTAIYYCARTGWLGPFDYWGQGTLVTVSS

SEQ ID NO: 959 - protein, 108 aa, synthetic construct; identical to SEQ ID NO: 23
  source 1..108: note = Description of Artificial Sequence: Synthetic polypeptide; note = VL of XENP019834

SEQ ID NO: 960 - protein, 5 aa, synthetic construct
  source 1..5: note = Description of Artificial Sequence: Synthetic peptide; note = XENP019834 vhCDR1
SYTMH

SEQ ID NO: 961 - protein, 17 aa, synthetic construct
  source 1..17: note = Description of Artificial Sequence: Synthetic peptide; note = XENP019834 vhCDR2
FISYDGNNKYYADSVKG

SEQ ID NO: 962 - protein, 9 aa, synthetic construct
  source 1..9: note = Description of Artificial Sequence: Synthetic peptide; note = XENP019834 vhCDR3
TGWLGPFDY

SEQ ID NO: 963 - protein, 12 aa, synthetic construct
  source 1..12: note = Description of Artificial Sequence: Synthetic peptide; note = XENP019834 vlCDR1
RASQSVGSSYLA

SEQ ID NO: 964 - protein, 7 aa, synthetic construct
  source 1..7: note = Description of Artificial Sequence: Synthetic peptide; note = XENP019834 vlCDR2
GAFSRAT

SEQ ID NO: 965 - protein, 9 aa, synthetic construct
  source 1..9: note = Description of Artificial Sequence: Synthetic peptide; note = XENP019834 vlCDR3
QQYGSSPWT

SEQ ID NO: 966 - protein, 246 aa, synthetic construct
  source 1..246: note = Description of Artificial Sequence: Synthetic polypeptide; note = XENP019835 [CTLA-4]_H0.87_L0_scFv(GKPGS)4
QVQLVESGGGVVQPGRSLRLSCAASGFTFSSYTMHWVRQAPGKGLEWVTFISYDGNNKYYADSVKGRFTISEDNSKNTLYLQMNSLRAEDTAIYYCARTGWLGPFDYWGQGTLVTVSSGKPGSGKPGSGKPGSGKPGSEIVLTQSPGTLSLSPGERATLSCRASQSVGSSYLAWYQQKPGQAPRLLIYGAFSRATGIPDRFSGSGSGTDFTLTISRLEPEDFAVYYCQQYGSSPWTFGQGTKVEIK

SEQ ID NO: 967 - protein, 118 aa, synthetic construct
  source 1..118: note = Description of Artificial Sequence: Synthetic polypeptide; note = VH of XENP019835
QVQLVESGGGVVQPGRSLRLSCAASGFTFSSYTMHWVRQAPGKGLEWVTFISYDGNNKYYADSVKGRFTISEDNSKNTLYLQMNSLRAEDTAIYYCARTGWLGPFDYWGQGTLVTVSS

SEQ ID NO: 968 - protein, 108 aa, synthetic construct; identical to SEQ ID NO: 23
  source 1..108: note = Description of Artificial Sequence: Synthetic polypeptide; note = VL of XENP019835

SEQ ID NO: 969 - protein, 5 aa, synthetic construct
  source 1..5: note = Description of Artificial Sequence: Synthetic peptide; note = XENP019835 vhCDR1
SYTMH

SEQ ID NO: 970 - protein, 17 aa, synthetic construct
  source 1..17: note = Description of Artificial Sequence: Synthetic peptide; note = XENP019835 vhCDR2
FISYDGNNKYYADSVKG

SEQ ID NO: 971 - protein, 9 aa, synthetic construct
  source 1..9: note = Description of Artificial Sequence: Synthetic peptide; note = XENP019835 vhCDR3
TGWLGPFDY

SEQ ID NO: 972 - protein, 12 aa, synthetic construct
  source 1..12: note = Description of Artificial Sequence: Synthetic peptide; note = XENP019835 vlCDR1
RASQSVGSSYLA

SEQ ID NO: 973 - protein, 7 aa, synthetic construct
  source 1..7: note = Description of Artificial Sequence: Synthetic peptide; note = XENP019835 vlCDR2
GAFSRAT

SEQ ID NO: 974 - protein, 9 aa, synthetic construct
  source 1..9: note = Description of Artificial Sequence: Synthetic peptide; note = XENP019835 vlCDR3
QQYGSSPWT

SEQ ID NO: 975 - protein, 246 aa, synthetic construct
  source 1..246: note = Description of Artificial Sequence: Synthetic polypeptide; note = XENP019836 [CTLA-4]_H0.88_L0_scFv(GKPGS)4
QVQLVESGGGVVQPGRSLRLSCAASGFTFSSYTMHWVRQAPGKGLEWVTFISYDGNNKYYADSVKGRFTISRENSKNTLYLQMNSLRAEDTAIYYCARTGWLGPFDYWGQGTLVTVSSGKPGSGKPGSGKPGSGKPGSEIVLTQSPGTLSLSPGERATLSCRASQSVGSSYLAWYQQKPGQAPRLLIYGAFSRATGIPDRFSGSGSGTDFTLTISRLEPEDFAVYYCQQYGSSPWTFGQGTKVEIK

SEQ ID NO: 976 - protein, 118 aa, synthetic construct
  source 1..118: note = Description of Artificial Sequence: Synthetic polypeptide; note = VH of XENP019836
QVQLVESGGGVVQPGRSLRLSCAASGFTFSSYTMHWVRQAPGKGLEWVTFISYDGNNKYYADSVKGRFTISRENSKNTLYLQMNSLRAEDTAIYYCARTGWLGPFDYWGQGTLVTVSS

SEQ ID NO: 977 - protein, 108 aa, synthetic construct; identical to SEQ ID NO: 23
  source 1..108: note = Description of Artificial Sequence: Synthetic polypeptide; note = VL of XENP019836

SEQ ID NO: 978 - protein, 5 aa, synthetic construct
  source 1..5: note = Description of Artificial Sequence: Synthetic peptide; note = XENP019836 vhCDR1
SYTMH

SEQ ID NO: 979 - protein, 17 aa, synthetic construct
  source 1..17: note = Description of Artificial Sequence: Synthetic peptide; note = XENP019836 vhCDR2
FISYDGNNKYYADSVKG

SEQ ID NO: 980 - protein, 9 aa, synthetic construct
  source 1..9: note = Description of Artificial Sequence: Synthetic peptide; note = XENP019836 vhCDR3
TGWLGPFDY

SEQ ID NO: 981 - protein, 12 aa, synthetic construct
  source 1..12: note = Description of Artificial Sequence: Synthetic peptide; note = XENP019836 vlCDR1
RASQSVGSSYLA

SEQ ID NO: 982 - protein, 7 aa, synthetic construct
  source 1..7: note = Description of Artificial Sequence: Synthetic peptide; note = XENP019836 vlCDR2
GAFSRAT

SEQ ID NO: 983 - protein, 9 aa, synthetic construct
  source 1..9: note = Description of Artificial Sequence: Synthetic peptide; note = XENP019836 vlCDR3
QQYGSSPWT

SEQ ID NO: 984 - protein, 246 aa, synthetic construct
  source 1..246: note = Description of Artificial Sequence: Synthetic polypeptide; note = XENP019837 [CTLA-4]_H0.89_L0_scFv(GKPGS)4
QVQLVESGGGVVQPGRSLRLSCAASGFTFSSYTMHWVRQAPGKGLEWVTFISYDGNNKYYADSVKGRFTISRDDSKNTLYLQMNSLRAEDTAIYYCARTGWLGPFDYWGQGTLVTVSSGKPGSGKPGSGKPGSGKPGSEIVLTQSPGTLSLSPGERATLSCRASQSVGSSYLAWYQQKPGQAPRLLIYGAFSRATGIPDRFSGSGSGTDFTLTISRLEPEDFAVYYCQQYGSSPWTFGQGTKVEIK

SEQ ID NO: 985 - protein, 118 aa, synthetic construct
  source 1..118: note = Description of Artificial Sequence: Synthetic polypeptide; note = VH of XENP019837
QVQLVESGGGVVQPGRSLRLSCAASGFTFSSYTMHWVRQAPGKGLEWVTFISYDGNNKYYADSVKGRFTISRDDSKNTLYLQMNSLRAEDTAIYYCARTGWLGPFDYWGQGTLVTVSS

SEQ ID NO: 986 - protein, 108 aa, synthetic construct; identical to SEQ ID NO: 23
  source 1..108: note = Description of Artificial Sequence: Synthetic polypeptide; note = VL of XENP019837

SEQ ID NO: 987 - protein, 5 aa, synthetic construct
  source 1..5: note = Description of Artificial Sequence: Synthetic peptide; note = XENP019837 vhCDR1
SYTMH

SEQ ID NO: 988 - protein, 17 aa, synthetic construct
  source 1..17: note = Description of Artificial Sequence: Synthetic peptide; note = XENP019837 vhCDR2
FISYDGNNKYYADSVKG

SEQ ID NO: 989 - protein, 9 aa, synthetic construct
  source 1..9: note = Description of Artificial Sequence: Synthetic peptide; note = XENP019837 vhCDR3
TGWLGPFDY

SEQ ID NO: 990 - protein, 12 aa, synthetic construct
  source 1..12: note = Description of Artificial Sequence: Synthetic peptide; note = XENP019837 vlCDR1
RASQSVGSSYLA

SEQ ID NO: 991 - protein, 7 aa, synthetic construct
  source 1..7: note = Description of Artificial Sequence: Synthetic peptide; note = XENP019837 vlCDR2
GAFSRAT

SEQ ID NO: 992 - protein, 9 aa, synthetic construct
  source 1..9: note = Description of Artificial Sequence: Synthetic peptide; note = XENP019837 vlCDR3
QQYGSSPWT

SEQ ID NO: 993 - protein, 246 aa, synthetic construct
  source 1..246: note = Description of Artificial Sequence: Synthetic polypeptide; note = XENP019838 [CTLA-4]_H0.90_L0_scFv(GKPGS)4
QVQLVESGGGVVQPGRSLRLSCAASGFTFSSYTMHWVRQAPGKGLEWVTFISYDGNNKYYADSVKGRFTISRDNAKNTLYLQMNSLRAEDTAIYYCARTGWLGPFDYWGQGTLVTVSSGKPGSGKPGSGKPGSGKPGSEIVLTQSPGTLSLSPGERATLSCRASQSVGSSYLAWYQQKPGQAPRLLIYGAFSRATGIPDRFSGSGSGTDFTLTISRLEPEDFAVYYCQQYGSSPWTFGQGTKVEIK

SEQ ID NO: 994 - protein, 118 aa, synthetic construct
  source 1..118: note = Description of Artificial Sequence: Synthetic polypeptide; note = VH of XENP019838
QVQLVESGGGVVQPGRSLRLSCAASGFTFSSYTMHWVRQAPGKGLEWVTFISYDGNNKYYADSVKGRFTISRDNAKNTLYLQMNSLRAEDTAIYYCARTGWLGPFDYWGQGTLVTVSS

SEQ ID NO: 995 - protein, 108 aa, synthetic construct; identical to SEQ ID NO: 23
  source 1..108: note = Description of Artificial Sequence: Synthetic polypeptide; note = VL of XENP019838

SEQ ID NO: 996 - protein, 5 aa, synthetic construct
  source 1..5: note = Description of Artificial Sequence: Synthetic peptide; note = XENP019838 vhCDR1
SYTMH

SEQ ID NO: 997 - protein, 17 aa, synthetic construct
  source 1..17: note = Description of Artificial Sequence: Synthetic peptide; note = XENP019838 vhCDR2
FISYDGNNKYYADSVKG

SEQ ID NO: 998 - protein, 9 aa, synthetic construct
  source 1..9: note = Description of Artificial Sequence: Synthetic peptide; note = XENP019838 vhCDR3
TGWLGPFDY

SEQ ID NO: 999 - protein, 12 aa, synthetic construct
  source 1..12: note = Description of Artificial Sequence: Synthetic peptide; note = XENP019838 vlCDR1
RASQSVGSSYLA

SEQ ID NO: 1000 - protein, 7 aa, synthetic construct
  source 1..7: note = Description of Artificial Sequence: Synthetic peptide; note = XENP019838 vlCDR2
GAFSRAT

SEQ ID NO: 1001 - protein, 9 aa, synthetic construct
  source 1..9: note = Description of Artificial Sequence: Synthetic peptide; note = XENP019838 vlCDR3
QQYGSSPWT

SEQ ID NO: 1002 - protein, 246 aa, synthetic construct
  source 1..246: note = Description of Artificial Sequence: Synthetic polypeptide; note = XENP019839 [CTLA-4]_H0.91_L0_scFv(GKPGS)4
QVQLVESGGGVVQPGRSLRLSCAASGFTFSSYTMHWVRQAPGKGLEWVTFISYDGNNKYYADSVKGRFTISRDNSRNTLYLQMNSLRAEDTAIYYCARTGWLGPFDYWGQGTLVTVSSGKPGSGKPGSGKPGSGKPGSEIVLTQSPGTLSLSPGERATLSCRASQSVGSSYLAWYQQKPGQAPRLLIYGAFSRATGIPDRFSGSGSGTDFTLTISRLEPEDFAVYYCQQYGSSPWTFGQGTKVEIK

SEQ ID NO: 1003 - protein, 118 aa, synthetic construct
  source 1..118: note = Description of Artificial Sequence: Synthetic polypeptide; note = VH of XENP019839
QVQLVESGGGVVQPGRSLRLSCAASGFTFSSYTMHWVRQAPGKGLEWVTFISYDGNNKYYADSVKGRFTISRDNSRNTLYLQMNSLRAEDTAIYYCARTGWLGPFDYWGQGTLVTVSS

SEQ ID NO: 1004 - protein, 108 aa, synthetic construct; identical to SEQ ID NO: 23
  source 1..108: note = Description of Artificial Sequence: Synthetic polypeptide; note = VL of XENP019839

SEQ ID NO: 1005 - protein, 5 aa, synthetic construct
  source 1..5: note = Description of Artificial Sequence: Synthetic peptide; note = XENP019839 vhCDR1
SYTMH

SEQ ID NO: 1006 - protein, 17 aa, synthetic construct
  source 1..17: note = Description of Artificial Sequence: Synthetic peptide; note = XENP019839 vhCDR2
FISYDGNNKYYADSVKG

SEQ ID NO: 1007 - protein, 9 aa, synthetic construct
  source 1..9: note = Description of Artificial Sequence: Synthetic peptide; note = XENP019839 vhCDR3
TGWLGPFDY

SEQ ID NO: 1008 - protein, 12 aa, synthetic construct
  source 1..12: note = Description of Artificial Sequence: Synthetic peptide; note = XENP019839 vlCDR1
RASQSVGSSYLA

SEQ ID NO: 1009 - protein, 7 aa, synthetic construct
  source 1..7: note = Description of Artificial Sequence: Synthetic peptide; note = XENP019839 vlCDR2
GAFSRAT

SEQ ID NO: 1010 - protein, 9 aa, synthetic construct
  source 1..9: note = Description of Artificial Sequence: Synthetic peptide; note = XENP019839 vlCDR3
QQYGSSPWT

SEQ ID NO: 1011 - protein, 246 aa, synthetic construct
  source 1..246: note = Description of Artificial Sequence: Synthetic polypeptide; note = XENP019840 [CTLA-4]_H0.92_L0_scFv(GKPGS)4
QVQLVESGGGVVQPGRSLRLSCAASGFTFSSYTMHWVRQAPGKGLEWVTFISYDGNNKYYADSVKGRFTISRDNSKNSLYLQMNSLRAEDTAIYYCARTGWLGPFDYWGQGTLVTVSSGKPGSGKPGSGKPGSGKPGSEIVLTQSPGTLSLSPGERATLSCRASQSVGSSYLAWYQQKPGQAPRLLIYGAFSRATGIPDRFSGSGSGTDFTLTISRLEPEDFAVYYCQQYGSSPWTFGQGTKVEIK

SEQ ID NO: 1012 - protein, 118 aa, synthetic construct
  source 1..118: note = Description of Artificial Sequence: Synthetic polypeptide; note = VH of XENP019840
QVQLVESGGGVVQPGRSLRLSCAASGFTFSSYTMHWVRQAPGKGLEWVTFISYDGNNKYYADSVKGRFTISRDNSKNSLYLQMNSLRAEDTAIYYCARTGWLGPFDYWGQGTLVTVSS

SEQ ID NO: 1013 - protein, 108 aa, synthetic construct; identical to SEQ ID NO: 23
  source 1..108: note = Description of Artificial Sequence: Synthetic polypeptide; note = VL of XENP019840

SEQ ID NO: 1014 - protein, 5 aa, synthetic construct
  source 1..5: note = Description of Artificial Sequence: Synthetic peptide; note = XENP019840 vhCDR1
SYTMH

SEQ ID NO: 1015 - protein, 17 aa, synthetic construct
  source 1..17: note = Description of Artificial Sequence: Synthetic peptide; note = XENP019840 vhCDR2
FISYDGNNKYYADSVKG

SEQ ID NO: 1016 - protein, 9 aa, synthetic construct
  source 1..9: note = Description of Artificial Sequence: Synthetic peptide; note = XENP019840 vhCDR3
TGWLGPFDY

SEQ ID NO: 1017 - protein, 12 aa, synthetic construct
  source 1..12: note = Description of Artificial Sequence: Synthetic peptide; note = XENP019840 vlCDR1
RASQSVGSSYLA

SEQ ID NO: 1018 - protein, 7 aa, synthetic construct
  source 1..7: note = Description of Artificial Sequence: Synthetic peptide; note = XENP019840 vlCDR2
GAFSRAT

SEQ ID NO: 1019 - protein, 9 aa, synthetic construct
  source 1..9: note = Description of Artificial Sequence: Synthetic peptide; note = XENP019840 vlCDR3
QQYGSSPWT

SEQ ID NO: 1020 - protein, 246 aa, synthetic construct
  source 1..246: note = Description of Artificial Sequence: Synthetic polypeptide; note = XENP019841 [CTLA-4]_H0.93_L0_scFv(GKPGS)4
QVQLVESGGGVVQPGRSLRLSCAASGFTFSSYTMHWVRQAPGKGLEWVTFISYDGNNKYYADSVKGRFTISRDNSKNQLYLQMNSLRAEDTAIYYCARTGWLGPFDYWGQGTLVTVSSGKPGSGKPGSGKPGSGKPGSEIVLTQSPGTLSLSPGERATLSCRASQSVGSSYLAWYQQKPGQAPRLLIYGAFSRATGIPDRFSGSGSGTDFTLTISRLEPEDFAVYYCQQYGSSPWTFGQGTKVEIK

SEQ ID NO: 1021 - protein, 118 aa, synthetic construct
  source 1..118: note = Description of Artificial Sequence: Synthetic polypeptide; note = VH of XENP019841
QVQLVESGGGVVQPGRSLRLSCAASGFTFSSYTMHWVRQAPGKGLEWVTFISYDGNNKYYADSVKGRFTISRDNSKNQLYLQMNSLRAEDTAIYYCARTGWLGPFDYWGQGTLVTVSS

SEQ ID NO: 1022 - protein, 108 aa, synthetic construct; identical to SEQ ID NO: 23
  source 1..108: note = Description of Artificial Sequence: Synthetic polypeptide; note = VL of XENP019841

SEQ ID NO: 1023 - protein, 5 aa, synthetic construct
  source 1..5: note = Description of Artificial Sequence: Synthetic peptide; note = XENP019841 vhCDR1
SYTMH

SEQ ID NO: 1024 - protein, 17 aa, synthetic construct
  source 1..17: note = Description of Artificial Sequence: Synthetic peptide; note = XENP019841 vhCDR2
FISYDGNNKYYADSVKG

SEQ ID NO: 1025 - protein, 9 aa, synthetic construct
  source 1..9: note = Description of Artificial Sequence: Synthetic peptide; note = XENP019841 vhCDR3
TGWLGPFDY

SEQ ID NO: 1026 - protein, 12 aa, synthetic construct
  source 1..12: note = Description of Artificial Sequence: Synthetic peptide; note = XENP019841 vlCDR1
RASQSVGSSYLA

SEQ ID NO: 1027 - protein, 7 aa, synthetic construct
  source 1..7: note = Description of Artificial Sequence: Synthetic peptide; note = XENP019841 vlCDR2
GAFSRAT

SEQ ID NO: 1028 - protein, 9 aa, synthetic construct
  source 1..9: note = Description of Artificial Sequence: Synthetic peptide; note = XENP019841 vlCDR3
QQYGSSPWT

SEQ ID NO: 1029 - protein, 246 aa, synthetic construct
  source 1..246: note = Description of Artificial Sequence: Synthetic polypeptide; note = XENP019842 [CTLA-4]_H0.94_L0_scFv(GKPGS)4
QVQLVESGGGVVQPGRSLRLSCAASGFTFSSYTMHWVRQAPGKGLEWVTFISYDGNNKYYADSVKGRFTISRDNSKNTLYLEMNSLRAEDTAIYYCARTGWLGPFDYWGQGTLVTVSSGKPGSGKPGSGKPGSGKPGSEIVLTQSPGTLSLSPGERATLSCRASQSVGSSYLAWYQQKPGQAPRLLIYGAFSRATGIPDRFSGSGSGTDFTLTISRLEPEDFAVYYCQQYGSSPWTFGQGTKVEIK

SEQ ID NO: 1030 - protein, 118 aa, synthetic construct
  source 1..118: note = Description of Artificial Sequence: Synthetic polypeptide; note = VH of XENP019842
QVQLVESGGGVVQPGRSLRLSCAASGFTFSSYTMHWVRQAPGKGLEWVTFISYDGNNKYYADSVKGRFTISRDNSKNTLYLEMNSLRAEDTAIYYCARTGWLGPFDYWGQGTLVTVSS

SEQ ID NO: 1031 - protein, 108 aa, synthetic construct; identical to SEQ ID NO: 23
  source 1..108: note = Description of Artificial Sequence: Synthetic polypeptide; note = VL of XENP019842

SEQ ID NO: 1032 - protein, 5 aa, synthetic construct
  source 1..5: note = Description of Artificial Sequence: Synthetic peptide; note = XENP019842 vhCDR1
SYTMH

SEQ ID NO: 1033 - protein, 17 aa, synthetic construct
  source 1..17: note = Description of Artificial Sequence: Synthetic peptide; note = XENP019842 vhCDR2
FISYDGNNKYYADSVKG

SEQ ID NO: 1034 - protein, 9 aa, synthetic construct
  source 1..9: note = Description of Artificial Sequence: Synthetic peptide; note = XENP019842 vhCDR3
TGWLGPFDY

SEQ ID NO: 1035 - protein, 12 aa, synthetic construct
  source 1..12: note = Description of Artificial Sequence: Synthetic peptide; note = XENP019842 vlCDR1
RASQSVGSSYLA

SEQ ID NO: 1036 - protein, 7 aa, synthetic construct
  source 1..7: note = Description of Artificial Sequence: Synthetic peptide; note = XENP019842 vlCDR2
GAFSRAT

SEQ ID NO: 1037 - protein, 9 aa, synthetic construct
  source 1..9: note = Description of Artificial Sequence: Synthetic peptide; note = XENP019842 vlCDR3
QQYGSSPWT

SEQ ID NO: 1038 - protein, 246 aa, synthetic construct
  source 1..246: note = Description of Artificial Sequence: Synthetic polypeptide; note = XENP019843 [CTLA-4]_H0.95_L0_scFv(GKPGS)4
QVQLVESGGGVVQPGRSLRLSCAASGFTFSSYTMHWVRQAPGKGLEWVTFISYDGNNKYYADSVKGRFTISRDNSKNTLYLQMDSLRAEDTAIYYCARTGWLGPFDYWGQGTLVTVSSGKPGSGKPGSGKPGSGKPGSEIVLTQSPGTLSLSPGERATLSCRASQSVGSSYLAWYQQKPGQAPRLLIYGAFSRATGIPDRFSGSGSGTDFTLTISRLEPEDFAVYYCQQYGSSPWTFGQGTKVEIK

SEQ ID NO: 1039 - protein, 118 aa, synthetic construct
  source 1..118: note = Description of Artificial Sequence: Synthetic polypeptide; note = VH of XENP019843
QVQLVESGGGVVQPGRSLRLSCAASGFTFSSYTMHWVRQAPGKGLEWVTFISYDGNNKYYADSVKGRFTISRDNSKNTLYLQMDSLRAEDTAIYYCARTGWLGPFDYWGQGTLVTVSS

SEQ ID NO: 1040 - protein, 108 aa, synthetic construct; identical to SEQ ID NO: 23
  source 1..108: note = Description of Artificial Sequence: Synthetic polypeptide; note = VL of XENP019843

SEQ ID NO: 1041 - protein, 5 aa, synthetic construct
  source 1..5: note = Description of Artificial Sequence: Synthetic peptide; note = XENP019843 vhCDR1
SYTMH

SEQ ID NO: 1042 - protein, 17 aa, synthetic construct
  source 1..17: note = Description of Artificial Sequence: Synthetic peptide; note = XENP019843 vhCDR2
FISYDGNNKYYADSVKG

SEQ ID NO: 1043 - protein, 9 aa, synthetic construct
  source 1..9: note = Description of Artificial Sequence: Synthetic peptide; note = XENP019843 vhCDR3
TGWLGPFDY

SEQ ID NO: 1044 - protein, 12 aa, synthetic construct
  source 1..12: note = Description of Artificial Sequence: Synthetic peptide; note = XENP019843 vlCDR1
RASQSVGSSYLA

SEQ ID NO: 1045 - protein, 7 aa, synthetic construct
  source 1..7: note = Description of Artificial Sequence: Synthetic peptide; note = XENP019843 vlCDR2
GAFSRAT

SEQ ID NO: 1046 - protein, 9 aa, synthetic construct
  source 1..9: note = Description of Artificial Sequence: Synthetic peptide; note = XENP019843 vlCDR3
QQYGSSPWT

SEQ ID NO: 1047 - protein, 246 aa, synthetic construct
  source 1..246: note = Description of Artificial Sequence: Synthetic polypeptide; note = XENP019844 [CTLA-4]_H0.96_L0_scFv(GKPGS)4
QVQLVESGGGVVQPGRSLRLSCAASGFTFSSYTMHWVRQAPGKGLEWVTFISYDGNNKYYADSVKGRFTISRDNSKNTLYLQMNDLRAEDTAIYYCARTGWLGPFDYWGQGTLVTVSSGKPGSGKPGSGKPGSGKPGSEIVLTQSPGTLSLSPGERATLSCRASQSVGSSYLAWYQQKPGQAPRLLIYGAFSRATGIPDRFSGSGSGTDFTLTISRLEPEDFAVYYCQQYGSSPWTFGQGTKVEIK

SEQ ID NO: 1048 - protein, 118 aa, synthetic construct
  source 1..118: note = Description of Artificial Sequence: Synthetic polypeptide; note = VH of XENP019844
QVQLVESGGGVVQPGRSLRLSCAASGFTFSSYTMHWVRQAPGKGLEWVTFISYDGNNKYYADSVKGRFTISRDNSKNTLYLQMNDLRAEDTAIYYCARTGWLGPFDYWGQGTLVTVSS

SEQ ID NO: 1049 - protein, 108 aa, synthetic construct; identical to SEQ ID NO: 23
  source 1..108: note = Description of Artificial Sequence: Synthetic polypeptide; note = VL of XENP019844

SEQ ID NO: 1050 - protein, 5 aa, synthetic construct
  source 1..5: note = Description of Artificial Sequence: Synthetic peptide; note = XENP019844 vhCDR1
SYTMH

SEQ ID NO: 1051 - protein, 17 aa, synthetic construct
  source 1..17: note = Description of Artificial Sequence: Synthetic peptide; note = XENP019844 vhCDR2
FISYDGNNKYYADSVKG

SEQ ID NO: 1052 - protein, 9 aa, synthetic construct
  source 1..9: note = Description of Artificial Sequence: Synthetic peptide; note = XENP019844 vhCDR3
TGWLGPFDY

SEQ ID NO: 1053 - protein, 12 aa, synthetic construct
  source 1..12: note = Description of Artificial Sequence: Synthetic peptide; note = XENP019844 vlCDR1
RASQSVGSSYLA

SEQ ID NO: 1054 - protein, 7 aa, synthetic construct
  source 1..7: note = Description of Artificial Sequence: Synthetic peptide; note = XENP019844 vlCDR2
GAFSRAT

SEQ ID NO: 1055 - protein, 9 aa, synthetic construct
  source 1..9: note = Description of Artificial Sequence: Synthetic peptide; note = XENP019844 vlCDR3
QQYGSSPWT

SEQ ID NO: 1056 - protein, 246 aa, synthetic construct
  source 1..246: note = Description of Artificial Sequence: Synthetic polypeptide; note = XENP019845 [CTLA-4]_H0.97_L0_scFv(GKPGS)4
QVQLVESGGGVVQPGRSLRLSCAASGFTFSSYTMHWVRQAPGKGLEWVTFISYDGNNKYYADSVKGRFTISRDNSKNTLYLQMNSLRTEDTAIYYCARTGWLGPFDYWGQGTLVTVSSGKPGSGKPGSGKPGSGKPGSEIVLTQSPGTLSLSPGERATLSCRASQSVGSSYLAWYQQKPGQAPRLLIYGAFSRATGIPDRFSGSGSGTDFTLTISRLEPEDFAVYYCQQYGSSPWTFGQGTKVEIK

SEQ ID NO: 1057 - protein, 118 aa, synthetic construct
  source 1..118: note = Description of Artificial Sequence: Synthetic polypeptide; note = VH of XENP019845
QVQLVESGGGVVQPGRSLRLSCAASGFTFSSYTMHWVRQAPGKGLEWVTFISYDGNNKYYADSVKGRFTISRDNSKNTLYLQMNSLRTEDTAIYYCARTGWLGPFDYWGQGTLVTVSS

SEQ ID NO: 1058 - protein, 108 aa, synthetic construct; identical to SEQ ID NO: 23
  source 1..108: note = Description of Artificial Sequence: Synthetic polypeptide; note = VL of XENP019845

SEQ ID NO: 1059 - protein, 5 aa, synthetic construct
  source 1..5: note = Description of Artificial Sequence: Synthetic peptide; note = XENP019845 vhCDR1
SYTMH

SEQ ID NO: 1060 - protein, 17 aa, synthetic construct
  source 1..17: note = Description of Artificial Sequence: Synthetic peptide; note = XENP019845 vhCDR2
FISYDGNNKYYADSVKG

SEQ ID NO: 1061 - protein, 9 aa, synthetic construct
  source 1..9: note = Description of Artificial Sequence: Synthetic peptide; note = XENP019845 vhCDR3
TGWLGPFDY

SEQ ID NO: 1062 - protein, 12 aa, synthetic construct
  source 1..12: note = Description of Artificial Sequence: Synthetic peptide; note = XENP019845 vlCDR1
RASQSVGSSYLA

SEQ ID NO: 1063 - protein, 7 aa, synthetic construct
  source 1..7: note = Description of Artificial Sequence: Synthetic peptide; note = XENP019845 vlCDR2
GAFSRAT

SEQ ID NO: 1064 - protein, 9 aa, synthetic construct
  source 1..9: note = Description of Artificial Sequence: Synthetic peptide; note = XENP019845 vlCDR3
QQYGSSPWT

SEQ ID NO: 1065 - protein, 246 aa, synthetic construct
  source 1..246: note = Description of Artificial Sequence: Synthetic polypeptide; note = XENP019846 [CTLA-4]_H0.98_L0_scFv(GKPGS)4
QVQLVESGGGVVQPGRSLRLSCAASGFTFSSYTMHWVRQAPGKGLEWVTFISYDGNNKYYADSVKGRFTISRDNSKNTLYLQMNSLRAEDTALYYCARTGWLGPFDYWGQGTLVTVSSGKPGSGKPGSGKPGSGKPGSEIVLTQSPGTLSLSPGERATLSCRASQSVGSSYLAWYQQKPGQAPRLLIYGAFSRATGIPDRFSGSGSGTDFTLTISRLEPEDFAVYYCQQYGSSPWTFGQGTKVEIK

SEQ ID NO: 1066 - protein, 118 aa, synthetic construct
  source 1..118: note = Description of Artificial Sequence: Synthetic polypeptide; note = VH of XENP019846
QVQLVESGGGVVQPGRSLRLSCAASGFTFSSYTMHWVRQAPGKGLEWVTFISYDGNNKYYADSVKGRFTISRDNSKNTLYLQMNSLRAEDTALYYCARTGWLGPFDYWGQGTLVTVSS

SEQ ID NO: 1067 - protein, 108 aa, synthetic construct; identical to SEQ ID NO: 23
  source 1..108: note = Description of Artificial Sequence: Synthetic polypeptide; note = VL of XENP019846

SEQ ID NO: 1068 - protein, 5 aa, synthetic construct
  source 1..5: note = Description of Artificial Sequence: Synthetic peptide; note = XENP019846 vhCDR1
SYTMH

SEQ ID NO: 1069 - protein, 17 aa, synthetic construct
  source 1..17: note = Description of Artificial Sequence: Synthetic peptide; note = XENP019846 vhCDR2
FISYDGNNKYYADSVKG

SEQ ID NO: 1070 - protein, 9 aa, synthetic construct
  source 1..9: note = Description of Artificial Sequence: Synthetic peptide; note = XENP019846 vhCDR3
TGWLGPFDY

SEQ ID NO: 1071 - protein, 12 aa, synthetic construct
  source 1..12: note = Description of Artificial Sequence: Synthetic peptide; note = XENP019846 vlCDR1
RASQSVGSSYLA

SEQ ID NO: 1072 - protein, 7 aa, synthetic construct
  source 1..7: note = Description of Artificial Sequence: Synthetic peptide; note = XENP019846 vlCDR2
GAFSRAT

SEQ ID NO: 1073 - protein, 9 aa, synthetic construct
  source 1..9: note = Description of Artificial Sequence: Synthetic peptide; note = XENP019846 vlCDR3
QQYGSSPWT

SEQ ID NO: 1074 - protein, 246 aa, synthetic construct
  source 1..246: note = Description of Artificial Sequence: Synthetic polypeptide; note = XENP019847 [CTLA-4]_H0.99_L0_scFv(GKPGS)4
QVQLVESGGGVVQPGRSLRLSCAASGFTFSSYTMHWVRQAPGKGLEWVTFISYDGNNKYYADSVKGRFTISRDNSKNTLYLQMNSLRAEDTAVYYCARTGWLGPFDYWGQGTLVTVSSGKPGSGKPGSGKPGSGKPGSEIVLTQSPGTLSLSPGERATLSCRASQSVGSSYLAWYQQKPGQAPRLLIYGAFSRATGIPDRFSGSGSGTDFTLTISRLEPEDFAVYYCQQYGSSPWTFGQGTKVEIK

SEQ ID NO: 1075 - protein, 118 aa, synthetic construct
  source 1..118: note = Description of Artificial Sequence: Synthetic polypeptide; note = VH of XENP019847
QVQLVESGGGVVQPGRSLRLSCAASGFTFSSYTMHWVRQAPGKGLEWVTFISYDGNNKYYADSVKGRFTISRDNSKNTLYLQMNSLRAEDTAVYYCARTGWLGPFDYWGQGTLVTVSS

SEQ ID NO: 1076 - protein, 108 aa, synthetic construct; identical to SEQ ID NO: 23
  source 1..108: note = Description of Artificial Sequence: Synthetic polypeptide; note = VL of XENP019847

SEQ ID NO: 1077 - protein, 5 aa, synthetic construct
  source 1..5: note = Description of Artificial Sequence: Synthetic peptide; note = XENP019847 vhCDR1
SYTMH

SEQ ID NO: 1078 - protein, 17 aa, synthetic construct
  source 1..17: note = Description of Artificial Sequence: Synthetic peptide; note = XENP019847 vhCDR2
FISYDGNNKYYADSVKG

SEQ ID NO: 1079 - protein, 9 aa, synthetic construct
  source 1..9: note = Description of Artificial Sequence: Synthetic peptide; note = XENP019847 vhCDR3
TGWLGPFDY

SEQ ID NO: 1080 - protein, 12 aa, synthetic construct
  source 1..12: note = Description of Artificial Sequence: Synthetic peptide; note = XENP019847 vlCDR1
RASQSVGSSYLA

SEQ ID NO: 1081 - protein, 7 aa, synthetic construct
  source 1..7: note = Description of Artificial Sequence: Synthetic peptide; note = XENP019847 vlCDR2
GAFSRAT

SEQ ID NO: 1082 - protein, 9 aa, synthetic construct
  source 1..9: note = Description of Artificial Sequence: Synthetic peptide; note = XENP019847 vlCDR3
QQYGSSPWT

SEQ ID NO: 1083 - protein, 246 aa, synthetic construct
  source 1..246: note = Description of Artificial Sequence: Synthetic polypeptide; note = XENP019848 [CTLA-4]_H0.100_L0_scFv(GKPGS)4
QVQLVESGGGVVQPGRSLRLSCAASGFTFSSYTMHWVRQAPGKGLEWVTFISYDGNNKYYADSVKGRFTISRDNSKNTLYLQMNSLRAEDTAIYYCTRTGWLGPFDYWGQGTLVTVSSGKPGSGKPGSGKPGSGKPGSEIVLTQSPGTLSLSPGERATLSCRASQSVGSSYLAWYQQKPGQAPRLLIYGAFSRATGIPDRFSGSGSGTDFTLTISRLEPEDFAVYYCQQYGSSPWTFGQGTKVEIK

SEQ ID NO: 1084 - protein, 118 aa, synthetic construct
  source 1..118: note = Description of Artificial Sequence: Synthetic polypeptide; note = VH of XENP019848
QVQLVESGGGVVQPGRSLRLSCAASGFTFSSYTMHWVRQAPGKGLEWVTFISYDGNNKYYADSVKGRFTISRDNSKNTLYLQMNSLRAEDTAIYYCTRTGWLGPFDYWGQGTLVTVSS

SEQ ID NO: 1085 - protein, 108 aa, synthetic construct; identical to SEQ ID NO: 23
  source 1..108: note = Description of Artificial Sequence: Synthetic polypeptide; note = VL of XENP019848

SEQ ID NO: 1086 - protein, 5 aa, synthetic construct
  source 1..5: note = Description of Artificial Sequence: Synthetic peptide; note = XENP019848 vhCDR1
SYTMH

SEQ ID NO: 1087 - protein, 17 aa, synthetic construct
  source 1..17: note = Description of Artificial Sequence: Synthetic peptide; note = XENP019848 vhCDR2
FISYDGNNKYYADSVKG

SEQ ID NO: 1088 - protein, 9 aa, synthetic construct
  source 1..9: note = Description of Artificial Sequence: Synthetic peptide; note = XENP019848 vhCDR3
TGWLGPFDY

SEQ ID NO: 1089 - protein, 12 aa, synthetic construct
  source 1..12: note = Description of Artificial Sequence: Synthetic peptide; note = XENP019848 vlCDR1
RASQSVGSSYLA

SEQ ID NO: 1090 - protein, 7 aa, synthetic construct
  source 1..7: note = Description of Artificial Sequence: Synthetic peptide; note = XENP019848 vlCDR2
GAFSRAT

SEQ ID NO: 1091 - protein, 9 aa, synthetic construct
  source 1..9: note = Description of Artificial Sequence: Synthetic peptide; note = XENP019848 vlCDR3
QQYGSSPWT

SEQ ID NO: 1092 - protein, 246 aa, synthetic construct
  source 1..246: note = Description of Artificial Sequence: Synthetic polypeptide; note = XENP019849 [CTLA-4]_H0.101_L0_scFv(GKPGS)4
QVQLVESGGGVVQPGRSLRLSCAASGFTFSSYTMHWVRQAPGKGLEWVTFISYDGNNKYYADSVKGRFTISRDNSKNTLYLQMNSLRAEDTAIYYCAKTGWLGPFDYWGQGTLVTVSSGKPGSGKPGSGKPGSGKPGSEIVLTQSPGTLSLSPGERATLSCRASQSVGSSYLAWYQQKPGQAPRLLIYGAFSRATGIPDRFSGSGSGTDFTLTISRLEPEDFAVYYCQQYGSSPWTFGQGTKVEIK

SEQ ID NO: 1093 - protein, 118 aa, synthetic construct
  source 1..118: note = Description of Artificial Sequence: Synthetic polypeptide; note = VH of XENP019849
QVQLVESGGGVVQPGRSLRLSCAASGFTFSSYTMHWVRQAPGKGLEWVTFISYDGNNKYYADSVKGRFTISRDNSKNTLYLQMNSLRAEDTAIYYCAKTGWLGPFDYWGQGTLVTVSS

SEQ ID NO: 1094 - protein, 108 aa, synthetic construct; identical to SEQ ID NO: 23
  source 1..108: note = Description of Artificial Sequence: Synthetic polypeptide; note = VL of XENP019849

SEQ ID NO: 1095 - protein, 5 aa, synthetic construct
  source 1..5: note = Description of Artificial Sequence: Synthetic peptide; note = XENP019849 vhCDR1
SYTMH

SEQ ID NO: 1096 - protein, 17 aa, synthetic construct
  source 1..17: note = Description of Artificial Sequence: Synthetic peptide; note = XENP019849 vhCDR2
FISYDGNNKYYADSVKG

SEQ ID NO: 1097 - protein, 9 aa, synthetic construct
  source 1..9: note = Description of Artificial Sequence: Synthetic peptide; note = XENP019849 vhCDR3
TGWLGPFDY

SEQ ID NO: 1098 - protein, 12 aa, synthetic construct
  source 1..12: note = Description of Artificial Sequence: Synthetic peptide; note = XENP019849 vlCDR1
RASQSVGSSYLA

SEQ ID NO: 1099 - protein, 7 aa, synthetic construct
  source 1..7: note = Description of Artificial Sequence: Synthetic peptide; note = XENP019849 vlCDR2
GAFSRAT

SEQ ID NO: 1100 - protein, 9 aa, synthetic construct
  source 1..9: note = Description of Artificial Sequence: Synthetic peptide; note = XENP019849 vlCDR3
QQYGSSPWT

SEQ ID NO: 1101 - protein, 246 aa, synthetic construct
  source 1..246: note = Description of Artificial Sequence: Synthetic polypeptide; note = XENP019850 [CTLA-4]_H0.102_L0_scFv(GKPGS)4
QVQLVESGGGVVQPGRSLRLSCAASGFTFSSYTMHWVRQAPGKGLEWVTFISYDGNNKYYADSVKGRFTISRDNSKNTLYLQMNSLRAEDTAIYYCARAGWLGPFDYWGQGTLVTVSSGKPGSGKPGSGKPGSGKPGSEIVLTQSPGTLSLSPGERATLSCRASQSVGSSYLAWYQQKPGQAPRLLIYGAFSRATGIPDRFSGSGSGTDFTLTISRLEPEDFAVYYCQQYGSSPWTFGQGTKVEIK

SEQ ID NO: 1102 - protein, 118 aa, synthetic construct
  source 1..118: note = Description of Artificial Sequence: Synthetic polypeptide; note = VH of XENP019850
QVQLVESGGGVVQPGRSLRLSCAASGFTFSSYTMHWVRQAPGKGLEWVTFISYDGNNKYYADSVKGRFTISRDNSKNTLYLQMNSLRAEDTAIYYCARAGWLGPFDYWGQGTLVTVSS

SEQ ID NO: 1103 - protein, 108 aa, synthetic construct; identical to SEQ ID NO: 23
  source 1..108: note = Description of Artificial Sequence: Synthetic polypeptide; note = VL of XENP019850

SEQ ID NO: 1104 - protein, 5 aa, synthetic construct
  source 1..5: note = Description of Artificial Sequence: Synthetic peptide; note = XENP019850 vhCDR1
SYTMH

SEQ ID NO: 1105 - protein, 17 aa, synthetic construct
  source 1..17: note = Description of Artificial Sequence: Synthetic peptide; note = XENP019850 vhCDR2
FISYDGNNKYYADSVKG

SEQ ID NO: 1106 - protein, 9 aa, synthetic construct
  source 1..9: note = Description of Artificial Sequence: Synthetic peptide; note = XENP019850 vhCDR3
AGWLGPFDY

SEQ ID NO: 1107 - protein, 12 aa, synthetic construct
  source 1..12: note = Description of Artificial Sequence: Synthetic peptide; note = XENP019850 vlCDR1
RASQSVGSSYLA

SEQ ID NO: 1108 - protein, 7 aa, synthetic construct
  source 1..7: note = Description of Artificial Sequence: Synthetic peptide; note = XENP019850 vlCDR2
GAFSRAT

SEQ ID NO: 1109 - protein, 9 aa, synthetic construct
  source 1..9: note = Description of Artificial Sequence: Synthetic peptide; note = XENP019850 vlCDR3
QQYGSSPWT

SEQ ID NO: 1110 - protein, 246 aa, synthetic construct
  source 1..246: note = Description of Artificial Sequence: Synthetic polypeptide; note = XENP019851 [CTLA-4]_H0.103_L0_scFv(GKPGS)4
QVQLVESGGGVVQPGRSLRLSCAASGFTFSSYTMHWVRQAPGKGLEWVTFISYDGNNKYYADSVKGRFTISRDNSKNTLYLQMNSLRAEDTAIYYCARGGWLGPFDYWGQGTLVTVSSGKPGSGKPGSGKPGSGKPGSEIVLTQSPGTLSLSPGERATLSCRASQSVGSSYLAWYQQKPGQAPRLLIYGAFSRATGIPDRFSGSGSGTDFTLTISRLEPEDFAVYYCQQYGSSPWTFGQGTKVEIK

SEQ ID NO: 1111 - protein, 118 aa, synthetic construct
  source 1..118: note = Description of Artificial Sequence: Synthetic polypeptide; note = VH of XENP019851
QVQLVESGGGVVQPGRSLRLSCAASGFTFSSYTMHWVRQAPGKGLEWVTFISYDGNNKYYADSVKGRFTISRDNSKNTLYLQMNSLRAEDTAIYYCARGGWLGPFDYWGQGTLVTVSS

SEQ ID NO: 1112 - protein, 108 aa, synthetic construct; identical to SEQ ID NO: 23
  source 1..108: note = Description of Artificial Sequence: Synthetic polypeptide; note = VL of XENP019851

SEQ ID NO: 1113 - protein, 5 aa, synthetic construct
  source 1..5: note = Description of Artificial Sequence: Synthetic peptide; note = XENP019851 vhCDR1
SYTMH

SEQ ID NO: 1114 - protein, 17 aa, synthetic construct
  source 1..17: note = Description of Artificial Sequence: Synthetic peptide; note = XENP019851 vhCDR2
FISYDGNNKYYADSVKG

SEQ ID NO: 1115 - protein, 9 aa, synthetic construct
  source 1..9: note = Description of Artificial Sequence: Synthetic peptide; note = XENP019851 vhCDR3
GGWLGPFDY

SEQ ID NO: 1116 - protein, 12 aa, synthetic construct
  source 1..12: note = Description of Artificial Sequence: Synthetic peptide; note = XENP019851 vlCDR1
RASQSVGSSYLA

SEQ ID NO: 1117 - protein, 7 aa, synthetic construct
  source 1..7: note = Description of Artificial Sequence: Synthetic peptide; note = XENP019851 vlCDR2
GAFSRAT

SEQ ID NO: 1118 - protein, 9 aa, synthetic construct
  source 1..9: note = Description of Artificial Sequence: Synthetic peptide; note = XENP019851 vlCDR3
QQYGSSPWT

SEQ ID NO: 1119 - protein, 246 aa, synthetic construct
  source 1..246: note = Description of Artificial Sequence: Synthetic polypeptide; note = XENP019852 [CTLA-4]_H0.104_L0_scFv(GKPGS)4
QVQLVESGGGVVQPGRSLRLSCAASGFTFSSYTMHWVRQAPGKGLEWVTFISYDGNNKYYADSVKGRFTISRDNSKNTLYLQMNSLRAEDTAIYYCARDGWLGPFDYWGQGTLVTVSSGKPGSGKPGSGKPGSGKPGSEIVLTQSPGTLSLSPGERATLSCRASQSVGSSYLAWYQQKPGQAPRLLIYGAFSRATGIPDRFSGSGSGTDFTLTISRLEPEDFAVYYCQQYGSSPWTFGQGTKVEIK

SEQ ID NO: 1120 - protein, 118 aa, synthetic construct
  source 1..118: note = Description of Artificial Sequence: Synthetic polypeptide; note = VH of XENP019852
QVQLVESGGGVVQPGRSLRLSCAASGFTFSSYTMHWVRQAPGKGLEWVTFISYDGNNKYYADSVKGRFTISRDNSKNTLYLQMNSLRAEDTAIYYCARDGWLGPFDYWGQGTLVTVSS

SEQ ID NO: 1121 - protein, 108 aa, synthetic construct; identical to SEQ ID NO: 23
  source 1..108: note = Description of Artificial Sequence: Synthetic polypeptide; note = VL of XENP019852

SEQ ID NO: 1122 - protein, 5 aa, synthetic construct
  source 1..5: note = Description of Artificial Sequence: Synthetic peptide; note = XENP019852 vhCDR1
SYTMH

SEQ ID NO: 1123 - protein, 17 aa, synthetic construct
  source 1..17: note = Description of Artificial Sequence: Synthetic peptide; note = XENP019852 vhCDR2
FISYDGNNKYYADSVKG

SEQ ID NO: 1124 - protein, 9 aa, synthetic construct
  source 1..9: note = Description of Artificial Sequence: Synthetic peptide; note = XENP019852 vhCDR3
DGWLGPFDY

SEQ ID NO: 1125 - protein, 12 aa, synthetic construct
  source 1..12: note = Description of Artificial Sequence: Synthetic peptide; note = XENP019852 vlCDR1
RASQSVGSSYLA

SEQ ID NO: 1126 - protein, 7 aa, synthetic construct
  source 1..7: note = Description of Artificial Sequence: Synthetic peptide; note = XENP019852 vlCDR2
GAFSRAT

SEQ ID NO: 1127 - protein, 9 aa, synthetic construct
  source 1..9: note = Description of Artificial Sequence: Synthetic peptide; note = XENP019852 vlCDR3
QQYGSSPWT

SEQ ID NO: 1128 - protein, 246 aa, synthetic construct
  source 1..246: note = Description of Artificial Sequence: Synthetic polypeptide; note = XENP019853 [CTLA-4]_H0.105_L0_scFv(GKPGS)4
QVQLVESGGGVVQPGRSLRLSCAASGFTFSSYTMHWVRQAPGKGLEWVTFISYDGNNKYYADSVKGRFTISRDNSKNTLYLQMNSLRAEDTAIYYCARSGWLGPFDYWGQGTLVTVSSGKPGSGKPGSGKPGSGKPGSEIVLTQSPGTLSLSPGERATLSCRASQSVGSSYLAWYQQKPGQAPRLLIYGAFSRATGIPDRFSGSGSGTDFTLTISRLEPEDFAVYYCQQYGSSPWTFGQGTKVEIK

SEQ ID NO: 1129 - protein, 118 aa, synthetic construct
  source 1..118: note = Description of Artificial Sequence: Synthetic polypeptide; note = VH of XENP019853
QVQLVESGGGVVQPGRSLRLSCAASGFTFSSYTMHWVRQAPGKGLEWVTFISYDGNNKYYADSVKGRFTISRDNSKNTLYLQMNSLRAEDTAIYYCARSGWLGPFDYWGQGTLVTVSS

SEQ ID NO: 1130 - protein, 108 aa, synthetic construct; identical to SEQ ID NO: 23
  source 1..108: note = Description of Artificial Sequence: Synthetic polypeptide; note = VL of XENP019853

SEQ ID NO: 1131 - protein, 5 aa, synthetic construct
  source 1..5: note = Description of Artificial Sequence: Synthetic peptide; note = XENP019853 vhCDR1
SYTMH

SEQ ID NO: 1132 - protein, 17 aa, synthetic construct
  source 1..17: note = Description of Artificial Sequence: Synthetic peptide; note = XENP019853 vhCDR2
FISYDGNNKYYADSVKG

SEQ ID NO: 1133 - protein, 9 aa, synthetic construct
  source 1..9: note = Description of Artificial Sequence: Synthetic peptide; note = XENP019853 vhCDR3
SGWLGPFDY

SEQ ID NO: 1134 - protein, 12 aa, synthetic construct
  source 1..12: note = Description of Artificial Sequence: Synthetic peptide; note = XENP019853 vlCDR1
RASQSVGSSYLA

SEQ ID NO: 1135 - protein, 7 aa, synthetic construct
  source 1..7: note = Description of Artificial Sequence: Synthetic peptide; note = XENP019853 vlCDR2
GAFSRAT

SEQ ID NO: 1136 - protein, 9 aa, synthetic construct
  source 1..9: note = Description of Artificial Sequence: Synthetic peptide; note = XENP019853 vlCDR3
QQYGSSPWT

SEQ ID NO: 1137 - protein, 246 aa, synthetic construct
  source 1..246: note = Description of Artificial Sequence: Synthetic polypeptide; note = XENP019854 [CTLA-4]_H0.106_L0_scFv(GKPGS)4
QVQLVESGGGVVQPGRSLRLSCAASGFTFSSYTMHWVRQAPGKGLEWVTFISYDGNNKYYADSVKGRFTISRDNSKNTLYLQMNSLRAEDTAIYYCARVGWLGPFDYWGQGTLVTVSSGKPGSGKPGSGKPGSGKPGSEIVLTQSPGTLSLSPGERATLSCRASQSVGSSYLAWYQQKPGQAPRLLIYGAFSRATGIPDRFSGSGSGTDFTLTISRLEPEDFAVYYCQQYGSSPWTFGQGTKVEIK

SEQ ID NO: 1138 - protein, 118 aa, synthetic construct
  source 1..118: note = Description of Artificial Sequence: Synthetic polypeptide; note = VH of XENP019854
QVQLVESGGGVVQPGRSLRLSCAASGFTFSSYTMHWVRQAPGKGLEWVTFISYDGNNKYYADSVKGRFTISRDNSKNTLYLQMNSLRAEDTAIYYCARVGWLGPFDYWGQGTLVTVSS

SEQ ID NO: 1139 - protein, 108 aa, synthetic construct; identical to SEQ ID NO: 23
  source 1..108: note = Description of Artificial Sequence: Synthetic polypeptide; note = VL of XENP019854

SEQ ID NO: 1140 - protein, 5 aa, synthetic construct
  source 1..5: note = Description of Artificial Sequence: Synthetic peptide; note = XENP019854 vhCDR1
SYTMH

SEQ ID NO: 1141 - protein, 17 aa, synthetic construct
  source 1..17: note = Description of Artificial Sequence: Synthetic peptide; note = XENP019854 vhCDR2
FISYDGNNKYYADSVKG

SEQ ID NO: 1142 - protein, 9 aa, synthetic construct
  source 1..9: note = Description of Artificial Sequence: Synthetic peptide; note = XENP019854 vhCDR3
VGWLGPFDY

SEQ ID NO: 1143 - protein, 12 aa, synthetic construct
  source 1..12: note = Description of Artificial Sequence: Synthetic peptide; note = XENP019854 vlCDR1
RASQSVGSSYLA

SEQ ID NO: 1144 - protein, 7 aa, synthetic construct
  source 1..7: note = Description of Artificial Sequence: Synthetic peptide; note = XENP019854 vlCDR2
GAFSRAT

SEQ ID NO: 1145 - protein, 9 aa, synthetic construct
  source 1..9: note = Description of Artificial Sequence: Synthetic peptide; note = XENP019854 vlCDR3
QQYGSSPWT

SEQ ID NO: 1146 - protein, 246 aa, synthetic construct
  source 1..246: note = Description of Artificial Sequence: Synthetic polypeptide; note = XENP019855 [CTLA-4]_H0.107_L0_scFv(GKPGS)4
QVQLVESGGGVVQPGRSLRLSCAASGFTFSSYTMHWVRQAPGKGLEWVTFISYDGNNKYYADSVKGRFTISRDNSKNTLYLQMNSLRAEDTAIYYCARYGWLGPFDYWGQGTLVTVSSGKPGSGKPGSGKPGSGKPGSEIVLTQSPGTLSLSPGERATLSCRASQSVGSSYLAWYQQKPGQAPRLLIYGAFSRATGIPDRFSGSGSGTDFTLTISRLEPEDFAVYYCQQYGSSPWTFGQGTKVEIK

SEQ ID NO: 1147 - protein, 118 aa, synthetic construct
  source 1..118: note = Description of Artificial Sequence: Synthetic polypeptide; note = VH of XENP019855
QVQLVESGGGVVQPGRSLRLSCAASGFTFSSYTMHWVRQAPGKGLEWVTFISYDGNNKYYADSVKGRFTISRDNSKNTLYLQMNSLRAEDTAIYYCARYGWLGPFDYWGQGTLVTVSS

SEQ ID NO: 1148 - protein, 108 aa, synthetic construct; identical to SEQ ID NO: 23
  source 1..108: note = Description of Artificial Sequence: Synthetic polypeptide; note = VL of XENP019855

SEQ ID NO: 1149 - protein, 5 aa, synthetic construct
  source 1..5: note = Description of Artificial Sequence: Synthetic peptide; note = XENP019855 vhCDR1
SYTMH

SEQ ID NO: 1150 - protein, 17 aa, synthetic construct
  source 1..17: note = Description of Artificial Sequence: Synthetic peptide; note = XENP019855 vhCDR2
FISYDGNNKYYADSVKG

SEQ ID NO: 1151 - protein, 9 aa, synthetic construct
  source 1..9: note = Description of Artificial Sequence: Synthetic peptide; note = XENP019855 vhCDR3
YGWLGPFDY

SEQ ID NO: 1152 - protein, 12 aa, synthetic construct
  source 1..12: note = Description of Artificial Sequence: Synthetic peptide; note = XENP019855 vlCDR1
RASQSVGSSYLA

SEQ ID NO: 1153 - protein, 7 aa, synthetic construct
  source 1..7: note = Description of Artificial Sequence: Synthetic peptide; note = XENP019855 vlCDR2
GAFSRAT

SEQ ID NO: 1154 - protein, 9 aa, synthetic construct
  source 1..9: note = Description of Artificial Sequence: Synthetic peptide; note = XENP019855 vlCDR3
QQYGSSPWT

SEQ ID NO: 1155 - protein, 246 aa, synthetic construct
  source 1..246: note = Description of Artificial Sequence: Synthetic polypeptide; note = XENP019856 [CTLA-4]_H0.108_L0_scFv(GKPGS)4
QVQLVESGGGVVQPGRSLRLSCAASGFTFSSYTMHWVRQAPGKGLEWVTFISYDGNNKYYADSVKGRFTISRDNSKNTLYLQMNSLRAEDTAIYYCARTAWLGPFDYWGQGTLVTVSSGKPGSGKPGSGKPGSGKPGSEIVLTQSPGTLSLSPGERATLSCRASQSVGSSYLAWYQQKPGQAPRLLIYGAFSRATGIPDRFSGSGSGTDFTLTISRLEPEDFAVYYCQQYGSSPWTFGQGTKVEIK

SEQ ID NO: 1156 - protein, 118 aa, synthetic construct
  source 1..118: note = Description of Artificial Sequence: Synthetic polypeptide; note = VH of XENP019856
QVQLVESGGGVVQPGRSLRLSCAASGFTFSSYTMHWVRQAPGKGLEWVTFISYDGNNKYYADSVKGRFTISRDNSKNTLYLQMNSLRAEDTAIYYCARTAWLGPFDYWGQGTLVTVSS

SEQ ID NO: 1157 - protein, 108 aa, synthetic construct; identical to SEQ ID NO: 23
  source 1..108: note = Description of Artificial Sequence: Synthetic polypeptide; note = VL of XENP019856

SEQ ID NO: 1158 - protein, 5 aa, synthetic construct
  source 1..5: note = Description of Artificial Sequence: Synthetic peptide; note = XENP019856 vhCDR1
SYTMH

SEQ ID NO: 1159 - protein, 17 aa, synthetic construct
  source 1..17: note = Description of Artificial Sequence: Synthetic peptide; note = XENP019856 vhCDR2
FISYDGNNKYYADSVKG

SEQ ID NO: 1160 - protein, 9 aa, synthetic construct
  source 1..9: note = Description of Artificial Sequence: Synthetic peptide; note = XENP019856 vhCDR3
TAWLGPFDY

SEQ ID NO: 1161 - protein, 12 aa, synthetic construct
  source 1..12: note = Description of Artificial Sequence: Synthetic peptide; note = XENP019856 vlCDR1
RASQSVGSSYLA

SEQ ID NO: 1162 - protein, 7 aa, synthetic construct
  source 1..7: note = Description of Artificial Sequence: Synthetic peptide; note = XENP019856 vlCDR2
GAFSRAT

SEQ ID NO: 1163 - protein, 9 aa, synthetic construct
  source 1..9: note = Description of Artificial Sequence: Synthetic peptide; note = XENP019856 vlCDR3
QQYGSSPWT

SEQ ID NO: 1164 - protein, 246 aa, synthetic construct
  source 1..246: note = Description of Artificial Sequence: Synthetic polypeptide; note = XENP019857 [CTLA-4]_H0.109_L0_scFv(GKPGS)4
QVQLVESGGGVVQPGRSLRLSCAASGFTFSSYTMHWVRQAPGKGLEWVTFISYDGNNKYYADSVKGRFTISRDNSKNTLYLQMNSLRAEDTAIYYCARTSWLGPFDYWGQGTLVTVSSGKPGSGKPGSGKPGSGKPGSEIVLTQSPGTLSLSPGERATLSCRASQSVGSSYLAWYQQKPGQAPRLLIYGAFSRATGIPDRFSGSGSGTDFTLTISRLEPEDFAVYYCQQYGSSPWTFGQGTKVEIK

SEQ ID NO: 1165 - protein, 118 aa, synthetic construct
  source 1..118: note = Description of Artificial Sequence: Synthetic polypeptide; note = VH of XENP019857
QVQLVESGGGVVQPGRSLRLSCAASGFTFSSYTMHWVRQAPGKGLEWVTFISYDGNNKYYADSVKGRFTISRDNSKNTLYLQMNSLRAEDTAIYYCARTSWLGPFDYWGQGTLVTVSS

SEQ ID NO: 1166 - protein, 108 aa, synthetic construct; identical to SEQ ID NO: 23
  source 1..108: note = Description of Artificial Sequence: Synthetic polypeptide; note = VL of XENP019857

SEQ ID NO: 1167 - protein, 5 aa, synthetic construct
  source 1..5: note = Description of Artificial Sequence: Synthetic peptide; note = XENP019857 vhCDR1
SYTMH

SEQ ID NO: 1168 - protein, 17 aa, synthetic construct
  source 1..17: note = Description of Artificial Sequence: Synthetic peptide; note = XENP019857 vhCDR2
FISYDGNNKYYADSVKG

SEQ ID NO: 1169 - protein, 9 aa, synthetic construct
  source 1..9: note = Description of Artificial Sequence: Synthetic peptide; note = XENP019857 vhCDR3
TSWLGPFDY

SEQ ID NO: 1170 - protein, 12 aa, synthetic construct
  source 1..12: note = Description of Artificial Sequence: Synthetic peptide; note = XENP019857 vlCDR1
RASQSVGSSYLA

SEQ ID NO: 1171 - protein, 7 aa, synthetic construct
  source 1..7: note = Description of Artificial Sequence: Synthetic peptide; note = XENP019857 vlCDR2
GAFSRAT

SEQ ID NO: 1172 - protein, 9 aa, synthetic construct
  source 1..9: note = Description of Artificial Sequence: Synthetic peptide; note = XENP019857 vlCDR3
QQYGSSPWT

SEQ ID NO: 1173 - protein, 246 aa, synthetic construct
  source 1..246: note = Description of Artificial Sequence: Synthetic polypeptide; note = XENP019858 [CTLA-4]_H0.110_L0_scFv(GKPGS)4
QVQLVESGGGVVQPGRSLRLSCAASGFTFSSYTMHWVRQAPGKGLEWVTFISYDGNNKYYADSVKGRFTISRDNSKNTLYLQMNSLRAEDTAIYYCARTTWLGPFDYWGQGTLVTVSSGKPGSGKPGSGKPGSGKPGSEIVLTQSPGTLSLSPGERATLSCRASQSVGSSYLAWYQQKPGQAPRLLIYGAFSRATGIPDRFSGSGSGTDFTLTISRLEPEDFAVYYCQQYGSSPWTFGQGTKVEIK

SEQ ID NO: 1174 - protein, 118 aa, synthetic construct
  source 1..118: note = Description of Artificial Sequence: Synthetic polypeptide; note = VH of XENP019858
QVQLVESGGGVVQPGRSLRLSCAASGFTFSSYTMHWVRQAPGKGLEWVTFISYDGNNKYYADSVKGRFTISRDNSKNTLYLQMNSLRAEDTAIYYCARTTWLGPFDYWGQGTLVTVSS

SEQ ID NO: 1175 - protein, 108 aa, synthetic construct; identical to SEQ ID NO: 23
  source 1..108: note = Description of Artificial Sequence: Synthetic polypeptide; note = VL of XENP019858

SEQ ID NO: 1176 - protein, 5 aa, synthetic construct
  source 1..5: note = Description of Artificial Sequence: Synthetic peptide; note = XENP019858 vhCDR1
SYTMH

SEQ ID NO: 1177 - protein, 17 aa, synthetic construct
  source 1..17: note = Description of Artificial Sequence: Synthetic peptide; note = XENP019858 vhCDR2
FISYDGNNKYYADSVKG

SEQ ID NO: 1178 - protein, 9 aa, synthetic construct
  source 1..9: note = Description of Artificial Sequence: Synthetic peptide; note = XENP019858 vhCDR3
TTWLGPFDY

SEQ ID NO: 1179 - protein, 12 aa, synthetic construct
  source 1..12: note = Description of Artificial Sequence: Synthetic peptide; note = XENP019858 vlCDR1
RASQSVGSSYLA

SEQ ID NO: 1180 - protein, 7 aa, synthetic construct
  source 1..7: note = Description of Artificial Sequence: Synthetic peptide; note = XENP019858 vlCDR2
GAFSRAT

SEQ ID NO: 1181 - protein, 9 aa, synthetic construct
  source 1..9: note = Description of Artificial Sequence: Synthetic peptide; note = XENP019858 vlCDR3
QQYGSSPWT

SEQ ID NO: 1182 - protein, 246 aa, synthetic construct
  source 1..246: note = Description of Artificial Sequence: Synthetic polypeptide; note = XENP019859 [CTLA-4]_H0.111_L0_scFv(GKPGS)4
QVQLVESGGGVVQPGRSLRLSCAASGFTFSSYTMHWVRQAPGKGLEWVTFISYDGNNKYYADSVKGRFTISRDNSKNTLYLQMNSLRAEDTAIYYCARTGFLGPFDYWGQGTLVTVSSGKPGSGKPGSGKPGSGKPGSEIVLTQSPGTLSLSPGERATLSCRASQSVGSSYLAWYQQKPGQAPRLLIYGAFSRATGIPDRFSGSGSGTDFTLTISRLEPEDFAVYYCQQYGSSPWTFGQGTKVEIK

SEQ ID NO: 1183 - protein, 118 aa, synthetic construct
  source 1..118: note = Description of Artificial Sequence: Synthetic polypeptide; note = VH of XENP019859
QVQLVESGGGVVQPGRSLRLSCAASGFTFSSYTMHWVRQAPGKGLEWVTFISYDGNNKYYADSVKGRFTISRDNSKNTLYLQMNSLRAEDTAIYYCARTGFLGPFDYWGQGTLVTVSS

SEQ ID NO: 1184 - protein, 108 aa, synthetic construct; identical to SEQ ID NO: 23
  source 1..108: note = Description of Artificial Sequence: Synthetic polypeptide; note = VL of XENP019859

SEQ ID NO: 1185 - protein, 5 aa, synthetic construct
  source 1..5: note = Description of Artificial Sequence: Synthetic peptide; note = XENP019859 vhCDR1
SYTMH

SEQ ID NO: 1186 - protein, 17 aa, synthetic construct
  source 1..17: note = Description of Artificial Sequence: Synthetic peptide; note = XENP019859 vhCDR2
FISYDGNNKYYADSVKG

SEQ ID NO: 1187 - protein, 9 aa, synthetic construct
  source 1..9: note = Description of Artificial Sequence: Synthetic peptide; note = XENP019859 vhCDR3
TGFLGPFDY

SEQ ID NO: 1188 - protein, 12 aa, synthetic construct
  source 1..12: note = Description of Artificial Sequence: Synthetic peptide; note = XENP019859 vlCDR1
RASQSVGSSYLA

SEQ ID NO: 1189 - protein, 7 aa, synthetic construct
  source 1..7: note = Description of Artificial Sequence: Synthetic peptide; note = XENP019859 vlCDR2
GAFSRAT

SEQ ID NO: 1190 - protein, 9 aa, synthetic construct
  source 1..9: note = Description of Artificial Sequence: Synthetic peptide; note = XENP019859 vlCDR3
QQYGSSPWT

SEQ ID NO: 1191 - protein, 246 aa, synthetic construct
  source 1..246: note = Description of Artificial Sequence: Synthetic polypeptide; note = XENP019860 [CTLA-4]_H0.112_L0_scFv(GKPGS)4
QVQLVESGGGVVQPGRSLRLSCAASGFTFSSYTMHWVRQAPGKGLEWVTFISYDGNNKYYADSVKGRFTISRDNSKNTLYLQMNSLRAEDTAIYYCARTGGLGPFDYWGQGTLVTVSSGKPGSGKPGSGKPGSGKPGSEIVLTQSPGTLSLSPGERATLSCRASQSVGSSYLAWYQQKPGQAPRLLIYGAFSRATGIPDRFSGSGSGTDFTLTISRLEPEDFAVYYCQQYGSSPWTFGQGTKVEIK

SEQ ID NO: 1192 - protein, 118 aa, synthetic construct
  source 1..118: note = Description of Artificial Sequence: Synthetic polypeptide; note = VH of XENP019860
QVQLVESGGGVVQPGRSLRLSCAASGFTFSSYTMHWVRQAPGKGLEWVTFISYDGNNKYYADSVKGRFTISRDNSKNTLYLQMNSLRAEDTAIYYCARTGGLGPFDYWGQGTLVTVSS

SEQ ID NO: 1193 - protein, 108 aa, synthetic construct; identical to SEQ ID NO: 23
  source 1..108: note = Description of Artificial Sequence: Synthetic polypeptide; note = VL of XENP019860

SEQ ID NO: 1194 - protein, 5 aa, synthetic construct
  source 1..5: note = Description of Artificial Sequence: Synthetic peptide; note = XENP019860 vhCDR1
SYTMH

SEQ ID NO: 1195 - protein, 17 aa, synthetic construct
  source 1..17: note = Description of Artificial Sequence: Synthetic peptide; note = XENP019860 vhCDR2
FISYDGNNKYYADSVKG

SEQ ID NO: 1196 - protein, 9 aa, synthetic construct
  source 1..9: note = Description of Artificial Sequence: Synthetic peptide; note = XENP019860 vhCDR3
TGGLGPFDY

SEQ ID NO: 1197 - protein, 12 aa, synthetic construct
  source 1..12: note = Description of Artificial Sequence: Synthetic peptide; note = XENP019860 vlCDR1
RASQSVGSSYLA

SEQ ID NO: 1198 - protein, 7 aa, synthetic construct
  source 1..7: note = Description of Artificial Sequence: Synthetic peptide; note = XENP019860 vlCDR2
GAFSRAT

SEQ ID NO: 1199 - protein, 9 aa, synthetic construct
  source 1..9: note = Description of Artificial Sequence: Synthetic peptide; note = XENP019860 vlCDR3
QQYGSSPWT

SEQ ID NO: 1200 - protein, 246 aa, synthetic construct
  source 1..246: note = Description of Artificial Sequence: Synthetic polypeptide; note = XENP019861 [CTLA-4]_H0.113_L0_scFv(GKPGS)4
QVQLVESGGGVVQPGRSLRLSCAASGFTFSSYTMHWVRQAPGKGLEWVTFISYDGNNKYYADSVKGRFTISRDNSKNTLYLQMNSLRAEDTAIYYCARTGHLGPFDYWGQGTLVTVSSGKPGSGKPGSGKPGSGKPGSEIVLTQSPGTLSLSPGERATLSCRASQSVGSSYLAWYQQKPGQAPRLLIYGAFSRATGIPDRFSGSGSGTDFTLTISRLEPEDFAVYYCQQYGSSPWTFGQGTKVEIK

SEQ ID NO: 1201 - protein, 118 aa, synthetic construct
  source 1..118: note = Description of Artificial Sequence: Synthetic polypeptide; note = VH of XENP019861
QVQLVESGGGVVQPGRSLRLSCAASGFTFSSYTMHWVRQAPGKGLEWVTFISYDGNNKYYADSVKGRFTISRDNSKNTLYLQMNSLRAEDTAIYYCARTGHLGPFDYWGQGTLVTVSS

SEQ ID NO: 1202 - protein, 108 aa, synthetic construct; identical to SEQ ID NO: 23
  source 1..108: note = Description of Artificial Sequence: Synthetic polypeptide; note = VL of XENP019861

SEQ ID NO: 1203 - protein, 5 aa, synthetic construct
  source 1..5: note = Description of Artificial Sequence: Synthetic peptide; note = XENP019861 vhCDR1
SYTMH

SEQ ID NO: 1204 - protein, 17 aa, synthetic construct
  source 1..17: note = Description of Artificial Sequence: Synthetic peptide; note = XENP019861 vhCDR2
FISYDGNNKYYADSVKG

SEQ ID NO: 1205 - protein, 9 aa, synthetic construct
  source 1..9: note = Description of Artificial Sequence: Synthetic peptide; note = XENP019861 vhCDR3
TGHLGPFDY

SEQ ID NO: 1206 - protein, 12 aa, synthetic construct
  source 1..12: note = Description of Artificial Sequence: Synthetic peptide; note = XENP019861 vlCDR1
RASQSVGSSYLA

SEQ ID NO: 1207 - protein, 7 aa, synthetic construct
  source 1..7: note = Description of Artificial Sequence: Synthetic peptide; note = XENP019861 vlCDR2
GAFSRAT

SEQ ID NO: 1208 - protein, 9 aa, synthetic construct
  source 1..9: note = Description of Artificial Sequence: Synthetic peptide; note = XENP019861 vlCDR3
QQYGSSPWT

SEQ ID NO: 1209 - protein, 246 aa, synthetic construct
  source 1..246: note = Description of Artificial Sequence: Synthetic polypeptide; note = XENP019862 [CTLA-4]_H0.114_L0_scFv(GKPGS)4
QVQLVESGGGVVQPGRSLRLSCAASGFTFSSYTMHWVRQAPGKGLEWVTFISYDGNNKYYADSVKGRFTISRDNSKNTLYLQMNSLRAEDTAIYYCARTGLLGPFDYWGQGTLVTVSSGKPGSGKPGSGKPGSGKPGSEIVLTQSPGTLSLSPGERATLSCRASQSVGSSYLAWYQQKPGQAPRLLIYGAFSRATGIPDRFSGSGSGTDFTLTISRLEPEDFAVYYCQQYGSSPWTFGQGTKVEIK

SEQ ID NO: 1210 - protein, 118 aa, synthetic construct
  source 1..118: note = Description of Artificial Sequence: Synthetic polypeptide; note = VH of XENP019862
QVQLVESGGGVVQPGRSLRLSCAASGFTFSSYTMHWVRQAPGKGLEWVTFISYDGNNKYYADSVKGRFTISRDNSKNTLYLQMNSLRAEDTAIYYCARTGLLGPFDYWGQGTLVTVSS

SEQ ID NO: 1211 - protein, 108 aa, synthetic construct; identical to SEQ ID NO: 23
  source 1..108: note = Description of Artificial Sequence: Synthetic polypeptide; note = VL of XENP019862

SEQ ID NO: 1212 - protein, 5 aa, synthetic construct
  source 1..5: note = Description of Artificial Sequence: Synthetic peptide; note = XENP019862 vhCDR1
SYTMH

SEQ ID NO: 1213 - protein, 17 aa, synthetic construct
  source 1..17: note = Description of Artificial Sequence: Synthetic peptide; note = XENP019862 vhCDR2
FISYDGNNKYYADSVKG

SEQ ID NO: 1214 - protein, 9 aa, synthetic construct
  source 1..9: note = Description of Artificial Sequence: Synthetic peptide; note = XENP019862 vhCDR3
TGLLGPFDY

SEQ ID NO: 1215 - protein, 12 aa, synthetic construct
  source 1..12: note = Description of Artificial Sequence: Synthetic peptide; note = XENP019862 vlCDR1
RASQSVGSSYLA

SEQ ID NO: 1216 - protein, 7 aa, synthetic construct
  source 1..7: note = Description of Artificial Sequence: Synthetic peptide; note = XENP019862 vlCDR2
GAFSRAT

SEQ ID NO: 1217 - protein, 9 aa, synthetic construct
  source 1..9: note = Description of Artificial Sequence: Synthetic peptide; note = XENP019862 vlCDR3
QQYGSSPWT

SEQ ID NO: 1218 - protein, 246 aa, synthetic construct
  source 1..246: note = Description of Artificial Sequence: Synthetic polypeptide; note = XENP019863 [CTLA-4]_H0.115_L0_scFv(GKPGS)4
QVQLVESGGGVVQPGRSLRLSCAASGFTFSSYTMHWVRQAPGKGLEWVTFISYDGNNKYYADSVKGRFTISRDNSKNTLYLQMNSLRAEDTAIYYCARTGYLGPFDYWGQGTLVTVSSGKPGSGKPGSGKPGSGKPGSEIVLTQSPGTLSLSPGERATLSCRASQSVGSSYLAWYQQKPGQAPRLLIYGAFSRATGIPDRFSGSGSGTDFTLTISRLEPEDFAVYYCQQYGSSPWTFGQGTKVEIK

SEQ ID NO: 1219 - protein, 118 aa, synthetic construct
  source 1..118: note = Description of Artificial Sequence: Synthetic polypeptide; note = VH of XENP019863
QVQLVESGGGVVQPGRSLRLSCAASGFTFSSYTMHWVRQAPGKGLEWVTFISYDGNNKYYADSVKGRFTISRDNSKNTLYLQMNSLRAEDTAIYYCARTGYLGPFDYWGQGTLVTVSS

SEQ ID NO: 1220 - protein, 108 aa, synthetic construct; identical to SEQ ID NO: 23
  source 1..108: note = Description of Artificial Sequence: Synthetic polypeptide; note = VL of XENP019863

SEQ ID NO: 1221 - protein, 5 aa, synthetic construct
  source 1..5: note = Description of Artificial Sequence: Synthetic peptide; note = XENP019863 vhCDR1
SYTMH

SEQ ID NO: 1222 - protein, 17 aa, synthetic construct
  source 1..17: note = Description of Artificial Sequence: Synthetic peptide; note = XENP019863 vhCDR2
FISYDGNNKYYADSVKG

SEQ ID NO: 1223 - protein, 9 aa, synthetic construct
  source 1..9: note = Description of Artificial Sequence: Synthetic peptide; note = XENP019863 vhCDR3
TGYLGPFDY

SEQ ID NO: 1224 - protein, 12 aa, synthetic construct
  source 1..12: note = Description of Artificial Sequence: Synthetic peptide; note = XENP019863 vlCDR1
RASQSVGSSYLA

SEQ ID NO: 1225 - protein, 7 aa, synthetic construct
  source 1..7: note = Description of Artificial Sequence: Synthetic peptide; note = XENP019863 vlCDR2
GAFSRAT

SEQ ID NO: 1226 - protein, 9 aa, synthetic construct
  source 1..9: note = Description of Artificial Sequence: Synthetic peptide; note = XENP019863 vlCDR3
QQYGSSPWT

SEQ ID NO: 1227 - protein, 246 aa, synthetic construct
  source 1..246: note = Description of Artificial Sequence: Synthetic polypeptide; note = XENP019864 [CTLA-4]_H0.116_L0_scFv(GKPGS)4
QVQLVESGGGVVQPGRSLRLSCAASGFTFSSYTMHWVRQAPGKGLEWVTFISYDGNNKYYADSVKGRFTISRDNSKNTLYLQMNSLRAEDTAIYYCARTGWDGPFDYWGQGTLVTVSSGKPGSGKPGSGKPGSGKPGSEIVLTQSPGTLSLSPGERATLSCRASQSVGSSYLAWYQQKPGQAPRLLIYGAFSRATGIPDRFSGSGSGTDFTLTISRLEPEDFAVYYCQQYGSSPWTFGQGTKVEIK

SEQ ID NO: 1228 - protein, 118 aa, synthetic construct
  source 1..118: note = Description of Artificial Sequence: Synthetic polypeptide; note = VH of XENP019864
QVQLVESGGGVVQPGRSLRLSCAASGFTFSSYTMHWVRQAPGKGLEWVTFISYDGNNKYYADSVKGRFTISRDNSKNTLYLQMNSLRAEDTAIYYCARTGWDGPFDYWGQGTLVTVSS

SEQ ID NO: 1229 - protein, 108 aa, synthetic construct; identical to SEQ ID NO: 23
  source 1..108: note = Description of Artificial Sequence: Synthetic polypeptide; note = VL of XENP019864

SEQ ID NO: 1230 - protein, 5 aa, synthetic construct
  source 1..5: note = Description of Artificial Sequence: Synthetic peptide; note = XENP019864 vhCDR1
SYTMH

SEQ ID NO: 1231 - protein, 17 aa, synthetic construct
  source 1..17: note = Description of Artificial Sequence: Synthetic peptide; note = XENP019864 vhCDR2
FISYDGNNKYYADSVKG

SEQ ID NO: 1232 - protein, 9 aa, synthetic construct
  source 1..9: note = Description of Artificial Sequence: Synthetic peptide; note = XENP019864 vhCDR3
TGWDGPFDY

SEQ ID NO: 1233 - protein, 12 aa, synthetic construct
  source 1..12: note = Description of Artificial Sequence: Synthetic peptide; note = XENP019864 vlCDR1
RASQSVGSSYLA

SEQ ID NO: 1234 - protein, 7 aa, synthetic construct
  source 1..7: note = Description of Artificial Sequence: Synthetic peptide; note = XENP019864 vlCDR2
GAFSRAT

SEQ ID NO: 1235 - protein, 9 aa, synthetic construct
  source 1..9: note = Description of Artificial Sequence: Synthetic peptide; note = XENP019864 vlCDR3
QQYGSSPWT

SEQ ID NO: 1236 - protein, 246 aa, synthetic construct
  source 1..246: note = Description of Artificial Sequence: Synthetic polypeptide; note = XENP019865 [CTLA-4]_H0.117_L0_scFv(GKPGS)4
QVQLVESGGGVVQPGRSLRLSCAASGFTFSSYTMHWVRQAPGKGLEWVTFISYDGNNKYYADSVKGRFTISRDNSKNTLYLQMNSLRAEDTAIYYCARTGWIGPFDYWGQGTLVTVSSGKPGSGKPGSGKPGSGKPGSEIVLTQSPGTLSLSPGERATLSCRASQSVGSSYLAWYQQKPGQAPRLLIYGAFSRATGIPDRFSGSGSGTDFTLTISRLEPEDFAVYYCQQYGSSPWTFGQGTKVEIK

SEQ ID NO: 1237 - protein, 118 aa, synthetic construct
  source 1..118: note = Description of Artificial Sequence: Synthetic polypeptide; note = VH of XENP019865
QVQLVESGGGVVQPGRSLRLSCAASGFTFSSYTMHWVRQAPGKGLEWVTFISYDGNNKYYADSVKGRFTISRDNSKNTLYLQMNSLRAEDTAIYYCARTGWIGPFDYWGQGTLVTVSS

SEQ ID NO: 1238 - protein, 108 aa, synthetic construct; identical to SEQ ID NO: 23
  source 1..108: note = Description of Artificial Sequence: Synthetic polypeptide; note = VL of XENP019865

SEQ ID NO: 1239 - protein, 5 aa, synthetic construct
  source 1..5: note = Description of Artificial Sequence: Synthetic peptide; note = XENP019865 vhCDR1
SYTMH

SEQ ID NO: 1240 - protein, 17 aa, synthetic construct
  source 1..17: note = Description of Artificial Sequence: Synthetic peptide; note = XENP019865 vhCDR2
FISYDGNNKYYADSVKG

SEQ ID NO: 1241 - protein, 9 aa, synthetic construct
  source 1..9: note = Description of Artificial Sequence: Synthetic peptide; note = XENP019865 vhCDR3
TGWIGPFDY

SEQ ID NO: 1242 - protein, 12 aa, synthetic construct
  source 1..12: note = Description of Artificial Sequence: Synthetic peptide; note = XENP019865 vlCDR1
RASQSVGSSYLA

SEQ ID NO: 1243 - protein, 7 aa, synthetic construct
  source 1..7: note = Description of Artificial Sequence: Synthetic peptide; note = XENP019865 vlCDR2
GAFSRAT

SEQ ID NO: 1244 - protein, 9 aa, synthetic construct
  source 1..9: note = Description of Artificial Sequence: Synthetic peptide; note = XENP019865 vlCDR3
QQYGSSPWT

SEQ ID NO: 1245 - protein, 246 aa, synthetic construct
  source 1..246: note = Description of Artificial Sequence: Synthetic polypeptide; note = XENP019866 [CTLA-4]_H0.118_L0_scFv(GKPGS)4
QVQLVESGGGVVQPGRSLRLSCAASGFTFSSYTMHWVRQAPGKGLEWVTFISYDGNNKYYADSVKGRFTISRDNSKNTLYLQMNSLRAEDTAIYYCARTGWVGPFDYWGQGTLVTVSSGKPGSGKPGSGKPGSGKPGSEIVLTQSPGTLSLSPGERATLSCRASQSVGSSYLAWYQQKPGQAPRLLIYGAFSRATGIPDRFSGSGSGTDFTLTISRLEPEDFAVYYCQQYGSSPWTFGQGTKVEIK

SEQ ID NO: 1246 - protein, 118 aa, synthetic construct
  source 1..118: note = Description of Artificial Sequence: Synthetic polypeptide; note = VH of XENP019866
QVQLVESGGGVVQPGRSLRLSCAASGFTFSSYTMHWVRQAPGKGLEWVTFISYDGNNKYYADSVKGRFTISRDNSKNTLYLQMNSLRAEDTAIYYCARTGWVGPFDYWGQGTLVTVSS

SEQ ID NO: 1247 - protein, 108 aa, synthetic construct; identical to SEQ ID NO: 23
  source 1..108: note = Description of Artificial Sequence: Synthetic polypeptide; note = VL of XENP019866

SEQ ID NO: 1248 - protein, 5 aa, synthetic construct
  source 1..5: note = Description of Artificial Sequence: Synthetic peptide; note = XENP019866 vhCDR1
SYTMH

SEQ ID NO: 1249 - protein, 17 aa, synthetic construct
  source 1..17: note = Description of Artificial Sequence: Synthetic peptide; note = XENP019866 vhCDR2
FISYDGNNKYYADSVKG

SEQ ID NO: 1250 - protein, 9 aa, synthetic construct
  source 1..9: note = Description of Artificial Sequence: Synthetic peptide; note = XENP019866 vhCDR3
TGWVGPFDY

SEQ ID NO: 1251 - protein, 12 aa, synthetic construct
  source 1..12: note = Description of Artificial Sequence: Synthetic peptide; note = XENP019866 vlCDR1
RASQSVGSSYLA

SEQ ID NO: 1252 - protein, 7 aa, synthetic construct
  source 1..7: note = Description of Artificial Sequence: Synthetic peptide; note = XENP019866 vlCDR2
GAFSRAT

SEQ ID NO: 1253 - protein, 9 aa, synthetic construct
  source 1..9: note = Description of Artificial Sequence: Synthetic peptide; note = XENP019866 vlCDR3
QQYGSSPWT

SEQ ID NO: 1254 - protein, 246 aa, synthetic construct
  source 1..246: note = Description of Artificial Sequence: Synthetic polypeptide; note = XENP019867 [CTLA-4]_H0.119_L0_scFv(GKPGS)4
QVQLVESGGGVVQPGRSLRLSCAASGFTFSSYTMHWVRQAPGKGLEWVTFISYDGNNKYYADSVKGRFTISRDNSKNTLYLQMNSLRAEDTAIYYCARTGWLAPFDYWGQGTLVTVSSGKPGSGKPGSGKPGSGKPGSEIVLTQSPGTLSLSPGERATLSCRASQSVGSSYLAWYQQKPGQAPRLLIYGAFSRATGIPDRFSGSGSGTDFTLTISRLEPEDFAVYYCQQYGSSPWTFGQGTKVEIK

SEQ ID NO: 1255 - protein, 118 aa, synthetic construct
  source 1..118: note = Description of Artificial Sequence: Synthetic polypeptide; note = VH of XENP019867
QVQLVESGGGVVQPGRSLRLSCAASGFTFSSYTMHWVRQAPGKGLEWVTFISYDGNNKYYADSVKGRFTISRDNSKNTLYLQMNSLRAEDTAIYYCARTGWLAPFDYWGQGTLVTVSS

SEQ ID NO: 1256 - protein, 108 aa, synthetic construct; identical to SEQ ID NO: 23
  source 1..108: note = Description of Artificial Sequence: Synthetic polypeptide; note = VL of XENP019867

SEQ ID NO: 1257 - protein, 5 aa, synthetic construct
  source 1..5: note = Description of Artificial Sequence: Synthetic peptide; note = XENP019867 vhCDR1
SYTMH

SEQ ID NO: 1258 - protein, 17 aa, synthetic construct
  source 1..17: note = Description of Artificial Sequence: Synthetic peptide; note = XENP019867 vhCDR2
FISYDGNNKYYADSVKG

SEQ ID NO: 1259 - protein, 9 aa, synthetic construct
  source 1..9: note = Description of Artificial Sequence: Synthetic peptide; note = XENP019867 vhCDR3
TGWLAPFDY

SEQ ID NO: 1260 - protein, 12 aa, synthetic construct
  source 1..12: note = Description of Artificial Sequence: Synthetic peptide; note = XENP019867 vlCDR1
RASQSVGSSYLA

SEQ ID NO: 1261 - protein, 7 aa, synthetic construct
  source 1..7: note = Description of Artificial Sequence: Synthetic peptide; note = XENP019867 vlCDR2
GAFSRAT

SEQ ID NO: 1262 - protein, 9 aa, synthetic construct
  source 1..9: note = Description of Artificial Sequence: Synthetic peptide; note = XENP019867 vlCDR3
QQYGSSPWT

SEQ ID NO: 1263 - protein, 246 aa, synthetic construct
  source 1..246: note = Description of Artificial Sequence: Synthetic polypeptide; note = XENP019868 [CTLA-4]_H0.120_L0_scFv(GKPGS)4
QVQLVESGGGVVQPGRSLRLSCAASGFTFSSYTMHWVRQAPGKGLEWVTFISYDGNNKYYADSVKGRFTISRDNSKNTLYLQMNSLRAEDTAIYYCARTGWLSPFDYWGQGTLVTVSSGKPGSGKPGSGKPGSGKPGSEIVLTQSPGTLSLSPGERATLSCRASQSVGSSYLAWYQQKPGQAPRLLIYGAFSRATGIPDRFSGSGSGTDFTLTISRLEPEDFAVYYCQQYGSSPWTFGQGTKVEIK

SEQ ID NO: 1264 - protein, 118 aa, synthetic construct
  source 1..118: note = Description of Artificial Sequence: Synthetic polypeptide; note = VH of XENP019868
QVQLVESGGGVVQPGRSLRLSCAASGFTFSSYTMHWVRQAPGKGLEWVTFISYDGNNKYYADSVKGRFTISRDNSKNTLYLQMNSLRAEDTAIYYCARTGWLSPFDYWGQGTLVTVSS

SEQ ID NO: 1265 - protein, 108 aa, synthetic construct; identical to SEQ ID NO: 23
  source 1..108: note = Description of Artificial Sequence: Synthetic polypeptide; note = VL of XENP019868

SEQ ID NO: 1266 - protein, 5 aa, synthetic construct
  source 1..5: note = Description of Artificial Sequence: Synthetic peptide; note = XENP019868 vhCDR1
SYTMH

SEQ ID NO: 1267 - protein, 17 aa, synthetic construct
  source 1..17: note = Description of Artificial Sequence: Synthetic peptide; note = XENP019868 vhCDR2
FISYDGNNKYYADSVKG

SEQ ID NO: 1268 - protein, 9 aa, synthetic construct
  source 1..9: note = Description of Artificial Sequence: Synthetic peptide; note = XENP019868 vhCDR3
TGWLSPFDY

SEQ ID NO: 1269 - protein, 12 aa, synthetic construct
  source 1..12: note = Description of Artificial Sequence: Synthetic peptide; note = XENP019868 vlCDR1
RASQSVGSSYLA

SEQ ID NO: 1270 - protein, 7 aa, synthetic construct
  source 1..7: note = Description of Artificial Sequence: Synthetic peptide; note = XENP019868 vlCDR2
GAFSRAT

SEQ ID NO: 1271 - protein, 9 aa, synthetic construct
  source 1..9: note = Description of Artificial Sequence: Synthetic peptide; note = XENP019868 vlCDR3
QQYGSSPWT

SEQ ID NO: 1272 - protein, 246 aa, synthetic construct
  source 1..246: note = Description of Artificial Sequence: Synthetic polypeptide; note = XENP019869 [CTLA-4]_H0.121_L0_scFv(GKPGS)4
QVQLVESGGGVVQPGRSLRLSCAASGFTFSSYTMHWVRQAPGKGLEWVTFISYDGNNKYYADSVKGRFTISRDNSKNTLYLQMNSLRAEDTAIYYCARTGWLTPFDYWGQGTLVTVSSGKPGSGKPGSGKPGSGKPGSEIVLTQSPGTLSLSPGERATLSCRASQSVGSSYLAWYQQKPGQAPRLLIYGAFSRATGIPDRFSGSGSGTDFTLTISRLEPEDFAVYYCQQYGSSPWTFGQGTKVEIK

SEQ ID NO: 1273 - protein, 118 aa, synthetic construct
  source 1..118: note = Description of Artificial Sequence: Synthetic polypeptide; note = VH of XENP019869
QVQLVESGGGVVQPGRSLRLSCAASGFTFSSYTMHWVRQAPGKGLEWVTFISYDGNNKYYADSVKGRFTISRDNSKNTLYLQMNSLRAEDTAIYYCARTGWLTPFDYWGQGTLVTVSS

SEQ ID NO: 1274 - protein, 108 aa, synthetic construct; identical to SEQ ID NO: 23
  source 1..108: note = Description of Artificial Sequence: Synthetic polypeptide; note = VL of XENP019869

SEQ ID NO: 1275 - protein, 5 aa, synthetic construct
  source 1..5: note = Description of Artificial Sequence: Synthetic peptide; note = XENP019869 vhCDR1
SYTMH

SEQ ID NO: 1276 - protein, 17 aa, synthetic construct
  source 1..17: note = Description of Artificial Sequence: Synthetic peptide; note = XENP019869 vhCDR2
FISYDGNNKYYADSVKG

SEQ ID NO: 1277 - protein, 9 aa, synthetic construct
  source 1..9: note = Description of Artificial Sequence: Synthetic peptide; note = XENP019869 vhCDR3
TGWLTPFDY

SEQ ID NO: 1278 - protein, 12 aa, synthetic construct
  source 1..12: note = Description of Artificial Sequence: Synthetic peptide; note = XENP019869 vlCDR1
RASQSVGSSYLA

SEQ ID NO: 1279 - protein, 7 aa, synthetic construct
  source 1..7: note = Description of Artificial Sequence: Synthetic peptide; note = XENP019869 vlCDR2
GAFSRAT

SEQ ID NO: 1280 - protein, 9 aa, synthetic construct
  source 1..9: note = Description of Artificial Sequence: Synthetic peptide; note = XENP019869 vlCDR3
QQYGSSPWT

SEQ ID NO: 1281 - protein, 246 aa, synthetic construct
  source 1..246: note = Description of Artificial Sequence: Synthetic polypeptide; note = XENP019870 [CTLA-4]_H0.122_L0_scFv(GKPGS)4
QVQLVESGGGVVQPGRSLRLSCAASGFTFSSYTMHWVRQAPGKGLEWVTFISYDGNNKYYADSVKGRFTISRDNSKNTLYLQMNSLRAEDTAIYYCARTGWLGPLDYWGQGTLVTVSSGKPGSGKPGSGKPGSGKPGSEIVLTQSPGTLSLSPGERATLSCRASQSVGSSYLAWYQQKPGQAPRLLIYGAFSRATGIPDRFSGSGSGTDFTLTISRLEPEDFAVYYCQQYGSSPWTFGQGTKVEIK

SEQ ID NO: 1282 - protein, 118 aa, synthetic construct
  source 1..118: note = Description of Artificial Sequence: Synthetic polypeptide; note = VH of XENP019870
QVQLVESGGGVVQPGRSLRLSCAASGFTFSSYTMHWVRQAPGKGLEWVTFISYDGNNKYYADSVKGRFTISRDNSKNTLYLQMNSLRAEDTAIYYCARTGWLGPLDYWGQGTLVTVSS

SEQ ID NO: 1283 - protein, 108 aa, synthetic construct; identical to SEQ ID NO: 23
  source 1..108: note = Description of Artificial Sequence: Synthetic polypeptide; note = VL of XENP019870

SEQ ID NO: 1284 - protein, 5 aa, synthetic construct
  source 1..5: note = Description of Artificial Sequence: Synthetic peptide; note = XENP019870 vhCDR1
SYTMH

SEQ ID NO: 1285 - protein, 17 aa, synthetic construct
  source 1..17: note = Description of Artificial Sequence: Synthetic peptide; note = XENP019870 vhCDR2
FISYDGNNKYYADSVKG

SEQ ID NO: 1286 - protein, 9 aa, synthetic construct
  source 1..9: note = Description of Artificial Sequence: Synthetic peptide; note = XENP019870 vhCDR3
TGWLGPLDY

SEQ ID NO: 1287 - protein, 12 aa, synthetic construct
  source 1..12: note = Description of Artificial Sequence: Synthetic peptide; note = XENP019870 vlCDR1
RASQSVGSSYLA

SEQ ID NO: 1288 - protein, 7 aa, synthetic construct
  source 1..7: note = Description of Artificial Sequence: Synthetic peptide; note = XENP019870 vlCDR2
GAFSRAT

SEQ ID NO: 1289 - protein, 9 aa, synthetic construct
  source 1..9: note = Description of Artificial Sequence: Synthetic peptide; note = XENP019870 vlCDR3
QQYGSSPWT

SEQ ID NO: 1290 - protein, 246 aa, synthetic construct
  source 1..246: note = Description of Artificial Sequence: Synthetic polypeptide; note = XENP019871 [CTLA-4]_H0.123_L0_scFv(GKPGS)4
QVQLVESGGGVVQPGRSLRLSCAASGFTFSSYTMHWVRQAPGKGLEWVTFISYDGNNKYYADSVKGRFTISRDNSKNTLYLQMNSLRAEDTAIYYCARTGWLGPMDYWGQGTLVTVSSGKPGSGKPGSGKPGSGKPGSEIVLTQSPGTLSLSPGERATLSCRASQSVGSSYLAWYQQKPGQAPRLLIYGAFSRATGIPDRFSGSGSGTDFTLTISRLEPEDFAVYYCQQYGSSPWTFGQGTKVEIK

SEQ ID NO: 1291 - protein, 118 aa, synthetic construct
  source 1..118: note = Description of Artificial Sequence: Synthetic polypeptide; note = VH of XENP019871
QVQLVESGGGVVQPGRSLRLSCAASGFTFSSYTMHWVRQAPGKGLEWVTFISYDGNNKYYADSVKGRFTISRDNSKNTLYLQMNSLRAEDTAIYYCARTGWLGPMDYWGQGTLVTVSS

SEQ ID NO: 1292 - protein, 108 aa, synthetic construct; identical to SEQ ID NO: 23
  source 1..108: note = Description of Artificial Sequence: Synthetic polypeptide; note = VL of XENP019871

SEQ ID NO: 1293 - protein, 5 aa, synthetic construct
  source 1..5: note = Description of Artificial Sequence: Synthetic peptide; note = XENP019871 vhCDR1
SYTMH

SEQ ID NO: 1294 - protein, 17 aa, synthetic construct
  source 1..17: note = Description of Artificial Sequence: Synthetic peptide; note = XENP019871 vhCDR2
FISYDGNNKYYADSVKG

SEQ ID NO: 1295 - protein, 9 aa, synthetic construct
  source 1..9: note = Description of Artificial Sequence: Synthetic peptide; note = XENP019871 vhCDR3
TGWLGPMDY

SEQ ID NO: 1296 - protein, 12 aa, synthetic construct
  source 1..12: note = Description of Artificial Sequence: Synthetic peptide; note = XENP019871 vlCDR1
RASQSVGSSYLA

SEQ ID NO: 1297 - protein, 7 aa, synthetic construct
  source 1..7: note = Description of Artificial Sequence: Synthetic peptide; note = XENP019871 vlCDR2
GAFSRAT

SEQ ID NO: 1298 - protein, 9 aa, synthetic construct
  source 1..9: note = Description of Artificial Sequence: Synthetic peptide; note = XENP019871 vlCDR3
QQYGSSPWT

SEQ ID NO: 1299 - protein, 246 aa, synthetic construct
  source 1..246: note = Description of Artificial Sequence: Synthetic polypeptide; note = XENP019872 [CTLA-4]_H0.124_L0_scFv(GKPGS)4
QVQLVESGGGVVQPGRSLRLSCAASGFTFSSYTMHWVRQAPGKGLEWVTFISYDGNNKYYADSVKGRFTISRDNSKNTLYLQMNSLRAEDTAIYYCARTGWLGPFAYWGQGTLVTVSSGKPGSGKPGSGKPGSGKPGSEIVLTQSPGTLSLSPGERATLSCRASQSVGSSYLAWYQQKPGQAPRLLIYGAFSRATGIPDRFSGSGSGTDFTLTISRLEPEDFAVYYCQQYGSSPWTFGQGTKVEIK

SEQ ID NO: 1300 - protein, 118 aa, synthetic construct
  source 1..118: note = Description of Artificial Sequence: Synthetic polypeptide; note = VH of XENP019872
QVQLVESGGGVVQPGRSLRLSCAASGFTFSSYTMHWVRQAPGKGLEWVTFISYDGNNKYYADSVKGRFTISRDNSKNTLYLQMNSLRAEDTAIYYCARTGWLGPFAYWGQGTLVTVSS

SEQ ID NO: 1301 - protein, 108 aa, synthetic construct; identical to SEQ ID NO: 23
  source 1..108: note = Description of Artificial Sequence: Synthetic polypeptide; note = VL of XENP019872

SEQ ID NO: 1302 - protein, 5 aa, synthetic construct
  source 1..5: note = Description of Artificial Sequence: Synthetic peptide; note = XENP019872 vhCDR1
SYTMH

SEQ ID NO: 1303 - protein, 17 aa, synthetic construct
  source 1..17: note = Description of Artificial Sequence: Synthetic peptide; note = XENP019872 vhCDR2
FISYDGNNKYYADSVKG

SEQ ID NO: 1304 - protein, 9 aa, synthetic construct
  source 1..9: note = Description of Artificial Sequence: Synthetic peptide; note = XENP019872 vhCDR3
TGWLGPFAY

SEQ ID NO: 1305 - protein, 12 aa, synthetic construct
  source 1..12: note = Description of Artificial Sequence: Synthetic peptide; note = XENP019872 vlCDR1
RASQSVGSSYLA

SEQ ID NO: 1306 - protein, 7 aa, synthetic construct
  source 1..7: note = Description of Artificial Sequence: Synthetic peptide; note = XENP019872 vlCDR2
GAFSRAT

SEQ ID NO: 1307 - protein, 9 aa, synthetic construct
  source 1..9: note = Description of Artificial Sequence: Synthetic peptide; note = XENP019872 vlCDR3
QQYGSSPWT

SEQ ID NO: 1308 - protein, 246 aa, synthetic construct
  source 1..246: note = Description of Artificial Sequence: Synthetic polypeptide; note = XENP019873 [CTLA-4]_H0.125_L0_scFv(GKPGS)4
QVQLVESGGGVVQPGRSLRLSCAASGFTFSSYTMHWVRQAPGKGLEWVTFISYDGNNKYYADSVKGRFTISRDNSKNTLYLQMNSLRAEDTAIYYCARTGWLGPFEYWGQGTLVTVSSGKPGSGKPGSGKPGSGKPGSEIVLTQSPGTLSLSPGERATLSCRASQSVGSSYLAWYQQKPGQAPRLLIYGAFSRATGIPDRFSGSGSGTDFTLTISRLEPEDFAVYYCQQYGSSPWTFGQGTKVEIK

SEQ ID NO: 1309 - protein, 118 aa, synthetic construct
  source 1..118: note = Description of Artificial Sequence: Synthetic polypeptide; note = VH of XENP019873
QVQLVESGGGVVQPGRSLRLSCAASGFTFSSYTMHWVRQAPGKGLEWVTFISYDGNNKYYADSVKGRFTISRDNSKNTLYLQMNSLRAEDTAIYYCARTGWLGPFEYWGQGTLVTVSS

SEQ ID NO: 1310 - protein, 108 aa, synthetic construct; identical to SEQ ID NO: 23
  source 1..108: note = Description of Artificial Sequence: Synthetic polypeptide; note = VL of XENP019873

SEQ ID NO: 1311 - protein, 5 aa, synthetic construct
  source 1..5: note = Description of Artificial Sequence: Synthetic peptide; note = XENP019873 vhCDR1
SYTMH

SEQ ID NO: 1312 - protein, 17 aa, synthetic construct
  source 1..17: note = Description of Artificial Sequence: Synthetic peptide; note = XENP019873 vhCDR2
FISYDGNNKYYADSVKG

SEQ ID NO: 1313 - protein, 9 aa, synthetic construct
  source 1..9: note = Description of Artificial Sequence: Synthetic peptide; note = XENP019873 vhCDR3
TGWLGPFEY

SEQ ID NO: 1314 - protein, 12 aa, synthetic construct
  source 1..12: note = Description of Artificial Sequence: Synthetic peptide; note = XENP019873 vlCDR1
RASQSVGSSYLA

SEQ ID NO: 1315 - protein, 7 aa, synthetic construct
  source 1..7: note = Description of Artificial Sequence: Synthetic peptide; note = XENP019873 vlCDR2
GAFSRAT

SEQ ID NO: 1316 - protein, 9 aa, synthetic construct
  source 1..9: note = Description of Artificial Sequence: Synthetic peptide; note = XENP019873 vlCDR3
QQYGSSPWT

SEQ ID NO: 1317 - protein, 246 aa, synthetic construct
  source 1..246: note = Description of Artificial Sequence: Synthetic polypeptide; note = XENP019874 [CTLA-4]_H0.126_L0_scFv(GKPGS)4
QVQLVESGGGVVQPGRSLRLSCAASGFTFSSYTMHWVRQAPGKGLEWVTFISYDGNNKYYADSVKGRFTISRDNSKNTLYLQMNSLRAEDTAIYYCARTGWLGPFHYWGQGTLVTVSSGKPGSGKPGSGKPGSGKPGSEIVLTQSPGTLSLSPGERATLSCRASQSVGSSYLAWYQQKPGQAPRLLIYGAFSRATGIPDRFSGSGSGTDFTLTISRLEPEDFAVYYCQQYGSSPWTFGQGTKVEIK

SEQ ID NO: 1318 - protein, 118 aa, synthetic construct
  source 1..118: note = Description of Artificial Sequence: Synthetic polypeptide; note = VH of XENP019874
QVQLVESGGGVVQPGRSLRLSCAASGFTFSSYTMHWVRQAPGKGLEWVTFISYDGNNKYYADSVKGRFTISRDNSKNTLYLQMNSLRAEDTAIYYCARTGWLGPFHYWGQGTLVTVSS

SEQ ID NO: 1319 - protein, 108 aa, synthetic construct; identical to SEQ ID NO: 23
  source 1..108: note = Description of Artificial Sequence: Synthetic polypeptide; note = VL of XENP019874

SEQ ID NO: 1320 - protein, 5 aa, synthetic construct
  source 1..5: note = Description of Artificial Sequence: Synthetic peptide; note = XENP019874 vhCDR1
SYTMH

SEQ ID NO: 1321 - protein, 17 aa, synthetic construct
  source 1..17: note = Description of Artificial Sequence: Synthetic peptide; note = XENP019874 vhCDR2
FISYDGNNKYYADSVKG

SEQ ID NO: 1322 - protein, 9 aa, synthetic construct
  source 1..9: note = Description of Artificial Sequence: Synthetic peptide; note = XENP019874 vhCDR3
TGWLGPFHY

SEQ ID NO: 1323 - protein, 12 aa, synthetic construct
  source 1..12: note = Description of Artificial Sequence: Synthetic peptide; note = XENP019874 vlCDR1
RASQSVGSSYLA

SEQ ID NO: 1324 - protein, 7 aa, synthetic construct
  source 1..7: note = Description of Artificial Sequence: Synthetic peptide; note = XENP019874 vlCDR2
GAFSRAT

SEQ ID NO: 1325 - protein, 9 aa, synthetic construct
  source 1..9: note = Description of Artificial Sequence: Synthetic peptide; note = XENP019874 vlCDR3
QQYGSSPWT

SEQ ID NO: 1326 - protein, 246 aa, synthetic construct
  source 1..246: note = Description of Artificial Sequence: Synthetic polypeptide; note = XENP019875 [CTLA-4]_H0.127_L0_scFv(GKPGS)4
QVQLVESGGGVVQPGRSLRLSCAASGFTFSSYTMHWVRQAPGKGLEWVTFISYDGNNKYYADSVKGRFTISRDNSKNTLYLQMNSLRAEDTAIYYCARTGWLGPFNYWGQGTLVTVSSGKPGSGKPGSGKPGSGKPGSEIVLTQSPGTLSLSPGERATLSCRASQSVGSSYLAWYQQKPGQAPRLLIYGAFSRATGIPDRFSGSGSGTDFTLTISRLEPEDFAVYYCQQYGSSPWTFGQGTKVEIK

SEQ ID NO: 1327 - protein, 118 aa, synthetic construct
  source 1..118: note = Description of Artificial Sequence: Synthetic polypeptide; note = VH of XENP019875
QVQLVESGGGVVQPGRSLRLSCAASGFTFSSYTMHWVRQAPGKGLEWVTFISYDGNNKYYADSVKGRFTISRDNSKNTLYLQMNSLRAEDTAIYYCARTGWLGPFNYWGQGTLVTVSS

SEQ ID NO: 1328 - protein, 108 aa, synthetic construct; identical to SEQ ID NO: 23
  source 1..108: note = Description of Artificial Sequence: Synthetic polypeptide; note = VL of XENP019875

SEQ ID NO: 1329 - protein, 5 aa, synthetic construct
  source 1..5: note = Description of Artificial Sequence: Synthetic peptide; note = XENP019875 vhCDR1
SYTMH

SEQ ID NO: 1330 - protein, 17 aa, synthetic construct
  source 1..17: note = Description of Artificial Sequence: Synthetic peptide; note = XENP019875 vhCDR2
FISYDGNNKYYADSVKG

SEQ ID NO: 1331 - protein, 9 aa, synthetic construct
  source 1..9: note = Description of Artificial Sequence: Synthetic peptide; note = XENP019875 vhCDR3
TGWLGPFNY

SEQ ID NO: 1332 - protein, 12 aa, synthetic construct
  source 1..12: note = Description of Artificial Sequence: Synthetic peptide; note = XENP019875 vlCDR1
RASQSVGSSYLA

SEQ ID NO: 1333 - protein, 7 aa, synthetic construct
  source 1..7: note = Description of Artificial Sequence: Synthetic peptide; note = XENP019875 vlCDR2
GAFSRAT

SEQ ID NO: 1334 - protein, 9 aa, synthetic construct
  source 1..9: note = Description of Artificial Sequence: Synthetic peptide; note = XENP019875 vlCDR3
QQYGSSPWT

SEQ ID NO: 1335 - protein, 246 aa, synthetic construct
  source 1..246: note = Description of Artificial Sequence: Synthetic polypeptide; note = XENP019876 [CTLA-4]_H0.128_L0_scFv(GKPGS)4
QVQLVESGGGVVQPGRSLRLSCAASGFTFSSYTMHWVRQAPGKGLEWVTFISYDGNNKYYADSVKGRFTISRDNSKNTLYLQMNSLRAEDTAIYYCARTGWLGPFSYWGQGTLVTVSSGKPGSGKPGSGKPGSGKPGSEIVLTQSPGTLSLSPGERATLSCRASQSVGSSYLAWYQQKPGQAPRLLIYGAFSRATGIPDRFSGSGSGTDFTLTISRLEPEDFAVYYCQQYGSSPWTFGQGTKVEIK

SEQ ID NO: 1336 - protein, 118 aa, synthetic construct
  source 1..118: note = Description of Artificial Sequence: Synthetic polypeptide; note = VH of XENP019876
QVQLVESGGGVVQPGRSLRLSCAASGFTFSSYTMHWVRQAPGKGLEWVTFISYDGNNKYYADSVKGRFTISRDNSKNTLYLQMNSLRAEDTAIYYCARTGWLGPFSYWGQGTLVTVSS

SEQ ID NO: 1337 - protein, 108 aa, synthetic construct; identical to SEQ ID NO: 23
  source 1..108: note = Description of Artificial Sequence: Synthetic polypeptide; note = VL of XENP019876

SEQ ID NO: 1338 - protein, 5 aa, synthetic construct
  source 1..5: note = Description of Artificial Sequence: Synthetic peptide; note = XENP019876 vhCDR1
SYTMH

SEQ ID NO: 1339 - protein, 17 aa, synthetic construct
  source 1..17: note = Description of Artificial Sequence: Synthetic peptide; note = XENP019876 vhCDR2
FISYDGNNKYYADSVKG

SEQ ID NO: 1340 - protein, 9 aa, synthetic construct
  source 1..9: note = Description of Artificial Sequence: Synthetic peptide; note = XENP019876 vhCDR3
TGWLGPFSY

SEQ ID NO: 1341 - protein, 12 aa, synthetic construct
  source 1..12: note = Description of Artificial Sequence: Synthetic peptide; note = XENP019876 vlCDR1
RASQSVGSSYLA

SEQ ID NO: 1342 - protein, 7 aa, synthetic construct
  source 1..7: note = Description of Artificial Sequence: Synthetic peptide; note = XENP019876 vlCDR2
GAFSRAT

SEQ ID NO: 1343 - protein, 9 aa, synthetic construct
  source 1..9: note = Description of Artificial Sequence: Synthetic peptide; note = XENP019876 vlCDR3
QQYGSSPWT

SEQ ID NO: 1344 - protein, 246 aa, synthetic construct
  source 1..246: note = Description of Artificial Sequence: Synthetic polypeptide; note = XENP019877 [CTLA-4]_H0.129_L0_scFv(GKPGS)4
QVQLVESGGGVVQPGRSLRLSCAASGFTFSSYTMHWVRQAPGKGLEWVTFISYDGNNKYYADSVKGRFTISRDNSKNTLYLQMNSLRAEDTAIYYCARTGWLGPFQYWGQGTLVTVSSGKPGSGKPGSGKPGSGKPGSEIVLTQSPGTLSLSPGERATLSCRASQSVGSSYLAWYQQKPGQAPRLLIYGAFSRATGIPDRFSGSGSGTDFTLTISRLEPEDFAVYYCQQYGSSPWTFGQGTKVEIK

SEQ ID NO: 1345 - protein, 118 aa, synthetic construct
  source 1..118: note = Description of Artificial Sequence: Synthetic polypeptide; note = VH of XENP019877
QVQLVESGGGVVQPGRSLRLSCAASGFTFSSYTMHWVRQAPGKGLEWVTFISYDGNNKYYADSVKGRFTISRDNSKNTLYLQMNSLRAEDTAIYYCARTGWLGPFQYWGQGTLVTVSS

SEQ ID NO: 1346 - protein, 108 aa, synthetic construct; identical to SEQ ID NO: 23
  source 1..108: note = Description of Artificial Sequence: Synthetic polypeptide; note = VL of XENP019877

SEQ ID NO: 1347 - protein, 5 aa, synthetic construct
  source 1..5: note = Description of Artificial Sequence: Synthetic peptide; note = XENP019877 vhCDR1
SYTMH

SEQ ID NO: 1348 - protein, 17 aa, synthetic construct
  source 1..17: note = Description of Artificial Sequence: Synthetic peptide; note = XENP019877 vhCDR2
FISYDGNNKYYADSVKG

SEQ ID NO: 1349 - protein, 9 aa, synthetic construct
  source 1..9: note = Description of Artificial Sequence: Synthetic peptide; note = XENP019877 vhCDR3
TGWLGPFQY

SEQ ID NO: 1350 - protein, 12 aa, synthetic construct
  source 1..12: note = Description of Artificial Sequence: Synthetic peptide; note = XENP019877 vlCDR1
RASQSVGSSYLA

SEQ ID NO: 1351 - protein, 7 aa, synthetic construct
  source 1..7: note = Description of Artificial Sequence: Synthetic peptide; note = XENP019877 vlCDR2
GAFSRAT

SEQ ID NO: 1352 - protein, 9 aa, synthetic construct
  source 1..9: note = Description of Artificial Sequence: Synthetic peptide; note = XENP019877 vlCDR3
QQYGSSPWT

SEQ ID NO: 1353 - protein, 246 aa, synthetic construct
  source 1..246: note = Description of Artificial Sequence: Synthetic polypeptide; note = XENP019878 [CTLA-4]_H0.130_L0_scFv(GKPGS)4
QVQLVESGGGVVQPGRSLRLSCAASGFTFSSYTMHWVRQAPGKGLEWVTFISYDGNNKYYADSVKGRFTISRDNSKNTLYLQMNSLRAEDTAIYYCARTGWLGPFDHWGQGTLVTVSSGKPGSGKPGSGKPGSGKPGSEIVLTQSPGTLSLSPGERATLSCRASQSVGSSYLAWYQQKPGQAPRLLIYGAFSRATGIPDRFSGSGSGTDFTLTISRLEPEDFAVYYCQQYGSSPWTFGQGTKVEIK

SEQ ID NO: 1354 - protein, 118 aa, synthetic construct
  source 1..118: note = Description of Artificial Sequence: Synthetic polypeptide; note = VH of XENP019878
QVQLVESGGGVVQPGRSLRLSCAASGFTFSSYTMHWVRQAPGKGLEWVTFISYDGNNKYYADSVKGRFTISRDNSKNTLYLQMNSLRAEDTAIYYCARTGWLGPFDHWGQGTLVTVSS

SEQ ID NO: 1355 - protein, 108 aa, synthetic construct; identical to SEQ ID NO: 23
  source 1..108: note = Description of Artificial Sequence: Synthetic polypeptide; note = VL of XENP019878

SEQ ID NO: 1356 - protein, 5 aa, synthetic construct
  source 1..5: note = Description of Artificial Sequence: Synthetic peptide; note = XENP019878 vhCDR1
SYTMH

SEQ ID NO: 1357 - protein, 17 aa, synthetic construct
  source 1..17: note = Description of Artificial Sequence: Synthetic peptide; note = XENP019878 vhCDR2
FISYDGNNKYYADSVKG

SEQ ID NO: 1358 - protein, 9 aa, synthetic construct
  source 1..9: note = Description of Artificial Sequence: Synthetic peptide; note = XENP019878 vhCDR3
TGWLGPFDH

SEQ ID NO: 1359 - protein, 12 aa, synthetic construct
  source 1..12: note = Description of Artificial Sequence: Synthetic peptide; note = XENP019878 vlCDR1
RASQSVGSSYLA

SEQ ID NO: 1360 - protein, 7 aa, synthetic construct
  source 1..7: note = Description of Artificial Sequence: Synthetic peptide; note = XENP019878 vlCDR2
GAFSRAT

SEQ ID NO: 1361 - protein, 9 aa, synthetic construct
  source 1..9: note = Description of Artificial Sequence: Synthetic peptide; note = XENP019878 vlCDR3
QQYGSSPWT

SEQ ID NO: 1362 - protein, 246 aa, synthetic construct
  source 1..246: note = Description of Artificial Sequence: Synthetic polypeptide; note = XENP019879 [CTLA-4]_H0.131_L0_scFv(GKPGS)4
QVQLVESGGGVVQPGRSLRLSCAASGFTFSSYTMHWVRQAPGKGLEWVTFISYDGNNKYYADSVKGRFTISRDNSKNTLYLQMNSLRAEDTAIYYCARTGWLGPFDLWGQGTLVTVSSGKPGSGKPGSGKPGSGKPGSEIVLTQSPGTLSLSPGERATLSCRASQSVGSSYLAWYQQKPGQAPRLLIYGAFSRATGIPDRFSGSGSGTDFTLTISRLEPEDFAVYYCQQYGSSPWTFGQGTKVEIK

SEQ ID NO: 1363 - protein, 118 aa, synthetic construct
  source 1..118: note = Description of Artificial Sequence: Synthetic polypeptide; note = VH of XENP019879
QVQLVESGGGVVQPGRSLRLSCAASGFTFSSYTMHWVRQAPGKGLEWVTFISYDGNNKYYADSVKGRFTISRDNSKNTLYLQMNSLRAEDTAIYYCARTGWLGPFDLWGQGTLVTVSS

SEQ ID NO: 1364 - protein, 108 aa, synthetic construct; identical to SEQ ID NO: 23
  source 1..108: note = Description of Artificial Sequence: Synthetic polypeptide; note = VL of XENP019879

SEQ ID NO: 1365 - protein, 5 aa, synthetic construct
  source 1..5: note = Description of Artificial Sequence: Synthetic peptide; note = XENP019879 vhCDR1
SYTMH

SEQ ID NO: 1366 - protein, 17 aa, synthetic construct
  source 1..17: note = Description of Artificial Sequence: Synthetic peptide; note = XENP019879 vhCDR2
FISYDGNNKYYADSVKG

SEQ ID NO: 1367 - protein, 9 aa, synthetic construct
  source 1..9: note = Description of Artificial Sequence: Synthetic peptide; note = XENP019879 vhCDR3
TGWLGPFDL

SEQ ID NO: 1368 - protein, 12 aa, synthetic construct
  source 1..12: note = Description of Artificial Sequence: Synthetic peptide; note = XENP019879 vlCDR1
RASQSVGSSYLA

SEQ ID NO: 1369 - protein, 7 aa, synthetic construct
  source 1..7: note = Description of Artificial Sequence: Synthetic peptide; note = XENP019879 vlCDR2
GAFSRAT

SEQ ID NO: 1370 - protein, 9 aa, synthetic construct
  source 1..9: note = Description of Artificial Sequence: Synthetic peptide; note = XENP019879 vlCDR3
QQYGSSPWT

SEQ ID NO: 1371 - protein, 246 aa, synthetic construct
  source 1..246: note = Description of Artificial Sequence: Synthetic polypeptide; note = XENP019880 [CTLA-4]_H0.132_L0_scFv(GKPGS)4
QVQLVESGGGVVQPGRSLRLSCAASGFTFSSYTMHWVRQAPGKGLEWVTFISYDGNNKYYADSVKGRFTISRDNSKNTLYLQMNSLRAEDTAIYYCARTGWLGPFDSWGQGTLVTVSSGKPGSGKPGSGKPGSGKPGSEIVLTQSPGTLSLSPGERATLSCRASQSVGSSYLAWYQQKPGQAPRLLIYGAFSRATGIPDRFSGSGSGTDFTLTISRLEPEDFAVYYCQQYGSSPWTFGQGTKVEIK

SEQ ID NO: 1372 - protein, 118 aa, synthetic construct
  source 1..118: note = Description of Artificial Sequence: Synthetic polypeptide; note = VH of XENP019880
QVQLVESGGGVVQPGRSLRLSCAASGFTFSSYTMHWVRQAPGKGLEWVTFISYDGNNKYYADSVKGRFTISRDNSKNTLYLQMNSLRAEDTAIYYCARTGWLGPFDSWGQGTLVTVSS

SEQ ID NO: 1373 - protein, 108 aa, synthetic construct; identical to SEQ ID NO: 23
  source 1..108: note = Description of Artificial Sequence: Synthetic polypeptide; note = VL of XENP019880

SEQ ID NO: 1374 - protein, 5 aa, synthetic construct
  source 1..5: note = Description of Artificial Sequence: Synthetic peptide; note = XENP019880 vhCDR1
SYTMH

SEQ ID NO: 1375 - protein, 17 aa, synthetic construct
  source 1..17: note = Description of Artificial Sequence: Synthetic peptide; note = XENP019880 vhCDR2
FISYDGNNKYYADSVKG

SEQ ID NO: 1376 - protein, 9 aa, synthetic construct
  source 1..9: note = Description of Artificial Sequence: Synthetic peptide; note = XENP019880 vhCDR3
TGWLGPFDS

SEQ ID NO: 1377 - protein, 12 aa, synthetic construct
  source 1..12: note = Description of Artificial Sequence: Synthetic peptide; note = XENP019880 vlCDR1
RASQSVGSSYLA

SEQ ID NO: 1378 - protein, 7 aa, synthetic construct
  source 1..7: note = Description of Artificial Sequence: Synthetic peptide; note = XENP019880 vlCDR2
GAFSRAT

SEQ ID NO: 1379 - protein, 9 aa, synthetic construct
  source 1..9: note = Description of Artificial Sequence: Synthetic peptide; note = XENP019880 vlCDR3
QQYGSSPWT

SEQ ID NO: 1380 - protein, 246 aa, synthetic construct
  source 1..246: note = Description of Artificial Sequence: Synthetic polypeptide; note = XENP019881 [CTLA-4]_H0.133_L0_scFv(GKPGS)4
QVQLVESGGGVVQPGRSLRLSCAASGFTFSSYTMHWVRQAPGKGLEWVTFISYDGNNKYYADSVKGRFTISRDNSKNTLYLQMNSLRAEDTAIYYCARTGWLGPFDVWGQGTLVTVSSGKPGSGKPGSGKPGSGKPGSEIVLTQSPGTLSLSPGERATLSCRASQSVGSSYLAWYQQKPGQAPRLLIYGAFSRATGIPDRFSGSGSGTDFTLTISRLEPEDFAVYYCQQYGSSPWTFGQGTKVEIK

SEQ ID NO: 1381 - protein, 118 aa, synthetic construct
  source 1..118: note = Description of Artificial Sequence: Synthetic polypeptide; note = VH of XENP019881
QVQLVESGGGVVQPGRSLRLSCAASGFTFSSYTMHWVRQAPGKGLEWVTFISYDGNNKYYADSVKGRFTISRDNSKNTLYLQMNSLRAEDTAIYYCARTGWLGPFDVWGQGTLVTVSS

SEQ ID NO: 1382 - protein, 108 aa, synthetic construct; identical to SEQ ID NO: 23
  source 1..108: note = Description of Artificial Sequence: Synthetic polypeptide; note = VL of XENP019881

SEQ ID NO: 1383 - protein, 5 aa, synthetic construct
  source 1..5: note = Description of Artificial Sequence: Synthetic peptide; note = XENP019881 vhCDR1
SYTMH

SEQ ID NO: 1384 - protein, 17 aa, synthetic construct
  source 1..17: note = Description of Artificial Sequence: Synthetic peptide; note = XENP019881 vhCDR2
FISYDGNNKYYADSVKG

SEQ ID NO: 1385 - protein, 9 aa, synthetic construct
  source 1..9: note = Description of Artificial Sequence: Synthetic peptide; note = XENP019881 vhCDR3
TGWLGPFDV

SEQ ID NO: 1386 - protein, 12 aa, synthetic construct
  source 1..12: note = Description of Artificial Sequence: Synthetic peptide; note = XENP019881 vlCDR1
RASQSVGSSYLA

SEQ ID NO: 1387 - protein, 7 aa, synthetic construct
  source 1..7: note = Description of Artificial Sequence: Synthetic peptide; note = XENP019881 vlCDR2
GAFSRAT

SEQ ID NO: 1388 - protein, 9 aa, synthetic construct
  source 1..9: note = Description of Artificial Sequence: Synthetic peptide; note = XENP019881 vlCDR3
QQYGSSPWT

SEQ ID NO: 1389 - protein, 246 aa, synthetic construct
  source 1..246: note = Description of Artificial Sequence: Synthetic polypeptide; note = XENP019882 [CTLA-4]_H0.134_L0_scFv(GKPGS)4
QVQLVESGGGVVQPGRSLRLSCAASGFTFSSYTMHWVRQAPGKGLEWVTFISYDGNNKYYADSVKGRFTISRDNSKNTLYLQMNSLRAEDTAIYYCARTGWLGPFDYWGRGTLVTVSSGKPGSGKPGSGKPGSGKPGSEIVLTQSPGTLSLSPGERATLSCRASQSVGSSYLAWYQQKPGQAPRLLIYGAFSRATGIPDRFSGSGSGTDFTLTISRLEPEDFAVYYCQQYGSSPWTFGQGTKVEIK

SEQ ID NO: 1390 - protein, 118 aa, synthetic construct; identical to SEQ ID NO: 67
  source 1..118: note = Description of Artificial Sequence: Synthetic polypeptide; note = VH of XENP019882

SEQ ID NO: 1391 - protein, 108 aa, synthetic construct; identical to SEQ ID NO: 23
  source 1..108: note = Description of Artificial Sequence: Synthetic polypeptide; note = VL of XENP019882

SEQ ID NO: 1392 - protein, 5 aa, synthetic construct
  source 1..5: note = Description of Artificial Sequence: Synthetic peptide; note = XENP019882 vhCDR1
SYTMH

SEQ ID NO: 1393 - protein, 17 aa, synthetic construct
  source 1..17: note = Description of Artificial Sequence: Synthetic peptide; note = XENP019882 vhCDR2
FISYDGNNKYYADSVKG

SEQ ID NO: 1394 - protein, 9 aa, synthetic construct
  source 1..9: note = Description of Artificial Sequence: Synthetic peptide; note = XENP019882 vhCDR3
TGWLGPFDY

SEQ ID NO: 1395 - protein, 12 aa, synthetic construct
  source 1..12: note = Description of Artificial Sequence: Synthetic peptide; note = XENP019882 vlCDR1
RASQSVGSSYLA

SEQ ID NO: 1396 - protein, 7 aa, synthetic construct
  source 1..7: note = Description of Artificial Sequence: Synthetic peptide; note = XENP019882 vlCDR2
GAFSRAT

SEQ ID NO: 1397 - protein, 9 aa, synthetic construct
  source 1..9: note = Description of Artificial Sequence: Synthetic peptide; note = XENP019882 vlCDR3
QQYGSSPWT

SEQ ID NO: 1398 - protein, 246 aa, synthetic construct
  source 1..246: note = Description of Artificial Sequence: Synthetic polypeptide; note = XENP019883 [CTLA-4]_H0.135_L0_scFv(GKPGS)4
QVQLVESGGGVVQPGRSLRLSCAASGFTFSSYTMHWVRQAPGKGLEWVTFISYDGNNKYYADSVKGRFTISRDNSKNTLYLQMNSLRAEDTAIYYCARTGWLGPFDYWGQGTMVTVSSGKPGSGKPGSGKPGSGKPGSEIVLTQSPGTLSLSPGERATLSCRASQSVGSSYLAWYQQKPGQAPRLLIYGAFSRATGIPDRFSGSGSGTDFTLTISRLEPEDFAVYYCQQYGSSPWTFGQGTKVEIK

SEQ ID NO: 1399 - protein, 118 aa, synthetic construct
  source 1..118: note = Description of Artificial Sequence: Synthetic polypeptide; note = VH of XENP019883
QVQLVESGGGVVQPGRSLRLSCAASGFTFSSYTMHWVRQAPGKGLEWVTFISYDGNNKYYADSVKGRFTISRDNSKNTLYLQMNSLRAEDTAIYYCARTGWLGPFDYWGQGTMVTVSS

SEQ ID NO: 1400 - protein, 108 aa, synthetic construct; identical to SEQ ID NO: 23
  source 1..108: note = Description of Artificial Sequence: Synthetic polypeptide; note = VL of XENP019883

SEQ ID NO: 1401 - protein, 5 aa, synthetic construct
  source 1..5: note = Description of Artificial Sequence: Synthetic peptide; note = XENP019883 vhCDR1
SYTMH

SEQ ID NO: 1402 - protein, 17 aa, synthetic construct
  source 1..17: note = Description of Artificial Sequence: Synthetic peptide; note = XENP019883 vhCDR2
FISYDGNNKYYADSVKG

SEQ ID NO: 1403 - protein, 9 aa, synthetic construct
  source 1..9: note = Description of Artificial Sequence: Synthetic peptide; note = XENP019883 vhCDR3
TGWLGPFDY

SEQ ID NO: 1404 - protein, 12 aa, synthetic construct
  source 1..12: note = Description of Artificial Sequence: Synthetic peptide; note = XENP019883 vlCDR1
RASQSVGSSYLA

SEQ ID NO: 1405 - protein, 7 aa, synthetic construct
  source 1..7: note = Description of Artificial Sequence: Synthetic peptide; note = XENP019883 vlCDR2
GAFSRAT

SEQ ID NO: 1406 - protein, 9 aa, synthetic construct
  source 1..9: note = Description of Artificial Sequence: Synthetic peptide; note = XENP019883 vlCDR3
QQYGSSPWT

SEQ ID NO: 1407 - protein, 246 aa, synthetic construct
  source 1..246: note = Description of Artificial Sequence: Synthetic polypeptide; note = XENP019884 [CTLA-4]_H0.136_L0_scFv(GKPGS)4
QVQLVESGGGVVQPGRSLRLSCAASGFTFSSYTMHWVRQAPGKGLEWVTFISYDGNNKYYADSVKGRFTISRDNSKNTLYLQMNSLRAEDTAIYYCARTGWLGPFDYWGQGTTVTVSSGKPGSGKPGSGKPGSGKPGSEIVLTQSPGTLSLSPGERATLSCRASQSVGSSYLAWYQQKPGQAPRLLIYGAFSRATGIPDRFSGSGSGTDFTLTISRLEPEDFAVYYCQQYGSSPWTFGQGTKVEIK

SEQ ID NO: 1408 - protein, 118 aa, synthetic construct
  source 1..118: note = Description of Artificial Sequence: Synthetic polypeptide; note = VH of XENP019884
QVQLVESGGGVVQPGRSLRLSCAASGFTFSSYTMHWVRQAPGKGLEWVTFISYDGNNKYYADSVKGRFTISRDNSKNTLYLQMNSLRAEDTAIYYCARTGWLGPFDYWGQGTTVTVSS

SEQ ID NO: 1409 - protein, 108 aa, synthetic construct; identical to SEQ ID NO: 23
  source 1..108: note = Description of Artificial Sequence: Synthetic polypeptide; note = VL of XENP019884

SEQ ID NO: 1410 - protein, 5 aa, synthetic construct
  source 1..5: note = Description of Artificial Sequence: Synthetic peptide; note = XENP019884 vhCDR1
SYTMH

SEQ ID NO: 1411 - protein, 17 aa, synthetic construct
  source 1..17: note = Description of Artificial Sequence: Synthetic peptide; note = XENP019884 vhCDR2
FISYDGNNKYYADSVKG

SEQ ID NO: 1412 - protein, 9 aa, synthetic construct
  source 1..9: note = Description of Artificial Sequence: Synthetic peptide; note = XENP019884 vhCDR3
TGWLGPFDY

SEQ ID NO: 1413 - protein, 12 aa, synthetic construct
  source 1..12: note = Description of Artificial Sequence: Synthetic peptide; note = XENP019884 vlCDR1
RASQSVGSSYLA

SEQ ID NO: 1414 - protein, 7 aa, synthetic construct
  source 1..7: note = Description of Artificial Sequence: Synthetic peptide; note = XENP019884 vlCDR2
GAFSRAT

SEQ ID NO: 1415 - protein, 9 aa, synthetic construct
  source 1..9: note = Description of Artificial Sequence: Synthetic peptide; note = XENP019884 vlCDR3
QQYGSSPWT

SEQ ID NO: 1416 - protein, 246 aa, synthetic construct
  source 1..246: note = Description of Artificial Sequence: Synthetic polypeptide; note = XENP019885 [CTLA-4]_H0_L0.1_scFv(GKPGS)4
QVQLVESGGGVVQPGRSLRLSCAASGFTFSSYTMHWVRQAPGKGLEWVTFISYDGNNKYYADSVKGRFTISRDNSKNTLYLQMNSLRAEDTAIYYCARTGWLGPFDYWGQGTLVTVSSGKPGSGKPGSGKPGSGKPGSAIVLTQSPGTLSLSPGERATLSCRASQSVGSSYLAWYQQKPGQAPRLLIYGAFSRATGIPDRFSGSGSGTDFTLTISRLEPEDFAVYYCQQYGSSPWTFGQGTKVEIK

SEQ ID NO: 1417 - protein, 118 aa, synthetic construct; identical to SEQ ID NO: 22
  source 1..118: note = Description of Artificial Sequence: Synthetic polypeptide; note = VH of XENP019885

SEQ ID NO: 1418 - protein, 108 aa, synthetic construct
  source 1..108: note = Description of Artificial Sequence: Synthetic polypeptide; note = VL of XENP019885
AIVLTQSPGTLSLSPGERATLSCRASQSVGSSYLAWYQQKPGQAPRLLIYGAFSRATGIPDRFSGSGSGTDFTLTISRLEPEDFAVYYCQQYGSSPWTFGQGTKVEIK

SEQ ID NO: 1419 - protein, 5 aa, synthetic construct
  source 1..5: note = Description of Artificial Sequence: Synthetic peptide; note = XENP019885 vhCDR1
SYTMH

SEQ ID NO: 1420 - protein, 17 aa, synthetic construct
  source 1..17: note = Description of Artificial Sequence: Synthetic peptide; note = XENP019885 vhCDR2
FISYDGNNKYYADSVKG

SEQ ID NO: 1421 - protein, 9 aa, synthetic construct
  source 1..9: note = Description of Artificial Sequence: Synthetic peptide; note = XENP019885 vhCDR3
TGWLGPFDY

SEQ ID NO: 1422 - protein, 12 aa, synthetic construct
  source 1..12: note = Description of Artificial Sequence: Synthetic peptide; note = XENP019885 vlCDR1
RASQSVGSSYLA

SEQ ID NO: 1423 - protein, 7 aa, synthetic construct
  source 1..7: note = Description of Artificial Sequence: Synthetic peptide; note = XENP019885 vlCDR2
GAFSRAT

SEQ ID NO: 1424 - protein, 9 aa, synthetic construct
  source 1..9: note = Description of Artificial Sequence: Synthetic peptide; note = XENP019885 vlCDR3
QQYGSSPWT

SEQ ID NO: 1425 - protein, 246 aa, synthetic construct
  source 1..246: note = Description of Artificial Sequence: Synthetic polypeptide; note = XENP019886 [CTLA-4]_H0_L0.2_scFv(GKPGS)4
QVQLVESGGGVVQPGRSLRLSCAASGFTFSSYTMHWVRQAPGKGLEWVTFISYDGNNKYYADSVKGRFTISRDNSKNTLYLQMNSLRAEDTAIYYCARTGWLGPFDYWGQGTLVTVSSGKPGSGKPGSGKPGSGKPGSDIVLTQSPGTLSLSPGERATLSCRASQSVGSSYLAWYQQKPGQAPRLLIYGAFSRATGIPDRFSGSGSGTDFTLTISRLEPEDFAVYYCQQYGSSPWTFGQGTKVEIK

SEQ ID NO: 1426 - protein, 118 aa, synthetic construct; identical to SEQ ID NO: 22
  source 1..118: note = Description of Artificial Sequence: Synthetic polypeptide; note = VH of XENP019886

SEQ ID NO: 1427 - protein, 108 aa, synthetic construct
  source 1..108: note = Description of Artificial Sequence: Synthetic polypeptide; note = VL of XENP019886
DIVLTQSPGTLSLSPGERATLSCRASQSVGSSYLAWYQQKPGQAPRLLIYGAFSRATGIPDRFSGSGSGTDFTLTISRLEPEDFAVYYCQQYGSSPWTFGQGTKVEIK

SEQ ID NO: 1428 - protein, 5 aa, synthetic construct
  source 1..5: note = Description of Artificial Sequence: Synthetic peptide; note = XENP019886 vhCDR1
SYTMH

SEQ ID NO: 1429 - protein, 17 aa, synthetic construct
  source 1..17: note = Description of Artificial Sequence: Synthetic peptide; note = XENP019886 vhCDR2
FISYDGNNKYYADSVKG

SEQ ID NO: 1430 - protein, 9 aa, synthetic construct
  source 1..9: note = Description of Artificial Sequence: Synthetic peptide; note = XENP019886 vhCDR3
TGWLGPFDY

SEQ ID NO: 1431 - protein, 12 aa, synthetic construct
  source 1..12: note = Description of Artificial Sequence: Synthetic peptide; note = XENP019886 vlCDR1
RASQSVGSSYLA

SEQ ID NO: 1432 - protein, 7 aa, synthetic construct
  source 1..7: note = Description of Artificial Sequence: Synthetic peptide; note = XENP019886 vlCDR2
GAFSRAT

SEQ ID NO: 1433 - protein, 9 aa, synthetic construct
  source 1..9: note = Description of Artificial Sequence: Synthetic peptide; note = XENP019886 vlCDR3
QQYGSSPWT

SEQ ID NO: 1434 - protein, 246 aa, synthetic construct
  source 1..246: note = Description of Artificial Sequence: Synthetic polypeptide; note = XENP019887 [CTLA-4]_H0_L0.3_scFv(GKPGS)4
QVQLVESGGGVVQPGRSLRLSCAASGFTFSSYTMHWVRQAPGKGLEWVTFISYDGNNKYYADSVKGRFTISRDNSKNTLYLQMNSLRAEDTAIYYCARTGWLGPFDYWGQGTLVTVSSGKPGSGKPGSGKPGSGKPGSQIVLTQSPGTLSLSPGERATLSCRASQSVGSSYLAWYQQKPGQAPRLLIYGAFSRATGIPDRFSGSGSGTDFTLTISRLEPEDFAVYYCQQYGSSPWTFGQGTKVEIK

SEQ ID NO: 1435 - protein, 118 aa, synthetic construct; identical to SEQ ID NO: 22
  source 1..118: note = Description of Artificial Sequence: Synthetic polypeptide; note = VH of XENP019887

SEQ ID NO: 1436 - protein, 108 aa, synthetic construct
  source 1..108: note = Description of Artificial Sequence: Synthetic polypeptide; note = VL of XENP019887
QIVLTQSPGTLSLSPGERATLSCRASQSVGSSYLAWYQQKPGQAPRLLIYGAFSRATGIPDRFSGSGSGTDFTLTISRLEPEDFAVYYCQQYGSSPWTFGQGTKVEIK

SEQ ID NO: 1437 - protein, 5 aa, synthetic construct
  source 1..5: note = Description of Artificial Sequence: Synthetic peptide; note = XENP019887 vhCDR1
SYTMH

SEQ ID NO: 1438 - protein, 17 aa, synthetic construct
  source 1..17: note = Description of Artificial Sequence: Synthetic peptide; note = XENP019887 vhCDR2
FISYDGNNKYYADSVKG

SEQ ID NO: 1439 - protein, 9 aa, synthetic construct
  source 1..9: note = Description of Artificial Sequence: Synthetic peptide; note = XENP019887 vhCDR3
TGWLGPFDY

SEQ ID NO: 1440 - protein, 12 aa, synthetic construct
  source 1..12: note = Description of Artificial Sequence: Synthetic peptide; note = XENP019887 vlCDR1
RASQSVGSSYLA

SEQ ID NO: 1441 - protein, 7 aa, synthetic construct
  source 1..7: note = Description of Artificial Sequence: Synthetic peptide; note = XENP019887 vlCDR2
GAFSRAT

SEQ ID NO: 1442 - protein, 9 aa, synthetic construct
  source 1..9: note = Description of Artificial Sequence: Synthetic peptide; note = XENP019887 vlCDR3
QQYGSSPWT

SEQ ID NO: 1443 - protein, 246 aa, synthetic construct
  source 1..246: note = Description of Artificial Sequence: Synthetic polypeptide; note = XENP019888 [CTLA-4]_H0_L0.4_scFv(GKPGS)4
QVQLVESGGGVVQPGRSLRLSCAASGFTFSSYTMHWVRQAPGKGLEWVTFISYDGNNKYYADSVKGRFTISRDNSKNTLYLQMNSLRAEDTAIYYCARTGWLGPFDYWGQGTLVTVSSGKPGSGKPGSGKPGSGKPGSRIVLTQSPGTLSLSPGERATLSCRASQSVGSSYLAWYQQKPGQAPRLLIYGAFSRATGIPDRFSGSGSGTDFTLTISRLEPEDFAVYYCQQYGSSPWTFGQGTKVEIK

SEQ ID NO: 1444 - protein, 118 aa, synthetic construct; identical to SEQ ID NO: 22
  source 1..118: note = Description of Artificial Sequence: Synthetic polypeptide; note = VH of XENP019888

SEQ ID NO: 1445 - protein, 108 aa, synthetic construct
  source 1..108: note = Description of Artificial Sequence: Synthetic polypeptide; note = VL of XENP019888
RIVLTQSPGTLSLSPGERATLSCRASQSVGSSYLAWYQQKPGQAPRLLIYGAFSRATGIPDRFSGSGSGTDFTLTISRLEPEDFAVYYCQQYGSSPWTFGQGTKVEIK

SEQ ID NO: 1446 - protein, 5 aa, synthetic construct
  source 1..5: note = Description of Artificial Sequence: Synthetic peptide; note = XENP019888 vhCDR1
SYTMH

SEQ ID NO: 1447 - protein, 17 aa, synthetic construct
  source 1..17: note = Description of Artificial Sequence: Synthetic peptide; note = XENP019888 vhCDR2
FISYDGNNKYYADSVKG

SEQ ID NO: 1448 - protein, 9 aa, synthetic construct
  source 1..9: note = Description of Artificial Sequence: Synthetic peptide; note = XENP019888 vhCDR3
TGWLGPFDY

SEQ ID NO: 1449 - protein, 12 aa, synthetic construct
  source 1..12: note = Description of Artificial Sequence: Synthetic peptide; note = XENP019888 vlCDR1
RASQSVGSSYLA

SEQ ID NO: 1450 - protein, 7 aa, synthetic construct
  source 1..7: note = Description of Artificial Sequence: Synthetic peptide; note = XENP019888 vlCDR2
GAFSRAT

SEQ ID NO: 1451 - protein, 9 aa, synthetic construct
  source 1..9: note = Description of Artificial Sequence: Synthetic peptide; note = XENP019888 vlCDR3
QQYGSSPWT

SEQ ID NO: 1452 - protein, 246 aa, synthetic construct
  source 1..246: note = Description of Artificial Sequence: Synthetic polypeptide; note = XENP019889 [CTLA-4]_H0_L0.5_scFv(GKPGS)4
QVQLVESGGGVVQPGRSLRLSCAASGFTFSSYTMHWVRQAPGKGLEWVTFISYDGNNKYYADSVKGRFTISRDNSKNTLYLQMNSLRAEDTAIYYCARTGWLGPFDYWGQGTLVTVSSGKPGSGKPGSGKPGSGKPGSEIRLTQSPGTLSLSPGERATLSCRASQSVGSSYLAWYQQKPGQAPRLLIYGAFSRATGIPDRFSGSGSGTDFTLTISRLEPEDFAVYYCQQYGSSPWTFGQGTKVEIK

SEQ ID NO: 1453 - protein, 118 aa, synthetic construct; identical to SEQ ID NO: 22
  source 1..118: note = Description of Artificial Sequence: Synthetic polypeptide; note = VH of XENP019889

SEQ ID NO: 1454 - protein, 108 aa, synthetic construct
  source 1..108: note = Description of Artificial Sequence: Synthetic polypeptide; note = VL of XENP019889
EIRLTQSPGTLSLSPGERATLSCRASQSVGSSYLAWYQQKPGQAPRLLIYGAFSRATGIPDRFSGSGSGTDFTLTISRLEPEDFAVYYCQQYGSSPWTFGQGTKVEIK

SEQ ID NO: 1455 - protein, 5 aa, synthetic construct
  source 1..5: note = Description of Artificial Sequence: Synthetic peptide; note = XENP019889 vhCDR1
SYTMH

SEQ ID NO: 1456 - protein, 17 aa, synthetic construct
  source 1..17: note = Description of Artificial Sequence: Synthetic peptide; note = XENP019889 vhCDR2
FISYDGNNKYYADSVKG

SEQ ID NO: 1457 - protein, 9 aa, synthetic construct
  source 1..9: note = Description of Artificial Sequence: Synthetic peptide; note = XENP019889 vhCDR3
TGWLGPFDY

SEQ ID NO: 1458 - protein, 12 aa, synthetic construct
  source 1..12: note = Description of Artificial Sequence: Synthetic peptide; note = XENP019889 vlCDR1
RASQSVGSSYLA

SEQ ID NO: 1459 - protein, 7 aa, synthetic construct
  source 1..7: note = Description of Artificial Sequence: Synthetic peptide; note = XENP019889 vlCDR2
GAFSRAT

SEQ ID NO: 1460 - protein, 9 aa, synthetic construct
  source 1..9: note = Description of Artificial Sequence: Synthetic peptide; note = XENP019889 vlCDR3
QQYGSSPWT

SEQ ID NO: 1461 - protein, 246 aa, synthetic construct
  source 1..246: note = Description of Artificial Sequence: Synthetic polypeptide; note = XENP019890 [CTLA-4]_H0_L0.6_scFv(GKPGS)4
QVQLVESGGGVVQPGRSLRLSCAASGFTFSSYTMHWVRQAPGKGLEWVTFISYDGNNKYYADSVKGRFTISRDNSKNTLYLQMNSLRAEDTAIYYCARTGWLGPFDYWGQGTLVTVSSGKPGSGKPGSGKPGSGKPGSEIRLTQSPGTLSLSPGERATLSCRASQSVGSSYLAWYQQKPGQAPRLLIYGAFSRATGIPDRFSGSGSGTDFTLTISRLEPEDFAVYYCQQYGSSPWTFGEGTKVEIK

SEQ ID NO: 1462 - protein, 118 aa, synthetic construct; identical to SEQ ID NO: 22
  source 1..118: note = Description of Artificial Sequence: Synthetic polypeptide; note = VH of XENP019890

SEQ ID NO: 1463 - protein, 108 aa, synthetic construct
  source 1..108: note = Description of Artificial Sequence: Synthetic polypeptide; note = VL of XENP019890
EIRLTQSPGTLSLSPGERATLSCRASQSVGSSYLAWYQQKPGQAPRLLIYGAFSRATGIPDRFSGSGSGTDFTLTISRLEPEDFAVYYCQQYGSSPWTFGEGTKVEIK

SEQ ID NO: 1464 - protein, 5 aa, synthetic construct
  source 1..5: note = Description of Artificial Sequence: Synthetic peptide; note = XENP019890 vhCDR1
SYTMH

SEQ ID NO: 1465 - protein, 17 aa, synthetic construct
  source 1..17: note = Description of Artificial Sequence: Synthetic peptide; note = XENP019890 vhCDR2
FISYDGNNKYYADSVKG

SEQ ID NO: 1466 - protein, 9 aa, synthetic construct
  source 1..9: note = Description of Artificial Sequence: Synthetic peptide; note = XENP019890 vhCDR3
TGWLGPFDY

SEQ ID NO: 1467 - protein, 12 aa, synthetic construct
  source 1..12: note = Description of Artificial Sequence: Synthetic peptide; note = XENP019890 vlCDR1
RASQSVGSSYLA

SEQ ID NO: 1468 - protein, 7 aa, synthetic construct
  source 1..7: note = Description of Artificial Sequence: Synthetic peptide; note = XENP019890 vlCDR2
GAFSRAT

SEQ ID NO: 1469 - protein, 9 aa, synthetic construct
  source 1..9: note = Description of Artificial Sequence: Synthetic peptide; note = XENP019890 vlCDR3
QQYGSSPWT

SEQ ID NO: 1470 - protein, 246 aa, synthetic construct
  source 1..246: note = Description of Artificial Sequence: Synthetic polypeptide; note = XENP019891 [CTLA-4]_H0_L0.7_scFv(GKPGS)4
QVQLVESGGGVVQPGRSLRLSCAASGFTFSSYTMHWVRQAPGKGLEWVTFISYDGNNKYYADSVKGRFTISRDNSKNTLYLQMNSLRAEDTAIYYCARTGWLGPFDYWGQGTLVTVSSGKPGSGKPGSGKPGSGKPGSEIVMTQSPGTLSLSPGERATLSCRASQSVGSSYLAWYQQKPGQAPRLLIYGAFSRATGIPDRFSGSGSGTDFTLTISRLEPEDFAVYYCQQYGSSPWTFGQGTKVEIK

SEQ ID NO: 1471 - protein, 118 aa, synthetic construct; identical to SEQ ID NO: 22
  source 1..118: note = Description of Artificial Sequence: Synthetic polypeptide; note = VH of XENP019891

SEQ ID NO: 1472 - protein, 108 aa, synthetic construct
  source 1..108: note = Description of Artificial Sequence: Synthetic polypeptide; note = VL of XENP019891
EIVMTQSPGTLSLSPGERATLSCRASQSVGSSYLAWYQQKPGQAPRLLIYGAFSRATGIPDRFSGSGSGTDFTLTISRLEPEDFAVYYCQQYGSSPWTFGQGTKVEIK

SEQ ID NO: 1473 - protein, 5 aa, synthetic construct
  source 1..5: note = Description of Artificial Sequence: Synthetic peptide; note = XENP019891 vhCDR1
SYTMH

SEQ ID NO: 1474 - protein, 17 aa, synthetic construct
  source 1..17: note = Description of Artificial Sequence: Synthetic peptide; note = XENP019891 vhCDR2
FISYDGNNKYYADSVKG

SEQ ID NO: 1475 - protein, 9 aa, synthetic construct
  source 1..9: note = Description of Artificial Sequence: Synthetic peptide; note = XENP019891 vhCDR3
TGWLGPFDY

SEQ ID NO: 1476 - protein, 12 aa, synthetic construct
  source 1..12: note = Description of Artificial Sequence: Synthetic peptide; note = XENP019891 vlCDR1
RASQSVGSSYLA

SEQ ID NO: 1477 - protein, 7 aa, synthetic construct
  source 1..7: note = Description of Artificial Sequence: Synthetic peptide; note = XENP019891 vlCDR2
GAFSRAT

SEQ ID NO: 1478 - protein, 9 aa, synthetic construct
  source 1..9: note = Description of Artificial Sequence: Synthetic peptide; note = XENP019891 vlCDR3
QQYGSSPWT

SEQ ID NO: 1479 - protein, 246 aa, synthetic construct
  source 1..246: note = Description of Artificial Sequence: Synthetic polypeptide; note = XENP019892 [CTLA-4]_H0_L0.8_scFv(GKPGS)4
QVQLVESGGGVVQPGRSLRLSCAASGFTFSSYTMHWVRQAPGKGLEWVTFISYDGNNKYYADSVKGRFTISRDNSKNTLYLQMNSLRAEDTAIYYCARTGWLGPFDYWGQGTLVTVSSGKPGSGKPGSGKPGSGKPGSEIVLTQSPATLSLSPGERATLSCRASQSVGSSYLAWYQQKPGQAPRLLIYGAFSRATGIPDRFSGSGSGTDFTLTISRLEPEDFAVYYCQQYGSSPWTFGQGTKVEIK

SEQ ID NO: 1480 - protein, 118 aa, synthetic construct; identical to SEQ ID NO: 22
  source 1..118: note = Description of Artificial Sequence: Synthetic polypeptide; note = VH of XENP019892

SEQ ID NO: 1481 - protein, 108 aa, synthetic construct
  source 1..108: note = Description of Artificial Sequence: Synthetic polypeptide; note = VL of XENP019892
EIVLTQSPATLSLSPGERATLSCRASQSVGSSYLAWYQQKPGQAPRLLIYGAFSRATGIPDRFSGSGSGTDFTLTISRLEPEDFAVYYCQQYGSSPWTFGQGTKVEIK

SEQ ID NO: 1482 - protein, 5 aa, synthetic construct
  source 1..5: note = Description of Artificial Sequence: Synthetic peptide; note = XENP019892 vhCDR1
SYTMH

SEQ ID NO: 1483 - protein, 17 aa, synthetic construct
  source 1..17: note = Description of Artificial Sequence: Synthetic peptide; note = XENP019892 vhCDR2
FISYDGNNKYYADSVKG

SEQ ID NO: 1484 - protein, 9 aa, synthetic construct
  source 1..9: note = Description of Artificial Sequence: Synthetic peptide; note = XENP019892 vhCDR3
TGWLGPFDY

SEQ ID NO: 1485 - protein, 12 aa, synthetic construct
  source 1..12: note = Description of Artificial Sequence: Synthetic peptide; note = XENP019892 vlCDR1
RASQSVGSSYLA

SEQ ID NO: 1486 - protein, 7 aa, synthetic construct
  source 1..7: note = Description of Artificial Sequence: Synthetic peptide; note = XENP019892 vlCDR2
GAFSRAT

SEQ ID NO: 1487 - protein, 9 aa, synthetic construct
  source 1..9: note = Description of Artificial Sequence: Synthetic peptide; note = XENP019892 vlCDR3
QQYGSSPWT

SEQ ID NO: 1488 - protein, 246 aa, synthetic construct
  source 1..246: note = Description of Artificial Sequence: Synthetic polypeptide; note = XENP019893 [CTLA-4]_H0_L0.9_scFv(GKPGS)4
QVQLVESGGGVVQPGRSLRLSCAASGFTFSSYTMHWVRQAPGKGLEWVTFISYDGNNKYYADSVKGRFTISRDNSKNTLYLQMNSLRAEDTAIYYCARTGWLGPFDYWGQGTLVTVSSGKPGSGKPGSGKPGSGKPGSEIVLTQSPPTLSLSPGERATLSCRASQSVGSSYLAWYQQKPGQAPRLLIYGAFSRATGIPDRFSGSGSGTDFTLTISRLEPEDFAVYYCQQYGSSPWTFGQGTKVEIK

SEQ ID NO: 1489 - protein, 118 aa, synthetic construct; identical to SEQ ID NO: 22
  source 1..118: note = Description of Artificial Sequence: Synthetic polypeptide; note = VH of XENP019893

SEQ ID NO: 1490 - protein, 108 aa, synthetic construct
  source 1..108: note = Description of Artificial Sequence: Synthetic polypeptide; note = VL of XENP019893
EIVLTQSPPTLSLSPGERATLSCRASQSVGSSYLAWYQQKPGQAPRLLIYGAFSRATGIPDRFSGSGSGTDFTLTISRLEPEDFAVYYCQQYGSSPWTFGQGTKVEIK

SEQ ID NO: 1491 - protein, 5 aa, synthetic construct
  source 1..5: note = Description of Artificial Sequence: Synthetic peptide; note = XENP019893 vhCDR1
SYTMH

SEQ ID NO: 1492 - protein, 17 aa, synthetic construct
  source 1..17: note = Description of Artificial Sequence: Synthetic peptide; note = XENP019893 vhCDR2
FISYDGNNKYYADSVKG

SEQ ID NO: 1493 - protein, 9 aa, synthetic construct
  source 1..9: note = Description of Artificial Sequence: Synthetic peptide; note = XENP019893 vhCDR3
TGWLGPFDY

SEQ ID NO: 1494 - protein, 12 aa, synthetic construct
  source 1..12: note = Description of Artificial Sequence: Synthetic peptide; note = XENP019893 vlCDR1
RASQSVGSSYLA

SEQ ID NO: 1495 - protein, 7 aa, synthetic construct
  source 1..7: note = Description of Artificial Sequence: Synthetic peptide; note = XENP019893 vlCDR2
GAFSRAT

SEQ ID NO: 1496 - protein, 9 aa, synthetic construct
  source 1..9: note = Description of Artificial Sequence: Synthetic peptide; note = XENP019893 vlCDR3
QQYGSSPWT

SEQ ID NO: 1497 - protein, 246 aa, synthetic construct
  source 1..246: note = Description of Artificial Sequence: Synthetic polypeptide; note = XENP019894 [CTLA-4]_H0_L0.10_scFv(GKPGS)4
QVQLVESGGGVVQPGRSLRLSCAASGFTFSSYTMHWVRQAPGKGLEWVTFISYDGNNKYYADSVKGRFTISRDNSKNTLYLQMNSLRAEDTAIYYCARTGWLGPFDYWGQGTLVTVSSGKPGSGKPGSGKPGSGKPGSEIVLTQSPSTLSLSPGERATLSCRASQSVGSSYLAWYQQKPGQAPRLLIYGAFSRATGIPDRFSGSGSGTDFTLTISRLEPEDFAVYYCQQYGSSPWTFGQGTKVEIK

SEQ ID NO: 1498 - protein, 118 aa, synthetic construct; identical to SEQ ID NO: 22
  source 1..118: note = Description of Artificial Sequence: Synthetic polypeptide; note = VH of XENP019894

SEQ ID NO: 1499 - protein, 108 aa, synthetic construct
  source 1..108: note = Description of Artificial Sequence: Synthetic polypeptide; note = VL of XENP019894
EIVLTQSPSTLSLSPGERATLSCRASQSVGSSYLAWYQQKPGQAPRLLIYGAFSRATGIPDRFSGSGSGTDFTLTISRLEPEDFAVYYCQQYGSSPWTFGQGTKVEIK

SEQ ID NO: 1500 - protein, 5 aa, synthetic construct
  source 1..5: note = Description of Artificial Sequence: Synthetic peptide; note = XENP019894 vhCDR1
SYTMH

SEQ ID NO: 1501 - protein, 17 aa, synthetic construct
  source 1..17: note = Description of Artificial Sequence: Synthetic peptide; note = XENP019894 vhCDR2
FISYDGNNKYYADSVKG

SEQ ID NO: 1502 - protein, 9 aa, synthetic construct
  source 1..9: note = Description of Artificial Sequence: Synthetic peptide; note = XENP019894 vhCDR3
TGWLGPFDY

SEQ ID NO: 1503 - protein, 12 aa, synthetic construct
  source 1..12: note = Description of Artificial Sequence: Synthetic peptide; note = XENP019894 vlCDR1
RASQSVGSSYLA

SEQ ID NO: 1504 - protein, 7 aa, synthetic construct
  source 1..7: note = Description of Artificial Sequence: Synthetic peptide; note = XENP019894 vlCDR2
GAFSRAT

SEQ ID NO: 1505 - protein, 9 aa, synthetic construct
  source 1..9: note = Description of Artificial Sequence: Synthetic peptide; note = XENP019894 vlCDR3
QQYGSSPWT

SEQ ID NO: 1506 - protein, 246 aa, synthetic construct
  source 1..246: note = Description of Artificial Sequence: Synthetic polypeptide; note = XENP019895 [CTLA-4]_H0_L0.11_scFv(GKPGS)4
QVQLVESGGGVVQPGRSLRLSCAASGFTFSSYTMHWVRQAPGKGLEWVTFISYDGNNKYYADSVKGRFTISRDNSKNTLYLQMNSLRAEDTAIYYCARTGWLGPFDYWGQGTLVTVSSGKPGSGKPGSGKPGSGKPGSEIVLTQSPGSLSLSPGERATLSCRASQSVGSSYLAWYQQKPGQAPRLLIYGAFSRATGIPDRFSGSGSGTDFTLTISRLEPEDFAVYYCQQYGSSPWTFGQGTKVEIK

SEQ ID NO: 1507 - protein, 118 aa, synthetic construct; identical to SEQ ID NO: 22
  source 1..118: note = Description of Artificial Sequence: Synthetic polypeptide; note = VH of XENP019895

SEQ ID NO: 1508 - protein, 108 aa, synthetic construct
  source 1..108: note = Description of Artificial Sequence: Synthetic polypeptide; note = VL of XENP019895
EIVLTQSPGSLSLSPGERATLSCRASQSVGSSYLAWYQQKPGQAPRLLIYGAFSRATGIPDRFSGSGSGTDFTLTISRLEPEDFAVYYCQQYGSSPWTFGQGTKVEIK

SEQ ID NO: 1509 - protein, 5 aa, synthetic construct
  source 1..5: note = Description of Artificial Sequence: Synthetic peptide; note = XENP019895 vhCDR1
SYTMH

SEQ ID NO: 1510 - protein, 17 aa, synthetic construct
  source 1..17: note = Description of Artificial Sequence: Synthetic peptide; note = XENP019895 vhCDR2
FISYDGNNKYYADSVKG

SEQ ID NO: 1511 - protein, 9 aa, synthetic construct
  source 1..9: note = Description of Artificial Sequence: Synthetic peptide; note = XENP019895 vhCDR3
TGWLGPFDY

SEQ ID NO: 1512 - protein, 12 aa, synthetic construct
  source 1..12: note = Description of Artificial Sequence: Synthetic peptide; note = XENP019895 vlCDR1
RASQSVGSSYLA

SEQ ID NO: 1513 - protein, 7 aa, synthetic construct
  source 1..7: note = Description of Artificial Sequence: Synthetic peptide; note = XENP019895 vlCDR2
GAFSRAT

SEQ ID NO: 1514 - protein, 9 aa, synthetic construct
  source 1..9: note = Description of Artificial Sequence: Synthetic peptide; note = XENP019895 vlCDR3
QQYGSSPWT

SEQ ID NO: 1515 - protein, 246 aa, synthetic construct
  source 1..246: note = Description of Artificial Sequence: Synthetic polypeptide; note = XENP019896 [CTLA-4]_H0_L0.12_scFv(GKPGS)4
QVQLVESGGGVVQPGRSLRLSCAASGFTFSSYTMHWVRQAPGKGLEWVTFISYDGNNKYYADSVKGRFTISRDNSKNTLYLQMNSLRAEDTAIYYCARTGWLGPFDYWGQGTLVTVSSGKPGSGKPGSGKPGSGKPGSEIVLTQSPGTLSVSPGERATLSCRASQSVGSSYLAWYQQKPGQAPRLLIYGAFSRATGIPDRFSGSGSGTDFTLTISRLEPEDFAVYYCQQYGSSPWTFGQGTKVEIK

SEQ ID NO: 1516 - protein, 118 aa, synthetic construct; identical to SEQ ID NO: 22
  source 1..118: note = Description of Artificial Sequence: Synthetic polypeptide; note = VH of XENP019896

SEQ ID NO: 1517 - protein, 108 aa, synthetic construct
  source 1..108: note = Description of Artificial Sequence: Synthetic polypeptide; note = VL of XENP019896
EIVLTQSPGTLSVSPGERATLSCRASQSVGSSYLAWYQQKPGQAPRLLIYGAFSRATGIPDRFSGSGSGTDFTLTISRLEPEDFAVYYCQQYGSSPWTFGQGTKVEIK

SEQ ID NO: 1518 - protein, 5 aa, synthetic construct
  source 1..5: note = Description of Artificial Sequence: Synthetic peptide; note = XENP019896 vhCDR1
SYTMH

SEQ ID NO: 1519 - protein, 17 aa, synthetic construct
  source 1..17: note = Description of Artificial Sequence: Synthetic peptide; note = XENP019896 vhCDR2
FISYDGNNKYYADSVKG

SEQ ID NO: 1520 - protein, 9 aa, synthetic construct
  source 1..9: note = Description of Artificial Sequence: Synthetic peptide; note = XENP019896 vhCDR3
TGWLGPFDY

SEQ ID NO: 1521 - protein, 12 aa, synthetic construct
  source 1..12: note = Description of Artificial Sequence: Synthetic peptide; note = XENP019896 vlCDR1
RASQSVGSSYLA

SEQ ID NO: 1522 - protein, 7 aa, synthetic construct
  source 1..7: note = Description of Artificial Sequence: Synthetic peptide; note = XENP019896 vlCDR2
GAFSRAT

SEQ ID NO: 1523 - protein, 9 aa, synthetic construct
  source 1..9: note = Description of Artificial Sequence: Synthetic peptide; note = XENP019896 vlCDR3
QQYGSSPWT

SEQ ID NO: 1524 - protein, 246 aa, synthetic construct
  source 1..246: note = Description of Artificial Sequence: Synthetic polypeptide; note = XENP019901 [CTLA-4]_H0_L0.13_scFv(GKPGS)4
QVQLVESGGGVVQPGRSLRLSCAASGFTFSSYTMHWVRQAPGKGLEWVTFISYDGNNKYYADSVKGRFTISRDNSKNTLYLQMNSLRAEDTAIYYCARTGWLGPFDYWGQGTLVTVSSGKPGSGKPGSGKPGSGKPGSEIVLTQSPGTLSLSPGEPATLSCRASQSVGSSYLAWYQQKPGQAPRLLIYGAFSRATGIPDRFSGSGSGTDFTLTISRLEPEDFAVYYCQQYGSSPWTFGQGTKVEIK

SEQ ID NO: 1525 - protein, 118 aa, synthetic construct; identical to SEQ ID NO: 22
  source 1..118: note = Description of Artificial Sequence: Synthetic polypeptide; note = VH of XENP019901

SEQ ID NO: 1526 - protein, 108 aa, synthetic construct
  source 1..108: note = Description of Artificial Sequence: Synthetic polypeptide; note = VL of XENP019901
EIVLTQSPGTLSLSPGEPATLSCRASQSVGSSYLAWYQQKPGQAPRLLIYGAFSRATGIPDRFSGSGSGTDFTLTISRLEPEDFAVYYCQQYGSSPWTFGQGTKVEIK

SEQ ID NO: 1527 - protein, 5 aa, synthetic construct
  source 1..5: note = Description of Artificial Sequence: Synthetic peptide; note = XENP019901 vhCDR1
SYTMH

SEQ ID NO: 1528 - protein, 17 aa, synthetic construct
  source 1..17: note = Description of Artificial Sequence: Synthetic peptide; note = XENP019901 vhCDR2
FISYDGNNKYYADSVKG

SEQ ID NO: 1529 - protein, 9 aa, synthetic construct
  source 1..9: note = Description of Artificial Sequence: Synthetic peptide; note = XENP019901 vhCDR3
TGWLGPFDY

SEQ ID NO: 1530 - protein, 12 aa, synthetic construct
  source 1..12: note = Description of Artificial Sequence: Synthetic peptide; note = XENP019901 vlCDR1
RASQSVGSSYLA

SEQ ID NO: 1531 - protein, 7 aa, synthetic construct
  source 1..7: note = Description of Artificial Sequence: Synthetic peptide; note = XENP019901 vlCDR2
GAFSRAT

SEQ ID NO: 1532 - protein, 9 aa, synthetic construct
  source 1..9: note = Description of Artificial Sequence: Synthetic peptide; note = XENP019901 vlCDR3
QQYGSSPWT

SEQ ID NO: 1533 - protein, 246 aa, synthetic construct
  source 1..246: note = Description of Artificial Sequence: Synthetic polypeptide; note = XENP019902 [CTLA-4]_H0_L0.14_scFv(GKPGS)4
QVQLVESGGGVVQPGRSLRLSCAASGFTFSSYTMHWVRQAPGKGLEWVTFISYDGNNKYYADSVKGRFTISRDNSKNTLYLQMNSLRAEDTAIYYCARTGWLGPFDYWGQGTLVTVSSGKPGSGKPGSGKPGSGKPGSEIVLTQSPGTLSLSPGEQATLSCRASQSVGSSYLAWYQQKPGQAPRLLIYGAFSRATGIPDRFSGSGSGTDFTLTISRLEPEDFAVYYCQQYGSSPWTFGQGTKVEIK

SEQ ID NO: 1534 - protein, 118 aa, synthetic construct; identical to SEQ ID NO: 22
  source 1..118: note = Description of Artificial Sequence: Synthetic polypeptide; note = VH of XENP019902

SEQ ID NO: 1535 - protein, 108 aa, synthetic construct
  source 1..108: note = Description of Artificial Sequence: Synthetic polypeptide; note = VL of XENP019902
EIVLTQSPGTLSLSPGEQATLSCRASQSVGSSYLAWYQQKPGQAPRLLIYGAFSRATGIPDRFSGSGSGTDFTLTISRLEPEDFAVYYCQQYGSSPWTFGQGTKVEIK

SEQ ID NO: 1536 - protein, 5 aa, synthetic construct
  source 1..5: note = Description of Artificial Sequence: Synthetic peptide; note = XENP019902 vhCDR1
SYTMH

SEQ ID NO: 1537 - protein, 17 aa, synthetic construct
  source 1..17: note = Description of Artificial Sequence: Synthetic peptide; note = XENP019902 vhCDR2
FISYDGNNKYYADSVKG

SEQ ID NO: 1538 - protein, 9 aa, synthetic construct
  source 1..9: note = Description of Artificial Sequence: Synthetic peptide; note = XENP019902 vhCDR3
TGWLGPFDY

SEQ ID NO: 1539 - protein, 12 aa, synthetic construct
  source 1..12: note = Description of Artificial Sequence: Synthetic peptide; note = XENP019902 vlCDR1
RASQSVGSSYLA

SEQ ID NO: 1540 - protein, 7 aa, synthetic construct
  source 1..7: note = Description of Artificial Sequence: Synthetic peptide; note = XENP019902 vlCDR2
GAFSRAT

SEQ ID NO: 1541 - protein, 9 aa, synthetic construct
  source 1..9: note = Description of Artificial Sequence: Synthetic peptide; note = XENP019902 vlCDR3
QQYGSSPWT

SEQ ID NO: 1542 - protein, 246 aa, synthetic construct
  source 1..246: note = Description of Artificial Sequence: Synthetic polypeptide; note = XENP019903 [CTLA-4]_H0_L0.15_scFv(GKPGS)4
QVQLVESGGGVVQPGRSLRLSCAASGFTFSSYTMHWVRQAPGKGLEWVTFISYDGNNKYYADSVKGRFTISRDNSKNTLYLQMNSLRAEDTAIYYCARTGWLGPFDYWGQGTLVTVSSGKPGSGKPGSGKPGSGKPGSEIVLTQSPGTLSLSPGERVTLSCRASQSVGSSYLAWYQQKPGQAPRLLIYGAFSRATGIPDRFSGSGSGTDFTLTISRLEPEDFAVYYCQQYGSSPWTFGQGTKVEIK

SEQ ID NO: 1543 - protein, 118 aa, synthetic construct; identical to SEQ ID NO: 22
  source 1..118: note = Description of Artificial Sequence: Synthetic polypeptide; note = VH of XENP019903

SEQ ID NO: 1544 - protein, 108 aa, synthetic construct
  source 1..108: note = Description of Artificial Sequence: Synthetic polypeptide; note = VL of XENP019903
EIVLTQSPGTLSLSPGERVTLSCRASQSVGSSYLAWYQQKPGQAPRLLIYGAFSRATGIPDRFSGSGSGTDFTLTISRLEPEDFAVYYCQQYGSSPWTFGQGTKVEIK

SEQ ID NO: 1545 - protein, 5 aa, synthetic construct
  source 1..5: note = Description of Artificial Sequence: Synthetic peptide; note = XENP019903 vhCDR1
SYTMH

SEQ ID NO: 1546 - protein, 17 aa, synthetic construct
  source 1..17: note = Description of Artificial Sequence: Synthetic peptide; note = XENP019903 vhCDR2
FISYDGNNKYYADSVKG

SEQ ID NO: 1547 - protein, 9 aa, synthetic construct
  source 1..9: note = Description of Artificial Sequence: Synthetic peptide; note = XENP019903 vhCDR3
TGWLGPFDY

SEQ ID NO: 1548 - protein, 12 aa, synthetic construct
  source 1..12: note = Description of Artificial Sequence: Synthetic peptide; note = XENP019903 vlCDR1
RASQSVGSSYLA

SEQ ID NO: 1549 - protein, 7 aa, synthetic construct
  source 1..7: note = Description of Artificial Sequence: Synthetic peptide; note = XENP019903 vlCDR2
GAFSRAT

SEQ ID NO: 1550 - protein, 9 aa, synthetic construct
  source 1..9: note = Description of Artificial Sequence: Synthetic peptide; note = XENP019903 vlCDR3
QQYGSSPWT

SEQ ID NO: 1551 - protein, 246 aa, synthetic construct
  source 1..246: note = Description of Artificial Sequence: Synthetic polypeptide; note = XENP019904 [CTLA-4]_H0_L0.16_scFv(GKPGS)4
QVQLVESGGGVVQPGRSLRLSCAASGFTFSSYTMHWVRQAPGKGLEWVTFISYDGNNKYYADSVKGRFTISRDNSKNTLYLQMNSLRAEDTAIYYCARTGWLGPFDYWGQGTLVTVSSGKPGSGKPGSGKPGSGKPGSEIVLTQSPGTLSLSPGERASLSCRASQSVGSSYLAWYQQKPGQAPRLLIYGAFSRATGIPDRFSGSGSGTDFTLTISRLEPEDFAVYYCQQYGSSPWTFGQGTKVEIK

SEQ ID NO: 1552 - protein, 118 aa, synthetic construct; identical to SEQ ID NO: 22
  source 1..118: note = Description of Artificial Sequence: Synthetic polypeptide; note = VH of XENP019904

SEQ ID NO: 1553 - protein, 108 aa, synthetic construct
  source 1..108: note = Description of Artificial Sequence: Synthetic polypeptide; note = VL of XENP019904
EIVLTQSPGTLSLSPGERASLSCRASQSVGSSYLAWYQQKPGQAPRLLIYGAFSRATGIPDRFSGSGSGTDFTLTISRLEPEDFAVYYCQQYGSSPWTFGQGTKVEIK

SEQ ID NO: 1554 - protein, 5 aa, synthetic construct
  source 1..5: note = Description of Artificial Sequence: Synthetic peptide; note = XENP019904 vhCDR1
SYTMH

SEQ ID NO: 1555 - protein, 17 aa, synthetic construct
  source 1..17: note = Description of Artificial Sequence: Synthetic peptide; note = XENP019904 vhCDR2
FISYDGNNKYYADSVKG

SEQ ID NO: 1556 - protein, 9 aa, synthetic construct
  source 1..9: note = Description of Artificial Sequence: Synthetic peptide; note = XENP019904 vhCDR3
TGWLGPFDY

SEQ ID NO: 1557 - protein, 12 aa, synthetic construct
  source 1..12: note = Description of Artificial Sequence: Synthetic peptide; note = XENP019904 vlCDR1
RASQSVGSSYLA

SEQ ID NO: 1558 - protein, 7 aa, synthetic construct
  source 1..7: note = Description of Artificial Sequence: Synthetic peptide; note = XENP019904 vlCDR2
GAFSRAT

SEQ ID NO: 1559 - protein, 9 aa, synthetic construct
  source 1..9: note = Description of Artificial Sequence: Synthetic peptide; note = XENP019904 vlCDR3
QQYGSSPWT

SEQ ID NO: 1560 - protein, 246 aa, synthetic construct
  source 1..246: note = Description of Artificial Sequence: Synthetic polypeptide; note = XENP019905 [CTLA-4]_H0_L0.17_scFv(GKPGS)4
QVQLVESGGGVVQPGRSLRLSCAASGFTFSSYTMHWVRQAPGKGLEWVTFISYDGNNKYYADSVKGRFTISRDNSKNTLYLQMNSLRAEDTAIYYCARTGWLGPFDYWGQGTLVTVSSGKPGSGKPGSGKPGSGKPGSEIVLTQSPGTLSLSPGERATISCRASQSVGSSYLAWYQQKPGQAPRLLIYGAFSRATGIPDRFSGSGSGTDFTLTISRLEPEDFAVYYCQQYGSSPWTFGQGTKVEIK

SEQ ID NO: 1561 - protein, 118 aa, synthetic construct; identical to SEQ ID NO: 22
  source 1..118: note = Description of Artificial Sequence: Synthetic polypeptide; note = VH of XENP019905

SEQ ID NO: 1562 - protein, 108 aa, synthetic construct
  source 1..108: note = Description of Artificial Sequence: Synthetic polypeptide; note = VL of XENP019905
EIVLTQSPGTLSLSPGERATISCRASQSVGSSYLAWYQQKPGQAPRLLIYGAFSRATGIPDRFSGSGSGTDFTLTISRLEPEDFAVYYCQQYGSSPWTFGQGTKVEIK

SEQ ID NO: 1563 - protein, 5 aa, synthetic construct
  source 1..5: note = Description of Artificial Sequence: Synthetic peptide; note = XENP019905 vhCDR1
SYTMH

SEQ ID NO: 1564 - protein, 17 aa, synthetic construct
  source 1..17: note = Description of Artificial Sequence: Synthetic peptide; note = XENP019905 vhCDR2
FISYDGNNKYYADSVKG

SEQ ID NO: 1565 - protein, 9 aa, synthetic construct
  source 1..9: note = Description of Artificial Sequence: Synthetic peptide; note = XENP019905 vhCDR3
TGWLGPFDY

SEQ ID NO: 1566 - protein, 12 aa, synthetic construct
  source 1..12: note = Description of Artificial Sequence: Synthetic peptide; note = XENP019905 vlCDR1
RASQSVGSSYLA

SEQ ID NO: 1567 - protein, 7 aa, synthetic construct
  source 1..7: note = Description of Artificial Sequence: Synthetic peptide; note = XENP019905 vlCDR2
GAFSRAT

SEQ ID NO: 1568 - protein, 9 aa, synthetic construct
  source 1..9: note = Description of Artificial Sequence: Synthetic peptide; note = XENP019905 vlCDR3
QQYGSSPWT

SEQ ID NO: 1569 - protein, 246 aa, synthetic construct
  source 1..246: note = Description of Artificial Sequence: Synthetic polypeptide; note = XENP019906 [CTLA-4]_H0_L0.18_scFv(GKPGS)4
QVQLVESGGGVVQPGRSLRLSCAASGFTFSSYTMHWVRQAPGKGLEWVTFISYDGNNKYYADSVKGRFTISRDNSKNTLYLQMNSLRAEDTAIYYCARTGWLGPFDYWGQGTLVTVSSGKPGSGKPGSGKPGSGKPGSEIVLTQSPGTLSLSPGERATLSCRSSQSVGSSYLAWYQQKPGQAPRLLIYGAFSRATGIPDRFSGSGSGTDFTLTISRLEPEDFAVYYCQQYGSSPWTFGQGTKVEIK

SEQ ID NO: 1570 - protein, 118 aa, synthetic construct; identical to SEQ ID NO: 22
  source 1..118: note = Description of Artificial Sequence: Synthetic polypeptide; note = VH of XENP019906

SEQ ID NO: 1571 - protein, 108 aa, synthetic construct
  source 1..108: note = Description of Artificial Sequence: Synthetic polypeptide; note = VL of XENP019906
EIVLTQSPGTLSLSPGERATLSCRSSQSVGSSYLAWYQQKPGQAPRLLIYGAFSRATGIPDRFSGSGSGTDFTLTISRLEPEDFAVYYCQQYGSSPWTFGQGTKVEIK

SEQ ID NO: 1572 - protein, 5 aa, synthetic construct
  source 1..5: note = Description of Artificial Sequence: Synthetic peptide; note = XENP019906 vhCDR1
SYTMH

SEQ ID NO: 1573 - protein, 17 aa, synthetic construct
  source 1..17: note = Description of Artificial Sequence: Synthetic peptide; note = XENP019906 vhCDR2
FISYDGNNKYYADSVKG

SEQ ID NO: 1574 - protein, 9 aa, synthetic construct
  source 1..9: note = Description of Artificial Sequence: Synthetic peptide; note = XENP019906 vhCDR3
TGWLGPFDY

SEQ ID NO: 1575 - protein, 12 aa, synthetic construct
  source 1..12: note = Description of Artificial Sequence: Synthetic peptide; note = XENP019906 vlCDR1
RSSQSVGSSYLA

SEQ ID NO: 1576 - protein, 7 aa, synthetic construct
  source 1..7: note = Description of Artificial Sequence: Synthetic peptide; note = XENP019906 vlCDR2
GAFSRAT

SEQ ID NO: 1577 - protein, 9 aa, synthetic construct
  source 1..9: note = Description of Artificial Sequence: Synthetic peptide; note = XENP019906 vlCDR3
QQYGSSPWT

SEQ ID NO: 1578 - protein, 246 aa, synthetic construct
  source 1..246: note = Description of Artificial Sequence: Synthetic polypeptide; note = XENP019907 [CTLA-4]_H0_L0.19_scFv(GKPGS)4
QVQLVESGGGVVQPGRSLRLSCAASGFTFSSYTMHWVRQAPGKGLEWVTFISYDGNNKYYADSVKGRFTISRDNSKNTLYLQMNSLRAEDTAIYYCARTGWLGPFDYWGQGTLVTVSSGKPGSGKPGSGKPGSGKPGSEIVLTQSPGTLSLSPGERATLSCRASQSDGSSYLAWYQQKPGQAPRLLIYGAFSRATGIPDRFSGSGSGTDFTLTISRLEPEDFAVYYCQQYGSSPWTFGQGTKVEIK

SEQ ID NO: 1579 - protein, 118 aa, synthetic construct; identical to SEQ ID NO: 22
  source 1..118: note = Description of Artificial Sequence: Synthetic polypeptide; note = VH of XENP019907

SEQ ID NO: 1580 - protein, 108 aa, synthetic construct
  source 1..108: note = Description of Artificial Sequence: Synthetic polypeptide; note = VL of XENP019907
EIVLTQSPGTLSLSPGERATLSCRASQSDGSSYLAWYQQKPGQAPRLLIYGAFSRATGIPDRFSGSGSGTDFTLTISRLEPEDFAVYYCQQYGSSPWTFGQGTKVEIK

SEQ ID NO: 1581 - protein, 5 aa, synthetic construct
  source 1..5: note = Description of Artificial Sequence: Synthetic peptide; note = XENP019907 vhCDR1
SYTMH

SEQ ID NO: 1582 - protein, 17 aa, synthetic construct
  source 1..17: note = Description of Artificial Sequence: Synthetic peptide; note = XENP019907 vhCDR2
FISYDGNNKYYADSVKG

SEQ ID NO: 1583 - protein, 9 aa, synthetic construct
  source 1..9: note = Description of Artificial Sequence: Synthetic peptide; note = XENP019907 vhCDR3
TGWLGPFDY

SEQ ID NO: 1584 - protein, 12 aa, synthetic construct
  source 1..12: note = Description of Artificial Sequence: Synthetic peptide; note = XENP019907 vlCDR1
RASQSDGSSYLA

SEQ ID NO: 1585 - protein, 7 aa, synthetic construct
  source 1..7: note = Description of Artificial Sequence: Synthetic peptide; note = XENP019907 vlCDR2
GAFSRAT

SEQ ID NO: 1586 - protein, 9 aa, synthetic construct
  source 1..9: note = Description of Artificial Sequence: Synthetic peptide; note = XENP019907 vlCDR3
QQYGSSPWT

SEQ ID NO: 1587 - protein, 246 aa, synthetic construct
  source 1..246: note = Description of Artificial Sequence: Synthetic polypeptide; note = XENP019908 [CTLA-4]_H0_L0.20_scFv(GKPGS)4
QVQLVESGGGVVQPGRSLRLSCAASGFTFSSYTMHWVRQAPGKGLEWVTFISYDGNNKYYADSVKGRFTISRDNSKNTLYLQMNSLRAEDTAIYYCARTGWLGPFDYWGQGTLVTVSSGKPGSGKPGSGKPGSGKPGSEIVLTQSPGTLSLSPGERATLSCRASQSSGSSYLAWYQQKPGQAPRLLIYGAFSRATGIPDRFSGSGSGTDFTLTISRLEPEDFAVYYCQQYGSSPWTFGQGTKVEIK

SEQ ID NO: 1588 - protein, 118 aa, synthetic construct; identical to SEQ ID NO: 22
  source 1..118: note = Description of Artificial Sequence: Synthetic polypeptide; note = VH of XENP019908

SEQ ID NO: 1589 - protein, 108 aa, synthetic construct
  source 1..108: note = Description of Artificial Sequence: Synthetic polypeptide; note = VL of XENP019908
EIVLTQSPGTLSLSPGERATLSCRASQSSGSSYLAWYQQKPGQAPRLLIYGAFSRATGIPDRFSGSGSGTDFTLTISRLEPEDFAVYYCQQYGSSPWTFGQGTKVEIK

SEQ ID NO: 1590 - protein, 5 aa, synthetic construct
  source 1..5: note = Description of Artificial Sequence: Synthetic peptide; note = XENP019908 vhCDR1
SYTMH

SEQ ID NO: 1591 - protein, 17 aa, synthetic construct
  source 1..17: note = Description of Artificial Sequence: Synthetic peptide; note = XENP019908 vhCDR2
FISYDGNNKYYADSVKG

SEQ ID NO: 1592 - protein, 9 aa, synthetic construct
  source 1..9: note = Description of Artificial Sequence: Synthetic peptide; note = XENP019908 vhCDR3
TGWLGPFDY

SEQ ID NO: 1593 - protein, 12 aa, synthetic construct
  source 1..12: note = Description of Artificial Sequence: Synthetic peptide; note = XENP019908 vlCDR1
RASQSSGSSYLA

SEQ ID NO: 1594 - protein, 7 aa, synthetic construct
  source 1..7: note = Description of Artificial Sequence: Synthetic peptide; note = XENP019908 vlCDR2
GAFSRAT

SEQ ID NO: 1595 - protein, 9 aa, synthetic construct
  source 1..9: note = Description of Artificial Sequence: Synthetic peptide; note = XENP019908 vlCDR3
QQYGSSPWT

SEQ ID NO: 1596 - protein, 246 aa, synthetic construct
  source 1..246: note = Description of Artificial Sequence: Synthetic polypeptide; note = XENP019909 [CTLA-4]_H0_L0.21_scFv(GKPGS)4
QVQLVESGGGVVQPGRSLRLSCAASGFTFSSYTMHWVRQAPGKGLEWVTFISYDGNNKYYADSVKGRFTISRDNSKNTLYLQMNSLRAEDTAIYYCARTGWLGPFDYWGQGTLVTVSSGKPGSGKPGSGKPGSGKPGSEIVLTQSPGTLSLSPGERATLSCRASQSVASSYLAWYQQKPGQAPRLLIYGAFSRATGIPDRFSGSGSGTDFTLTISRLEPEDFAVYYCQQYGSSPWTFGQGTKVEIK

SEQ ID NO: 1597 - protein, 118 aa, synthetic construct; identical to SEQ ID NO: 22
  source 1..118: note = Description of Artificial Sequence: Synthetic polypeptide; note = VH of XENP019909

SEQ ID NO: 1598 - protein, 108 aa, synthetic construct
  source 1..108: note = Description of Artificial Sequence: Synthetic polypeptide; note = VL of XENP019909
EIVLTQSPGTLSLSPGERATLSCRASQSVASSYLAWYQQKPGQAPRLLIYGAFSRATGIPDRFSGSGSGTDFTLTISRLEPEDFAVYYCQQYGSSPWTFGQGTKVEIK

SEQ ID NO: 1599 - protein, 5 aa, synthetic construct
  source 1..5: note = Description of Artificial Sequence: Synthetic peptide; note = XENP019909 vhCDR1
SYTMH

SEQ ID NO: 1600 - protein, 17 aa, synthetic construct
  source 1..17: note = Description of Artificial Sequence: Synthetic peptide; note = XENP019909 vhCDR2
FISYDGNNKYYADSVKG

SEQ ID NO: 1601 - protein, 9 aa, synthetic construct
  source 1..9: note = Description of Artificial Sequence: Synthetic peptide; note = XENP019909 vhCDR3
TGWLGPFDY

SEQ ID NO: 1602 - protein, 12 aa, synthetic construct
  source 1..12: note = Description of Artificial Sequence: Synthetic peptide; note = XENP019909 vlCDR1
RASQSVASSYLA

SEQ ID NO: 1603 - protein, 7 aa, synthetic construct
  source 1..7: note = Description of Artificial Sequence: Synthetic peptide; note = XENP019909 vlCDR2
GAFSRAT

SEQ ID NO: 1604 - protein, 9 aa, synthetic construct
  source 1..9: note = Description of Artificial Sequence: Synthetic peptide; note = XENP019909 vlCDR3
QQYGSSPWT

SEQ ID NO: 1605 - protein, 246 aa, synthetic construct
  source 1..246: note = Description of Artificial Sequence: Synthetic polypeptide; note = XENP019910 [CTLA-4]_H0_L0.22_scFv(GKPGS)4
QVQLVESGGGVVQPGRSLRLSCAASGFTFSSYTMHWVRQAPGKGLEWVTFISYDGNNKYYADSVKGRFTISRDNSKNTLYLQMNSLRAEDTAIYYCARTGWLGPFDYWGQGTLVTVSSGKPGSGKPGSGKPGSGKPGSEIVLTQSPGTLSLSPGERATLSCRASQSVSSSYLAWYQQKPGQAPRLLIYGAFSRATGIPDRFSGSGSGTDFTLTISRLEPEDFAVYYCQQYGSSPWTFGQGTKVEIK

SEQ ID NO: 1606 - protein, 118 aa, synthetic construct; identical to SEQ ID NO: 22
  source 1..118: note = Description of Artificial Sequence: Synthetic polypeptide; note = VH of XENP019910

SEQ ID NO: 1607 - protein, 108 aa, synthetic construct
  source 1..108: note = Description of Artificial Sequence: Synthetic polypeptide; note = VL of XENP019910
EIVLTQSPGTLSLSPGERATLSCRASQSVSSSYLAWYQQKPGQAPRLLIYGAFSRATGIPDRFSGSGSGTDFTLTISRLEPEDFAVYYCQQYGSSPWTFGQGTKVEIK

SEQ ID NO: 1608 - protein, 5 aa, synthetic construct
  source 1..5: note = Description of Artificial Sequence: Synthetic peptide; note = XENP019910 vhCDR1
SYTMH

SEQ ID NO: 1609 - protein, 17 aa, synthetic construct
  source 1..17: note = Description of Artificial Sequence: Synthetic peptide; note = XENP019910 vhCDR2
FISYDGNNKYYADSVKG

SEQ ID NO: 1610 - protein, 9 aa, synthetic construct
  source 1..9: note = Description of Artificial Sequence: Synthetic peptide; note = XENP019910 vhCDR3
TGWLGPFDY

SEQ ID NO: 1611 - protein, 12 aa, synthetic construct
  source 1..12: note = Description of Artificial Sequence: Synthetic peptide; note = XENP019910 vlCDR1
RASQSVSSSYLA

SEQ ID NO: 1612 - protein, 7 aa, synthetic construct
  source 1..7: note = Description of Artificial Sequence: Synthetic peptide; note = XENP019910 vlCDR2
GAFSRAT

SEQ ID NO: 1613 - protein, 9 aa, synthetic construct
  source 1..9: note = Description of Artificial Sequence: Synthetic peptide; note = XENP019910 vlCDR3
QQYGSSPWT

SEQ ID NO: 1614 - protein, 246 aa, synthetic construct
  source 1..246: note = Description of Artificial Sequence: Synthetic polypeptide; note = XENP019911 [CTLA-4]_H0_L0.23_scFv(GKPGS)4
QVQLVESGGGVVQPGRSLRLSCAASGFTFSSYTMHWVRQAPGKGLEWVTFISYDGNNKYYADSVKGRFTISRDNSKNTLYLQMNSLRAEDTAIYYCARTGWLGPFDYWGQGTLVTVSSGKPGSGKPGSGKPGSGKPGSEIVLTQSPGTLSLSPGERATLSCRASQSVTSSYLAWYQQKPGQAPRLLIYGAFSRATGIPDRFSGSGSGTDFTLTISRLEPEDFAVYYCQQYGSSPWTFGQGTKVEIK

SEQ ID NO: 1615 - protein, 118 aa, synthetic construct; identical to SEQ ID NO: 22
  source 1..118: note = Description of Artificial Sequence: Synthetic polypeptide; note = VH of XENP019911

SEQ ID NO: 1616 - protein, 108 aa, synthetic construct
  source 1..108: note = Description of Artificial Sequence: Synthetic polypeptide; note = VL of XENP019911
EIVLTQSPGTLSLSPGERATLSCRASQSVTSSYLAWYQQKPGQAPRLLIYGAFSRATGIPDRFSGSGSGTDFTLTISRLEPEDFAVYYCQQYGSSPWTFGQGTKVEIK

SEQ ID NO: 1617 - protein, 5 aa, synthetic construct
  source 1..5: note = Description of Artificial Sequence: Synthetic peptide; note = XENP019911 vhCDR1
SYTMH

SEQ ID NO: 1618 - protein, 17 aa, synthetic construct
  source 1..17: note = Description of Artificial Sequence: Synthetic peptide; note = XENP019911 vhCDR2
FISYDGNNKYYADSVKG

SEQ ID NO: 1619 - protein, 9 aa, synthetic construct
  source 1..9: note = Description of Artificial Sequence: Synthetic peptide; note = XENP019911 vhCDR3
TGWLGPFDY

SEQ ID NO: 1620 - protein, 12 aa, synthetic construct
  source 1..12: note = Description of Artificial Sequence: Synthetic peptide; note = XENP019911 vlCDR1
RASQSVTSSYLA

SEQ ID NO: 1621 - protein, 7 aa, synthetic construct
  source 1..7: note = Description of Artificial Sequence: Synthetic peptide; note = XENP019911 vlCDR2
GAFSRAT

SEQ ID NO: 1622 - protein, 9 aa, synthetic construct
  source 1..9: note = Description of Artificial Sequence: Synthetic peptide; note = XENP019911 vlCDR3
QQYGSSPWT

SEQ ID NO: 1623 - protein, 246 aa, synthetic construct
  source 1..246: note = Description of Artificial Sequence: Synthetic polypeptide; note = XENP019912 [CTLA-4]_H0_L0.24_scFv(GKPGS)4
QVQLVESGGGVVQPGRSLRLSCAASGFTFSSYTMHWVRQAPGKGLEWVTFISYDGNNKYYADSVKGRFTISRDNSKNTLYLQMNSLRAEDTAIYYCARTGWLGPFDYWGQGTLVTVSSGKPGSGKPGSGKPGSGKPGSEIVLTQSPGTLSLSPGERATLSCRASQSVGASYLAWYQQKPGQAPRLLIYGAFSRATGIPDRFSGSGSGTDFTLTISRLEPEDFAVYYCQQYGSSPWTFGQGTKVEIK

SEQ ID NO: 1624 - protein, 118 aa, synthetic construct; identical to SEQ ID NO: 22
  source 1..118: note = Description of Artificial Sequence: Synthetic polypeptide; note = VH of XENP019912

SEQ ID NO: 1625 - protein, 108 aa, synthetic construct
  source 1..108: note = Description of Artificial Sequence: Synthetic polypeptide; note = VL of XENP019912
EIVLTQSPGTLSLSPGERATLSCRASQSVGASYLAWYQQKPGQAPRLLIYGAFSRATGIPDRFSGSGSGTDFTLTISRLEPEDFAVYYCQQYGSSPWTFGQGTKVEIK

SEQ ID NO: 1626 - protein, 5 aa, synthetic construct
  source 1..5: note = Description of Artificial Sequence: Synthetic peptide; note = XENP019912 vhCDR1
SYTMH

SEQ ID NO: 1627 - protein, 17 aa, synthetic construct
  source 1..17: note = Description of Artificial Sequence: Synthetic peptide; note = XENP019912 vhCDR2
FISYDGNNKYYADSVKG

SEQ ID NO: 1628 - protein, 9 aa, synthetic construct
  source 1..9: note = Description of Artificial Sequence: Synthetic peptide; note = XENP019912 vhCDR3
TGWLGPFDY

SEQ ID NO: 1629 - protein, 12 aa, synthetic construct
  source 1..12: note = Description of Artificial Sequence: Synthetic peptide; note = XENP019912 vlCDR1
RASQSVGASYLA

SEQ ID NO: 1630 - protein, 7 aa, synthetic construct
  source 1..7: note = Description of Artificial Sequence: Synthetic peptide; note = XENP019912 vlCDR2
GAFSRAT

SEQ ID NO: 1631 - protein, 9 aa, synthetic construct
  source 1..9: note = Description of Artificial Sequence: Synthetic peptide; note = XENP019912 vlCDR3
QQYGSSPWT

SEQ ID NO: 1632 - protein, 246 aa, synthetic construct
  source 1..246: note = Description of Artificial Sequence: Synthetic polypeptide; note = XENP019913 [CTLA-4]_H0_L0.25_scFv(GKPGS)4
QVQLVESGGGVVQPGRSLRLSCAASGFTFSSYTMHWVRQAPGKGLEWVTFISYDGNNKYYADSVKGRFTISRDNSKNTLYLQMNSLRAEDTAIYYCARTGWLGPFDYWGQGTLVTVSSGKPGSGKPGSGKPGSGKPGSEIVLTQSPGTLSLSPGERATLSCRASQSVGGSYLAWYQQKPGQAPRLLIYGAFSRATGIPDRFSGSGSGTDFTLTISRLEPEDFAVYYCQQYGSSPWTFGQGTKVEIK

SEQ ID NO: 1633 - protein, 118 aa, synthetic construct; identical to SEQ ID NO: 22
  source 1..118: note = Description of Artificial Sequence: Synthetic polypeptide; note = VH of XENP019913

SEQ ID NO: 1634 - protein, 108 aa, synthetic construct
  source 1..108: note = Description of Artificial Sequence: Synthetic polypeptide; note = VL of XENP019913
EIVLTQSPGTLSLSPGERATLSCRASQSVGGSYLAWYQQKPGQAPRLLIYGAFSRATGIPDRFSGSGSGTDFTLTISRLEPEDFAVYYCQQYGSSPWTFGQGTKVEIK

SEQ ID NO: 1635 - protein, 5 aa, synthetic construct
  source 1..5: note = Description of Artificial Sequence: Synthetic peptide; note = XENP019913 vhCDR1
SYTMH

SEQ ID NO: 1636 - protein, 17 aa, synthetic construct
  source 1..17: note = Description of Artificial Sequence: Synthetic peptide; note = XENP019913 vhCDR2
FISYDGNNKYYADSVKG

SEQ ID NO: 1637 - protein, 9 aa, synthetic construct
  source 1..9: note = Description of Artificial Sequence: Synthetic peptide; note = XENP019913 vhCDR3
TGWLGPFDY

SEQ ID NO: 1638 - protein, 12 aa, synthetic construct
  source 1..12: note = Description of Artificial Sequence: Synthetic peptide; note = XENP019913 vlCDR1
RASQSVGGSYLA

SEQ ID NO: 1639 - protein, 7 aa, synthetic construct
  source 1..7: note = Description of Artificial Sequence: Synthetic peptide; note = XENP019913 vlCDR2
GAFSRAT

SEQ ID NO: 1640 - protein, 9 aa, synthetic construct
  source 1..9: note = Description of Artificial Sequence: Synthetic peptide; note = XENP019913 vlCDR3
QQYGSSPWT

SEQ ID NO: 1641 - protein, 246 aa, synthetic construct
  source 1..246: note = Description of Artificial Sequence: Synthetic polypeptide; note = XENP019914 [CTLA-4]_H0_L0.26_scFv(GKPGS)4
QVQLVESGGGVVQPGRSLRLSCAASGFTFSSYTMHWVRQAPGKGLEWVTFISYDGNNKYYADSVKGRFTISRDNSKNTLYLQMNSLRAEDTAIYYCARTGWLGPFDYWGQGTLVTVSSGKPGSGKPGSGKPGSGKPGSEIVLTQSPGTLSLSPGERATLSCRASQSVGNSYLAWYQQKPGQAPRLLIYGAFSRATGIPDRFSGSGSGTDFTLTISRLEPEDFAVYYCQQYGSSPWTFGQGTKVEIK

SEQ ID NO: 1642 - protein, 118 aa, synthetic construct; identical to SEQ ID NO: 22
  source 1..118: note = Description of Artificial Sequence: Synthetic polypeptide; note = VH of XENP019914

SEQ ID NO: 1643 - protein, 108 aa, synthetic construct
  source 1..108: note = Description of Artificial Sequence: Synthetic polypeptide; note = VL of XENP019914
EIVLTQSPGTLSLSPGERATLSCRASQSVGNSYLAWYQQKPGQAPRLLIYGAFSRATGIPDRFSGSGSGTDFTLTISRLEPEDFAVYYCQQYGSSPWTFGQGTKVEIK

SEQ ID NO: 1644 - protein, 5 aa, synthetic construct
  source 1..5: note = Description of Artificial Sequence: Synthetic peptide; note = XENP019914 vhCDR1
SYTMH

SEQ ID NO: 1645 - protein, 17 aa, synthetic construct
  source 1..17: note = Description of Artificial Sequence: Synthetic peptide; note = XENP019914 vhCDR2
FISYDGNNKYYADSVKG

SEQ ID NO: 1646 - protein, 9 aa, synthetic construct
  source 1..9: note = Description of Artificial Sequence: Synthetic peptide; note = XENP019914 vhCDR3
TGWLGPFDY

SEQ ID NO: 1647 - protein, 12 aa, synthetic construct
  source 1..12: note = Description of Artificial Sequence: Synthetic peptide; note = XENP019914 vlCDR1
RASQSVGNSYLA

SEQ ID NO: 1648 - protein, 7 aa, synthetic construct
  source 1..7: note = Description of Artificial Sequence: Synthetic peptide; note = XENP019914 vlCDR2
GAFSRAT

SEQ ID NO: 1649 - protein, 9 aa, synthetic construct
  source 1..9: note = Description of Artificial Sequence: Synthetic peptide; note = XENP019914 vlCDR3
QQYGSSPWT

SEQ ID NO: 1650 - protein, 246 aa, synthetic construct
  source 1..246: note = Description of Artificial Sequence: Synthetic polypeptide; note = XENP019915 [CTLA-4]_H0_L0.27_scFv(GKPGS)4
QVQLVESGGGVVQPGRSLRLSCAASGFTFSSYTMHWVRQAPGKGLEWVTFISYDGNNKYYADSVKGRFTISRDNSKNTLYLQMNSLRAEDTAIYYCARTGWLGPFDYWGQGTLVTVSSGKPGSGKPGSGKPGSGKPGSEIVLTQSPGTLSLSPGERATLSCRASQSVGQSYLAWYQQKPGQAPRLLIYGAFSRATGIPDRFSGSGSGTDFTLTISRLEPEDFAVYYCQQYGSSPWTFGQGTKVEIK

SEQ ID NO: 1651 - protein, 118 aa, synthetic construct; identical to SEQ ID NO: 22
  source 1..118: note = Description of Artificial Sequence: Synthetic polypeptide; note = VH of XENP019915

SEQ ID NO: 1652 - protein, 108 aa, synthetic construct
  source 1..108: note = Description of Artificial Sequence: Synthetic polypeptide; note = VL of XENP019915
EIVLTQSPGTLSLSPGERATLSCRASQSVGQSYLAWYQQKPGQAPRLLIYGAFSRATGIPDRFSGSGSGTDFTLTISRLEPEDFAVYYCQQYGSSPWTFGQGTKVEIK

SEQ ID NO: 1653 - protein, 5 aa, synthetic construct
  source 1..5: note = Description of Artificial Sequence: Synthetic peptide; note = XENP019915 vhCDR1
SYTMH

SEQ ID NO: 1654 - protein, 17 aa, synthetic construct
  source 1..17: note = Description of Artificial Sequence: Synthetic peptide; note = XENP019915 vhCDR2
FISYDGNNKYYADSVKG

SEQ ID NO: 1655 - protein, 9 aa, synthetic construct
  source 1..9: note = Description of Artificial Sequence: Synthetic peptide; note = XENP019915 vhCDR3
TGWLGPFDY

SEQ ID NO: 1656 - protein, 12 aa, synthetic construct
  source 1..12: note = Description of Artificial Sequence: Synthetic peptide; note = XENP019915 vlCDR1
RASQSVGQSYLA

SEQ ID NO: 1657 - protein, 7 aa, synthetic construct
  source 1..7: note = Description of Artificial Sequence: Synthetic peptide; note = XENP019915 vlCDR2
GAFSRAT

SEQ ID NO: 1658 - protein, 9 aa, synthetic construct
  source 1..9: note = Description of Artificial Sequence: Synthetic peptide; note = XENP019915 vlCDR3
QQYGSSPWT

SEQ ID NO: 1659 - protein, 246 aa, synthetic construct
  source 1..246: note = Description of Artificial Sequence: Synthetic polypeptide; note = XENP019916 [CTLA-4]_H0_L0.28_scFv(GKPGS)4
QVQLVESGGGVVQPGRSLRLSCAASGFTFSSYTMHWVRQAPGKGLEWVTFISYDGNNKYYADSVKGRFTISRDNSKNTLYLQMNSLRAEDTAIYYCARTGWLGPFDYWGQGTLVTVSSGKPGSGKPGSGKPGSGKPGSEIVLTQSPGTLSLSPGERATLSCRASQSVGTSYLAWYQQKPGQAPRLLIYGAFSRATGIPDRFSGSGSGTDFTLTISRLEPEDFAVYYCQQYGSSPWTFGQGTKVEIK

SEQ ID NO: 1660 - protein, 118 aa, synthetic construct; identical to SEQ ID NO: 22
  source 1..118: note = Description of Artificial Sequence: Synthetic polypeptide; note = VH of XENP019916

SEQ ID NO: 1661 - protein, 108 aa, synthetic construct
  source 1..108: note = Description of Artificial Sequence: Synthetic polypeptide; note = VL of XENP019916
EIVLTQSPGTLSLSPGERATLSCRASQSVGTSYLAWYQQKPGQAPRLLIYGAFSRATGIPDRFSGSGSGTDFTLTISRLEPEDFAVYYCQQYGSSPWTFGQGTKVEIK

SEQ ID NO: 1662 - protein, 5 aa, synthetic construct
  source 1..5: note = Description of Artificial Sequence: Synthetic peptide; note = XENP019916 vhCDR1
SYTMH

SEQ ID NO: 1663 - protein, 17 aa, synthetic construct
  source 1..17: note = Description of Artificial Sequence: Synthetic peptide; note = XENP019916 vhCDR2
FISYDGNNKYYADSVKG

SEQ ID NO: 1664 - protein, 9 aa, synthetic construct
  source 1..9: note = Description of Artificial Sequence: Synthetic peptide; note = XENP019916 vhCDR3
TGWLGPFDY

SEQ ID NO: 1665 - protein, 12 aa, synthetic construct
  source 1..12: note = Description of Artificial Sequence: Synthetic peptide; note = XENP019916 vlCDR1
RASQSVGTSYLA

SEQ ID NO: 1666 - protein, 7 aa, synthetic construct
  source 1..7: note = Description of Artificial Sequence: Synthetic peptide; note = XENP019916 vlCDR2
GAFSRAT

SEQ ID NO: 1667 - protein, 9 aa, synthetic construct
  source 1..9: note = Description of Artificial Sequence: Synthetic peptide; note = XENP019916 vlCDR3
QQYGSSPWT

SEQ ID NO: 1668 - protein, 246 aa, synthetic construct
  source 1..246: note = Description of Artificial Sequence: Synthetic polypeptide; note = XENP019917 [CTLA-4]_H0_L0.29_scFv(GKPGS)4
QVQLVESGGGVVQPGRSLRLSCAASGFTFSSYTMHWVRQAPGKGLEWVTFISYDGNNKYYADSVKGRFTISRDNSKNTLYLQMNSLRAEDTAIYYCARTGWLGPFDYWGQGTLVTVSSGKPGSGKPGSGKPGSGKPGSEIVLTQSPGTLSLSPGERATLSCRASQSVGSAYLAWYQQKPGQAPRLLIYGAFSRATGIPDRFSGSGSGTDFTLTISRLEPEDFAVYYCQQYGSSPWTFGQGTKVEIK

SEQ ID NO: 1669 - protein, 118 aa, synthetic construct; identical to SEQ ID NO: 22
  source 1..118: note = Description of Artificial Sequence: Synthetic polypeptide; note = VH of XENP019917

SEQ ID NO: 1670 - protein, 108 aa, synthetic construct
  source 1..108: note = Description of Artificial Sequence: Synthetic polypeptide; note = VL of XENP019917
EIVLTQSPGTLSLSPGERATLSCRASQSVGSAYLAWYQQKPGQAPRLLIYGAFSRATGIPDRFSGSGSGTDFTLTISRLEPEDFAVYYCQQYGSSPWTFGQGTKVEIK

SEQ ID NO: 1671 - protein, 5 aa, synthetic construct
  source 1..5: note = Description of Artificial Sequence: Synthetic peptide; note = XENP019917 vhCDR1
SYTMH

SEQ ID NO: 1672 - protein, 17 aa, synthetic construct
  source 1..17: note = Description of Artificial Sequence: Synthetic peptide; note = XENP019917 vhCDR2
FISYDGNNKYYADSVKG

SEQ ID NO: 1673 - protein, 9 aa, synthetic construct
  source 1..9: note = Description of Artificial Sequence: Synthetic peptide; note = XENP019917 vhCDR3
TGWLGPFDY

SEQ ID NO: 1674 - protein, 12 aa, synthetic construct
  source 1..12: note = Description of Artificial Sequence: Synthetic peptide; note = XENP019917 vlCDR1
RASQSVGSAYLA

SEQ ID NO: 1675 - protein, 7 aa, synthetic construct
  source 1..7: note = Description of Artificial Sequence: Synthetic peptide; note = XENP019917 vlCDR2
GAFSRAT

SEQ ID NO: 1676 - protein, 9 aa, synthetic construct
  source 1..9: note = Description of Artificial Sequence: Synthetic peptide; note = XENP019917 vlCDR3
QQYGSSPWT

SEQ ID NO: 1677 - protein, 246 aa, synthetic construct
  source 1..246: note = Description of Artificial Sequence: Synthetic polypeptide; note = XENP019918 [CTLA-4]_H0_L0.30_scFv(GKPGS)4
QVQLVESGGGVVQPGRSLRLSCAASGFTFSSYTMHWVRQAPGKGLEWVTFISYDGNNKYYADSVKGRFTISRDNSKNTLYLQMNSLRAEDTAIYYCARTGWLGPFDYWGQGTLVTVSSGKPGSGKPGSGKPGSGKPGSEIVLTQSPGTLSLSPGERATLSCRASQSVGSGYLAWYQQKPGQAPRLLIYGAFSRATGIPDRFSGSGSGTDFTLTISRLEPEDFAVYYCQQYGSSPWTFGQGTKVEIK

SEQ ID NO: 1678 - protein, 118 aa, synthetic construct; identical to SEQ ID NO: 22
  source 1..118: note = Description of Artificial Sequence: Synthetic polypeptide; note = VH of XENP019918

SEQ ID NO: 1679 - protein, 108 aa, synthetic construct
  source 1..108: note = Description of Artificial Sequence: Synthetic polypeptide; note = VL of XENP019918
EIVLTQSPGTLSLSPGERATLSCRASQSVGSGYLAWYQQKPGQAPRLLIYGAFSRATGIPDRFSGSGSGTDFTLTISRLEPEDFAVYYCQQYGSSPWTFGQGTKVEIK

SEQ ID NO: 1680 - protein, 5 aa, synthetic construct
  source 1..5: note = Description of Artificial Sequence: Synthetic peptide; note = XENP019918 vhCDR1
SYTMH

SEQ ID NO: 1681 - protein, 17 aa, synthetic construct
  source 1..17: note = Description of Artificial Sequence: Synthetic peptide; note = XENP019918 vhCDR2
FISYDGNNKYYADSVKG

SEQ ID NO: 1682 - protein, 9 aa, synthetic construct
  source 1..9: note = Description of Artificial Sequence: Synthetic peptide; note = XENP019918 vhCDR3
TGWLGPFDY

SEQ ID NO: 1683 - protein, 12 aa, synthetic construct
  source 1..12: note = Description of Artificial Sequence: Synthetic peptide; note = XENP019918 vlCDR1
RASQSVGSGYLA

SEQ ID NO: 1684 - protein, 7 aa, synthetic construct
  source 1..7: note = Description of Artificial Sequence: Synthetic peptide; note = XENP019918 vlCDR2
GAFSRAT

SEQ ID NO: 1685 - protein, 9 aa, synthetic construct
  source 1..9: note = Description of Artificial Sequence: Synthetic peptide; note = XENP019918 vlCDR3
QQYGSSPWT

SEQ ID NO: 1686 - protein, 246 aa, synthetic construct
  source 1..246: note = Description of Artificial Sequence: Synthetic polypeptide; note = XENP019919 [CTLA-4]_H0_L0.31_scFv(GKPGS)4
QVQLVESGGGVVQPGRSLRLSCAASGFTFSSYTMHWVRQAPGKGLEWVTFISYDGNNKYYADSVKGRFTISRDNSKNTLYLQMNSLRAEDTAIYYCARTGWLGPFDYWGQGTLVTVSSGKPGSGKPGSGKPGSGKPGSEIVLTQSPGTLSLSPGERATLSCRASQSVGSNYLAWYQQKPGQAPRLLIYGAFSRATGIPDRFSGSGSGTDFTLTISRLEPEDFAVYYCQQYGSSPWTFGQGTKVEIK

SEQ ID NO: 1687 - protein, 118 aa, synthetic construct; identical to SEQ ID NO: 22
  source 1..118: note = Description of Artificial Sequence: Synthetic polypeptide; note = VH of XENP019919

SEQ ID NO: 1688 - protein, 108 aa, synthetic construct
  source 1..108: note = Description of Artificial Sequence: Synthetic polypeptide; note = VL of XENP019919
EIVLTQSPGTLSLSPGERATLSCRASQSVGSNYLAWYQQKPGQAPRLLIYGAFSRATGIPDRFSGSGSGTDFTLTISRLEPEDFAVYYCQQYGSSPWTFGQGTKVEIK

SEQ ID NO: 1689 - protein, 5 aa, synthetic construct
  source 1..5: note = Description of Artificial Sequence: Synthetic peptide; note = XENP019919 vhCDR1
SYTMH

SEQ ID NO: 1690 - protein, 17 aa, synthetic construct
  source 1..17: note = Description of Artificial Sequence: Synthetic peptide; note = XENP019919 vhCDR2
FISYDGNNKYYADSVKG

SEQ ID NO: 1691 - protein, 9 aa, synthetic construct
  source 1..9: note = Description of Artificial Sequence: Synthetic peptide; note = XENP019919 vhCDR3
TGWLGPFDY

SEQ ID NO: 1692 - protein, 12 aa, synthetic construct
  source 1..12: note = Description of Artificial Sequence: Synthetic peptide; note = XENP019919 vlCDR1
RASQSVGSNYLA

SEQ ID NO: 1693 - protein, 7 aa, synthetic construct
  source 1..7: note = Description of Artificial Sequence: Synthetic peptide; note = XENP019919 vlCDR2
GAFSRAT

SEQ ID NO: 1694 - protein, 9 aa, synthetic construct
  source 1..9: note = Description of Artificial Sequence: Synthetic peptide; note = XENP019919 vlCDR3
QQYGSSPWT

SEQ ID NO: 1695 - protein, 246 aa, synthetic construct
  source 1..246: note = Description of Artificial Sequence: Synthetic polypeptide; note = XENP019920 [CTLA-4]_H0_L0.32_scFv(GKPGS)4
QVQLVESGGGVVQPGRSLRLSCAASGFTFSSYTMHWVRQAPGKGLEWVTFISYDGNNKYYADSVKGRFTISRDNSKNTLYLQMNSLRAEDTAIYYCARTGWLGPFDYWGQGTLVTVSSGKPGSGKPGSGKPGSGKPGSEIVLTQSPGTLSLSPGERATLSCRASQSVGSQYLAWYQQKPGQAPRLLIYGAFSRATGIPDRFSGSGSGTDFTLTISRLEPEDFAVYYCQQYGSSPWTFGQGTKVEIK

SEQ ID NO: 1696 - protein, 118 aa, synthetic construct; identical to SEQ ID NO: 22
  source 1..118: note = Description of Artificial Sequence: Synthetic polypeptide; note = VH of XENP019920

SEQ ID NO: 1697 - protein, 108 aa, synthetic construct
  source 1..108: note = Description of Artificial Sequence: Synthetic polypeptide; note = VL of XENP019920
EIVLTQSPGTLSLSPGERATLSCRASQSVGSQYLAWYQQKPGQAPRLLIYGAFSRATGIPDRFSGSGSGTDFTLTISRLEPEDFAVYYCQQYGSSPWTFGQGTKVEIK

SEQ ID NO: 1698 - protein, 5 aa, synthetic construct
  source 1..5: note = Description of Artificial Sequence: Synthetic peptide; note = XENP019920 vhCDR1
SYTMH

SEQ ID NO: 1699 - protein, 17 aa, synthetic construct
  source 1..17: note = Description of Artificial Sequence: Synthetic peptide; note = XENP019920 vhCDR2
FISYDGNNKYYADSVKG

SEQ ID NO: 1700 - protein, 9 aa, synthetic construct
  source 1..9: note = Description of Artificial Sequence: Synthetic peptide; note = XENP019920 vhCDR3
TGWLGPFDY

SEQ ID NO: 1701 - protein, 12 aa, synthetic construct
  source 1..12: note = Description of Artificial Sequence: Synthetic peptide; note = XENP019920 vlCDR1
RASQSVGSQYLA

SEQ ID NO: 1702 - protein, 7 aa, synthetic construct
  source 1..7: note = Description of Artificial Sequence: Synthetic peptide; note = XENP019920 vlCDR2
GAFSRAT

SEQ ID NO: 1703 - protein, 9 aa, synthetic construct
  source 1..9: note = Description of Artificial Sequence: Synthetic peptide; note = XENP019920 vlCDR3
QQYGSSPWT

SEQ ID NO: 1704 - protein, 246 aa, synthetic construct
  source 1..246: note = Description of Artificial Sequence: Synthetic polypeptide; note = XENP019921 [CTLA-4]_H0_L0.33_scFv(GKPGS)4
QVQLVESGGGVVQPGRSLRLSCAASGFTFSSYTMHWVRQAPGKGLEWVTFISYDGNNKYYADSVKGRFTISRDNSKNTLYLQMNSLRAEDTAIYYCARTGWLGPFDYWGQGTLVTVSSGKPGSGKPGSGKPGSGKPGSEIVLTQSPGTLSLSPGERATLSCRASQSVGSTYLAWYQQKPGQAPRLLIYGAFSRATGIPDRFSGSGSGTDFTLTISRLEPEDFAVYYCQQYGSSPWTFGQGTKVEIK

SEQ ID NO: 1705 - protein, 118 aa, synthetic construct; identical to SEQ ID NO: 22
  source 1..118: note = Description of Artificial Sequence: Synthetic polypeptide; note = VH of XENP019921

SEQ ID NO: 1706 - protein, 108 aa, synthetic construct
  source 1..108: note = Description of Artificial Sequence: Synthetic polypeptide; note = VL of XENP019921
EIVLTQSPGTLSLSPGERATLSCRASQSVGSTYLAWYQQKPGQAPRLLIYGAFSRATGIPDRFSGSGSGTDFTLTISRLEPEDFAVYYCQQYGSSPWTFGQGTKVEIK

SEQ ID NO: 1707 - protein, 5 aa, synthetic construct
  source 1..5: note = Description of Artificial Sequence: Synthetic peptide; note = XENP019921 vhCDR1
SYTMH

SEQ ID NO: 1708 - protein, 17 aa, synthetic construct
  source 1..17: note = Description of Artificial Sequence: Synthetic peptide; note = XENP019921 vhCDR2
FISYDGNNKYYADSVKG

SEQ ID NO: 1709 - protein, 9 aa, synthetic construct
  source 1..9: note = Description of Artificial Sequence: Synthetic peptide; note = XENP019921 vhCDR3
TGWLGPFDY

SEQ ID NO: 1710 - protein, 12 aa, synthetic construct
  source 1..12: note = Description of Artificial Sequence: Synthetic peptide; note = XENP019921 vlCDR1
RASQSVGSTYLA

SEQ ID NO: 1711 - protein, 7 aa, synthetic construct
  source 1..7: note = Description of Artificial Sequence: Synthetic peptide; note = XENP019921 vlCDR2
GAFSRAT

SEQ ID NO: 1712 - protein, 9 aa, synthetic construct
  source 1..9: note = Description of Artificial Sequence: Synthetic peptide; note = XENP019921 vlCDR3
QQYGSSPWT

SEQ ID NO: 1713 - protein, 246 aa, synthetic construct
  source 1..246: note = Description of Artificial Sequence: Synthetic polypeptide; note = XENP019922 [CTLA-4]_H0_L0.34_scFv(GKPGS)4
QVQLVESGGGVVQPGRSLRLSCAASGFTFSSYTMHWVRQAPGKGLEWVTFISYDGNNKYYADSVKGRFTISRDNSKNTLYLQMNSLRAEDTAIYYCARTGWLGPFDYWGQGTLVTVSSGKPGSGKPGSGKPGSGKPGSEIVLTQSPGTLSLSPGERATLSCRASQSVGSSALAWYQQKPGQAPRLLIYGAFSRATGIPDRFSGSGSGTDFTLTISRLEPEDFAVYYCQQYGSSPWTFGQGTKVEIK

SEQ ID NO: 1714 - protein, 118 aa, synthetic construct; identical to SEQ ID NO: 22
  source 1..118: note = Description of Artificial Sequence: Synthetic polypeptide; note = VH of XENP019922

SEQ ID NO: 1715 - protein, 108 aa, synthetic construct
  source 1..108: note = Description of Artificial Sequence: Synthetic polypeptide; note = VL of XENP019922
EIVLTQSPGTLSLSPGERATLSCRASQSVGSSALAWYQQKPGQAPRLLIYGAFSRATGIPDRFSGSGSGTDFTLTISRLEPEDFAVYYCQQYGSSPWTFGQGTKVEIK

SEQ ID NO: 1716 - protein, 5 aa, synthetic construct
  source 1..5: note = Description of Artificial Sequence: Synthetic peptide; note = XENP019922 vhCDR1
SYTMH

SEQ ID NO: 1717 - protein, 17 aa, synthetic construct
  source 1..17: note = Description of Artificial Sequence: Synthetic peptide; note = XENP019922 vhCDR2
FISYDGNNKYYADSVKG

SEQ ID NO: 1718 - protein, 9 aa, synthetic construct
  source 1..9: note = Description of Artificial Sequence: Synthetic peptide; note = XENP019922 vhCDR3
TGWLGPFDY

SEQ ID NO: 1719 - protein, 12 aa, synthetic construct
  source 1..12: note = Description of Artificial Sequence: Synthetic peptide; note = XENP019922 vlCDR1
RASQSVGSSALA

SEQ ID NO: 1720 - protein, 7 aa, synthetic construct
  source 1..7: note = Description of Artificial Sequence: Synthetic peptide; note = XENP019922 vlCDR2
GAFSRAT

SEQ ID NO: 1721 - protein, 9 aa, synthetic construct
  source 1..9: note = Description of Artificial Sequence: Synthetic peptide; note = XENP019922 vlCDR3
QQYGSSPWT

SEQ ID NO: 1722 - protein, 246 aa, synthetic construct
  source 1..246: note = Description of Artificial Sequence: Synthetic polypeptide; note = XENP019923 [CTLA-4]_H0_L0.35_scFv(GKPGS)4
QVQLVESGGGVVQPGRSLRLSCAASGFTFSSYTMHWVRQAPGKGLEWVTFISYDGNNKYYADSVKGRFTISRDNSKNTLYLQMNSLRAEDTAIYYCARTGWLGPFDYWGQGTLVTVSSGKPGSGKPGSGKPGSGKPGSEIVLTQSPGTLSLSPGERATLSCRASQSVGSSFLAWYQQKPGQAPRLLIYGAFSRATGIPDRFSGSGSGTDFTLTISRLEPEDFAVYYCQQYGSSPWTFGQGTKVEIK

SEQ ID NO: 1723 - protein, 118 aa, synthetic construct; identical to SEQ ID NO: 22
  source 1..118: note = Description of Artificial Sequence: Synthetic polypeptide; note = VH of XENP019923

SEQ ID NO: 1724 - protein, 108 aa, synthetic construct
  source 1..108: note = Description of Artificial Sequence: Synthetic polypeptide; note = VL of XENP019923
EIVLTQSPGTLSLSPGERATLSCRASQSVGSSFLAWYQQKPGQAPRLLIYGAFSRATGIPDRFSGSGSGTDFTLTISRLEPEDFAVYYCQQYGSSPWTFGQGTKVEIK

SEQ ID NO: 1725 - protein, 5 aa, synthetic construct
  source 1..5: note = Description of Artificial Sequence: Synthetic peptide; note = XENP019923 vhCDR1
SYTMH

SEQ ID NO: 1726 - protein, 17 aa, synthetic construct
  source 1..17: note = Description of Artificial Sequence: Synthetic peptide; note = XENP019923 vhCDR2
FISYDGNNKYYADSVKG

SEQ ID NO: 1727 - protein, 9 aa, synthetic construct
  source 1..9: note = Description of Artificial Sequence: Synthetic peptide; note = XENP019923 vhCDR3
TGWLGPFDY

SEQ ID NO: 1728 - protein, 12 aa, synthetic construct
  source 1..12: note = Description of Artificial Sequence: Synthetic peptide; note = XENP019923 vlCDR1
RASQSVGSSFLA

SEQ ID NO: 1729 - protein, 7 aa, synthetic construct
  source 1..7: note = Description of Artificial Sequence: Synthetic peptide; note = XENP019923 vlCDR2
GAFSRAT

SEQ ID NO: 1730 - protein, 9 aa, synthetic construct
  source 1..9: note = Description of Artificial Sequence: Synthetic peptide; note = XENP019923 vlCDR3
QQYGSSPWT

SEQ ID NO: 1731 - protein, 246 aa, synthetic construct
  source 1..246: note = Description of Artificial Sequence: Synthetic polypeptide; note = XENP019924 [CTLA-4]_H0_L0.36_scFv(GKPGS)4
QVQLVESGGGVVQPGRSLRLSCAASGFTFSSYTMHWVRQAPGKGLEWVTFISYDGNNKYYADSVKGRFTISRDNSKNTLYLQMNSLRAEDTAIYYCARTGWLGPFDYWGQGTLVTVSSGKPGSGKPGSGKPGSGKPGSEIVLTQSPGTLSLSPGERATLSCRASQSVGSSHLAWYQQKPGQAPRLLIYGAFSRATGIPDRFSGSGSGTDFTLTISRLEPEDFAVYYCQQYGSSPWTFGQGTKVEIK

SEQ ID NO: 1732 - protein, 118 aa, synthetic construct; identical to SEQ ID NO: 22
  source 1..118: note = Description of Artificial Sequence: Synthetic polypeptide; note = VH of XENP019924

SEQ ID NO: 1733 - protein, 108 aa, synthetic construct
  source 1..108: note = Description of Artificial Sequence: Synthetic polypeptide; note = VL of XENP019924
EIVLTQSPGTLSLSPGERATLSCRASQSVGSSHLAWYQQKPGQAPRLLIYGAFSRATGIPDRFSGSGSGTDFTLTISRLEPEDFAVYYCQQYGSSPWTFGQGTKVEIK

SEQ ID NO: 1734 - protein, 5 aa, synthetic construct
  source 1..5: note = Description of Artificial Sequence: Synthetic peptide; note = XENP019924 vhCDR1
SYTMH

SEQ ID NO: 1735 - protein, 17 aa, synthetic construct
  source 1..17: note = Description of Artificial Sequence: Synthetic peptide; note = XENP019924 vhCDR2
FISYDGNNKYYADSVKG

SEQ ID NO: 1736 - protein, 9 aa, synthetic construct
  source 1..9: note = Description of Artificial Sequence: Synthetic peptide; note = XENP019924 vhCDR3
TGWLGPFDY

SEQ ID NO: 1737 - protein, 12 aa, synthetic construct
  source 1..12: note = Description of Artificial Sequence: Synthetic peptide; note = XENP019924 vlCDR1
RASQSVGSSHLA

SEQ ID NO: 1738 - protein, 7 aa, synthetic construct
  source 1..7: note = Description of Artificial Sequence: Synthetic peptide; note = XENP019924 vlCDR2
GAFSRAT

SEQ ID NO: 1739 - protein, 9 aa, synthetic construct
  source 1..9: note = Description of Artificial Sequence: Synthetic peptide; note = XENP019924 vlCDR3
QQYGSSPWT

SEQ ID NO: 1740 - protein, 246 aa, synthetic construct
  source 1..246: note = Description of Artificial Sequence: Synthetic polypeptide; note = XENP019925 [CTLA-4]_H0_L0.37_scFv(GKPGS)4
QVQLVESGGGVVQPGRSLRLSCAASGFTFSSYTMHWVRQAPGKGLEWVTFISYDGNNKYYADSVKGRFTISRDNSKNTLYLQMNSLRAEDTAIYYCARTGWLGPFDYWGQGTLVTVSSGKPGSGKPGSGKPGSGKPGSEIVLTQSPGTLSLSPGERATLSCRASQSVGSSLLAWYQQKPGQAPRLLIYGAFSRATGIPDRFSGSGSGTDFTLTISRLEPEDFAVYYCQQYGSSPWTFGQGTKVEIK

SEQ ID NO: 1741 - protein, 118 aa, synthetic construct; identical to SEQ ID NO: 22
  source 1..118: note = Description of Artificial Sequence: Synthetic polypeptide; note = VH of XENP019925

SEQ ID NO: 1742 - protein, 108 aa, synthetic construct
  source 1..108: note = Description of Artificial Sequence: Synthetic polypeptide; note = VL of XENP019925
EIVLTQSPGTLSLSPGERATLSCRASQSVGSSLLAWYQQKPGQAPRLLIYGAFSRATGIPDRFSGSGSGTDFTLTISRLEPEDFAVYYCQQYGSSPWTFGQGTKVEIK

SEQ ID NO: 1743 - protein, 5 aa, synthetic construct
  source 1..5: note = Description of Artificial Sequence: Synthetic peptide; note = XENP019925 vhCDR1
SYTMH

SEQ ID NO: 1744 - protein, 17 aa, synthetic construct
  source 1..17: note = Description of Artificial Sequence: Synthetic peptide; note = XENP019925 vhCDR2
FISYDGNNKYYADSVKG

SEQ ID NO: 1745 - protein, 9 aa, synthetic construct
  source 1..9: note = Description of Artificial Sequence: Synthetic peptide; note = XENP019925 vhCDR3
TGWLGPFDY

SEQ ID NO: 1746 - protein, 12 aa, synthetic construct
  source 1..12: note = Description of Artificial Sequence: Synthetic peptide; note = XENP019925 vlCDR1
RASQSVGSSLLA

SEQ ID NO: 1747 - protein, 7 aa, synthetic construct
  source 1..7: note = Description of Artificial Sequence: Synthetic peptide; note = XENP019925 vlCDR2
GAFSRAT

SEQ ID NO: 1748 - protein, 9 aa, synthetic construct
  source 1..9: note = Description of Artificial Sequence: Synthetic peptide; note = XENP019925 vlCDR3
QQYGSSPWT

SEQ ID NO: 1749 - protein, 246 aa, synthetic construct
  source 1..246: note = Description of Artificial Sequence: Synthetic polypeptide; note = XENP019926 [CTLA-4]_H0_L0.38_scFv(GKPGS)4
QVQLVESGGGVVQPGRSLRLSCAASGFTFSSYTMHWVRQAPGKGLEWVTFISYDGNNKYYADSVKGRFTISRDNSKNTLYLQMNSLRAEDTAIYYCARTGWLGPFDYWGQGTLVTVSSGKPGSGKPGSGKPGSGKPGSEIVLTQSPGTLSLSPGERATLSCRASQSVGSSNLAWYQQKPGQAPRLLIYGAFSRATGIPDRFSGSGSGTDFTLTISRLEPEDFAVYYCQQYGSSPWTFGQGTKVEIK

SEQ ID NO: 1750 - protein, 118 aa, synthetic construct; identical to SEQ ID NO: 22
  source 1..118: note = Description of Artificial Sequence: Synthetic polypeptide; note = VH of XENP019926

SEQ ID NO: 1751 - protein, 108 aa, synthetic construct
  source 1..108: note = Description of Artificial Sequence: Synthetic polypeptide; note = VL of XENP019926
EIVLTQSPGTLSLSPGERATLSCRASQSVGSSNLAWYQQKPGQAPRLLIYGAFSRATGIPDRFSGSGSGTDFTLTISRLEPEDFAVYYCQQYGSSPWTFGQGTKVEIK

SEQ ID NO: 1752 - protein, 5 aa, synthetic construct
  source 1..5: note = Description of Artificial Sequence: Synthetic peptide; note = XENP019926 vhCDR1
SYTMH

SEQ ID NO: 1753 - protein, 17 aa, synthetic construct
  source 1..17: note = Description of Artificial Sequence: Synthetic peptide; note = XENP019926 vhCDR2
FISYDGNNKYYADSVKG

SEQ ID NO: 1754 - protein, 9 aa, synthetic construct
  source 1..9: note = Description of Artificial Sequence: Synthetic peptide; note = XENP019926 vhCDR3
TGWLGPFDY

SEQ ID NO: 1755 - protein, 12 aa, synthetic construct
  source 1..12: note = Description of Artificial Sequence: Synthetic peptide; note = XENP019926 vlCDR1
RASQSVGSSNLA

SEQ ID NO: 1756 - protein, 7 aa, synthetic construct
  source 1..7: note = Description of Artificial Sequence: Synthetic peptide; note = XENP019926 vlCDR2
GAFSRAT

SEQ ID NO: 1757 - protein, 9 aa, synthetic construct
  source 1..9: note = Description of Artificial Sequence: Synthetic peptide; note = XENP019926 vlCDR3
QQYGSSPWT

SEQ ID NO: 1758 - protein, 246 aa, synthetic construct
  source 1..246: note = Description of Artificial Sequence: Synthetic polypeptide; note = XENP019927 [CTLA-4]_H0_L0.39_scFv(GKPGS)4
QVQLVESGGGVVQPGRSLRLSCAASGFTFSSYTMHWVRQAPGKGLEWVTFISYDGNNKYYADSVKGRFTISRDNSKNTLYLQMNSLRAEDTAIYYCARTGWLGPFDYWGQGTLVTVSSGKPGSGKPGSGKPGSGKPGSEIVLTQSPGTLSLSPGERATLSCRASQSVGSSSLAWYQQKPGQAPRLLIYGAFSRATGIPDRFSGSGSGTDFTLTISRLEPEDFAVYYCQQYGSSPWTFGQGTKVEIK

SEQ ID NO: 1759 - protein, 118 aa, synthetic construct; identical to SEQ ID NO: 22
  source 1..118: note = Description of Artificial Sequence: Synthetic polypeptide; note = VH of XENP019927

SEQ ID NO: 1760 - protein, 108 aa, synthetic construct
  source 1..108: note = Description of Artificial Sequence: Synthetic polypeptide; note = VL of XENP019927
EIVLTQSPGTLSLSPGERATLSCRASQSVGSSSLAWYQQKPGQAPRLLIYGAFSRATGIPDRFSGSGSGTDFTLTISRLEPEDFAVYYCQQYGSSPWTFGQGTKVEIK

SEQ ID NO: 1761 - protein, 5 aa, synthetic construct
  source 1..5: note = Description of Artificial Sequence: Synthetic peptide; note = XENP019927 vhCDR1
SYTMH

SEQ ID NO: 1762 - protein, 17 aa, synthetic construct
  source 1..17: note = Description of Artificial Sequence: Synthetic peptide; note = XENP019927 vhCDR2
FISYDGNNKYYADSVKG

SEQ ID NO: 1763 - protein, 9 aa, synthetic construct
  source 1..9: note = Description of Artificial Sequence: Synthetic peptide; note = XENP019927 vhCDR3
TGWLGPFDY

SEQ ID NO: 1764 - protein, 12 aa, synthetic construct
  source 1..12: note = Description of Artificial Sequence: Synthetic peptide; note = XENP019927 vlCDR1
RASQSVGSSSLA

SEQ ID NO: 1765 - protein, 7 aa, synthetic construct
  source 1..7: note = Description of Artificial Sequence: Synthetic peptide; note = XENP019927 vlCDR2
GAFSRAT

SEQ ID NO: 1766 - protein, 9 aa, synthetic construct
  source 1..9: note = Description of Artificial Sequence: Synthetic peptide; note = XENP019927 vlCDR3
QQYGSSPWT

SEQ ID NO: 1767 - protein, 246 aa, synthetic construct
  source 1..246: note = Description of Artificial Sequence: Synthetic polypeptide; note = XENP019928 [CTLA-4]_H0_L0.40_scFv(GKPGS)4
QVQLVESGGGVVQPGRSLRLSCAASGFTFSSYTMHWVRQAPGKGLEWVTFISYDGNNKYYADSVKGRFTISRDNSKNTLYLQMNSLRAEDTAIYYCARTGWLGPFDYWGQGTLVTVSSGKPGSGKPGSGKPGSGKPGSEIVLTQSPGTLSLSPGERATLSCRASQSVGSSVLAWYQQKPGQAPRLLIYGAFSRATGIPDRFSGSGSGTDFTLTISRLEPEDFAVYYCQQYGSSPWTFGQGTKVEIK

SEQ ID NO: 1768 - protein, 118 aa, synthetic construct; identical to SEQ ID NO: 22
  source 1..118: note = Description of Artificial Sequence: Synthetic polypeptide; note = VH of XENP019928

SEQ ID NO: 1769 - protein, 108 aa, synthetic construct
  source 1..108: note = Description of Artificial Sequence: Synthetic polypeptide; note = VL of XENP019928
EIVLTQSPGTLSLSPGERATLSCRASQSVGSSVLAWYQQKPGQAPRLLIYGAFSRATGIPDRFSGSGSGTDFTLTISRLEPEDFAVYYCQQYGSSPWTFGQGTKVEIK

SEQ ID NO: 1770 - protein, 5 aa, synthetic construct
  source 1..5: note = Description of Artificial Sequence: Synthetic peptide; note = XENP019928 vhCDR1
SYTMH

SEQ ID NO: 1771 - protein, 17 aa, synthetic construct
  source 1..17: note = Description of Artificial Sequence: Synthetic peptide; note = XENP019928 vhCDR2
FISYDGNNKYYADSVKG

SEQ ID NO: 1772 - protein, 9 aa, synthetic construct
  source 1..9: note = Description of Artificial Sequence: Synthetic peptide; note = XENP019928 vhCDR3
TGWLGPFDY

SEQ ID NO: 1773 - protein, 12 aa, synthetic construct
  source 1..12: note = Description of Artificial Sequence: Synthetic peptide; note = XENP019928 vlCDR1
RASQSVGSSVLA

SEQ ID NO: 1774 - protein, 7 aa, synthetic construct
  source 1..7: note = Description of Artificial Sequence: Synthetic peptide; note = XENP019928 vlCDR2
GAFSRAT

SEQ ID NO: 1775 - protein, 9 aa, synthetic construct
  source 1..9: note = Description of Artificial Sequence: Synthetic peptide; note = XENP019928 vlCDR3
QQYGSSPWT

SEQ ID NO: 1776 - protein, 246 aa, synthetic construct
  source 1..246: note = Description of Artificial Sequence: Synthetic polypeptide; note = XENP019929 [CTLA-4]_H0_L0.41_scFv(GKPGS)4
QVQLVESGGGVVQPGRSLRLSCAASGFTFSSYTMHWVRQAPGKGLEWVTFISYDGNNKYYADSVKGRFTISRDNSKNTLYLQMNSLRAEDTAIYYCARTGWLGPFDYWGQGTLVTVSSGKPGSGKPGSGKPGSGKPGSEIVLTQSPGTLSLSPGERATLSCRASQSVGSSYMAWYQQKPGQAPRLLIYGAFSRATGIPDRFSGSGSGTDFTLTISRLEPEDFAVYYCQQYGSSPWTFGQGTKVEIK

SEQ ID NO: 1777 - protein, 118 aa, synthetic construct; identical to SEQ ID NO: 22
  source 1..118: note = Description of Artificial Sequence: Synthetic polypeptide; note = VH of XENP019929

SEQ ID NO: 1778 - protein, 108 aa, synthetic construct
  source 1..108: note = Description of Artificial Sequence: Synthetic polypeptide; note = VL of XENP019929
EIVLTQSPGTLSLSPGERATLSCRASQSVGSSYMAWYQQKPGQAPRLLIYGAFSRATGIPDRFSGSGSGTDFTLTISRLEPEDFAVYYCQQYGSSPWTFGQGTKVEIK

SEQ ID NO: 1779 - protein, 5 aa, synthetic construct
  source 1..5: note = Description of Artificial Sequence: Synthetic peptide; note = XENP019929 vhCDR1
SYTMH

SEQ ID NO: 1780 - protein, 17 aa, synthetic construct
  source 1..17: note = Description of Artificial Sequence: Synthetic peptide; note = XENP019929 vhCDR2
FISYDGNNKYYADSVKG

SEQ ID NO: 1781 - protein, 9 aa, synthetic construct
  source 1..9: note = Description of Artificial Sequence: Synthetic peptide; note = XENP019929 vhCDR3
TGWLGPFDY

SEQ ID NO: 1782 - protein, 12 aa, synthetic construct
  source 1..12: note = Description of Artificial Sequence: Synthetic peptide; note = XENP019929 vlCDR1
RASQSVGSSYMA

SEQ ID NO: 1783 - protein, 7 aa, synthetic construct
  source 1..7: note = Description of Artificial Sequence: Synthetic peptide; note = XENP019929 vlCDR2
GAFSRAT

SEQ ID NO: 1784 - protein, 9 aa, synthetic construct
  source 1..9: note = Description of Artificial Sequence: Synthetic peptide; note = XENP019929 vlCDR3
QQYGSSPWT

SEQ ID NO: 1785 - protein, 246 aa, synthetic construct
  source 1..246: note = Description of Artificial Sequence: Synthetic polypeptide; note = XENP019930 [CTLA-4]_H0_L0.42_scFv(GKPGS)4
QVQLVESGGGVVQPGRSLRLSCAASGFTFSSYTMHWVRQAPGKGLEWVTFISYDGNNKYYADSVKGRFTISRDNSKNTLYLQMNSLRAEDTAIYYCARTGWLGPFDYWGQGTLVTVSSGKPGSGKPGSGKPGSGKPGSEIVLTQSPGTLSLSPGERATLSCRASQSVGSSYLDWYQQKPGQAPRLLIYGAFSRATGIPDRFSGSGSGTDFTLTISRLEPEDFAVYYCQQYGSSPWTFGQGTKVEIK

SEQ ID NO: 1786 - protein, 118 aa, synthetic construct; identical to SEQ ID NO: 22
  source 1..118: note = Description of Artificial Sequence: Synthetic polypeptide; note = VH of XENP019930

SEQ ID NO: 1787 - protein, 108 aa, synthetic construct
  source 1..108: note = Description of Artificial Sequence: Synthetic polypeptide; note = VL of XENP019930
EIVLTQSPGTLSLSPGERATLSCRASQSVGSSYLDWYQQKPGQAPRLLIYGAFSRATGIPDRFSGSGSGTDFTLTISRLEPEDFAVYYCQQYGSSPWTFGQGTKVEIK

SEQ ID NO: 1788 - protein, 5 aa, synthetic construct
  source 1..5: note = Description of Artificial Sequence: Synthetic peptide; note = XENP019930 vhCDR1
SYTMH

SEQ ID NO: 1789 - protein, 17 aa, synthetic construct
  source 1..17: note = Description of Artificial Sequence: Synthetic peptide; note = XENP019930 vhCDR2
FISYDGNNKYYADSVKG

SEQ ID NO: 1790 - protein, 9 aa, synthetic construct
  source 1..9: note = Description of Artificial Sequence: Synthetic peptide; note = XENP019930 vhCDR3
TGWLGPFDY

SEQ ID NO: 1791 - protein, 12 aa, synthetic construct
  source 1..12: note = Description of Artificial Sequence: Synthetic peptide; note = XENP019930 vlCDR1
RASQSVGSSYLD

SEQ ID NO: 1792 - protein, 7 aa, synthetic construct
  source 1..7: note = Description of Artificial Sequence: Synthetic peptide; note = XENP019930 vlCDR2
GAFSRAT

SEQ ID NO: 1793 - protein, 9 aa, synthetic construct
  source 1..9: note = Description of Artificial Sequence: Synthetic peptide; note = XENP019930 vlCDR3
QQYGSSPWT

SEQ ID NO: 1794 - protein, 246 aa, synthetic construct
  source 1..246: note = Description of Artificial Sequence: Synthetic polypeptide; note = XENP019931 [CTLA-4]_H0_L0.43_scFv(GKPGS)4
QVQLVESGGGVVQPGRSLRLSCAASGFTFSSYTMHWVRQAPGKGLEWVTFISYDGNNKYYADSVKGRFTISRDNSKNTLYLQMNSLRAEDTAIYYCARTGWLGPFDYWGQGTLVTVSSGKPGSGKPGSGKPGSGKPGSEIVLTQSPGTLSLSPGERATLSCRASQSVGSSYLDWYQQKPGQAPRLLIYGAFSRATGIPDRFSGSGSGTDFTLTISRLEPEDFAVYYCKQYGSSPWTFGQGTKVEIK

SEQ ID NO: 1795 - protein, 118 aa, synthetic construct; identical to SEQ ID NO: 22
  source 1..118: note = Description of Artificial Sequence: Synthetic polypeptide; note = VH of XENP019931

SEQ ID NO: 1796 - protein, 108 aa, synthetic construct
  source 1..108: note = Description of Artificial Sequence: Synthetic polypeptide; note = VL of XENP019931
EIVLTQSPGTLSLSPGERATLSCRASQSVGSSYLDWYQQKPGQAPRLLIYGAFSRATGIPDRFSGSGSGTDFTLTISRLEPEDFAVYYCKQYGSSPWTFGQGTKVEIK

SEQ ID NO: 1797 - protein, 5 aa, synthetic construct
  source 1..5: note = Description of Artificial Sequence: Synthetic peptide; note = XENP019931 vhCDR1
SYTMH

SEQ ID NO: 1798 - protein, 17 aa, synthetic construct
  source 1..17: note = Description of Artificial Sequence: Synthetic peptide; note = XENP019931 vhCDR2
FISYDGNNKYYADSVKG

SEQ ID NO: 1799 - protein, 9 aa, synthetic construct
  source 1..9: note = Description of Artificial Sequence: Synthetic peptide; note = XENP019931 vhCDR3
TGWLGPFDY

SEQ ID NO: 1800 - protein, 12 aa, synthetic construct
  source 1..12: note = Description of Artificial Sequence: Synthetic peptide; note = XENP019931 vlCDR1
RASQSVGSSYLD

SEQ ID NO: 1801 - protein, 7 aa, synthetic construct
  source 1..7: note = Description of Artificial Sequence: Synthetic peptide; note = XENP019931 vlCDR2
GAFSRAT

SEQ ID NO: 1802 - protein, 9 aa, synthetic construct
  source 1..9: note = Description of Artificial Sequence: Synthetic peptide; note = XENP019931 vlCDR3
KQYGSSPWT

SEQ ID NO: 1803 - protein, 246 aa, synthetic construct
  source 1..246: note = Description of Artificial Sequence: Synthetic polypeptide; note = XENP019932 [CTLA-4]_H0_L0.44_scFv(GKPGS)4
QVQLVESGGGVVQPGRSLRLSCAASGFTFSSYTMHWVRQAPGKGLEWVTFISYDGNNKYYADSVKGRFTISRDNSKNTLYLQMNSLRAEDTAIYYCARTGWLGPFDYWGQGTLVTVSSGKPGSGKPGSGKPGSGKPGSEIVLTQSPGTLSLSPGERATLSCRASQSVGSSYLSWYQQKPGQAPRLLIYGAFSRATGIPDRFSGSGSGTDFTLTISRLEPEDFAVYYCQQYGSSPWTFGQGTKVEIK

SEQ ID NO: 1804 - protein, 118 aa, synthetic construct; identical to SEQ ID NO: 22
  source 1..118: note = Description of Artificial Sequence: Synthetic polypeptide; note = VH of XENP019932

SEQ ID NO: 1805 - protein, 108 aa, synthetic construct
  source 1..108: note = Description of Artificial Sequence: Synthetic polypeptide; note = VL of XENP019932
EIVLTQSPGTLSLSPGERATLSCRASQSVGSSYLSWYQQKPGQAPRLLIYGAFSRATGIPDRFSGSGSGTDFTLTISRLEPEDFAVYYCQQYGSSPWTFGQGTKVEIK

SEQ ID NO: 1806 - protein, 5 aa, synthetic construct
  source 1..5: note = Description of Artificial Sequence: Synthetic peptide; note = XENP019932 vhCDR1
SYTMH

SEQ ID NO: 1807 - protein, 17 aa, synthetic construct
  source 1..17: note = Description of Artificial Sequence: Synthetic peptide; note = XENP019932 vhCDR2
FISYDGNNKYYADSVKG

SEQ ID NO: 1808 - protein, 9 aa, synthetic construct
  source 1..9: note = Description of Artificial Sequence: Synthetic peptide; note = XENP019932 vhCDR3
TGWLGPFDY

SEQ ID NO: 1809 - protein, 12 aa, synthetic construct
  source 1..12: note = Description of Artificial Sequence: Synthetic peptide; note = XENP019932 vlCDR1
RASQSVGSSYLS

SEQ ID NO: 1810 - protein, 7 aa, synthetic construct
  source 1..7: note = Description of Artificial Sequence: Synthetic peptide; note = XENP019932 vlCDR2
GAFSRAT

SEQ ID NO: 1811 - protein, 9 aa, synthetic construct
  source 1..9: note = Description of Artificial Sequence: Synthetic peptide; note = XENP019932 vlCDR3
QQYGSSPWT

SEQ ID NO: 1812 - protein, 246 aa, synthetic construct
  source 1..246: note = Description of Artificial Sequence: Synthetic polypeptide; note = XENP019933 [CTLA-4]_H0_L0.45_scFv(GKPGS)4
QVQLVESGGGVVQPGRSLRLSCAASGFTFSSYTMHWVRQAPGKGLEWVTFISYDGNNKYYADSVKGRFTISRDNSKNTLYLQMNSLRAEDTAIYYCARTGWLGPFDYWGQGTLVTVSSGKPGSGKPGSGKPGSGKPGSEIVLTQSPGTLSLSPGERATLSCRASQSVGSSYLTWYQQKPGQAPRLLIYGAFSRATGIPDRFSGSGSGTDFTLTISRLEPEDFAVYYCQQYGSSPWTFGQGTKVEIK

SEQ ID NO: 1813 - protein, 118 aa, synthetic construct; identical to SEQ ID NO: 22
  source 1..118: note = Description of Artificial Sequence: Synthetic polypeptide; note = VH of XENP019933

SEQ ID NO: 1814 - protein, 108 aa, synthetic construct
  source 1..108: note = Description of Artificial Sequence: Synthetic polypeptide; note = VL of XENP019933
EIVLTQSPGTLSLSPGERATLSCRASQSVGSSYLTWYQQKPGQAPRLLIYGAFSRATGIPDRFSGSGSGTDFTLTISRLEPEDFAVYYCQQYGSSPWTFGQGTKVEIK

SEQ ID NO: 1815 - protein, 5 aa, synthetic construct
  source 1..5: note = Description of Artificial Sequence: Synthetic peptide; note = XENP019933 vhCDR1
SYTMH

SEQ ID NO: 1816 - protein, 17 aa, synthetic construct
  source 1..17: note = Description of Artificial Sequence: Synthetic peptide; note = XENP019933 vhCDR2
FISYDGNNKYYADSVKG

SEQ ID NO: 1817 - protein, 9 aa, synthetic construct
  source 1..9: note = Description of Artificial Sequence: Synthetic peptide; note = XENP019933 vhCDR3
TGWLGPFDY

SEQ ID NO: 1818 - protein, 12 aa, synthetic construct
  source 1..12: note = Description of Artificial Sequence: Synthetic peptide; note = XENP019933 vlCDR1
RASQSVGSSYLT

SEQ ID NO: 1819 - protein, 7 aa, synthetic construct
  source 1..7: note = Description of Artificial Sequence: Synthetic peptide; note = XENP019933 vlCDR2
GAFSRAT

SEQ ID NO: 1820 - protein, 9 aa, synthetic construct
  source 1..9: note = Description of Artificial Sequence: Synthetic peptide; note = XENP019933 vlCDR3
QQYGSSPWT

SEQ ID NO: 1821 - protein, 246 aa, synthetic construct
  source 1..246: note = Description of Artificial Sequence: Synthetic polypeptide; note = XENP019934 [CTLA-4]_H0_L0.46_scFv(GKPGS)4
QVQLVESGGGVVQPGRSLRLSCAASGFTFSSYTMHWVRQAPGKGLEWVTFISYDGNNKYYADSVKGRFTISRDNSKNTLYLQMNSLRAEDTAIYYCARTGWLGPFDYWGQGTLVTVSSGKPGSGKPGSGKPGSGKPGSEIVLTQSPGTLSLSPGERATLSCRASQSVGSSYLAWYEQKPGQAPRLLIYGAFSRATGIPDRFSGSGSGTDFTLTISRLEPEDFAVYYCQQYGSSPWTFGQGTKVEIK

SEQ ID NO: 1822 - protein, 118 aa, synthetic construct; identical to SEQ ID NO: 22
  source 1..118: note = Description of Artificial Sequence: Synthetic polypeptide; note = VH of XENP019934

SEQ ID NO: 1823 - protein, 108 aa, synthetic construct
  source 1..108: note = Description of Artificial Sequence: Synthetic polypeptide; note = VL of XENP019934
EIVLTQSPGTLSLSPGERATLSCRASQSVGSSYLAWYEQKPGQAPRLLIYGAFSRATGIPDRFSGSGSGTDFTLTISRLEPEDFAVYYCQQYGSSPWTFGQGTKVEIK

SEQ ID NO: 1824 - protein, 5 aa, synthetic construct
  source 1..5: note = Description of Artificial Sequence: Synthetic peptide; note = XENP019934 vhCDR1
SYTMH

SEQ ID NO: 1825 - protein, 17 aa, synthetic construct
  source 1..17: note = Description of Artificial Sequence: Synthetic peptide; note = XENP019934 vhCDR2
FISYDGNNKYYADSVKG

SEQ ID NO: 1826 - protein, 9 aa, synthetic construct
  source 1..9: note = Description of Artificial Sequence: Synthetic peptide; note = XENP019934 vhCDR3
TGWLGPFDY

SEQ ID NO: 1827 - protein, 12 aa, synthetic construct
  source 1..12: note = Description of Artificial Sequence: Synthetic peptide; note = XENP019934 vlCDR1
RASQSVGSSYLA

SEQ ID NO: 1828 - protein, 7 aa, synthetic construct
  source 1..7: note = Description of Artificial Sequence: Synthetic peptide; note = XENP019934 vlCDR2
GAFSRAT

SEQ ID NO: 1829 - protein, 9 aa, synthetic construct
  source 1..9: note = Description of Artificial Sequence: Synthetic peptide; note = XENP019934 vlCDR3
QQYGSSPWT

SEQ ID NO: 1830 - protein, 246 aa, synthetic construct
  source 1..246: note = Description of Artificial Sequence: Synthetic polypeptide; note = XENP019935 [CTLA-4]_H0_L0.47_scFv(GKPGS)4
QVQLVESGGGVVQPGRSLRLSCAASGFTFSSYTMHWVRQAPGKGLEWVTFISYDGNNKYYADSVKGRFTISRDNSKNTLYLQMNSLRAEDTAIYYCARTGWLGPFDYWGQGTLVTVSSGKPGSGKPGSGKPGSGKPGSEIVLTQSPGTLSLSPGERATLSCRASQSVGSSYLAWYLQKPGQAPRLLIYGAFSRATGIPDRFSGSGSGTDFTLTISRLEPEDFAVYYCQQYGSSPWTFGQGTKVEIK

SEQ ID NO: 1831 - protein, 118 aa, synthetic construct; identical to SEQ ID NO: 22
  source 1..118: note = Description of Artificial Sequence: Synthetic polypeptide; note = VH of XENP019935

SEQ ID NO: 1832 - protein, 108 aa, synthetic construct
  source 1..108: note = Description of Artificial Sequence: Synthetic polypeptide; note = VL of XENP019935
EIVLTQSPGTLSLSPGERATLSCRASQSVGSSYLAWYLQKPGQAPRLLIYGAFSRATGIPDRFSGSGSGTDFTLTISRLEPEDFAVYYCQQYGSSPWTFGQGTKVEIK

SEQ ID NO: 1833 - protein, 5 aa, synthetic construct
  source 1..5: note = Description of Artificial Sequence: Synthetic peptide; note = XENP019935 vhCDR1
SYTMH

SEQ ID NO: 1834 - protein, 17 aa, synthetic construct
  source 1..17: note = Description of Artificial Sequence: Synthetic peptide; note = XENP019935 vhCDR2
FISYDGNNKYYADSVKG

SEQ ID NO: 1835 - protein, 9 aa, synthetic construct
  source 1..9: note = Description of Artificial Sequence: Synthetic peptide; note = XENP019935 vhCDR3
TGWLGPFDY

SEQ ID NO: 1836 - protein, 12 aa, synthetic construct
  source 1..12: note = Description of Artificial Sequence: Synthetic peptide; note = XENP019935 vlCDR1
RASQSVGSSYLA

SEQ ID NO: 1837 - protein, 7 aa, synthetic construct
  source 1..7: note = Description of Artificial Sequence: Synthetic peptide; note = XENP019935 vlCDR2
GAFSRAT

SEQ ID NO: 1838 - protein, 9 aa, synthetic construct
  source 1..9: note = Description of Artificial Sequence: Synthetic peptide; note = XENP019935 vlCDR3
QQYGSSPWT

SEQ ID NO: 1839 - protein, 246 aa, synthetic construct
  source 1..246: note = Description of Artificial Sequence: Synthetic polypeptide; note = XENP019936 [CTLA-4]_H0_L0.48_scFv(GKPGS)4
QVQLVESGGGVVQPGRSLRLSCAASGFTFSSYTMHWVRQAPGKGLEWVTFISYDGNNKYYADSVKGRFTISRDNSKNTLYLQMNSLRAEDTAIYYCARTGWLGPFDYWGQGTLVTVSSGKPGSGKPGSGKPGSGKPGSEIVLTQSPGTLSLSPGERATLSCRASQSVGSSYLAWYRQKPGQAPRLLIYGAFSRATGIPDRFSGSGSGTDFTLTISRLEPEDFAVYYCQQYGSSPWTFGQGTKVEIK

SEQ ID NO: 1840 - protein, 118 aa, synthetic construct; identical to SEQ ID NO: 22
  source 1..118: note = Description of Artificial Sequence: Synthetic polypeptide; note = VH of XENP019936

SEQ ID NO: 1841 - protein, 108 aa, synthetic construct
  source 1..108: note = Description of Artificial Sequence: Synthetic polypeptide; note = VL of XENP019936
EIVLTQSPGTLSLSPGERATLSCRASQSVGSSYLAWYRQKPGQAPRLLIYGAFSRATGIPDRFSGSGSGTDFTLTISRLEPEDFAVYYCQQYGSSPWTFGQGTKVEIK

SEQ ID NO: 1842 - protein, 5 aa, synthetic construct
  source 1..5: note = Description of Artificial Sequence: Synthetic peptide; note = XENP019936 vhCDR1
SYTMH

SEQ ID NO: 1843 - protein, 17 aa, synthetic construct
  source 1..17: note = Description of Artificial Sequence: Synthetic peptide; note = XENP019936 vhCDR2
FISYDGNNKYYADSVKG

SEQ ID NO: 1844 - protein, 9 aa, synthetic construct
  source 1..9: note = Description of Artificial Sequence: Synthetic peptide; note = XENP019936 vhCDR3
TGWLGPFDY

SEQ ID NO: 1845 - protein, 12 aa, synthetic construct
  source 1..12: note = Description of Artificial Sequence: Synthetic peptide; note = XENP019936 vlCDR1
RASQSVGSSYLA

SEQ ID NO: 1846 - protein, 7 aa, synthetic construct
  source 1..7: note = Description of Artificial Sequence: Synthetic peptide; note = XENP019936 vlCDR2
GAFSRAT

SEQ ID NO: 1847 - protein, 9 aa, synthetic construct
  source 1..9: note = Description of Artificial Sequence: Synthetic peptide; note = XENP019936 vlCDR3
QQYGSSPWT

SEQ ID NO: 1848 - protein, 246 aa, synthetic construct
  source 1..246: note = Description of Artificial Sequence: Synthetic polypeptide; note = XENP019937 [CTLA-4]_H0_L0.49_scFv(GKPGS)4
QVQLVESGGGVVQPGRSLRLSCAASGFTFSSYTMHWVRQAPGKGLEWVTFISYDGNNKYYADSVKGRFTISRDNSKNTLYLQMNSLRAEDTAIYYCARTGWLGPFDYWGQGTLVTVSSGKPGSGKPGSGKPGSGKPGSEIVLTQSPGTLSLSPGERATLSCRASQSVGSSYLAWYRQKPGQAPELLIYGAFSRATGIPDRFSGSGSGTDFTLTISRLEPEDFAVYYCQQYGSSPWTFGQGTKVEIK

SEQ ID NO: 1849 - protein, 118 aa, synthetic construct; identical to SEQ ID NO: 22
  source 1..118: note = Description of Artificial Sequence: Synthetic polypeptide; note = VH of XENP019937

SEQ ID NO: 1850 - protein, 108 aa, synthetic construct
  source 1..108: note = Description of Artificial Sequence: Synthetic polypeptide; note = VL of XENP019937
EIVLTQSPGTLSLSPGERATLSCRASQSVGSSYLAWYRQKPGQAPELLIYGAFSRATGIPDRFSGSGSGTDFTLTISRLEPEDFAVYYCQQYGSSPWTFGQGTKVEIK

SEQ ID NO: 1851 - protein, 5 aa, synthetic construct
  source 1..5: note = Description of Artificial Sequence: Synthetic peptide; note = XENP019937 vhCDR1
SYTMH

SEQ ID NO: 1852 - protein, 17 aa, synthetic construct
  source 1..17: note = Description of Artificial Sequence: Synthetic peptide; note = XENP019937 vhCDR2
FISYDGNNKYYADSVKG

SEQ ID NO: 1853 - protein, 9 aa, synthetic construct
  source 1..9: note = Description of Artificial Sequence: Synthetic peptide; note = XENP019937 vhCDR3
TGWLGPFDY

SEQ ID NO: 1854 - protein, 12 aa, synthetic construct
  source 1..12: note = Description of Artificial Sequence: Synthetic peptide; note = XENP019937 vlCDR1
RASQSVGSSYLA

SEQ ID NO: 1855 - protein, 7 aa, synthetic construct
  source 1..7: note = Description of Artificial Sequence: Synthetic peptide; note = XENP019937 vlCDR2
GAFSRAT

SEQ ID NO: 1856 - protein, 9 aa, synthetic construct
  source 1..9: note = Description of Artificial Sequence: Synthetic peptide; note = XENP019937 vlCDR3
QQYGSSPWT

SEQ ID NO: 1857 - protein, 246 aa, synthetic construct
  source 1..246: note = Description of Artificial Sequence: Synthetic polypeptide; note = XENP019938 [CTLA-4]_H0_L0.50_scFv(GKPGS)4
QVQLVESGGGVVQPGRSLRLSCAASGFTFSSYTMHWVRQAPGKGLEWVTFISYDGNNKYYADSVKGRFTISRDNSKNTLYLQMNSLRAEDTAIYYCARTGWLGPFDYWGQGTLVTVSSGKPGSGKPGSGKPGSGKPGSEIVLTQSPGTLSLSPGERATLSCRASQSVGSSYLAWYQEKPGQAPRLLIYGAFSRATGIPDRFSGSGSGTDFTLTISRLEPEDFAVYYCQQYGSSPWTFGQGTKVEIK

SEQ ID NO: 1858 - protein, 118 aa, synthetic construct; identical to SEQ ID NO: 22
  source 1..118: note = Description of Artificial Sequence: Synthetic polypeptide; note = VH of XENP019938

SEQ ID NO: 1859 - protein, 108 aa, synthetic construct; identical to SEQ ID NO: 32
  source 1..108: note = Description of Artificial Sequence: Synthetic polypeptide; note = VL of XENP019938

SEQ ID NO: 1860 - protein, 5 aa, synthetic construct
  source 1..5: note = Description of Artificial Sequence: Synthetic peptide; note = XENP019938 vhCDR1
SYTMH

SEQ ID NO: 1861 - protein, 17 aa, synthetic construct
  source 1..17: note = Description of Artificial Sequence: Synthetic peptide; note = XENP019938 vhCDR2
FISYDGNNKYYADSVKG

SEQ ID NO: 1862 - protein, 9 aa, synthetic construct
  source 1..9: note = Description of Artificial Sequence: Synthetic peptide; note = XENP019938 vhCDR3
TGWLGPFDY

SEQ ID NO: 1863 - protein, 12 aa, synthetic construct
  source 1..12: note = Description of Artificial Sequence: Synthetic peptide; note = XENP019938 vlCDR1
RASQSVGSSYLA

SEQ ID NO: 1864 - protein, 7 aa, synthetic construct
  source 1..7: note = Description of Artificial Sequence: Synthetic peptide; note = XENP019938 vlCDR2
GAFSRAT

SEQ ID NO: 1865 - protein, 9 aa, synthetic construct
  source 1..9: note = Description of Artificial Sequence: Synthetic peptide; note = XENP019938 vlCDR3
QQYGSSPWT

SEQ ID NO: 1866 - protein, 246 aa, synthetic construct
  source 1..246: note = Description of Artificial Sequence: Synthetic polypeptide; note = XENP019939 [CTLA-4]_H0_L0.51_scFv(GKPGS)4
QVQLVESGGGVVQPGRSLRLSCAASGFTFSSYTMHWVRQAPGKGLEWVTFISYDGNNKYYADSVKGRFTISRDNSKNTLYLQMNSLRAEDTAIYYCARTGWLGPFDYWGQGTLVTVSSGKPGSGKPGSGKPGSGKPGSEIVLTQSPGTLSLSPGERATLSCRASQSVGSSYLAWYQQKPDQAPRLLIYGAFSRATGIPDRFSGSGSGTDFTLTISRLEPEDFAVYYCQQYGSSPWTFGQGTKVEIK

SEQ ID NO: 1867 - protein, 118 aa, synthetic construct; identical to SEQ ID NO: 22
  source 1..118: note = Description of Artificial Sequence: Synthetic polypeptide; note = VH of XENP019939

SEQ ID NO: 1868 - protein, 108 aa, synthetic construct; identical to SEQ ID NO: 41
  source 1..108: note = Description of Artificial Sequence: Synthetic polypeptide; note = VL of XENP019939

SEQ ID NO: 1869 - protein, 5 aa, synthetic construct
  source 1..5: note = Description of Artificial Sequence: Synthetic peptide; note = XENP019939 vhCDR1
SYTMH

SEQ ID NO: 1870 - protein, 17 aa, synthetic construct
  source 1..17: note = Description of Artificial Sequence: Synthetic peptide; note = XENP019939 vhCDR2
FISYDGNNKYYADSVKG

SEQ ID NO: 1871 - protein, 9 aa, synthetic construct
  source 1..9: note = Description of Artificial Sequence: Synthetic peptide; note = XENP019939 vhCDR3
TGWLGPFDY

SEQ ID NO: 1872 - protein, 12 aa, synthetic construct
  source 1..12: note = Description of Artificial Sequence: Synthetic peptide; note = XENP019939 vlCDR1
RASQSVGSSYLA

SEQ ID NO: 1873 - protein, 7 aa, synthetic construct
  source 1..7: note = Description of Artificial Sequence: Synthetic peptide; note = XENP019939 vlCDR2
GAFSRAT

SEQ ID NO: 1874 - protein, 9 aa, synthetic construct
  source 1..9: note = Description of Artificial Sequence: Synthetic peptide; note = XENP019939 vlCDR3
QQYGSSPWT

SEQ ID NO: 1875 - protein, 246 aa, synthetic construct
  source 1..246: note = Description of Artificial Sequence: Synthetic polypeptide; note = XENP019940 [CTLA-4]_H0_L0.52_scFv(GKPGS)4
QVQLVESGGGVVQPGRSLRLSCAASGFTFSSYTMHWVRQAPGKGLEWVTFISYDGNNKYYADSVKGRFTISRDNSKNTLYLQMNSLRAEDTAIYYCARTGWLGPFDYWGQGTLVTVSSGKPGSGKPGSGKPGSGKPGSEIVLTQSPGTLSLSPGERATLSCRASQSVGSSYLAWYQQKPEQAPRLLIYGAFSRATGIPDRFSGSGSGTDFTLTISRLEPEDFAVYYCQQYGSSPWTFGQGTKVEIK

SEQ ID NO: 1876 - protein, 118 aa, synthetic construct; identical to SEQ ID NO: 22
  source 1..118: note = Description of Artificial Sequence: Synthetic polypeptide; note = VH of XENP019940

SEQ ID NO: 1877 - protein, 108 aa, synthetic construct
  source 1..108: note = Description of Artificial Sequence: Synthetic polypeptide; note = VL of XENP019940
EIVLTQSPGTLSLSPGERATLSCRASQSVGSSYLAWYQQKPEQAPRLLIYGAFSRATGIPDRFSGSGSGTDFTLTISRLEPEDFAVYYCQQYGSSPWTFGQGTKVEIK

SEQ ID NO: 1878 - protein, 5 aa, synthetic construct
  source 1..5: note = Description of Artificial Sequence: Synthetic peptide; note = XENP019940 vhCDR1
SYTMH

SEQ ID NO: 1879 - protein, 17 aa, synthetic construct
  source 1..17: note = Description of Artificial Sequence: Synthetic peptide; note = XENP019940 vhCDR2
FISYDGNNKYYADSVKG

SEQ ID NO: 1880 - protein, 9 aa, synthetic construct
  source 1..9: note = Description of Artificial Sequence: Synthetic peptide; note = XENP019940 vhCDR3
TGWLGPFDY

SEQ ID NO: 1881 - protein, 12 aa, synthetic construct
  source 1..12: note = Description of Artificial Sequence: Synthetic peptide; note = XENP019940 vlCDR1
RASQSVGSSYLA

SEQ ID NO: 1882 - protein, 7 aa, synthetic construct
  source 1..7: note = Description of Artificial Sequence: Synthetic peptide; note = XENP019940 vlCDR2
GAFSRAT

SEQ ID NO: 1883 - protein, 9 aa, synthetic construct
  source 1..9: note = Description of Artificial Sequence: Synthetic peptide; note = XENP019940 vlCDR3
QQYGSSPWT

SEQ ID NO: 1884 - protein, 246 aa, synthetic construct
  source 1..246: note = Description of Artificial Sequence: Synthetic polypeptide; note = XENP019941 [CTLA-4]_H0_L0.53_scFv(GKPGS)4
QVQLVESGGGVVQPGRSLRLSCAASGFTFSSYTMHWVRQAPGKGLEWVTFISYDGNNKYYADSVKGRFTISRDNSKNTLYLQMNSLRAEDTAIYYCARTGWLGPFDYWGQGTLVTVSSGKPGSGKPGSGKPGSGKPGSEIVLTQSPGTLSLSPGERATLSCRASQSVGSSYLAWYQQKPGEAPRLLIYGAFSRATGIPDRFSGSGSGTDFTLTISRLEPEDFAVYYCQQYGSSPWTFGQGTKVEIK

SEQ ID NO: 1885 - protein, 118 aa, synthetic construct; identical to SEQ ID NO: 22
  source 1..118: note = Description of Artificial Sequence: Synthetic polypeptide; note = VH of XENP019941

SEQ ID NO: 1886 - protein, 108 aa, synthetic construct; identical to SEQ ID NO: 77
  source 1..108: note = Description of Artificial Sequence: Synthetic polypeptide; note = VL of XENP019941

SEQ ID NO: 1887 - protein, 5 aa, synthetic construct
  source 1..5: note = Description of Artificial Sequence: Synthetic peptide; note = XENP019941 vhCDR1
SYTMH

SEQ ID NO: 1888 - protein, 17 aa, synthetic construct
  source 1..17: note = Description of Artificial Sequence: Synthetic peptide; note = XENP019941 vhCDR2
FISYDGNNKYYADSVKG

SEQ ID NO: 1889 - protein, 9 aa, synthetic construct
  source 1..9: note = Description of Artificial Sequence: Synthetic peptide; note = XENP019941 vhCDR3
TGWLGPFDY

SEQ ID NO: 1890 - protein, 12 aa, synthetic construct
  source 1..12: note = Description of Artificial Sequence: Synthetic peptide; note = XENP019941 vlCDR1
RASQSVGSSYLA

SEQ ID NO: 1891 - protein, 7 aa, synthetic construct
  source 1..7: note = Description of Artificial Sequence: Synthetic peptide; note = XENP019941 vlCDR2
GAFSRAT

SEQ ID NO: 1892 - protein, 9 aa, synthetic construct
  source 1..9: note = Description of Artificial Sequence: Synthetic peptide; note = XENP019941 vlCDR3
QQYGSSPWT

SEQ ID NO: 1893 - protein, 246 aa, synthetic construct
  source 1..246: note = Description of Artificial Sequence: Synthetic polypeptide; note = XENP019942 [CTLA-4]_H0_L0.54_scFv(GKPGS)4
QVQLVESGGGVVQPGRSLRLSCAASGFTFSSYTMHWVRQAPGKGLEWVTFISYDGNNKYYADSVKGRFTISRDNSKNTLYLQMNSLRAEDTAIYYCARTGWLGPFDYWGQGTLVTVSSGKPGSGKPGSGKPGSGKPGSEIVLTQSPGTLSLSPGERATLSCRASQSVGSSYLAWYQQKPGKAPRLLIYGAFSRATGIPDRFSGSGSGTDFTLTISRLEPEDFAVYYCQQYGSSPWTFGQGTKVEIK

SEQ ID NO: 1894 - protein, 118 aa, synthetic construct; identical to SEQ ID NO: 22
  source 1..118: note = Description of Artificial Sequence: Synthetic polypeptide; note = VH of XENP019942

SEQ ID NO: 1895 - protein, 108 aa, synthetic construct
  source 1..108: note = Description of Artificial Sequence: Synthetic polypeptide; note = VL of XENP019942
EIVLTQSPGTLSLSPGERATLSCRASQSVGSSYLAWYQQKPGKAPRLLIYGAFSRATGIPDRFSGSGSGTDFTLTISRLEPEDFAVYYCQQYGSSPWTFGQGTKVEIK

SEQ ID NO: 1896 - protein, 5 aa, synthetic construct
  source 1..5: note = Description of Artificial Sequence: Synthetic peptide; note = XENP019942 vhCDR1
SYTMH

SEQ ID NO: 1897 - protein, 17 aa, synthetic construct
  source 1..17: note = Description of Artificial Sequence: Synthetic peptide; note = XENP019942 vhCDR2
FISYDGNNKYYADSVKG

SEQ ID NO: 1898 - protein, 9 aa, synthetic construct
  source 1..9: note = Description of Artificial Sequence: Synthetic peptide; note = XENP019942 vhCDR3
TGWLGPFDY

SEQ ID NO: 1899 - protein, 12 aa, synthetic construct
  source 1..12: note = Description of Artificial Sequence: Synthetic peptide; note = XENP019942 vlCDR1
RASQSVGSSYLA

SEQ ID NO: 1900 - protein, 7 aa, synthetic construct
  source 1..7: note = Description of Artificial Sequence: Synthetic peptide; note = XENP019942 vlCDR2
GAFSRAT

SEQ ID NO: 1901 - protein, 9 aa, synthetic construct
  source 1..9: note = Description of Artificial Sequence: Synthetic peptide; note = XENP019942 vlCDR3
QQYGSSPWT

SEQ ID NO: 1902 - protein, 246 aa, synthetic construct
  source 1..246: note = Description of Artificial Sequence: Synthetic polypeptide; note = XENP019943 [CTLA-4]_H0_L0.55_scFv(GKPGS)4
QVQLVESGGGVVQPGRSLRLSCAASGFTFSSYTMHWVRQAPGKGLEWVTFISYDGNNKYYADSVKGRFTISRDNSKNTLYLQMNSLRAEDTAIYYCARTGWLGPFDYWGQGTLVTVSSGKPGSGKPGSGKPGSGKPGSEIVLTQSPGTLSLSPGERATLSCRASQSVGSSYLAWYQQKPGKSPRLLIYGAFSRATGIPDRFSGSGSGTDFTLTISRLEPEDFAVYYCQQYGSSPWTFGQGTKVEIK

SEQ ID NO: 1903 - protein, 118 aa, synthetic construct; identical to SEQ ID NO: 22
  source 1..118: note = Description of Artificial Sequence: Synthetic polypeptide; note = VH of XENP019943

SEQ ID NO: 1904 - protein, 108 aa, synthetic construct
  source 1..108: note = Description of Artificial Sequence: Synthetic polypeptide; note = VL of XENP019943
EIVLTQSPGTLSLSPGERATLSCRASQSVGSSYLAWYQQKPGKSPRLLIYGAFSRATGIPDRFSGSGSGTDFTLTISRLEPEDFAVYYCQQYGSSPWTFGQGTKVEIK

SEQ ID NO: 1905 - protein, 5 aa, synthetic construct
  source 1..5: note = Description of Artificial Sequence: Synthetic peptide; note = XENP019943 vhCDR1
SYTMH

SEQ ID NO: 1906 - protein, 17 aa, synthetic construct
  source 1..17: note = Description of Artificial Sequence: Synthetic peptide; note = XENP019943 vhCDR2
FISYDGNNKYYADSVKG

SEQ ID NO: 1907 - protein, 9 aa, synthetic construct
  source 1..9: note = Description of Artificial Sequence: Synthetic peptide; note = XENP019943 vhCDR3
TGWLGPFDY

SEQ ID NO: 1908 - protein, 12 aa, synthetic construct
  source 1..12: note = Description of Artificial Sequence: Synthetic peptide; note = XENP019943 vlCDR1
RASQSVGSSYLA

SEQ ID NO: 1909 - protein, 7 aa, synthetic construct
  source 1..7: note = Description of Artificial Sequence: Synthetic peptide; note = XENP019943 vlCDR2
GAFSRAT

SEQ ID NO: 1910 - protein, 9 aa, synthetic construct
  source 1..9: note = Description of Artificial Sequence: Synthetic peptide; note = XENP019943 vlCDR3
QQYGSSPWT

SEQ ID NO: 1911 - protein, 246 aa, synthetic construct
  source 1..246: note = Description of Artificial Sequence: Synthetic polypeptide; note = XENP019944 [CTLA-4]_H0_L0.56_scFv(GKPGS)4
QVQLVESGGGVVQPGRSLRLSCAASGFTFSSYTMHWVRQAPGKGLEWVTFISYDGNNKYYADSVKGRFTISRDNSKNTLYLQMNSLRAEDTAIYYCARTGWLGPFDYWGQGTLVTVSSGKPGSGKPGSGKPGSGKPGSEIVLTQSPGTLSLSPGERATLSCRASQSVGSSYLAWYQQKPGQSPRLLIYGAFSRATGIPDRFSGSGSGTDFTLTISRLEPEDFAVYYCQQYGSSPWTFGQGTKVEIK

SEQ ID NO: 1912 - protein, 118 aa, synthetic construct; identical to SEQ ID NO: 22
  source 1..118: note = Description of Artificial Sequence: Synthetic polypeptide; note = VH of XENP019944

SEQ ID NO: 1913 - protein, 108 aa, synthetic construct
  source 1..108: note = Description of Artificial Sequence: Synthetic polypeptide; note = VL of XENP019944
EIVLTQSPGTLSLSPGERATLSCRASQSVGSSYLAWYQQKPGQSPRLLIYGAFSRATGIPDRFSGSGSGTDFTLTISRLEPEDFAVYYCQQYGSSPWTFGQGTKVEIK

SEQ ID NO: 1914 - protein, 5 aa, synthetic construct
  source 1..5: note = Description of Artificial Sequence: Synthetic peptide; note = XENP019944 vhCDR1
SYTMH

SEQ ID NO: 1915 - protein, 17 aa, synthetic construct
  source 1..17: note = Description of Artificial Sequence: Synthetic peptide; note = XENP019944 vhCDR2
FISYDGNNKYYADSVKG

SEQ ID NO: 1916 - protein, 9 aa, synthetic construct
  source 1..9: note = Description of Artificial Sequence: Synthetic peptide; note = XENP019944 vhCDR3
TGWLGPFDY

SEQ ID NO: 1917 - protein, 12 aa, synthetic construct
  source 1..12: note = Description of Artificial Sequence: Synthetic peptide; note = XENP019944 vlCDR1
RASQSVGSSYLA

SEQ ID NO: 1918 - protein, 7 aa, synthetic construct
  source 1..7: note = Description of Artificial Sequence: Synthetic peptide; note = XENP019944 vlCDR2
GAFSRAT

SEQ ID NO: 1919 - protein, 9 aa, synthetic construct
  source 1..9: note = Description of Artificial Sequence: Synthetic peptide; note = XENP019944 vlCDR3
QQYGSSPWT

SEQ ID NO: 1920 - protein, 246 aa, synthetic construct
  source 1..246: note = Description of Artificial Sequence: Synthetic polypeptide; note = XENP019945 [CTLA-4]_H0_L0.57_scFv(GKPGS)4
QVQLVESGGGVVQPGRSLRLSCAASGFTFSSYTMHWVRQAPGKGLEWVTFISYDGNNKYYADSVKGRFTISRDNSKNTLYLQMNSLRAEDTAIYYCARTGWLGPFDYWGQGTLVTVSSGKPGSGKPGSGKPGSGKPGSEIVLTQSPGTLSLSPGERATLSCRASQSVGSSYLAWYQQKPGQAPELLIYGAFSRATGIPDRFSGSGSGTDFTLTISRLEPEDFAVYYCQQYGSSPWTFGQGTKVEIK

SEQ ID NO: 1921 - protein, 118 aa, synthetic construct; identical to SEQ ID NO: 22
  source 1..118: note = Description of Artificial Sequence: Synthetic polypeptide; note = VH of XENP019945

SEQ ID NO: 1922 - protein, 108 aa, synthetic construct; identical to SEQ ID NO: 86
  source 1..108: note = Description of Artificial Sequence: Synthetic polypeptide; note = VL of XENP019945

SEQ ID NO: 1923 - protein, 5 aa, synthetic construct
  source 1..5: note = Description of Artificial Sequence: Synthetic peptide; note = XENP019945 vhCDR1
SYTMH

SEQ ID NO: 1924 - protein, 17 aa, synthetic construct
  source 1..17: note = Description of Artificial Sequence: Synthetic peptide; note = XENP019945 vhCDR2
FISYDGNNKYYADSVKG

SEQ ID NO: 1925 - protein, 9 aa, synthetic construct
  source 1..9: note = Description of Artificial Sequence: Synthetic peptide; note = XENP019945 vhCDR3
TGWLGPFDY

SEQ ID NO: 1926 - protein, 12 aa, synthetic construct
  source 1..12: note = Description of Artificial Sequence: Synthetic peptide; note = XENP019945 vlCDR1
RASQSVGSSYLA

SEQ ID NO: 1927 - protein, 7 aa, synthetic construct
  source 1..7: note = Description of Artificial Sequence: Synthetic peptide; note = XENP019945 vlCDR2
GAFSRAT

SEQ ID NO: 1928 - protein, 9 aa, synthetic construct
  source 1..9: note = Description of Artificial Sequence: Synthetic peptide; note = XENP019945 vlCDR3
QQYGSSPWT

SEQ ID NO: 1929 - protein, 246 aa, synthetic construct
  source 1..246: note = Description of Artificial Sequence: Synthetic polypeptide; note = XENP019946 [CTLA-4]_H0_L0.58_scFv(GKPGS)4
QVQLVESGGGVVQPGRSLRLSCAASGFTFSSYTMHWVRQAPGKGLEWVTFISYDGNNKYYADSVKGRFTISRDNSKNTLYLQMNSLRAEDTAIYYCARTGWLGPFDYWGQGTLVTVSSGKPGSGKPGSGKPGSGKPGSEIVLTQSPGTLSLSPGERATLSCRASQSVGSSYLAWYQQKPGQAPELLIYGAFSRATGIPDRFSGSGSGTDFTLTISRLEPQDFAVYYCQQYGSSPWTFGQGTKVEIK

SEQ ID NO: 1930 - protein, 118 aa, synthetic construct; identical to SEQ ID NO: 22
  source 1..118: note = Description of Artificial Sequence: Synthetic polypeptide; note = VH of XENP019946

SEQ ID NO: 1931 - protein, 108 aa, synthetic construct
  source 1..108: note = Description of Artificial Sequence: Synthetic polypeptide; note = VL of XENP019946
EIVLTQSPGTLSLSPGERATLSCRASQSVGSSYLAWYQQKPGQAPELLIYGAFSRATGIPDRFSGSGSGTDFTLTISRLEPQDFAVYYCQQYGSSPWTFGQGTKVEIK

SEQ ID NO: 1932 - protein, 5 aa, synthetic construct
  source 1..5: note = Description of Artificial Sequence: Synthetic peptide; note = XENP019946 vhCDR1
SYTMH

SEQ ID NO: 1933 - protein, 17 aa, synthetic construct
  source 1..17: note = Description of Artificial Sequence: Synthetic peptide; note = XENP019946 vhCDR2
FISYDGNNKYYADSVKG

SEQ ID NO: 1934 - protein, 9 aa, synthetic construct
  source 1..9: note = Description of Artificial Sequence: Synthetic peptide; note = XENP019946 vhCDR3
TGWLGPFDY

SEQ ID NO: 1935 - protein, 12 aa, synthetic construct
  source 1..12: note = Description of Artificial Sequence: Synthetic peptide; note = XENP019946 vlCDR1
RASQSVGSSYLA

SEQ ID NO: 1936 - protein, 7 aa, synthetic construct
  source 1..7: note = Description of Artificial Sequence: Synthetic peptide; note = XENP019946 vlCDR2
GAFSRAT

SEQ ID NO: 1937 - protein, 9 aa, synthetic construct
  source 1..9: note = Description of Artificial Sequence: Synthetic peptide; note = XENP019946 vlCDR3
QQYGSSPWT

SEQ ID NO: 1938 - protein, 246 aa, synthetic construct
  source 1..246: note = Description of Artificial Sequence: Synthetic polypeptide; note = XENP019947 [CTLA-4]_H0_L0.59_scFv(GKPGS)4
QVQLVESGGGVVQPGRSLRLSCAASGFTFSSYTMHWVRQAPGKGLEWVTFISYDGNNKYYADSVKGRFTISRDNSKNTLYLQMNSLRAEDTAIYYCARTGWLGPFDYWGQGTLVTVSSGKPGSGKPGSGKPGSGKPGSEIVLTQSPGTLSLSPGERATLSCRASQSVGSSYLAWYQQKPGQAPKLLIYGAFSRATGIPDRFSGSGSGTDFTLTISRLEPEDFAVYYCQQYGSSPWTFGQGTKVEIK

SEQ ID NO: 1939 - protein, 118 aa, synthetic construct; identical to SEQ ID NO: 22
  source 1..118: note = Description of Artificial Sequence: Synthetic polypeptide; note = VH of XENP019947

SEQ ID NO: 1940 - protein, 108 aa, synthetic construct
  source 1..108: note = Description of Artificial Sequence: Synthetic polypeptide; note = VL of XENP019947
EIVLTQSPGTLSLSPGERATLSCRASQSVGSSYLAWYQQKPGQAPKLLIYGAFSRATGIPDRFSGSGSGTDFTLTISRLEPEDFAVYYCQQYGSSPWTFGQGTKVEIK

SEQ ID NO: 1941 - protein, 5 aa, synthetic construct
  source 1..5: note = Description of Artificial Sequence: Synthetic peptide; note = XENP019947 vhCDR1
SYTMH

SEQ ID NO: 1942 - protein, 17 aa, synthetic construct
  source 1..17: note = Description of Artificial Sequence: Synthetic peptide; note = XENP019947 vhCDR2
FISYDGNNKYYADSVKG

SEQ ID NO: 1943 - protein, 9 aa, synthetic construct
  source 1..9: note = Description of Artificial Sequence: Synthetic peptide; note = XENP019947 vhCDR3
TGWLGPFDY

SEQ ID NO: 1944 - protein, 12 aa, synthetic construct
  source 1..12: note = Description of Artificial Sequence: Synthetic peptide; note = XENP019947 vlCDR1
RASQSVGSSYLA

SEQ ID NO: 1945 - protein, 7 aa, synthetic construct
  source 1..7: note = Description of Artificial Sequence: Synthetic peptide; note = XENP019947 vlCDR2
GAFSRAT

SEQ ID NO: 1946 - protein, 9 aa, synthetic construct
  source 1..9: note = Description of Artificial Sequence: Synthetic peptide; note = XENP019947 vlCDR3
QQYGSSPWT

SEQ ID NO: 1947 - protein, 246 aa, synthetic construct
  source 1..246: note = Description of Artificial Sequence: Synthetic polypeptide; note = XENP019948 [CTLA-4]_H0_L0.60_scFv(GKPGS)4
QVQLVESGGGVVQPGRSLRLSCAASGFTFSSYTMHWVRQAPGKGLEWVTFISYDGNNKYYADSVKGRFTISRDNSKNTLYLQMNSLRAEDTAIYYCARTGWLGPFDYWGQGTLVTVSSGKPGSGKPGSGKPGSGKPGSEIVLTQSPGTLSLSPGERATLSCRASQSVGSSYLAWYQQKPGQAPRRLIYGAFSRATGIPDRFSGSGSGTDFTLTISRLEPEDFAVYYCQQYGSSPWTFGQGTKVEIK

SEQ ID NO: 1948 - protein, 118 aa, synthetic construct; identical to SEQ ID NO: 22
  source 1..118: note = Description of Artificial Sequence: Synthetic polypeptide; note = VH of XENP019948

SEQ ID NO: 1949 - protein, 108 aa, synthetic construct
  source 1..108: note = Description of Artificial Sequence: Synthetic polypeptide; note = VL of XENP019948
EIVLTQSPGTLSLSPGERATLSCRASQSVGSSYLAWYQQKPGQAPRRLIYGAFSRATGIPDRFSGSGSGTDFTLTISRLEPEDFAVYYCQQYGSSPWTFGQGTKVEIK

SEQ ID NO: 1950 - protein, 5 aa, synthetic construct
  source 1..5: note = Description of Artificial Sequence: Synthetic peptide; note = XENP019948 vhCDR1
SYTMH

SEQ ID NO: 1951 - protein, 17 aa, synthetic construct
  source 1..17: note = Description of Artificial Sequence: Synthetic peptide; note = XENP019948 vhCDR2
FISYDGNNKYYADSVKG

SEQ ID NO: 1952 - protein, 9 aa, synthetic construct
  source 1..9: note = Description of Artificial Sequence: Synthetic peptide; note = XENP019948 vhCDR3
TGWLGPFDY

SEQ ID NO: 1953 - protein, 12 aa, synthetic construct
  source 1..12: note = Description of Artificial Sequence: Synthetic peptide; note = XENP019948 vlCDR1
RASQSVGSSYLA

SEQ ID NO: 1954 - protein, 7 aa, synthetic construct
  source 1..7: note = Description of Artificial Sequence: Synthetic peptide; note = XENP019948 vlCDR2
GAFSRAT

SEQ ID NO: 1955 - protein, 9 aa, synthetic construct
  source 1..9: note = Description of Artificial Sequence: Synthetic peptide; note = XENP019948 vlCDR3
QQYGSSPWT

SEQ ID NO: 1956 - protein, 246 aa, synthetic construct
  source 1..246: note = Description of Artificial Sequence: Synthetic polypeptide; note = XENP019949 [CTLA-4]_H0_L0.61_scFv(GKPGS)4
QVQLVESGGGVVQPGRSLRLSCAASGFTFSSYTMHWVRQAPGKGLEWVTFISYDGNNKYYADSVKGRFTISRDNSKNTLYLQMNSLRAEDTAIYYCARTGWLGPFDYWGQGTLVTVSSGKPGSGKPGSGKPGSGKPGSEIVLTQSPGTLSLSPGERATLSCRASQSVGSSYLAWYQQKPGQAPRRLIYGAFSRDTGIPDRFSGSGSGTDFTLTISRLEPEDFAVYYCQQYGSSPWTFGQGTKVEIK

SEQ ID NO: 1957 - protein, 118 aa, synthetic construct; identical to SEQ ID NO: 22
  source 1..118: note = Description of Artificial Sequence: Synthetic polypeptide; note = VH of XENP019949

SEQ ID NO: 1958 - protein, 108 aa, synthetic construct
  source 1..108: note = Description of Artificial Sequence: Synthetic polypeptide; note = VL of XENP019949
EIVLTQSPGTLSLSPGERATLSCRASQSVGSSYLAWYQQKPGQAPRRLIYGAFSRDTGIPDRFSGSGSGTDFTLTISRLEPEDFAVYYCQQYGSSPWTFGQGTKVEIK

SEQ ID NO: 1959 - protein, 5 aa, synthetic construct
  source 1..5: note = Description of Artificial Sequence: Synthetic peptide; note = XENP019949 vhCDR1
SYTMH

SEQ ID NO: 1960 - protein, 17 aa, synthetic construct
  source 1..17: note = Description of Artificial Sequence: Synthetic peptide; note = XENP019949 vhCDR2
FISYDGNNKYYADSVKG

SEQ ID NO: 1961 - protein, 9 aa, synthetic construct
  source 1..9: note = Description of Artificial Sequence: Synthetic peptide; note = XENP019949 vhCDR3
TGWLGPFDY

SEQ ID NO: 1962 - protein, 12 aa, synthetic construct
  source 1..12: note = Description of Artificial Sequence: Synthetic peptide; note = XENP019949 vlCDR1
RASQSVGSSYLA

SEQ ID NO: 1963 - protein, 7 aa, synthetic construct
  source 1..7: note = Description of Artificial Sequence: Synthetic peptide; note = XENP019949 vlCDR2
GAFSRDT

SEQ ID NO: 1964 - protein, 9 aa, synthetic construct
  source 1..9: note = Description of Artificial Sequence: Synthetic peptide; note = XENP019949 vlCDR3
QQYGSSPWT

SEQ ID NO: 1965 - protein, 246 aa, synthetic construct
  source 1..246: note = Description of Artificial Sequence: Synthetic polypeptide; note = XENP019950 [CTLA-4]_H0_L0.62_scFv(GKPGS)4
QVQLVESGGGVVQPGRSLRLSCAASGFTFSSYTMHWVRQAPGKGLEWVTFISYDGNNKYYADSVKGRFTISRDNSKNTLYLQMNSLRAEDTAIYYCARTGWLGPFDYWGQGTLVTVSSGKPGSGKPGSGKPGSGKPGSEIVLTQSPGTLSLSPGERATLSCRASQSVGSSYLAWYQQKPGQAPRLLIAGAFSRATGIPDRFSGSGSGTDFTLTISRLEPEDFAVYYCQQYGSSPWTFGQGTKVEIK

SEQ ID NO: 1966 - protein, 118 aa, synthetic construct; identical to SEQ ID NO: 22
  source 1..118: note = Description of Artificial Sequence: Synthetic polypeptide; note = VH of XENP019950

SEQ ID NO: 1967 - protein, 108 aa, synthetic construct
  source 1..108: note = Description of Artificial Sequence: Synthetic polypeptide; note = VL of XENP019950
EIVLTQSPGTLSLSPGERATLSCRASQSVGSSYLAWYQQKPGQAPRLLIAGAFSRATGIPDRFSGSGSGTDFTLTISRLEPEDFAVYYCQQYGSSPWTFGQGTKVEIK

SEQ ID NO: 1968 - protein, 5 aa, synthetic construct
  source 1..5: note = Description of Artificial Sequence: Synthetic peptide; note = XENP019950 vhCDR1
SYTMH

SEQ ID NO: 1969 - protein, 17 aa, synthetic construct
  source 1..17: note = Description of Artificial Sequence: Synthetic peptide; note = XENP019950 vhCDR2
FISYDGNNKYYADSVKG

SEQ ID NO: 1970 - protein, 9 aa, synthetic construct
  source 1..9: note = Description of Artificial Sequence: Synthetic peptide; note = XENP019950 vhCDR3
TGWLGPFDY

SEQ ID NO: 1971 - protein, 12 aa, synthetic construct
  source 1..12: note = Description of Artificial Sequence: Synthetic peptide; note = XENP019950 vlCDR1
RASQSVGSSYLA

SEQ ID NO: 1972 - protein, 7 aa, synthetic construct
  source 1..7: note = Description of Artificial Sequence: Synthetic peptide; note = XENP019950 vlCDR2
GAFSRAT

SEQ ID NO: 1973 - protein, 9 aa, synthetic construct
  source 1..9: note = Description of Artificial Sequence: Synthetic peptide; note = XENP019950 vlCDR3
QQYGSSPWT

SEQ ID NO: 1974 - protein, 246 aa, synthetic construct
  source 1..246: note = Description of Artificial Sequence: Synthetic polypeptide; note = XENP019951 [CTLA-4]_H0_L0.63_scFv(GKPGS)4
QVQLVESGGGVVQPGRSLRLSCAASGFTFSSYTMHWVRQAPGKGLEWVTFISYDGNNKYYADSVKGRFTISRDNSKNTLYLQMNSLRAEDTAIYYCARTGWLGPFDYWGQGTLVTVSSGKPGSGKPGSGKPGSGKPGSEIVLTQSPGTLSLSPGERATLSCRASQSVGSSYLAWYQQKPGQAPRLLIFGAFSRATGIPDRFSGSGSGTDFTLTISRLEPEDFAVYYCQQYGSSPWTFGQGTKVEIK

SEQ ID NO: 1975 - protein, 118 aa, synthetic construct; identical to SEQ ID NO: 22
  source 1..118: note = Description of Artificial Sequence: Synthetic polypeptide; note = VH of XENP019951

SEQ ID NO: 1976 - protein, 108 aa, synthetic construct
  source 1..108: note = Description of Artificial Sequence: Synthetic polypeptide; note = VL of XENP019951
EIVLTQSPGTLSLSPGERATLSCRASQSVGSSYLAWYQQKPGQAPRLLIFGAFSRATGIPDRFSGSGSGTDFTLTISRLEPEDFAVYYCQQYGSSPWTFGQGTKVEIK

SEQ ID NO: 1977 - protein, 5 aa, synthetic construct
  source 1..5: note = Description of Artificial Sequence: Synthetic peptide; note = XENP019951 vhCDR1
SYTMH

SEQ ID NO: 1978 - protein, 17 aa, synthetic construct
  source 1..17: note = Description of Artificial Sequence: Synthetic peptide; note = XENP019951 vhCDR2
FISYDGNNKYYADSVKG

SEQ ID NO: 1979 - protein, 9 aa, synthetic construct
  source 1..9: note = Description of Artificial Sequence: Synthetic peptide; note = XENP019951 vhCDR3
TGWLGPFDY

SEQ ID NO: 1980 - protein, 12 aa, synthetic construct
  source 1..12: note = Description of Artificial Sequence: Synthetic peptide; note = XENP019951 vlCDR1
RASQSVGSSYLA

SEQ ID NO: 1981 - protein, 7 aa, synthetic construct
  source 1..7: note = Description of Artificial Sequence: Synthetic peptide; note = XENP019951 vlCDR2
GAFSRAT

SEQ ID NO: 1982 - protein, 9 aa, synthetic construct
  source 1..9: note = Description of Artificial Sequence: Synthetic peptide; note = XENP019951 vlCDR3
QQYGSSPWT

SEQ ID NO: 1983 - protein, 246 aa, synthetic construct
  source 1..246: note = Description of Artificial Sequence: Synthetic polypeptide; note = XENP019952 [CTLA-4]_H0_L0.64_scFv(GKPGS)4
QVQLVESGGGVVQPGRSLRLSCAASGFTFSSYTMHWVRQAPGKGLEWVTFISYDGNNKYYADSVKGRFTISRDNSKNTLYLQMNSLRAEDTAIYYCARTGWLGPFDYWGQGTLVTVSSGKPGSGKPGSGKPGSGKPGSEIVLTQSPGTLSLSPGERATLSCRASQSVGSSYLAWYQQKPGQAPRLLIHGAFSRATGIPDRFSGSGSGTDFTLTISRLEPEDFAVYYCQQYGSSPWTFGQGTKVEIK

SEQ ID NO: 1984 - protein, 118 aa, synthetic construct; identical to SEQ ID NO: 22
  source 1..118: note = Description of Artificial Sequence: Synthetic polypeptide; note = VH of XENP019952

SEQ ID NO: 1985 - protein, 108 aa, synthetic construct
  source 1..108: note = Description of Artificial Sequence: Synthetic polypeptide; note = VL of XENP019952
EIVLTQSPGTLSLSPGERATLSCRASQSVGSSYLAWYQQKPGQAPRLLIHGAFSRATGIPDRFSGSGSGTDFTLTISRLEPEDFAVYYCQQYGSSPWTFGQGTKVEIK

SEQ ID NO: 1986 - protein, 5 aa, synthetic construct
  source 1..5: note = Description of Artificial Sequence: Synthetic peptide; note = XENP019952 vhCDR1
SYTMH

SEQ ID NO: 1987 - protein, 17 aa, synthetic construct
  source 1..17: note = Description of Artificial Sequence: Synthetic peptide; note = XENP019952 vhCDR2
FISYDGNNKYYADSVKG

SEQ ID NO: 1988 - protein, 9 aa, synthetic construct
  source 1..9: note = Description of Artificial Sequence: Synthetic peptide; note = XENP019952 vhCDR3
TGWLGPFDY

SEQ ID NO: 1989 - protein, 12 aa, synthetic construct
  source 1..12: note = Description of Artificial Sequence: Synthetic peptide; note = XENP019952 vlCDR1
RASQSVGSSYLA

SEQ ID NO: 1990 - protein, 7 aa, synthetic construct
  source 1..7: note = Description of Artificial Sequence: Synthetic peptide; note = XENP019952 vlCDR2
GAFSRAT

SEQ ID NO: 1991 - protein, 9 aa, synthetic construct
  source 1..9: note = Description of Artificial Sequence: Synthetic peptide; note = XENP019952 vlCDR3
QQYGSSPWT

SEQ ID NO: 1992 - protein, 246 aa, synthetic construct
  source 1..246: note = Description of Artificial Sequence: Synthetic polypeptide; note = XENP019953 [CTLA-4]_H0_L0.65_scFv(GKPGS)4
QVQLVESGGGVVQPGRSLRLSCAASGFTFSSYTMHWVRQAPGKGLEWVTFISYDGNNKYYADSVKGRFTISRDNSKNTLYLQMNSLRAEDTAIYYCARTGWLGPFDYWGQGTLVTVSSGKPGSGKPGSGKPGSGKPGSEIVLTQSPGTLSLSPGERATLSCRASQSVGSSYLAWYQQKPGQAPRLLILGAFSRATGIPDRFSGSGSGTDFTLTISRLEPEDFAVYYCQQYGSSPWTFGQGTKVEIK

SEQ ID NO: 1993 - protein, 118 aa, synthetic construct; identical to SEQ ID NO: 22
  source 1..118: note = Description of Artificial Sequence: Synthetic polypeptide; note = VH of XENP019953

SEQ ID NO: 1994 - protein, 108 aa, synthetic construct
  source 1..108: note = Description of Artificial Sequence: Synthetic polypeptide; note = VL of XENP019953
EIVLTQSPGTLSLSPGERATLSCRASQSVGSSYLAWYQQKPGQAPRLLILGAFSRATGIPDRFSGSGSGTDFTLTISRLEPEDFAVYYCQQYGSSPWTFGQGTKVEIK

SEQ ID NO: 1995 - protein, 5 aa, synthetic construct
  source 1..5: note = Description of Artificial Sequence: Synthetic peptide; note = XENP019953 vhCDR1
SYTMH

SEQ ID NO: 1996 - protein, 17 aa, synthetic construct
  source 1..17: note = Description of Artificial Sequence: Synthetic peptide; note = XENP019953 vhCDR2
FISYDGNNKYYADSVKG

SEQ ID NO: 1997 - protein, 9 aa, synthetic construct
  source 1..9: note = Description of Artificial Sequence: Synthetic peptide; note = XENP019953 vhCDR3
TGWLGPFDY

SEQ ID NO: 1998 - protein, 12 aa, synthetic construct
  source 1..12: note = Description of Artificial Sequence: Synthetic peptide; note = XENP019953 vlCDR1
RASQSVGSSYLA

SEQ ID NO: 1999 - protein, 7 aa, synthetic construct
  source 1..7: note = Description of Artificial Sequence: Synthetic peptide; note = XENP019953 vlCDR2
GAFSRAT

SEQ ID NO: 2000 - protein, 9 aa, synthetic construct
  source 1..9: note = Description of Artificial Sequence: Synthetic peptide; note = XENP019953 vlCDR3
QQYGSSPWT

SEQ ID NO: 2001 - protein, 246 aa, synthetic construct
  source 1..246: note = Description of Artificial Sequence: Synthetic polypeptide; note = XENP019954 [CTLA-4]_H0_L0.66_scFv(GKPGS)4
QVQLVESGGGVVQPGRSLRLSCAASGFTFSSYTMHWVRQAPGKGLEWVTFISYDGNNKYYADSVKGRFTISRDNSKNTLYLQMNSLRAEDTAIYYCARTGWLGPFDYWGQGTLVTVSSGKPGSGKPGSGKPGSGKPGSEIVLTQSPGTLSLSPGERATLSCRASQSVGSSYLAWYQQKPGQAPRLLIVGAFSRATGIPDRFSGSGSGTDFTLTISRLEPEDFAVYYCQQYGSSPWTFGQGTKVEIK

SEQ ID NO: 2002 - protein, 118 aa, synthetic construct; identical to SEQ ID NO: 22
  source 1..118: note = Description of Artificial Sequence: Synthetic polypeptide; note = VH of XENP019954

SEQ ID NO: 2003 - protein, 108 aa, synthetic construct
  source 1..108: note = Description of Artificial Sequence: Synthetic polypeptide; note = VL of XENP019954
EIVLTQSPGTLSLSPGERATLSCRASQSVGSSYLAWYQQKPGQAPRLLIVGAFSRATGIPDRFSGSGSGTDFTLTISRLEPEDFAVYYCQQYGSSPWTFGQGTKVEIK

SEQ ID NO: 2004 - protein, 5 aa, synthetic construct
  source 1..5: note = Description of Artificial Sequence: Synthetic peptide; note = XENP019954 vhCDR1
SYTMH

SEQ ID NO: 2005 - protein, 17 aa, synthetic construct
  source 1..17: note = Description of Artificial Sequence: Synthetic peptide; note = XENP019954 vhCDR2
FISYDGNNKYYADSVKG

SEQ ID NO: 2006 - protein, 9 aa, synthetic construct
  source 1..9: note = Description of Artificial Sequence: Synthetic peptide; note = XENP019954 vhCDR3
TGWLGPFDY

SEQ ID NO: 2007 - protein, 12 aa, synthetic construct
  source 1..12: note = Description of Artificial Sequence: Synthetic peptide; note = XENP019954 vlCDR1
RASQSVGSSYLA

SEQ ID NO: 2008 - protein, 7 aa, synthetic construct
  source 1..7: note = Description of Artificial Sequence: Synthetic peptide; note = XENP019954 vlCDR2
GAFSRAT

SEQ ID NO: 2009 - protein, 9 aa, synthetic construct
  source 1..9: note = Description of Artificial Sequence: Synthetic peptide; note = XENP019954 vlCDR3
QQYGSSPWT

SEQ ID NO: 2010 - protein, 246 aa, synthetic construct
  source 1..246: note = Description of Artificial Sequence: Synthetic polypeptide; note = XENP019955 [CTLA-4]_H0_L0.67_scFv(GKPGS)4
QVQLVESGGGVVQPGRSLRLSCAASGFTFSSYTMHWVRQAPGKGLEWVTFISYDGNNKYYADSVKGRFTISRDNSKNTLYLQMNSLRAEDTAIYYCARTGWLGPFDYWGQGTLVTVSSGKPGSGKPGSGKPGSGKPGSEIVLTQSPGTLSLSPGERATLSCRASQSVGSSYLAWYQQKPGQAPRLLIYDAFSRATGIPDRFSGSGSGTDFTLTISRLEPEDFAVYYCQQYGSSPWTFGQGTKVEIK

SEQ ID NO: 2011 - protein, 118 aa, synthetic construct; identical to SEQ ID NO: 22
  source 1..118: note = Description of Artificial Sequence: Synthetic polypeptide; note = VH of XENP019955

SEQ ID NO: 2012 - protein, 108 aa, synthetic construct
  source 1..108: note = Description of Artificial Sequence: Synthetic polypeptide; note = VL of XENP019955
EIVLTQSPGTLSLSPGERATLSCRASQSVGSSYLAWYQQKPGQAPRLLIYDAFSRATGIPDRFSGSGSGTDFTLTISRLEPEDFAVYYCQQYGSSPWTFGQGTKVEIK

SEQ ID NO: 2013 - protein, 5 aa, synthetic construct
  source 1..5: note = Description of Artificial Sequence: Synthetic peptide; note = XENP019955 vhCDR1
SYTMH

SEQ ID NO: 2014 - protein, 17 aa, synthetic construct
  source 1..17: note = Description of Artificial Sequence: Synthetic peptide; note = XENP019955 vhCDR2
FISYDGNNKYYADSVKG

SEQ ID NO: 2015 - protein, 9 aa, synthetic construct
  source 1..9: note = Description of Artificial Sequence: Synthetic peptide; note = XENP019955 vhCDR3
TGWLGPFDY

SEQ ID NO: 2016 - protein, 12 aa, synthetic construct
  source 1..12: note = Description of Artificial Sequence: Synthetic peptide; note = XENP019955 vlCDR1
RASQSVGSSYLA

SEQ ID NO: 2017 - protein, 7 aa, synthetic construct
  source 1..7: note = Description of Artificial Sequence: Synthetic peptide; note = XENP019955 vlCDR2
DAFSRAT

SEQ ID NO: 2018 - protein, 9 aa, synthetic construct
  source 1..9: note = Description of Artificial Sequence: Synthetic peptide; note = XENP019955 vlCDR3
QQYGSSPWT

SEQ ID NO: 2019 - protein, 246 aa, synthetic construct
  source 1..246: note = Description of Artificial Sequence: Synthetic polypeptide; note = XENP019956 [CTLA-4]_H0_L0.68_scFv(GKPGS)4
QVQLVESGGGVVQPGRSLRLSCAASGFTFSSYTMHWVRQAPGKGLEWVTFISYDGNNKYYADSVKGRFTISRDNSKNTLYLQMNSLRAEDTAIYYCARTGWLGPFDYWGQGTLVTVSSGKPGSGKPGSGKPGSGKPGSEIVLTQSPGTLSLSPGERATLSCRASQSVGSSYLAWYQQKPGQAPRLLIYSAFSRATGIPDRFSGSGSGTDFTLTISRLEPEDFAVYYCQQYGSSPWTFGQGTKVEIK

SEQ ID NO: 2020 - protein, 118 aa, synthetic construct; identical to SEQ ID NO: 22
  source 1..118: note = Description of Artificial Sequence: Synthetic polypeptide; note = VH of XENP019956

SEQ ID NO: 2021 - protein, 108 aa, synthetic construct
  source 1..108: note = Description of Artificial Sequence: Synthetic polypeptide; note = VL of XENP019956
EIVLTQSPGTLSLSPGERATLSCRASQSVGSSYLAWYQQKPGQAPRLLIYSAFSRATGIPDRFSGSGSGTDFTLTISRLEPEDFAVYYCQQYGSSPWTFGQGTKVEIK

SEQ ID NO: 2022 - protein, 5 aa, synthetic construct
  source 1..5: note = Description of Artificial Sequence: Synthetic peptide; note = XENP019956 vhCDR1
SYTMH

SEQ ID NO: 2023 - protein, 17 aa, synthetic construct
  source 1..17: note = Description of Artificial Sequence: Synthetic peptide; note = XENP019956 vhCDR2
FISYDGNNKYYADSVKG

SEQ ID NO: 2024 - protein, 9 aa, synthetic construct
  source 1..9: note = Description of Artificial Sequence: Synthetic peptide; note = XENP019956 vhCDR3
TGWLGPFDY

SEQ ID NO: 2025 - protein, 12 aa, synthetic construct
  source 1..12: note = Description of Artificial Sequence: Synthetic peptide; note = XENP019956 vlCDR1
RASQSVGSSYLA

SEQ ID NO: 2026 - protein, 7 aa, synthetic construct
  source 1..7: note = Description of Artificial Sequence: Synthetic peptide; note = XENP019956 vlCDR2
SAFSRAT

SEQ ID NO: 2027 - protein, 9 aa, synthetic construct
  source 1..9: note = Description of Artificial Sequence: Synthetic peptide; note = XENP019956 vlCDR3
QQYGSSPWT

SEQ ID NO: 2028 - protein, 246 aa, synthetic construct
  source 1..246: note = Description of Artificial Sequence: Synthetic polypeptide; note = XENP019957 [CTLA-4]_H0_L0.69_scFv(GKPGS)4
QVQLVESGGGVVQPGRSLRLSCAASGFTFSSYTMHWVRQAPGKGLEWVTFISYDGNNKYYADSVKGRFTISRDNSKNTLYLQMNSLRAEDTAIYYCARTGWLGPFDYWGQGTLVTVSSGKPGSGKPGSGKPGSGKPGSEIVLTQSPGTLSLSPGERATLSCRASQSVGSSYLAWYQQKPGQAPRLLIYGVFSRATGIPDRFSGSGSGTDFTLTISRLEPEDFAVYYCQQYGSSPWTFGQGTKVEIK

SEQ ID NO: 2029 - protein, 118 aa, synthetic construct; identical to SEQ ID NO: 22
  source 1..118: note = Description of Artificial Sequence: Synthetic polypeptide; note = VH of XENP019957

SEQ ID NO: 2030 - protein, 108 aa, synthetic construct
  source 1..108: note = Description of Artificial Sequence: Synthetic polypeptide; note = VL of XENP019957
EIVLTQSPGTLSLSPGERATLSCRASQSVGSSYLAWYQQKPGQAPRLLIYGVFSRATGIPDRFSGSGSGTDFTLTISRLEPEDFAVYYCQQYGSSPWTFGQGTKVEIK

SEQ ID NO: 2031 - protein, 5 aa, synthetic construct
  source 1..5: note = Description of Artificial Sequence: Synthetic peptide; note = XENP019957 vhCDR1
SYTMH

SEQ ID NO: 2032 - protein, 17 aa, synthetic construct
  source 1..17: note = Description of Artificial Sequence: Synthetic peptide; note = XENP019957 vhCDR2
FISYDGNNKYYADSVKG

SEQ ID NO: 2033 - protein, 9 aa, synthetic construct
  source 1..9: note = Description of Artificial Sequence: Synthetic peptide; note = XENP019957 vhCDR3
TGWLGPFDY

SEQ ID NO: 2034 - protein, 12 aa, synthetic construct
  source 1..12: note = Description of Artificial Sequence: Synthetic peptide; note = XENP019957 vlCDR1
RASQSVGSSYLA

SEQ ID NO: 2035 - protein, 7 aa, synthetic construct
  source 1..7: note = Description of Artificial Sequence: Synthetic peptide; note = XENP019957 vlCDR2
GVFSRAT

SEQ ID NO: 2036 - protein, 9 aa, synthetic construct
  source 1..9: note = Description of Artificial Sequence: Synthetic peptide; note = XENP019957 vlCDR3
QQYGSSPWT

SEQ ID NO: 2037 - protein, 246 aa, synthetic construct
  source 1..246: note = Description of Artificial Sequence: Synthetic polypeptide; note = XENP019958 [CTLA-4]_H0_L0.70_scFv(GKPGS)4
QVQLVESGGGVVQPGRSLRLSCAASGFTFSSYTMHWVRQAPGKGLEWVTFISYDGNNKYYADSVKGRFTISRDNSKNTLYLQMNSLRAEDTAIYYCARTGWLGPFDYWGQGTLVTVSSGKPGSGKPGSGKPGSGKPGSEIVLTQSPGTLSLSPGERATLSCRASQSVGSSYLAWYQQKPGQAPRLLIYGAHSRATGIPDRFSGSGSGTDFTLTISRLEPEDFAVYYCQQYGSSPWTFGQGTKVEIK

SEQ ID NO: 2038 - protein, 118 aa, synthetic construct; identical to SEQ ID NO: 22
  source 1..118: note = Description of Artificial Sequence: Synthetic polypeptide; note = VH of XENP019958

SEQ ID NO: 2039 - protein, 108 aa, synthetic construct
  source 1..108: note = Description of Artificial Sequence: Synthetic polypeptide; note = VL of XENP019958
EIVLTQSPGTLSLSPGERATLSCRASQSVGSSYLAWYQQKPGQAPRLLIYGAHSRATGIPDRFSGSGSGTDFTLTISRLEPEDFAVYYCQQYGSSPWTFGQGTKVEIK

SEQ ID NO: 2040 - protein, 5 aa, synthetic construct
  source 1..5: note = Description of Artificial Sequence: Synthetic peptide; note = XENP019958 vhCDR1
SYTMH

SEQ ID NO: 2041 - protein, 17 aa, synthetic construct
  source 1..17: note = Description of Artificial Sequence: Synthetic peptide; note = XENP019958 vhCDR2
FISYDGNNKYYADSVKG

SEQ ID NO: 2042 - protein, 9 aa, synthetic construct
  source 1..9: note = Description of Artificial Sequence: Synthetic peptide; note = XENP019958 vhCDR3
TGWLGPFDY

SEQ ID NO: 2043 - protein, 12 aa, synthetic construct
  source 1..12: note = Description of Artificial Sequence: Synthetic peptide; note = XENP019958 vlCDR1
RASQSVGSSYLA

SEQ ID NO: 2044 - protein, 7 aa, synthetic construct
  source 1..7: note = Description of Artificial Sequence: Synthetic peptide; note = XENP019958 vlCDR2
GAHSRAT

SEQ ID NO: 2045 - protein, 9 aa, synthetic construct
  source 1..9: note = Description of Artificial Sequence: Synthetic peptide; note = XENP019958 vlCDR3
QQYGSSPWT

SEQ ID NO: 2046 - protein, 246 aa, synthetic construct
  source 1..246: note = Description of Artificial Sequence: Synthetic polypeptide; note = XENP019959 [CTLA-4]_H0_L0.71_scFv(GKPGS)4
QVQLVESGGGVVQPGRSLRLSCAASGFTFSSYTMHWVRQAPGKGLEWVTFISYDGNNKYYADSVKGRFTISRDNSKNTLYLQMNSLRAEDTAIYYCARTGWLGPFDYWGQGTLVTVSSGKPGSGKPGSGKPGSGKPGSEIVLTQSPGTLSLSPGERATLSCRASQSVGSSYLAWYQQKPGQAPRLLIYGAISRATGIPDRFSGSGSGTDFTLTISRLEPEDFAVYYCQQYGSSPWTFGQGTKVEIK

SEQ ID NO: 2047 - protein, 118 aa, synthetic construct; identical to SEQ ID NO: 22
  source 1..118: note = Description of Artificial Sequence: Synthetic polypeptide; note = VH of XENP019959

SEQ ID NO: 2048 - protein, 108 aa, synthetic construct
  source 1..108: note = Description of Artificial Sequence: Synthetic polypeptide; note = VL of XENP019959
EIVLTQSPGTLSLSPGERATLSCRASQSVGSSYLAWYQQKPGQAPRLLIYGAISRATGIPDRFSGSGSGTDFTLTISRLEPEDFAVYYCQQYGSSPWTFGQGTKVEIK

SEQ ID NO: 2049 - protein, 5 aa, synthetic construct
  source 1..5: note = Description of Artificial Sequence: Synthetic peptide; note = XENP019959 vhCDR1
SYTMH

SEQ ID NO: 2050 - protein, 17 aa, synthetic construct
  source 1..17: note = Description of Artificial Sequence: Synthetic peptide; note = XENP019959 vhCDR2
FISYDGNNKYYADSVKG

SEQ ID NO: 2051 - protein, 9 aa, synthetic construct
  source 1..9: note = Description of Artificial Sequence: Synthetic peptide; note = XENP019959 vhCDR3
TGWLGPFDY

SEQ ID NO: 2052 - protein, 12 aa, synthetic construct
  source 1..12: note = Description of Artificial Sequence: Synthetic peptide; note = XENP019959 vlCDR1
RASQSVGSSYLA

SEQ ID NO: 2053 - protein, 7 aa, synthetic construct
  source 1..7: note = Description of Artificial Sequence: Synthetic peptide; note = XENP019959 vlCDR2
GAISRAT

SEQ ID NO: 2054 - protein, 9 aa, synthetic construct
  source 1..9: note = Description of Artificial Sequence: Synthetic peptide; note = XENP019959 vlCDR3
QQYGSSPWT

SEQ ID NO: 2055 - protein, 246 aa, synthetic construct
  source 1..246: note = Description of Artificial Sequence: Synthetic polypeptide; note = XENP019960 [CTLA-4]_H0_L0.72_scFv(GKPGS)4
QVQLVESGGGVVQPGRSLRLSCAASGFTFSSYTMHWVRQAPGKGLEWVTFISYDGNNKYYADSVKGRFTISRDNSKNTLYLQMNSLRAEDTAIYYCARTGWLGPFDYWGQGTLVTVSSGKPGSGKPGSGKPGSGKPGSEIVLTQSPGTLSLSPGERATLSCRASQSVGSSYLAWYQQKPGQAPRLLIYGALSRATGIPDRFSGSGSGTDFTLTISRLEPEDFAVYYCQQYGSSPWTFGQGTKVEIK

SEQ ID NO: 2056 - protein, 118 aa, synthetic construct; identical to SEQ ID NO: 22
  source 1..118: note = Description of Artificial Sequence: Synthetic polypeptide; note = VH of XENP019960

SEQ ID NO: 2057 - protein, 108 aa, synthetic construct
  source 1..108: note = Description of Artificial Sequence: Synthetic polypeptide; note = VL of XENP019960
EIVLTQSPGTLSLSPGERATLSCRASQSVGSSYLAWYQQKPGQAPRLLIYGALSRATGIPDRFSGSGSGTDFTLTISRLEPEDFAVYYCQQYGSSPWTFGQGTKVEIK

SEQ ID NO: 2058 - protein, 5 aa, synthetic construct
  source 1..5: note = Description of Artificial Sequence: Synthetic peptide; note = XENP019960 vhCDR1
SYTMH

SEQ ID NO: 2059 - protein, 17 aa, synthetic construct
  source 1..17: note = Description of Artificial Sequence: Synthetic peptide; note = XENP019960 vhCDR2
FISYDGNNKYYADSVKG

SEQ ID NO: 2060 - protein, 9 aa, synthetic construct
  source 1..9: note = Description of Artificial Sequence: Synthetic peptide; note = XENP019960 vhCDR3
TGWLGPFDY

SEQ ID NO: 2061 - protein, 12 aa, synthetic construct
  source 1..12: note = Description of Artificial Sequence: Synthetic peptide; note = XENP019960 vlCDR1
RASQSVGSSYLA

SEQ ID NO: 2062 - protein, 7 aa, synthetic construct
  source 1..7: note = Description of Artificial Sequence: Synthetic peptide; note = XENP019960 vlCDR2
GALSRAT

SEQ ID NO: 2063 - protein, 9 aa, synthetic construct
  source 1..9: note = Description of Artificial Sequence: Synthetic peptide; note = XENP019960 vlCDR3
QQYGSSPWT

SEQ ID NO: 2064 - protein, 246 aa, synthetic construct
  source 1..246: note = Description of Artificial Sequence: Synthetic polypeptide; note = XENP019961 [CTLA-4]_H0_L0.73_scFv(GKPGS)4
QVQLVESGGGVVQPGRSLRLSCAASGFTFSSYTMHWVRQAPGKGLEWVTFISYDGNNKYYADSVKGRFTISRDNSKNTLYLQMNSLRAEDTAIYYCARTGWLGPFDYWGQGTLVTVSSGKPGSGKPGSGKPGSGKPGSEIVLTQSPGTLSLSPGERATLSCRASQSVGSSYLAWYQQKPGQAPRLLIYGASSRATGIPDRFSGSGSGTDFTLTISRLEPEDFAVYYCQQYGSSPWTFGQGTKVEIK

SEQ ID NO: 2065 - protein, 118 aa, synthetic construct; identical to SEQ ID NO: 22
  source 1..118: note = Description of Artificial Sequence: Synthetic polypeptide; note = VH of XENP019961

SEQ ID NO: 2066 - protein, 108 aa, synthetic construct
  source 1..108: note = Description of Artificial Sequence: Synthetic polypeptide; note = VL of XENP019961
EIVLTQSPGTLSLSPGERATLSCRASQSVGSSYLAWYQQKPGQAPRLLIYGASSRATGIPDRFSGSGSGTDFTLTISRLEPEDFAVYYCQQYGSSPWTFGQGTKVEIK

SEQ ID NO: 2067 - protein, 5 aa, synthetic construct
  source 1..5: note = Description of Artificial Sequence: Synthetic peptide; note = XENP019961 vhCDR1
SYTMH

SEQ ID NO: 2068 - protein, 17 aa, synthetic construct
  source 1..17: note = Description of Artificial Sequence: Synthetic peptide; note = XENP019961 vhCDR2
FISYDGNNKYYADSVKG

SEQ ID NO: 2069 - protein, 9 aa, synthetic construct
  source 1..9: note = Description of Artificial Sequence: Synthetic peptide; note = XENP019961 vhCDR3
TGWLGPFDY

SEQ ID NO: 2070 - protein, 12 aa, synthetic construct
  source 1..12: note = Description of Artificial Sequence: Synthetic peptide; note = XENP019961 vlCDR1
RASQSVGSSYLA

SEQ ID NO: 2071 - protein, 7 aa, synthetic construct
  source 1..7: note = Description of Artificial Sequence: Synthetic peptide; note = XENP019961 vlCDR2
GASSRAT

SEQ ID NO: 2072 - protein, 9 aa, synthetic construct
  source 1..9: note = Description of Artificial Sequence: Synthetic peptide; note = XENP019961 vlCDR3
QQYGSSPWT

SEQ ID NO: 2073 - protein, 246 aa, synthetic construct
  source 1..246: note = Description of Artificial Sequence: Synthetic polypeptide; note = XENP019962 [CTLA-4]_H0_L0.74_scFv(GKPGS)4
QVQLVESGGGVVQPGRSLRLSCAASGFTFSSYTMHWVRQAPGKGLEWVTFISYDGNNKYYADSVKGRFTISRDNSKNTLYLQMNSLRAEDTAIYYCARTGWLGPFDYWGQGTLVTVSSGKPGSGKPGSGKPGSGKPGSEIVLTQSPGTLSLSPGERATLSCRASQSVGSSYLAWYQQKPGQAPRLLIYGAYSRATGIPDRFSGSGSGTDFTLTISRLEPEDFAVYYCQQYGSSPWTFGQGTKVEIK

SEQ ID NO: 2074 - protein, 118 aa, synthetic construct; identical to SEQ ID NO: 22
  source 1..118: note = Description of Artificial Sequence: Synthetic polypeptide; note = VH of XENP019962

SEQ ID NO: 2075 - protein, 108 aa, synthetic construct
  source 1..108: note = Description of Artificial Sequence: Synthetic polypeptide; note = VL of XENP019962
EIVLTQSPGTLSLSPGERATLSCRASQSVGSSYLAWYQQKPGQAPRLLIYGAYSRATGIPDRFSGSGSGTDFTLTISRLEPEDFAVYYCQQYGSSPWTFGQGTKVEIK

SEQ ID NO: 2076 - protein, 5 aa, synthetic construct
  source 1..5: note = Description of Artificial Sequence: Synthetic peptide; note = XENP019962 vhCDR1
SYTMH

SEQ ID NO: 2077 - protein, 17 aa, synthetic construct
  source 1..17: note = Description of Artificial Sequence: Synthetic peptide; note = XENP019962 vhCDR2
FISYDGNNKYYADSVKG

SEQ ID NO: 2078 - protein, 9 aa, synthetic construct
  source 1..9: note = Description of Artificial Sequence: Synthetic peptide; note = XENP019962 vhCDR3
TGWLGPFDY

SEQ ID NO: 2079 - protein, 12 aa, synthetic construct
  source 1..12: note = Description of Artificial Sequence: Synthetic peptide; note = XENP019962 vlCDR1
RASQSVGSSYLA

SEQ ID NO: 2080 - protein, 7 aa, synthetic construct
  source 1..7: note = Description of Artificial Sequence: Synthetic peptide; note = XENP019962 vlCDR2
GAYSRAT

SEQ ID NO: 2081 - protein, 9 aa, synthetic construct
  source 1..9: note = Description of Artificial Sequence: Synthetic peptide; note = XENP019962 vlCDR3
QQYGSSPWT

SEQ ID NO: 2082 - protein, 246 aa, synthetic construct
  source 1..246: note = Description of Artificial Sequence: Synthetic polypeptide; note = XENP019963 [CTLA-4]_H0_L0.75_scFv(GKPGS)4
QVQLVESGGGVVQPGRSLRLSCAASGFTFSSYTMHWVRQAPGKGLEWVTFISYDGNNKYYADSVKGRFTISRDNSKNTLYLQMNSLRAEDTAIYYCARTGWLGPFDYWGQGTLVTVSSGKPGSGKPGSGKPGSGKPGSEIVLTQSPGTLSLSPGERATLSCRASQSVGSSYLAWYQQKPGQAPRLLIYGAFARATGIPDRFSGSGSGTDFTLTISRLEPEDFAVYYCQQYGSSPWTFGQGTKVEIK

SEQ ID NO: 2083 - protein, 118 aa, synthetic construct; identical to SEQ ID NO: 22
  source 1..118: note = Description of Artificial Sequence: Synthetic polypeptide; note = VH of XENP019963

SEQ ID NO: 2084 - protein, 108 aa, synthetic construct
  source 1..108: note = Description of Artificial Sequence: Synthetic polypeptide; note = VL of XENP019963
EIVLTQSPGTLSLSPGERATLSCRASQSVGSSYLAWYQQKPGQAPRLLIYGAFARATGIPDRFSGSGSGTDFTLTISRLEPEDFAVYYCQQYGSSPWTFGQGTKVEIK

SEQ ID NO: 2085 - protein, 5 aa, synthetic construct
  source 1..5: note = Description of Artificial Sequence: Synthetic peptide; note = XENP019963 vhCDR1
SYTMH

SEQ ID NO: 2086 - protein, 17 aa, synthetic construct
  source 1..17: note = Description of Artificial Sequence: Synthetic peptide; note = XENP019963 vhCDR2
FISYDGNNKYYADSVKG

SEQ ID NO: 2087 - protein, 9 aa, synthetic construct
  source 1..9: note = Description of Artificial Sequence: Synthetic peptide; note = XENP019963 vhCDR3
TGWLGPFDY

SEQ ID NO: 2088 - protein, 12 aa, synthetic construct
  source 1..12: note = Description of Artificial Sequence: Synthetic peptide; note = XENP019963 vlCDR1
RASQSVGSSYLA

SEQ ID NO: 2089 - protein, 7 aa, synthetic construct
  source 1..7: note = Description of Artificial Sequence: Synthetic peptide; note = XENP019963 vlCDR2
GAFARAT

SEQ ID NO: 2090 - protein, 9 aa, synthetic construct
  source 1..9: note = Description of Artificial Sequence: Synthetic peptide; note = XENP019963 vlCDR3
QQYGSSPWT

SEQ ID NO: 2091 - protein, 246 aa, synthetic construct
  source 1..246: note = Description of Artificial Sequence: Synthetic polypeptide; note = XENP019964 [CTLA-4]_H0_L0.76_scFv(GKPGS)4
QVQLVESGGGVVQPGRSLRLSCAASGFTFSSYTMHWVRQAPGKGLEWVTFISYDGNNKYYADSVKGRFTISRDNSKNTLYLQMNSLRAEDTAIYYCARTGWLGPFDYWGQGTLVTVSSGKPGSGKPGSGKPGSGKPGSEIVLTQSPGTLSLSPGERATLSCRASQSVGSSYLAWYQQKPGQAPRLLIYGAFGRATGIPDRFSGSGSGTDFTLTISRLEPEDFAVYYCQQYGSSPWTFGQGTKVEIK

SEQ ID NO: 2092 - protein, 118 aa, synthetic construct; identical to SEQ ID NO: 22
  source 1..118: note = Description of Artificial Sequence: Synthetic polypeptide; note = VH of XENP019964

SEQ ID NO: 2093 - protein, 108 aa, synthetic construct
  source 1..108: note = Description of Artificial Sequence: Synthetic polypeptide; note = VL of XENP019964
EIVLTQSPGTLSLSPGERATLSCRASQSVGSSYLAWYQQKPGQAPRLLIYGAFGRATGIPDRFSGSGSGTDFTLTISRLEPEDFAVYYCQQYGSSPWTFGQGTKVEIK

SEQ ID NO: 2094 - protein, 5 aa, synthetic construct
  source 1..5: note = Description of Artificial Sequence: Synthetic peptide; note = XENP019964 vhCDR1
SYTMH

SEQ ID NO: 2095 - protein, 17 aa, synthetic construct
  source 1..17: note = Description of Artificial Sequence: Synthetic peptide; note = XENP019964 vhCDR2
FISYDGNNKYYADSVKG

SEQ ID NO: 2096 - protein, 9 aa, synthetic construct
  source 1..9: note = Description of Artificial Sequence: Synthetic peptide; note = XENP019964 vhCDR3
TGWLGPFDY

SEQ ID NO: 2097 - protein, 12 aa, synthetic construct
  source 1..12: note = Description of Artificial Sequence: Synthetic peptide; note = XENP019964 vlCDR1
RASQSVGSSYLA

SEQ ID NO: 2098 - protein, 7 aa, synthetic construct
  source 1..7: note = Description of Artificial Sequence: Synthetic peptide; note = XENP019964 vlCDR2
GAFGRAT

SEQ ID NO: 2099 - protein, 9 aa, synthetic construct
  source 1..9: note = Description of Artificial Sequence: Synthetic peptide; note = XENP019964 vlCDR3
QQYGSSPWT

SEQ ID NO: 2100 - protein, 246 aa, synthetic construct
  source 1..246: note = Description of Artificial Sequence: Synthetic polypeptide; note = XENP019965 [CTLA-4]_H0_L0.77_scFv(GKPGS)4
QVQLVESGGGVVQPGRSLRLSCAASGFTFSSYTMHWVRQAPGKGLEWVTFISYDGNNKYYADSVKGRFTISRDNSKNTLYLQMNSLRAEDTAIYYCARTGWLGPFDYWGQGTLVTVSSGKPGSGKPGSGKPGSGKPGSEIVLTQSPGTLSLSPGERATLSCRASQSVGSSYLAWYQQKPGQAPRLLIYGAFNRATGIPDRFSGSGSGTDFTLTISRLEPEDFAVYYCQQYGSSPWTFGQGTKVEIK

SEQ ID NO: 2101 - protein, 118 aa, synthetic construct; identical to SEQ ID NO: 22
  source 1..118: note = Description of Artificial Sequence: Synthetic polypeptide; note = VH of XENP019965

SEQ ID NO: 2102 - protein, 108 aa, synthetic construct
  source 1..108: note = Description of Artificial Sequence: Synthetic polypeptide; note = VL of XENP019965
EIVLTQSPGTLSLSPGERATLSCRASQSVGSSYLAWYQQKPGQAPRLLIYGAFNRATGIPDRFSGSGSGTDFTLTISRLEPEDFAVYYCQQYGSSPWTFGQGTKVEIK

SEQ ID NO: 2103 - protein, 5 aa, synthetic construct
  source 1..5: note = Description of Artificial Sequence: Synthetic peptide; note = XENP019965 vhCDR1
SYTMH

SEQ ID NO: 2104 - protein, 17 aa, synthetic construct
  source 1..17: note = Description of Artificial Sequence: Synthetic peptide; note = XENP019965 vhCDR2
FISYDGNNKYYADSVKG

SEQ ID NO: 2105 - protein, 9 aa, synthetic construct
  source 1..9: note = Description of Artificial Sequence: Synthetic peptide; note = XENP019965 vhCDR3
TGWLGPFDY

SEQ ID NO: 2106 - protein, 12 aa, synthetic construct
  source 1..12: note = Description of Artificial Sequence: Synthetic peptide; note = XENP019965 vlCDR1
RASQSVGSSYLA

SEQ ID NO: 2107 - protein, 7 aa, synthetic construct
  source 1..7: note = Description of Artificial Sequence: Synthetic peptide; note = XENP019965 vlCDR2
GAFNRAT

SEQ ID NO: 2108 - protein, 9 aa, synthetic construct
  source 1..9: note = Description of Artificial Sequence: Synthetic peptide; note = XENP019965 vlCDR3
QQYGSSPWT

SEQ ID NO: 2109 - protein, 246 aa, synthetic construct
  source 1..246: note = Description of Artificial Sequence: Synthetic polypeptide; note = XENP019966 [CTLA-4]_H0_L0.78_scFv(GKPGS)4
QVQLVESGGGVVQPGRSLRLSCAASGFTFSSYTMHWVRQAPGKGLEWVTFISYDGNNKYYADSVKGRFTISRDNSKNTLYLQMNSLRAEDTAIYYCARTGWLGPFDYWGQGTLVTVSSGKPGSGKPGSGKPGSGKPGSEIVLTQSPGTLSLSPGERATLSCRASQSVGSSYLAWYQQKPGQAPRLLIYGAFQRATGIPDRFSGSGSGTDFTLTISRLEPEDFAVYYCQQYGSSPWTFGQGTKVEIK

SEQ ID NO: 2110 - protein, 118 aa, synthetic construct; identical to SEQ ID NO: 22
  source 1..118: note = Description of Artificial Sequence: Synthetic polypeptide; note = VH of XENP019966

SEQ ID NO: 2111 - protein, 108 aa, synthetic construct
  source 1..108: note = Description of Artificial Sequence: Synthetic polypeptide; note = VL of XENP019966
EIVLTQSPGTLSLSPGERATLSCRASQSVGSSYLAWYQQKPGQAPRLLIYGAFQRATGIPDRFSGSGSGTDFTLTISRLEPEDFAVYYCQQYGSSPWTFGQGTKVEIK

SEQ ID NO: 2112 - protein, 5 aa, synthetic construct
  source 1..5: note = Description of Artificial Sequence: Synthetic peptide; note = XENP019966 vhCDR1
SYTMH

SEQ ID NO: 2113 - protein, 17 aa, synthetic construct
  source 1..17: note = Description of Artificial Sequence: Synthetic peptide; note = XENP019966 vhCDR2
FISYDGNNKYYADSVKG

SEQ ID NO: 2114 - protein, 9 aa, synthetic construct
  source 1..9: note = Description of Artificial Sequence: Synthetic peptide; note = XENP019966 vhCDR3
TGWLGPFDY

SEQ ID NO: 2115 - protein, 12 aa, synthetic construct
  source 1..12: note = Description of Artificial Sequence: Synthetic peptide; note = XENP019966 vlCDR1
RASQSVGSSYLA

SEQ ID NO: 2116 - protein, 7 aa, synthetic construct
  source 1..7: note = Description of Artificial Sequence: Synthetic peptide; note = XENP019966 vlCDR2
GAFQRAT

SEQ ID NO: 2117 - protein, 9 aa, synthetic construct
  source 1..9: note = Description of Artificial Sequence: Synthetic peptide; note = XENP019966 vlCDR3
QQYGSSPWT

SEQ ID NO: 2118 - protein, 246 aa, synthetic construct
  source 1..246: note = Description of Artificial Sequence: Synthetic polypeptide; note = XENP019967 [CTLA-4]_H0_L0.79_scFv(GKPGS)4
QVQLVESGGGVVQPGRSLRLSCAASGFTFSSYTMHWVRQAPGKGLEWVTFISYDGNNKYYADSVKGRFTISRDNSKNTLYLQMNSLRAEDTAIYYCARTGWLGPFDYWGQGTLVTVSSGKPGSGKPGSGKPGSGKPGSEIVLTQSPGTLSLSPGERATLSCRASQSVGSSYLAWYQQKPGQAPRLLIYGAFTRATGIPDRFSGSGSGTDFTLTISRLEPEDFAVYYCQQYGSSPWTFGQGTKVEIK

SEQ ID NO: 2119 - protein, 118 aa, synthetic construct; identical to SEQ ID NO: 22
  source 1..118: note = Description of Artificial Sequence: Synthetic polypeptide; note = VH of XENP019967

SEQ ID NO: 2120 - protein, 108 aa, synthetic construct
  source 1..108: note = Description of Artificial Sequence: Synthetic polypeptide; note = VL of XENP019967
EIVLTQSPGTLSLSPGERATLSCRASQSVGSSYLAWYQQKPGQAPRLLIYGAFTRATGIPDRFSGSGSGTDFTLTISRLEPEDFAVYYCQQYGSSPWTFGQGTKVEIK

SEQ ID NO: 2121 - protein, 5 aa, synthetic construct
  source 1..5: note = Description of Artificial Sequence: Synthetic peptide; note = XENP019967 vhCDR1
SYTMH

SEQ ID NO: 2122 - protein, 17 aa, synthetic construct
  source 1..17: note = Description of Artificial Sequence: Synthetic peptide; note = XENP019967 vhCDR2
FISYDGNNKYYADSVKG

SEQ ID NO: 2123 - protein, 9 aa, synthetic construct
  source 1..9: note = Description of Artificial Sequence: Synthetic peptide; note = XENP019967 vhCDR3
TGWLGPFDY

SEQ ID NO: 2124 - protein, 12 aa, synthetic construct
  source 1..12: note = Description of Artificial Sequence: Synthetic peptide; note = XENP019967 vlCDR1
RASQSVGSSYLA

SEQ ID NO: 2125 - protein, 7 aa, synthetic construct
  source 1..7: note = Description of Artificial Sequence: Synthetic peptide; note = XENP019967 vlCDR2
GAFTRAT

SEQ ID NO: 2126 - protein, 9 aa, synthetic construct
  source 1..9: note = Description of Artificial Sequence: Synthetic peptide; note = XENP019967 vlCDR3
QQYGSSPWT

SEQ ID NO: 2127 - protein, 246 aa, synthetic construct
  source 1..246: note = Description of Artificial Sequence: Synthetic polypeptide; note = XENP019968 [CTLA-4]_H0_L0.80_scFv(GKPGS)4
QVQLVESGGGVVQPGRSLRLSCAASGFTFSSYTMHWVRQAPGKGLEWVTFISYDGNNKYYADSVKGRFTISRDNSKNTLYLQMNSLRAEDTAIYYCARTGWLGPFDYWGQGTLVTVSSGKPGSGKPGSGKPGSGKPGSEIVLTQSPGTLSLSPGERATLSCRASQSVGSSYLAWYQQKPGQAPRLLIYGAFSRDTGIPDRFSGSGSGTDFTLTISRLEPEDFAVYYCQQYGSSPWTFGQGTKVEIK

SEQ ID NO: 2128 - protein, 118 aa, synthetic construct; identical to SEQ ID NO: 22
  source 1..118: note = Description of Artificial Sequence: Synthetic polypeptide; note = VH of XENP019968

SEQ ID NO: 2129 - protein, 108 aa, synthetic construct
  source 1..108: note = Description of Artificial Sequence: Synthetic polypeptide; note = VL of XENP019968
EIVLTQSPGTLSLSPGERATLSCRASQSVGSSYLAWYQQKPGQAPRLLIYGAFSRDTGIPDRFSGSGSGTDFTLTISRLEPEDFAVYYCQQYGSSPWTFGQGTKVEIK

SEQ ID NO: 2130 - protein, 5 aa, synthetic construct
  source 1..5: note = Description of Artificial Sequence: Synthetic peptide; note = XENP019968 vhCDR1
SYTMH

SEQ ID NO: 2131 - protein, 17 aa, synthetic construct
  source 1..17: note = Description of Artificial Sequence: Synthetic peptide; note = XENP019968 vhCDR2
FISYDGNNKYYADSVKG

SEQ ID NO: 2132 - protein, 9 aa, synthetic construct
  source 1..9: note = Description of Artificial Sequence: Synthetic peptide; note = XENP019968 vhCDR3
TGWLGPFDY

SEQ ID NO: 2133 - protein, 12 aa, synthetic construct
  source 1..12: note = Description of Artificial Sequence: Synthetic peptide; note = XENP019968 vlCDR1
RASQSVGSSYLA

SEQ ID NO: 2134 - protein, 7 aa, synthetic construct
  source 1..7: note = Description of Artificial Sequence: Synthetic peptide; note = XENP019968 vlCDR2
GAFSRDT

SEQ ID NO: 2135 - protein, 9 aa, synthetic construct
  source 1..9: note = Description of Artificial Sequence: Synthetic peptide; note = XENP019968 vlCDR3
QQYGSSPWT

SEQ ID NO: 2136 - protein, 246 aa, synthetic construct
  source 1..246: note = Description of Artificial Sequence: Synthetic polypeptide; note = XENP019969 [CTLA-4]_H0_L0.81_scFv(GKPGS)4
QVQLVESGGGVVQPGRSLRLSCAASGFTFSSYTMHWVRQAPGKGLEWVTFISYDGNNKYYADSVKGRFTISRDNSKNTLYLQMNSLRAEDTAIYYCARTGWLGPFDYWGQGTLVTVSSGKPGSGKPGSGKPGSGKPGSEIVLTQSPGTLSLSPGERATLSCRASQSVGSSYLAWYQQKPGQAPRLLIYGAFSRASGIPDRFSGSGSGTDFTLTISRLEPEDFAVYYCQQYGSSPWTFGQGTKVEIK

SEQ ID NO: 2137 - protein, 118 aa, synthetic construct; identical to SEQ ID NO: 22
  source 1..118: note = Description of Artificial Sequence: Synthetic polypeptide; note = VH of XENP019969

SEQ ID NO: 2138 - protein, 108 aa, synthetic construct
  source 1..108: note = Description of Artificial Sequence: Synthetic polypeptide; note = VL of XENP019969
EIVLTQSPGTLSLSPGERATLSCRASQSVGSSYLAWYQQKPGQAPRLLIYGAFSRASGIPDRFSGSGSGTDFTLTISRLEPEDFAVYYCQQYGSSPWTFGQGTKVEIK

SEQ ID NO: 2139 - protein, 5 aa, synthetic construct
  source 1..5: note = Description of Artificial Sequence: Synthetic peptide; note = XENP019969 vhCDR1
SYTMH

SEQ ID NO: 2140 - protein, 17 aa, synthetic construct
  source 1..17: note = Description of Artificial Sequence: Synthetic peptide; note = XENP019969 vhCDR2
FISYDGNNKYYADSVKG

SEQ ID NO: 2141 - protein, 9 aa, synthetic construct
  source 1..9: note = Description of Artificial Sequence: Synthetic peptide; note = XENP019969 vhCDR3
TGWLGPFDY

SEQ ID NO: 2142 - protein, 12 aa, synthetic construct
  source 1..12: note = Description of Artificial Sequence: Synthetic peptide; note = XENP019969 vlCDR1
RASQSVGSSYLA

SEQ ID NO: 2143 - protein, 7 aa, synthetic construct
  source 1..7: note = Description of Artificial Sequence: Synthetic peptide; note = XENP019969 vlCDR2
GAFSRAS

SEQ ID NO: 2144 - protein, 9 aa, synthetic construct
  source 1..9: note = Description of Artificial Sequence: Synthetic peptide; note = XENP019969 vlCDR3
QQYGSSPWT

SEQ ID NO: 2145 - protein, 246 aa, synthetic construct
  source 1..246: note = Description of Artificial Sequence: Synthetic polypeptide; note = XENP019970 [CTLA-4]_H0_L0.82_scFv(GKPGS)4
QVQLVESGGGVVQPGRSLRLSCAASGFTFSSYTMHWVRQAPGKGLEWVTFISYDGNNKYYADSVKGRFTISRDNSKNTLYLQMNSLRAEDTAIYYCARTGWLGPFDYWGQGTLVTVSSGKPGSGKPGSGKPGSGKPGSEIVLTQSPGTLSLSPGERATLSCRASQSVGSSYLAWYQQKPGQAPRLLIYGAFSRATGVPDRFSGSGSGTDFTLTISRLEPEDFAVYYCQQYGSSPWTFGQGTKVEIK

SEQ ID NO: 2146 - protein, 118 aa, synthetic construct; identical to SEQ ID NO: 22
  source 1..118: note = Description of Artificial Sequence: Synthetic polypeptide; note = VH of XENP019970

SEQ ID NO: 2147 - protein, 108 aa, synthetic construct
  source 1..108: note = Description of Artificial Sequence: Synthetic polypeptide; note = VL of XENP019970
EIVLTQSPGTLSLSPGERATLSCRASQSVGSSYLAWYQQKPGQAPRLLIYGAFSRATGVPDRFSGSGSGTDFTLTISRLEPEDFAVYYCQQYGSSPWTFGQGTKVEIK

SEQ ID NO: 2148 - protein, 5 aa, synthetic construct
  source 1..5: note = Description of Artificial Sequence: Synthetic peptide; note = XENP019970 vhCDR1
SYTMH

SEQ ID NO: 2149 - protein, 17 aa, synthetic construct
  source 1..17: note = Description of Artificial Sequence: Synthetic peptide; note = XENP019970 vhCDR2
FISYDGNNKYYADSVKG

SEQ ID NO: 2150 - protein, 9 aa, synthetic construct
  source 1..9: note = Description of Artificial Sequence: Synthetic peptide; note = XENP019970 vhCDR3
TGWLGPFDY

SEQ ID NO: 2151 - protein, 12 aa, synthetic construct
  source 1..12: note = Description of Artificial Sequence: Synthetic peptide; note = XENP019970 vlCDR1
RASQSVGSSYLA

SEQ ID NO: 2152 - protein, 7 aa, synthetic construct
  source 1..7: note = Description of Artificial Sequence: Synthetic peptide; note = XENP019970 vlCDR2
GAFSRAT

SEQ ID NO: 2153 - protein, 9 aa, synthetic construct
  source 1..9: note = Description of Artificial Sequence: Synthetic peptide; note = XENP019970 vlCDR3
QQYGSSPWT

SEQ ID NO: 2154 - protein, 246 aa, synthetic construct
  source 1..246: note = Description of Artificial Sequence: Synthetic polypeptide; note = XENP019971 [CTLA-4]_H0_L0.83_scFv(GKPGS)4
QVQLVESGGGVVQPGRSLRLSCAASGFTFSSYTMHWVRQAPGKGLEWVTFISYDGNNKYYADSVKGRFTISRDNSKNTLYLQMNSLRAEDTAIYYCARTGWLGPFDYWGQGTLVTVSSGKPGSGKPGSGKPGSGKPGSEIVLTQSPGTLSLSPGERATLSCRASQSVGSSYLAWYQQKPGQAPRLLIYGAFSRATGIPARFSGSGSGTDFTLTISRLEPEDFAVYYCQQYGSSPWTFGQGTKVEIK

SEQ ID NO: 2155 - protein, 118 aa, synthetic construct; identical to SEQ ID NO: 22
  source 1..118: note = Description of Artificial Sequence: Synthetic polypeptide; note = VH of XENP019971

SEQ ID NO: 2156 - protein, 108 aa, synthetic construct
  source 1..108: note = Description of Artificial Sequence: Synthetic polypeptide; note = VL of XENP019971
EIVLTQSPGTLSLSPGERATLSCRASQSVGSSYLAWYQQKPGQAPRLLIYGAFSRATGIPARFSGSGSGTDFTLTISRLEPEDFAVYYCQQYGSSPWTFGQGTKVEIK

SEQ ID NO: 2157 - protein, 5 aa, synthetic construct
  source 1..5: note = Description of Artificial Sequence: Synthetic peptide; note = XENP019971 vhCDR1
SYTMH

SEQ ID NO: 2158 - protein, 17 aa, synthetic construct
  source 1..17: note = Description of Artificial Sequence: Synthetic peptide; note = XENP019971 vhCDR2
FISYDGNNKYYADSVKG

SEQ ID NO: 2159 - protein, 9 aa, synthetic construct
  source 1..9: note = Description of Artificial Sequence: Synthetic peptide; note = XENP019971 vhCDR3
TGWLGPFDY

SEQ ID NO: 2160 - protein, 12 aa, synthetic construct
  source 1..12: note = Description of Artificial Sequence: Synthetic peptide; note = XENP019971 vlCDR1
RASQSVGSSYLA

SEQ ID NO: 2161 - protein, 7 aa, synthetic construct
  source 1..7: note = Description of Artificial Sequence: Synthetic peptide; note = XENP019971 vlCDR2
GAFSRAT

SEQ ID NO: 2162 - protein, 9 aa, synthetic construct
  source 1..9: note = Description of Artificial Sequence: Synthetic peptide; note = XENP019971 vlCDR3
QQYGSSPWT

SEQ ID NO: 2163 - protein, 246 aa, synthetic construct
  source 1..246: note = Description of Artificial Sequence: Synthetic polypeptide; note = XENP019972 [CTLA-4]_H0_L0.84_scFv(GKPGS)4
QVQLVESGGGVVQPGRSLRLSCAASGFTFSSYTMHWVRQAPGKGLEWVTFISYDGNNKYYADSVKGRFTISRDNSKNTLYLQMNSLRAEDTAIYYCARTGWLGPFDYWGQGTLVTVSSGKPGSGKPGSGKPGSGKPGSEIVLTQSPGTLSLSPGERATLSCRASQSVGSSYLAWYQQKPGQAPRLLIYGAFSRATGIPDRFSGSGSRTDFTLTISRLEPEDFAVYYCQQYGSSPWTFGQGTKVEIK

SEQ ID NO: 2164 - protein, 118 aa, synthetic construct; identical to SEQ ID NO: 22
  source 1..118: note = Description of Artificial Sequence: Synthetic polypeptide; note = VH of XENP019972

SEQ ID NO: 2165 - protein, 108 aa, synthetic construct
  source 1..108: note = Description of Artificial Sequence: Synthetic polypeptide; note = VL of XENP019972
EIVLTQSPGTLSLSPGERATLSCRASQSVGSSYLAWYQQKPGQAPRLLIYGAFSRATGIPDRFSGSGSRTDFTLTISRLEPEDFAVYYCQQYGSSPWTFGQGTKVEIK

SEQ ID NO: 2166 - protein, 5 aa, synthetic construct
  source 1..5: note = Description of Artificial Sequence: Synthetic peptide; note = XENP019972 vhCDR1
SYTMH

SEQ ID NO: 2167 - protein, 17 aa, synthetic construct
  source 1..17: note = Description of Artificial Sequence: Synthetic peptide; note = XENP019972 vhCDR2
FISYDGNNKYYADSVKG

SEQ ID NO: 2168 - protein, 9 aa, synthetic construct
  source 1..9: note = Description of Artificial Sequence: Synthetic peptide; note = XENP019972 vhCDR3
TGWLGPFDY

SEQ ID NO: 2169 - protein, 12 aa, synthetic construct
  source 1..12: note = Description of Artificial Sequence: Synthetic peptide; note = XENP019972 vlCDR1
RASQSVGSSYLA

SEQ ID NO: 2170 - protein, 7 aa, synthetic construct
  source 1..7: note = Description of Artificial Sequence: Synthetic peptide; note = XENP019972 vlCDR2
GAFSRAT

SEQ ID NO: 2171 - protein, 9 aa, synthetic construct
  source 1..9: note = Description of Artificial Sequence: Synthetic peptide; note = XENP019972 vlCDR3
QQYGSSPWT

SEQ ID NO: 2172 - protein, 246 aa, synthetic construct
  source 1..246: note = Description of Artificial Sequence: Synthetic polypeptide; note = XENP019973 [CTLA-4]_H0_L0.85_scFv(GKPGS)4
QVQLVESGGGVVQPGRSLRLSCAASGFTFSSYTMHWVRQAPGKGLEWVTFISYDGNNKYYADSVKGRFTISRDNSKNTLYLQMNSLRAEDTAIYYCARTGWLGPFDYWGQGTLVTVSSGKPGSGKPGSGKPGSGKPGSEIVLTQSPGTLSLSPGERATLSCRASQSVGSSYLAWYQQKPGQAPRLLIYGAFSRATGIPDRFSGSGSGTEFTLTISRLEPEDFAVYYCQQYGSSPWTFGQGTKVEIK

SEQ ID NO: 2173 - protein, 118 aa, synthetic construct; identical to SEQ ID NO: 22
  source 1..118: note = Description of Artificial Sequence: Synthetic polypeptide; note = VH of XENP019973

SEQ ID NO: 2174 - protein, 108 aa, synthetic construct
  source 1..108: note = Description of Artificial Sequence: Synthetic polypeptide; note = VL of XENP019973
EIVLTQSPGTLSLSPGERATLSCRASQSVGSSYLAWYQQKPGQAPRLLIYGAFSRATGIPDRFSGSGSGTEFTLTISRLEPEDFAVYYCQQYGSSPWTFGQGTKVEIK

SEQ ID NO: 2175 - protein, 5 aa, synthetic construct
  source 1..5: note = Description of Artificial Sequence: Synthetic peptide; note = XENP019973 vhCDR1
SYTMH

SEQ ID NO: 2176 - protein, 17 aa, synthetic construct
  source 1..17: note = Description of Artificial Sequence: Synthetic peptide; note = XENP019973 vhCDR2
FISYDGNNKYYADSVKG

SEQ ID NO: 2177 - protein, 9 aa, synthetic construct
  source 1..9: note = Description of Artificial Sequence: Synthetic peptide; note = XENP019973 vhCDR3
TGWLGPFDY

SEQ ID NO: 2178 - protein, 12 aa, synthetic construct
  source 1..12: note = Description of Artificial Sequence: Synthetic peptide; note = XENP019973 vlCDR1
RASQSVGSSYLA

SEQ ID NO: 2179 - protein, 7 aa, synthetic construct
  source 1..7: note = Description of Artificial Sequence: Synthetic peptide; note = XENP019973 vlCDR2
GAFSRAT

SEQ ID NO: 2180 - protein, 9 aa, synthetic construct
  source 1..9: note = Description of Artificial Sequence: Synthetic peptide; note = XENP019973 vlCDR3
QQYGSSPWT

SEQ ID NO: 2181 - protein, 246 aa, synthetic construct
  source 1..246: note = Description of Artificial Sequence: Synthetic polypeptide; note = XENP019974 [CTLA-4]_H0_L0.86_scFv(GKPGS)4
QVQLVESGGGVVQPGRSLRLSCAASGFTFSSYTMHWVRQAPGKGLEWVTFISYDGNNKYYADSVKGRFTISRDNSKNTLYLQMNSLRAEDTAIYYCARTGWLGPFDYWGQGTLVTVSSGKPGSGKPGSGKPGSGKPGSEIVLTQSPGTLSLSPGERATLSCRASQSVGSSYLAWYQQKPGQAPRLLIYGAFSRATGIPDRFSGSGSGTDFTLKISRLEPEDFAVYYCQQYGSSPWTFGQGTKVEIK

SEQ ID NO: 2182 - protein, 118 aa, synthetic construct; identical to SEQ ID NO: 22
  source 1..118: note = Description of Artificial Sequence: Synthetic polypeptide; note = VH of XENP019974

SEQ ID NO: 2183 - protein, 108 aa, synthetic construct
  source 1..108: note = Description of Artificial Sequence: Synthetic polypeptide; note = VL of XENP019974
EIVLTQSPGTLSLSPGERATLSCRASQSVGSSYLAWYQQKPGQAPRLLIYGAFSRATGIPDRFSGSGSGTDFTLKISRLEPEDFAVYYCQQYGSSPWTFGQGTKVEIK

SEQ ID NO: 2184 - protein, 5 aa, synthetic construct
  source 1..5: note = Description of Artificial Sequence: Synthetic peptide; note = XENP019974 vhCDR1
SYTMH

SEQ ID NO: 2185 - protein, 17 aa, synthetic construct
  source 1..17: note = Description of Artificial Sequence: Synthetic peptide; note = XENP019974 vhCDR2
FISYDGNNKYYADSVKG

SEQ ID NO: 2186 - protein, 9 aa, synthetic construct
  source 1..9: note = Description of Artificial Sequence: Synthetic peptide; note = XENP019974 vhCDR3
TGWLGPFDY

SEQ ID NO: 2187 - protein, 12 aa, synthetic construct
  source 1..12: note = Description of Artificial Sequence: Synthetic peptide; note = XENP019974 vlCDR1
RASQSVGSSYLA

SEQ ID NO: 2188 - protein, 7 aa, synthetic construct
  source 1..7: note = Description of Artificial Sequence: Synthetic peptide; note = XENP019974 vlCDR2
GAFSRAT

SEQ ID NO: 2189 - protein, 9 aa, synthetic construct
  source 1..9: note = Description of Artificial Sequence: Synthetic peptide; note = XENP019974 vlCDR3
QQYGSSPWT

SEQ ID NO: 2190 - protein, 246 aa, synthetic construct
  source 1..246: note = Description of Artificial Sequence: Synthetic polypeptide; note = XENP019975 [CTLA-4]_H0_L0.87_scFv(GKPGS)4
QVQLVESGGGVVQPGRSLRLSCAASGFTFSSYTMHWVRQAPGKGLEWVTFISYDGNNKYYADSVKGRFTISRDNSKNTLYLQMNSLRAEDTAIYYCARTGWLGPFDYWGQGTLVTVSSGKPGSGKPGSGKPGSGKPGSEIVLTQSPGTLSLSPGERATLSCRASQSVGSSYLAWYQQKPGQAPRLLIYGAFSRATGIPDRFSGSGSGTDFTLTISSLEPEDFAVYYCQQYGSSPWTFGQGTKVEIK

SEQ ID NO: 2191 - protein, 118 aa, synthetic construct; identical to SEQ ID NO: 22
  source 1..118: note = Description of Artificial Sequence: Synthetic polypeptide; note = VH of XENP019975

SEQ ID NO: 2192 - protein, 108 aa, synthetic construct
  source 1..108: note = Description of Artificial Sequence: Synthetic polypeptide; note = VL of XENP019975
EIVLTQSPGTLSLSPGERATLSCRASQSVGSSYLAWYQQKPGQAPRLLIYGAFSRATGIPDRFSGSGSGTDFTLTISSLEPEDFAVYYCQQYGSSPWTFGQGTKVEIK

SEQ ID NO: 2193 - protein, 5 aa, synthetic construct
  source 1..5: note = Description of Artificial Sequence: Synthetic peptide; note = XENP019975 vhCDR1
SYTMH

SEQ ID NO: 2194 - protein, 17 aa, synthetic construct
  source 1..17: note = Description of Artificial Sequence: Synthetic peptide; note = XENP019975 vhCDR2
FISYDGNNKYYADSVKG

SEQ ID NO: 2195 - protein, 9 aa, synthetic construct
  source 1..9: note = Description of Artificial Sequence: Synthetic peptide; note = XENP019975 vhCDR3
TGWLGPFDY

SEQ ID NO: 2196 - protein, 12 aa, synthetic construct
  source 1..12: note = Description of Artificial Sequence: Synthetic peptide; note = XENP019975 vlCDR1
RASQSVGSSYLA

SEQ ID NO: 2197 - protein, 7 aa, synthetic construct
  source 1..7: note = Description of Artificial Sequence: Synthetic peptide; note = XENP019975 vlCDR2
GAFSRAT

SEQ ID NO: 2198 - protein, 9 aa, synthetic construct
  source 1..9: note = Description of Artificial Sequence: Synthetic peptide; note = XENP019975 vlCDR3
QQYGSSPWT

SEQ ID NO: 2199 - protein, 246 aa, synthetic construct
  source 1..246: note = Description of Artificial Sequence: Synthetic polypeptide; note = XENP019976 [CTLA-4]_H0_L0.88_scFv(GKPGS)4
QVQLVESGGGVVQPGRSLRLSCAASGFTFSSYTMHWVRQAPGKGLEWVTFISYDGNNKYYADSVKGRFTISRDNSKNTLYLQMNSLRAEDTAIYYCARTGWLGPFDYWGQGTLVTVSSGKPGSGKPGSGKPGSGKPGSEIVLTQSPGTLSLSPGERATLSCRASQSVGSSYLAWYQQKPGQAPRLLIYGAFSRATGIPDRFSGSGSGTDFTLTISSLQSEDFAVYYCQQYGSSPWTFGQGTKVEIK

SEQ ID NO: 2200 - protein, 118 aa, synthetic construct; identical to SEQ ID NO: 22
  source 1..118: note = Description of Artificial Sequence: Synthetic polypeptide; note = VH of XENP019976

SEQ ID NO: 2201 - protein, 108 aa, synthetic construct
  source 1..108: note = Description of Artificial Sequence: Synthetic polypeptide; note = VL of XENP019976
EIVLTQSPGTLSLSPGERATLSCRASQSVGSSYLAWYQQKPGQAPRLLIYGAFSRATGIPDRFSGSGSGTDFTLTISSLQSEDFAVYYCQQYGSSPWTFGQGTKVEIK

SEQ ID NO: 2202 - protein, 5 aa, synthetic construct
  source 1..5: note = Description of Artificial Sequence: Synthetic peptide; note = XENP019976 vhCDR1
SYTMH

SEQ ID NO: 2203 - protein, 17 aa, synthetic construct
  source 1..17: note = Description of Artificial Sequence: Synthetic peptide; note = XENP019976 vhCDR2
FISYDGNNKYYADSVKG

SEQ ID NO: 2204 - protein, 9 aa, synthetic construct
  source 1..9: note = Description of Artificial Sequence: Synthetic peptide; note = XENP019976 vhCDR3
TGWLGPFDY

SEQ ID NO: 2205 - protein, 12 aa, synthetic construct
  source 1..12: note = Description of Artificial Sequence: Synthetic peptide; note = XENP019976 vlCDR1
RASQSVGSSYLA

SEQ ID NO: 2206 - protein, 7 aa, synthetic construct
  source 1..7: note = Description of Artificial Sequence: Synthetic peptide; note = XENP019976 vlCDR2
GAFSRAT

SEQ ID NO: 2207 - protein, 9 aa, synthetic construct
  source 1..9: note = Description of Artificial Sequence: Synthetic peptide; note = XENP019976 vlCDR3
QQYGSSPWT

SEQ ID NO: 2208 - protein, 246 aa, synthetic construct
  source 1..246: note = Description of Artificial Sequence: Synthetic polypeptide; note = XENP019977 [CTLA-4]_H0_L0.89_scFv(GKPGS)4
QVQLVESGGGVVQPGRSLRLSCAASGFTFSSYTMHWVRQAPGKGLEWVTFISYDGNNKYYADSVKGRFTISRDNSKNTLYLQMNSLRAEDTAIYYCARTGWLGPFDYWGQGTLVTVSSGKPGSGKPGSGKPGSGKPGSEIVLTQSPGTLSLSPGERATLSCRASQSVGSSYLAWYQQKPGQAPRLLIYGAFSRATGIPDRFSGSGSGTDFTLTISRVEPEDFAVYYCQQYGSSPWTFGQGTKVEIK

SEQ ID NO: 2209 - protein, 118 aa, synthetic construct; identical to SEQ ID NO: 22
  source 1..118: note = Description of Artificial Sequence: Synthetic polypeptide; note = VH of XENP019977

SEQ ID NO: 2210 - protein, 108 aa, synthetic construct
  source 1..108: note = Description of Artificial Sequence: Synthetic polypeptide; note = VL of XENP019977
EIVLTQSPGTLSLSPGERATLSCRASQSVGSSYLAWYQQKPGQAPRLLIYGAFSRATGIPDRFSGSGSGTDFTLTISRVEPEDFAVYYCQQYGSSPWTFGQGTKVEIK

SEQ ID NO: 2211 - protein, 5 aa, synthetic construct
  source 1..5: note = Description of Artificial Sequence: Synthetic peptide; note = XENP019977 vhCDR1
SYTMH

SEQ ID NO: 2212 - protein, 17 aa, synthetic construct
  source 1..17: note = Description of Artificial Sequence: Synthetic peptide; note = XENP019977 vhCDR2
FISYDGNNKYYADSVKG

SEQ ID NO: 2213 - protein, 9 aa, synthetic construct
  source 1..9: note = Description of Artificial Sequence: Synthetic peptide; note = XENP019977 vhCDR3
TGWLGPFDY

SEQ ID NO: 2214 - protein, 12 aa, synthetic construct
  source 1..12: note = Description of Artificial Sequence: Synthetic peptide; note = XENP019977 vlCDR1
RASQSVGSSYLA

SEQ ID NO: 2215 - protein, 7 aa, synthetic construct
  source 1..7: note = Description of Artificial Sequence: Synthetic peptide; note = XENP019977 vlCDR2
GAFSRAT

SEQ ID NO: 2216 - protein, 9 aa, synthetic construct
  source 1..9: note = Description of Artificial Sequence: Synthetic peptide; note = XENP019977 vlCDR3
QQYGSSPWT

SEQ ID NO: 2217 - protein, 246 aa, synthetic construct
  source 1..246: note = Description of Artificial Sequence: Synthetic polypeptide; note = XENP019978 [CTLA-4]_H0_L0.90_scFv(GKPGS)4
QVQLVESGGGVVQPGRSLRLSCAASGFTFSSYTMHWVRQAPGKGLEWVTFISYDGNNKYYADSVKGRFTISRDNSKNTLYLQMNSLRAEDTAIYYCARTGWLGPFDYWGQGTLVTVSSGKPGSGKPGSGKPGSGKPGSEIVLTQSPGTLSLSPGERATLSCRASQSVGSSYLAWYQQKPGQAPRLLIYGAFSRATGIPDRFSGSGSGTDFTLTISRLQPEDFAVYYCQQYGSSPWTFGQGTKVEIK

SEQ ID NO: 2218 - protein, 118 aa, synthetic construct; identical to SEQ ID NO: 22
  source 1..118: note = Description of Artificial Sequence: Synthetic polypeptide; note = VH of XENP019978

SEQ ID NO: 2219 - protein, 108 aa, synthetic construct
  source 1..108: note = Description of Artificial Sequence: Synthetic polypeptide; note = VL of XENP019978
EIVLTQSPGTLSLSPGERATLSCRASQSVGSSYLAWYQQKPGQAPRLLIYGAFSRATGIPDRFSGSGSGTDFTLTISRLQPEDFAVYYCQQYGSSPWTFGQGTKVEIK

SEQ ID NO: 2220 - protein, 5 aa, synthetic construct
  source 1..5: note = Description of Artificial Sequence: Synthetic peptide; note = XENP019978 vhCDR1
SYTMH

SEQ ID NO: 2221 - protein, 17 aa, synthetic construct
  source 1..17: note = Description of Artificial Sequence: Synthetic peptide; note = XENP019978 vhCDR2
FISYDGNNKYYADSVKG

SEQ ID NO: 2222 - protein, 9 aa, synthetic construct
  source 1..9: note = Description of Artificial Sequence: Synthetic peptide; note = XENP019978 vhCDR3
TGWLGPFDY

SEQ ID NO: 2223 - protein, 12 aa, synthetic construct
  source 1..12: note = Description of Artificial Sequence: Synthetic peptide; note = XENP019978 vlCDR1
RASQSVGSSYLA

SEQ ID NO: 2224 - protein, 7 aa, synthetic construct
  source 1..7: note = Description of Artificial Sequence: Synthetic peptide; note = XENP019978 vlCDR2
GAFSRAT

SEQ ID NO: 2225 - protein, 9 aa, synthetic construct
  source 1..9: note = Description of Artificial Sequence: Synthetic peptide; note = XENP019978 vlCDR3
QQYGSSPWT

SEQ ID NO: 2226 - protein, 246 aa, synthetic construct
  source 1..246: note = Description of Artificial Sequence: Synthetic polypeptide; note = XENP019979 [CTLA-4]_H0_L0.91_scFv(GKPGS)4
QVQLVESGGGVVQPGRSLRLSCAASGFTFSSYTMHWVRQAPGKGLEWVTFISYDGNNKYYADSVKGRFTISRDNSKNTLYLQMNSLRAEDTAIYYCARTGWLGPFDYWGQGTLVTVSSGKPGSGKPGSGKPGSGKPGSEIVLTQSPGTLSLSPGERATLSCRASQSVGSSYLAWYQQKPGQAPRLLIYGAFSRATGIPDRFSGSGSGTDFTLTISRLESEDFAVYYCQQYGSSPWTFGQGTKVEIK

SEQ ID NO: 2227 - protein, 118 aa, synthetic construct; identical to SEQ ID NO: 22
  source 1..118: note = Description of Artificial Sequence: Synthetic polypeptide; note = VH of XENP019979

SEQ ID NO: 2228 - protein, 108 aa, synthetic construct
  source 1..108: note = Description of Artificial Sequence: Synthetic polypeptide; note = VL of XENP019979
EIVLTQSPGTLSLSPGERATLSCRASQSVGSSYLAWYQQKPGQAPRLLIYGAFSRATGIPDRFSGSGSGTDFTLTISRLESEDFAVYYCQQYGSSPWTFGQGTKVEIK

SEQ ID NO: 2229 - protein, 5 aa, synthetic construct
  source 1..5: note = Description of Artificial Sequence: Synthetic peptide; note = XENP019979 vhCDR1
SYTMH

SEQ ID NO: 2230 - protein, 17 aa, synthetic construct
  source 1..17: note = Description of Artificial Sequence: Synthetic peptide; note = XENP019979 vhCDR2
FISYDGNNKYYADSVKG

SEQ ID NO: 2231 - protein, 9 aa, synthetic construct
  source 1..9: note = Description of Artificial Sequence: Synthetic peptide; note = XENP019979 vhCDR3
TGWLGPFDY

SEQ ID NO: 2232 - protein, 12 aa, synthetic construct
  source 1..12: note = Description of Artificial Sequence: Synthetic peptide; note = XENP019979 vlCDR1
RASQSVGSSYLA

SEQ ID NO: 2233 - protein, 7 aa, synthetic construct
  source 1..7: note = Description of Artificial Sequence: Synthetic peptide; note = XENP019979 vlCDR2
GAFSRAT

SEQ ID NO: 2234 - protein, 9 aa, synthetic construct
  source 1..9: note = Description of Artificial Sequence: Synthetic peptide; note = XENP019979 vlCDR3
QQYGSSPWT

SEQ ID NO: 2235 - protein, 246 aa, synthetic construct
  source 1..246: note = Description of Artificial Sequence: Synthetic polypeptide; note = XENP019980 [CTLA-4]_H0_L0.92_scFv(GKPGS)4
QVQLVESGGGVVQPGRSLRLSCAASGFTFSSYTMHWVRQAPGKGLEWVTFISYDGNNKYYADSVKGRFTISRDNSKNTLYLQMNSLRAEDTAIYYCARTGWLGPFDYWGQGTLVTVSSGKPGSGKPGSGKPGSGKPGSEIVLTQSPGTLSLSPGERATLSCRASQSVGSSYLAWYQQKPGQAPRLLIYGAFSRATGIPDRFSGSGSGTDFTLTISRLEPQDFAVYYCQQYGSSPWTFGQGTKVEIK

SEQ ID NO: 2236 - protein, 118 aa, synthetic construct; identical to SEQ ID NO: 22
  source 1..118: note = Description of Artificial Sequence: Synthetic polypeptide; note = VH of XENP019980

SEQ ID NO: 2237 - protein, 108 aa, synthetic construct
  source 1..108: note = Description of Artificial Sequence: Synthetic polypeptide; note = VL of XENP019980
EIVLTQSPGTLSLSPGERATLSCRASQSVGSSYLAWYQQKPGQAPRLLIYGAFSRATGIPDRFSGSGSGTDFTLTISRLEPQDFAVYYCQQYGSSPWTFGQGTKVEIK

SEQ ID NO: 2238 - protein, 5 aa, synthetic construct
  source 1..5: note = Description of Artificial Sequence: Synthetic peptide; note = XENP019980 vhCDR1
SYTMH

SEQ ID NO: 2239 - protein, 17 aa, synthetic construct
  source 1..17: note = Description of Artificial Sequence: Synthetic peptide; note = XENP019980 vhCDR2
FISYDGNNKYYADSVKG

SEQ ID NO: 2240 - protein, 9 aa, synthetic construct
  source 1..9: note = Description of Artificial Sequence: Synthetic peptide; note = XENP019980 vhCDR3
TGWLGPFDY

SEQ ID NO: 2241 - protein, 12 aa, synthetic construct
  source 1..12: note = Description of Artificial Sequence: Synthetic peptide; note = XENP019980 vlCDR1
RASQSVGSSYLA

SEQ ID NO: 2242 - protein, 7 aa, synthetic construct
  source 1..7: note = Description of Artificial Sequence: Synthetic peptide; note = XENP019980 vlCDR2
GAFSRAT

SEQ ID NO: 2243 - protein, 9 aa, synthetic construct
  source 1..9: note = Description of Artificial Sequence: Synthetic peptide; note = XENP019980 vlCDR3
QQYGSSPWT

SEQ ID NO: 2244 - protein, 246 aa, synthetic construct
  source 1..246: note = Description of Artificial Sequence: Synthetic polypeptide; note = XENP019981 [CTLA-4]_H0_L0.93_scFv(GKPGS)4
QVQLVESGGGVVQPGRSLRLSCAASGFTFSSYTMHWVRQAPGKGLEWVTFISYDGNNKYYADSVKGRFTISRDNSKNTLYLQMNSLRAEDTAIYYCARTGWLGPFDYWGQGTLVTVSSGKPGSGKPGSGKPGSGKPGSEIVLTQSPGTLSLSPGERATLSCRASQSVGSSYLAWYQQKPGQAPRLLIYGAFSRATGIPDRFSGSGSGTDFTLTISRLEPEDFAVYYCKQYGSSPWTFGQGTKVEIK

SEQ ID NO: 2245 - protein, 118 aa, synthetic construct; identical to SEQ ID NO: 22
  source 1..118: note = Description of Artificial Sequence: Synthetic polypeptide; note = VH of XENP019981

SEQ ID NO: 2246 - protein, 108 aa, synthetic construct
  source 1..108: note = Description of Artificial Sequence: Synthetic polypeptide; note = VL of XENP019981
EIVLTQSPGTLSLSPGERATLSCRASQSVGSSYLAWYQQKPGQAPRLLIYGAFSRATGIPDRFSGSGSGTDFTLTISRLEPEDFAVYYCKQYGSSPWTFGQGTKVEIK

SEQ ID NO: 2247 - protein, 5 aa, synthetic construct
  source 1..5: note = Description of Artificial Sequence: Synthetic peptide; note = XENP019981 vhCDR1
SYTMH

SEQ ID NO: 2248 - protein, 17 aa, synthetic construct
  source 1..17: note = Description of Artificial Sequence: Synthetic peptide; note = XENP019981 vhCDR2
FISYDGNNKYYADSVKG

SEQ ID NO: 2249 - protein, 9 aa, synthetic construct
  source 1..9: note = Description of Artificial Sequence: Synthetic peptide; note = XENP019981 vhCDR3
TGWLGPFDY

SEQ ID NO: 2250 - protein, 12 aa, synthetic construct
  source 1..12: note = Description of Artificial Sequence: Synthetic peptide; note = XENP019981 vlCDR1
RASQSVGSSYLA

SEQ ID NO: 2251 - protein, 7 aa, synthetic construct
  source 1..7: note = Description of Artificial Sequence: Synthetic peptide; note = XENP019981 vlCDR2
GAFSRAT

SEQ ID NO: 2252 - protein, 9 aa, synthetic construct
  source 1..9: note = Description of Artificial Sequence: Synthetic peptide; note = XENP019981 vlCDR3
KQYGSSPWT

SEQ ID NO: 2253 - protein, 246 aa, synthetic construct
  source 1..246: note = Description of Artificial Sequence: Synthetic polypeptide; note = XENP019982 [CTLA-4]_H0_L0.94_scFv(GKPGS)4
QVQLVESGGGVVQPGRSLRLSCAASGFTFSSYTMHWVRQAPGKGLEWVTFISYDGNNKYYADSVKGRFTISRDNSKNTLYLQMNSLRAEDTAIYYCARTGWLGPFDYWGQGTLVTVSSGKPGSGKPGSGKPGSGKPGSEIVLTQSPGTLSLSPGERATLSCRASQSVGSSYLAWYQQKPGQAPRLLIYGAFSRATGIPDRFSGSGSGTDFTLTISRLEPEDFAVYYCLQYGSSPWTFGQGTKVEIK

SEQ ID NO: 2254 - protein, 118 aa, synthetic construct; identical to SEQ ID NO: 22
  source 1..118: note = Description of Artificial Sequence: Synthetic polypeptide; note = VH of XENP019982

SEQ ID NO: 2255 - protein, 108 aa, synthetic construct
  source 1..108: note = Description of Artificial Sequence: Synthetic polypeptide; note = VL of XENP019982
EIVLTQSPGTLSLSPGERATLSCRASQSVGSSYLAWYQQKPGQAPRLLIYGAFSRATGIPDRFSGSGSGTDFTLTISRLEPEDFAVYYCLQYGSSPWTFGQGTKVEIK

SEQ ID NO: 2256 - protein, 5 aa, synthetic construct
  source 1..5: note = Description of Artificial Sequence: Synthetic peptide; note = XENP019982 vhCDR1
SYTMH

SEQ ID NO: 2257 - protein, 17 aa, synthetic construct
  source 1..17: note = Description of Artificial Sequence: Synthetic peptide; note = XENP019982 vhCDR2
FISYDGNNKYYADSVKG

SEQ ID NO: 2258 - protein, 9 aa, synthetic construct
  source 1..9: note = Description of Artificial Sequence: Synthetic peptide; note = XENP019982 vhCDR3
TGWLGPFDY

SEQ ID NO: 2259 - protein, 12 aa, synthetic construct
  source 1..12: note = Description of Artificial Sequence: Synthetic peptide; note = XENP019982 vlCDR1
RASQSVGSSYLA

SEQ ID NO: 2260 - protein, 7 aa, synthetic construct
  source 1..7: note = Description of Artificial Sequence: Synthetic peptide; note = XENP019982 vlCDR2
GAFSRAT

SEQ ID NO: 2261 - protein, 9 aa, synthetic construct
  source 1..9: note = Description of Artificial Sequence: Synthetic peptide; note = XENP019982 vlCDR3
LQYGSSPWT

SEQ ID NO: 2262 - protein, 246 aa, synthetic construct
  source 1..246: note = Description of Artificial Sequence: Synthetic polypeptide; note = XENP019983 [CTLA-4]_H0_L0.95_scFv(GKPGS)4
QVQLVESGGGVVQPGRSLRLSCAASGFTFSSYTMHWVRQAPGKGLEWVTFISYDGNNKYYADSVKGRFTISRDNSKNTLYLQMNSLRAEDTAIYYCARTGWLGPFDYWGQGTLVTVSSGKPGSGKPGSGKPGSGKPGSEIVLTQSPGTLSLSPGERATLSCRASQSVGSSYLAWYQQKPGQAPRLLIYGAFSRATGIPDRFSGSGSGTDFTLTISRLEPEDFAVYYCMQYGSSPWTFGQGTKVEIK

SEQ ID NO: 2263 - protein, 118 aa, synthetic construct; identical to SEQ ID NO: 22
  source 1..118: note = Description of Artificial Sequence: Synthetic polypeptide; note = VH of XENP019983

SEQ ID NO: 2264 - protein, 108 aa, synthetic construct
  source 1..108: note = Description of Artificial Sequence: Synthetic polypeptide; note = VL of XENP019983
EIVLTQSPGTLSLSPGERATLSCRASQSVGSSYLAWYQQKPGQAPRLLIYGAFSRATGIPDRFSGSGSGTDFTLTISRLEPEDFAVYYCMQYGSSPWTFGQGTKVEIK

SEQ ID NO: 2265 - protein, 5 aa, synthetic construct
  source 1..5: note = Description of Artificial Sequence: Synthetic peptide; note = XENP019983 vhCDR1
SYTMH

SEQ ID NO: 2266 - protein, 17 aa, synthetic construct
  source 1..17: note = Description of Artificial Sequence: Synthetic peptide; note = XENP019983 vhCDR2
FISYDGNNKYYADSVKG

SEQ ID NO: 2267 - protein, 9 aa, synthetic construct
  source 1..9: note = Description of Artificial Sequence: Synthetic peptide; note = XENP019983 vhCDR3
TGWLGPFDY

SEQ ID NO: 2268 - protein, 12 aa, synthetic construct
  source 1..12: note = Description of Artificial Sequence: Synthetic peptide; note = XENP019983 vlCDR1
RASQSVGSSYLA

SEQ ID NO: 2269 - protein, 7 aa, synthetic construct
  source 1..7: note = Description of Artificial Sequence: Synthetic peptide; note = XENP019983 vlCDR2
GAFSRAT

SEQ ID NO: 2270 - protein, 9 aa, synthetic construct
  source 1..9: note = Description of Artificial Sequence: Synthetic peptide; note = XENP019983 vlCDR3
MQYGSSPWT

SEQ ID NO: 2271 - protein, 246 aa, synthetic construct
  source 1..246: note = Description of Artificial Sequence: Synthetic polypeptide; note = XENP019984 [CTLA-4]_H0_L0.96_scFv(GKPGS)4
QVQLVESGGGVVQPGRSLRLSCAASGFTFSSYTMHWVRQAPGKGLEWVTFISYDGNNKYYADSVKGRFTISRDNSKNTLYLQMNSLRAEDTAIYYCARTGWLGPFDYWGQGTLVTVSSGKPGSGKPGSGKPGSGKPGSEIVLTQSPGTLSLSPGERATLSCRASQSVGSSYLAWYQQKPGQAPRLLIYGAFSRATGIPDRFSGSGSGTDFTLTISRLEPEDFAVYYCQSYGSSPWTFGQGTKVEIK

SEQ ID NO: 2272 - protein, 118 aa, synthetic construct; identical to SEQ ID NO: 22
  source 1..118: note = Description of Artificial Sequence: Synthetic polypeptide; note = VH of XENP019984

SEQ ID NO: 2273 - protein, 108 aa, synthetic construct
  source 1..108: note = Description of Artificial Sequence: Synthetic polypeptide; note = VL of XENP019984
EIVLTQSPGTLSLSPGERATLSCRASQSVGSSYLAWYQQKPGQAPRLLIYGAFSRATGIPDRFSGSGSGTDFTLTISRLEPEDFAVYYCQSYGSSPWTFGQGTKVEIK

SEQ ID NO: 2274 - protein, 5 aa, synthetic construct
  source 1..5: note = Description of Artificial Sequence: Synthetic peptide; note = XENP019984 vhCDR1
SYTMH

SEQ ID NO: 2275 - protein, 17 aa, synthetic construct
  source 1..17: note = Description of Artificial Sequence: Synthetic peptide; note = XENP019984 vhCDR2
FISYDGNNKYYADSVKG

SEQ ID NO: 2276 - protein, 9 aa, synthetic construct
  source 1..9: note = Description of Artificial Sequence: Synthetic peptide; note = XENP019984 vhCDR3
TGWLGPFDY

SEQ ID NO: 2277 - protein, 12 aa, synthetic construct
  source 1..12: note = Description of Artificial Sequence: Synthetic peptide; note = XENP019984 vlCDR1
RASQSVGSSYLA

SEQ ID NO: 2278 - protein, 7 aa, synthetic construct
  source 1..7: note = Description of Artificial Sequence: Synthetic peptide; note = XENP019984 vlCDR2
GAFSRAT

SEQ ID NO: 2279 - protein, 9 aa, synthetic construct
  source 1..9: note = Description of Artificial Sequence: Synthetic peptide; note = XENP019984 vlCDR3
QSYGSSPWT

SEQ ID NO: 2280 - protein, 246 aa, synthetic construct
  source 1..246: note = Description of Artificial Sequence: Synthetic polypeptide; note = XENP019985 [CTLA-4]_H0_L0.97_scFv(GKPGS)4
QVQLVESGGGVVQPGRSLRLSCAASGFTFSSYTMHWVRQAPGKGLEWVTFISYDGNNKYYADSVKGRFTISRDNSKNTLYLQMNSLRAEDTAIYYCARTGWLGPFDYWGQGTLVTVSSGKPGSGKPGSGKPGSGKPGSEIVLTQSPGTLSLSPGERATLSCRASQSVGSSYLAWYQQKPGQAPRLLIYGAFSRATGIPDRFSGSGSGTDFTLTISRLEPEDFAVYYCQQAGSSPWTFGQGTKVEIK

SEQ ID NO: 2281 - protein, 118 aa, synthetic construct; identical to SEQ ID NO: 22
  source 1..118: note = Description of Artificial Sequence: Synthetic polypeptide; note = VH of XENP019985

SEQ ID NO: 2282 - protein, 108 aa, synthetic construct
  source 1..108: note = Description of Artificial Sequence: Synthetic polypeptide; note = VL of XENP019985
EIVLTQSPGTLSLSPGERATLSCRASQSVGSSYLAWYQQKPGQAPRLLIYGAFSRATGIPDRFSGSGSGTDFTLTISRLEPEDFAVYYCQQAGSSPWTFGQGTKVEIK

SEQ ID NO: 2283 - protein, 5 aa, synthetic construct
  source 1..5: note = Description of Artificial Sequence: Synthetic peptide; note = XENP019985 vhCDR1
SYTMH

SEQ ID NO: 2284 - protein, 17 aa, synthetic construct
  source 1..17: note = Description of Artificial Sequence: Synthetic peptide; note = XENP019985 vhCDR2
FISYDGNNKYYADSVKG

SEQ ID NO: 2285 - protein, 9 aa, synthetic construct
  source 1..9: note = Description of Artificial Sequence: Synthetic peptide; note = XENP019985 vhCDR3
TGWLGPFDY

SEQ ID NO: 2286 - protein, 12 aa, synthetic construct
  source 1..12: note = Description of Artificial Sequence: Synthetic peptide; note = XENP019985 vlCDR1
RASQSVGSSYLA

SEQ ID NO: 2287 - protein, 7 aa, synthetic construct
  source 1..7: note = Description of Artificial Sequence: Synthetic peptide; note = XENP019985 vlCDR2
GAFSRAT

SEQ ID NO: 2288 - protein, 9 aa, synthetic construct
  source 1..9: note = Description of Artificial Sequence: Synthetic peptide; note = XENP019985 vlCDR3
QQAGSSPWT

SEQ ID NO: 2289 - protein, 246 aa, synthetic construct
  source 1..246: note = Description of Artificial Sequence: Synthetic polypeptide; note = XENP019986 [CTLA-4]_H0_L0.98_scFv(GKPGS)4
QVQLVESGGGVVQPGRSLRLSCAASGFTFSSYTMHWVRQAPGKGLEWVTFISYDGNNKYYADSVKGRFTISRDNSKNTLYLQMNSLRAEDTAIYYCARTGWLGPFDYWGQGTLVTVSSGKPGSGKPGSGKPGSGKPGSEIVLTQSPGTLSLSPGERATLSCRASQSVGSSYLAWYQQKPGQAPRLLIYGAFSRATGIPDRFSGSGSGTDFTLTISRLEPEDFAVYYCQQFGSSPWTFGQGTKVEIK

SEQ ID NO: 2290 - protein, 118 aa, synthetic construct; identical to SEQ ID NO: 22
  source 1..118: note = Description of Artificial Sequence: Synthetic polypeptide; note = VH of XENP019986

SEQ ID NO: 2291 - protein, 108 aa, synthetic construct
  source 1..108: note = Description of Artificial Sequence: Synthetic polypeptide; note = VL of XENP019986
EIVLTQSPGTLSLSPGERATLSCRASQSVGSSYLAWYQQKPGQAPRLLIYGAFSRATGIPDRFSGSGSGTDFTLTISRLEPEDFAVYYCQQFGSSPWTFGQGTKVEIK

SEQ ID NO: 2292 - protein, 5 aa, synthetic construct
  source 1..5: note = Description of Artificial Sequence: Synthetic peptide; note = XENP019986 vhCDR1
SYTMH

SEQ ID NO: 2293 - protein, 17 aa, synthetic construct
  source 1..17: note = Description of Artificial Sequence: Synthetic peptide; note = XENP019986 vhCDR2
FISYDGNNKYYADSVKG

SEQ ID NO: 2294 - protein, 9 aa, synthetic construct
  source 1..9: note = Description of Artificial Sequence: Synthetic peptide; note = XENP019986 vhCDR3
TGWLGPFDY

SEQ ID NO: 2295 - protein, 12 aa, synthetic construct
  source 1..12: note = Description of Artificial Sequence: Synthetic peptide; note = XENP019986 vlCDR1
RASQSVGSSYLA

SEQ ID NO: 2296 - protein, 7 aa, synthetic construct
  source 1..7: note = Description of Artificial Sequence: Synthetic peptide; note = XENP019986 vlCDR2
GAFSRAT

SEQ ID NO: 2297 - protein, 9 aa, synthetic construct
  source 1..9: note = Description of Artificial Sequence: Synthetic peptide; note = XENP019986 vlCDR3
QQFGSSPWT

SEQ ID NO: 2298 - protein, 246 aa, synthetic construct
  source 1..246: note = Description of Artificial Sequence: Synthetic polypeptide; note = XENP019987 [CTLA-4]_H0_L0.99_scFv(GKPGS)4
QVQLVESGGGVVQPGRSLRLSCAASGFTFSSYTMHWVRQAPGKGLEWVTFISYDGNNKYYADSVKGRFTISRDNSKNTLYLQMNSLRAEDTAIYYCARTGWLGPFDYWGQGTLVTVSSGKPGSGKPGSGKPGSGKPGSEIVLTQSPGTLSLSPGERATLSCRASQSVGSSYLAWYQQKPGQAPRLLIYGAFSRATGIPDRFSGSGSGTDFTLTISRLEPEDFAVYYCQQHGSSPWTFGQGTKVEIK

SEQ ID NO: 2299 - protein, 118 aa, synthetic construct; identical to SEQ ID NO: 22
  source 1..118: note = Description of Artificial Sequence: Synthetic polypeptide; note = VH of XENP019987

SEQ ID NO: 2300 - protein, 108 aa, synthetic construct
  source 1..108: note = Description of Artificial Sequence: Synthetic polypeptide; note = VL of XENP019987
EIVLTQSPGTLSLSPGERATLSCRASQSVGSSYLAWYQQKPGQAPRLLIYGAFSRATGIPDRFSGSGSGTDFTLTISRLEPEDFAVYYCQQHGSSPWTFGQGTKVEIK

SEQ ID NO: 2301 - protein, 5 aa, synthetic construct
  source 1..5: note = Description of Artificial Sequence: Synthetic peptide; note = XENP019987 vhCDR1
SYTMH

SEQ ID NO: 2302 - protein, 17 aa, synthetic construct
  source 1..17: note = Description of Artificial Sequence: Synthetic peptide; note = XENP019987 vhCDR2
FISYDGNNKYYADSVKG

SEQ ID NO: 2303 - protein, 9 aa, synthetic construct
  source 1..9: note = Description of Artificial Sequence: Synthetic peptide; note = XENP019987 vhCDR3
TGWLGPFDY

SEQ ID NO: 2304 - protein, 12 aa, synthetic construct
  source 1..12: note = Description of Artificial Sequence: Synthetic peptide; note = XENP019987 vlCDR1
RASQSVGSSYLA

SEQ ID NO: 2305 - protein, 7 aa, synthetic construct
  source 1..7: note = Description of Artificial Sequence: Synthetic peptide; note = XENP019987 vlCDR2
GAFSRAT

SEQ ID NO: 2306 - protein, 9 aa, synthetic construct
  source 1..9: note = Description of Artificial Sequence: Synthetic peptide; note = XENP019987 vlCDR3
QQHGSSPWT

SEQ ID NO: 2307 - protein, 246 aa, synthetic construct
  source 1..246: note = Description of Artificial Sequence: Synthetic polypeptide; note = XENP019988 [CTLA-4]_H0_L0.100_scFv(GKPGS)4
QVQLVESGGGVVQPGRSLRLSCAASGFTFSSYTMHWVRQAPGKGLEWVTFISYDGNNKYYADSVKGRFTISRDNSKNTLYLQMNSLRAEDTAIYYCARTGWLGPFDYWGQGTLVTVSSGKPGSGKPGSGKPGSGKPGSEIVLTQSPGTLSLSPGERATLSCRASQSVGSSYLAWYQQKPGQAPRLLIYGAFSRATGIPDRFSGSGSGTDFTLTISRLEPEDFAVYYCQQLGSSPWTFGQGTKVEIK

SEQ ID NO: 2308 - protein, 118 aa, synthetic construct; identical to SEQ ID NO: 22
  source 1..118: note = Description of Artificial Sequence: Synthetic polypeptide; note = VH of XENP019988

SEQ ID NO: 2309 - protein, 108 aa, synthetic construct
  source 1..108: note = Description of Artificial Sequence: Synthetic polypeptide; note = VL of XENP019988
EIVLTQSPGTLSLSPGERATLSCRASQSVGSSYLAWYQQKPGQAPRLLIYGAFSRATGIPDRFSGSGSGTDFTLTISRLEPEDFAVYYCQQLGSSPWTFGQGTKVEIK

SEQ ID NO: 2310 - protein, 5 aa, synthetic construct
  source 1..5: note = Description of Artificial Sequence: Synthetic peptide; note = XENP019988 vhCDR1
SYTMH

SEQ ID NO: 2311 - protein, 17 aa, synthetic construct
  source 1..17: note = Description of Artificial Sequence: Synthetic peptide; note = XENP019988 vhCDR2
FISYDGNNKYYADSVKG

SEQ ID NO: 2312 - protein, 9 aa, synthetic construct
  source 1..9: note = Description of Artificial Sequence: Synthetic peptide; note = XENP019988 vhCDR3
TGWLGPFDY

SEQ ID NO: 2313 - protein, 12 aa, synthetic construct
  source 1..12: note = Description of Artificial Sequence: Synthetic peptide; note = XENP019988 vlCDR1
RASQSVGSSYLA

SEQ ID NO: 2314 - protein, 7 aa, synthetic construct
  source 1..7: note = Description of Artificial Sequence: Synthetic peptide; note = XENP019988 vlCDR2
GAFSRAT

SEQ ID NO: 2315 - protein, 9 aa, synthetic construct
  source 1..9: note = Description of Artificial Sequence: Synthetic peptide; note = XENP019988 vlCDR3
QQLGSSPWT

SEQ ID NO: 2316 - protein, 246 aa, synthetic construct
  source 1..246: note = Description of Artificial Sequence: Synthetic polypeptide; note = XENP019989 [CTLA-4]_H0_L0.101_scFv(GKPGS)4
QVQLVESGGGVVQPGRSLRLSCAASGFTFSSYTMHWVRQAPGKGLEWVTFISYDGNNKYYADSVKGRFTISRDNSKNTLYLQMNSLRAEDTAIYYCARTGWLGPFDYWGQGTLVTVSSGKPGSGKPGSGKPGSGKPGSEIVLTQSPGTLSLSPGERATLSCRASQSVGSSYLAWYQQKPGQAPRLLIYGAFSRATGIPDRFSGSGSGTDFTLTISRLEPEDFAVYYCQQVGSSPWTFGQGTKVEIK

SEQ ID NO: 2317 - protein, 118 aa, synthetic construct; identical to SEQ ID NO: 22
  source 1..118: note = Description of Artificial Sequence: Synthetic polypeptide; note = VH of XENP019989

SEQ ID NO: 2318 - protein, 108 aa, synthetic construct
  source 1..108: note = Description of Artificial Sequence: Synthetic polypeptide; note = VL of XENP019989
EIVLTQSPGTLSLSPGERATLSCRASQSVGSSYLAWYQQKPGQAPRLLIYGAFSRATGIPDRFSGSGSGTDFTLTISRLEPEDFAVYYCQQVGSSPWTFGQGTKVEIK

SEQ ID NO: 2319 - protein, 5 aa, synthetic construct
  source 1..5: note = Description of Artificial Sequence: Synthetic peptide; note = XENP019989 vhCDR1
SYTMH

SEQ ID NO: 2320 - protein, 17 aa, synthetic construct
  source 1..17: note = Description of Artificial Sequence: Synthetic peptide; note = XENP019989 vhCDR2
FISYDGNNKYYADSVKG

SEQ ID NO: 2321 - protein, 9 aa, synthetic construct
  source 1..9: note = Description of Artificial Sequence: Synthetic peptide; note = XENP019989 vhCDR3
TGWLGPFDY

SEQ ID NO: 2322 - protein, 12 aa, synthetic construct
  source 1..12: note = Description of Artificial Sequence: Synthetic peptide; note = XENP019989 vlCDR1
RASQSVGSSYLA

SEQ ID NO: 2323 - protein, 7 aa, synthetic construct
  source 1..7: note = Description of Artificial Sequence: Synthetic peptide; note = XENP019989 vlCDR2
GAFSRAT

SEQ ID NO: 2324 - protein, 9 aa, synthetic construct
  source 1..9: note = Description of Artificial Sequence: Synthetic peptide; note = XENP019989 vlCDR3
QQVGSSPWT

SEQ ID NO: 2325 - protein, 246 aa, synthetic construct
  source 1..246: note = Description of Artificial Sequence: Synthetic polypeptide; note = XENP019990 [CTLA-4]_H0_L0.102_scFv(GKPGS)4
QVQLVESGGGVVQPGRSLRLSCAASGFTFSSYTMHWVRQAPGKGLEWVTFISYDGNNKYYADSVKGRFTISRDNSKNTLYLQMNSLRAEDTAIYYCARTGWLGPFDYWGQGTLVTVSSGKPGSGKPGSGKPGSGKPGSEIVLTQSPGTLSLSPGERATLSCRASQSVGSSYLAWYQQKPGQAPRLLIYGAFSRATGIPDRFSGSGSGTDFTLTISRLEPEDFAVYYCQQYGESPWTFGQGTKVEIK

SEQ ID NO: 2326 - protein, 118 aa, synthetic construct; identical to SEQ ID NO: 22
  source 1..118: note = Description of Artificial Sequence: Synthetic polypeptide; note = VH of XENP019990

SEQ ID NO: 2327 - protein, 108 aa, synthetic construct
  source 1..108: note = Description of Artificial Sequence: Synthetic polypeptide; note = VL of XENP019990
EIVLTQSPGTLSLSPGERATLSCRASQSVGSSYLAWYQQKPGQAPRLLIYGAFSRATGIPDRFSGSGSGTDFTLTISRLEPEDFAVYYCQQYGESPWTFGQGTKVEIK

SEQ ID NO: 2328 - protein, 5 aa, synthetic construct
  source 1..5: note = Description of Artificial Sequence: Synthetic peptide; note = XENP019990 vhCDR1
SYTMH

SEQ ID NO: 2329 - protein, 17 aa, synthetic construct
  source 1..17: note = Description of Artificial Sequence: Synthetic peptide; note = XENP019990 vhCDR2
FISYDGNNKYYADSVKG

SEQ ID NO: 2330 - protein, 9 aa, synthetic construct
  source 1..9: note = Description of Artificial Sequence: Synthetic peptide; note = XENP019990 vhCDR3
TGWLGPFDY

SEQ ID NO: 2331 - protein, 12 aa, synthetic construct
  source 1..12: note = Description of Artificial Sequence: Synthetic peptide; note = XENP019990 vlCDR1
RASQSVGSSYLA

SEQ ID NO: 2332 - protein, 7 aa, synthetic construct
  source 1..7: note = Description of Artificial Sequence: Synthetic peptide; note = XENP019990 vlCDR2
GAFSRAT

SEQ ID NO: 2333 - protein, 9 aa, synthetic construct
  source 1..9: note = Description of Artificial Sequence: Synthetic peptide; note = XENP019990 vlCDR3
QQYGESPWT

SEQ ID NO: 2334 - protein, 246 aa, synthetic construct
  source 1..246: note = Description of Artificial Sequence: Synthetic polypeptide; note = XENP019991 [CTLA-4]_H0_L0.103_scFv(GKPGS)4
QVQLVESGGGVVQPGRSLRLSCAASGFTFSSYTMHWVRQAPGKGLEWVTFISYDGNNKYYADSVKGRFTISRDNSKNTLYLQMNSLRAEDTAIYYCARTGWLGPFDYWGQGTLVTVSSGKPGSGKPGSGKPGSGKPGSEIVLTQSPGTLSLSPGERATLSCRASQSVGSSYLAWYQQKPGQAPRLLIYGAFSRATGIPDRFSGSGSGTDFTLTISRLEPEDFAVYYCQQYGKSPWTFGQGTKVEIK

SEQ ID NO: 2335 - protein, 118 aa, synthetic construct; identical to SEQ ID NO: 22
  source 1..118: note = Description of Artificial Sequence: Synthetic polypeptide; note = VH of XENP019991

SEQ ID NO: 2336 - protein, 108 aa, synthetic construct
  source 1..108: note = Description of Artificial Sequence: Synthetic polypeptide; note = VL of XENP019991
EIVLTQSPGTLSLSPGERATLSCRASQSVGSSYLAWYQQKPGQAPRLLIYGAFSRATGIPDRFSGSGSGTDFTLTISRLEPEDFAVYYCQQYGKSPWTFGQGTKVEIK

SEQ ID NO: 2337 - protein, 5 aa, synthetic construct
  source 1..5: note = Description of Artificial Sequence: Synthetic peptide; note = XENP019991 vhCDR1
SYTMH

SEQ ID NO: 2338 - protein, 17 aa, synthetic construct
  source 1..17: note = Description of Artificial Sequence: Synthetic peptide; note = XENP019991 vhCDR2
FISYDGNNKYYADSVKG

SEQ ID NO: 2339 - protein, 9 aa, synthetic construct
  source 1..9: note = Description of Artificial Sequence: Synthetic peptide; note = XENP019991 vhCDR3
TGWLGPFDY

SEQ ID NO: 2340 - protein, 12 aa, synthetic construct
  source 1..12: note = Description of Artificial Sequence: Synthetic peptide; note = XENP019991 vlCDR1
RASQSVGSSYLA

SEQ ID NO: 2341 - protein, 7 aa, synthetic construct
  source 1..7: note = Description of Artificial Sequence: Synthetic peptide; note = XENP019991 vlCDR2
GAFSRAT

SEQ ID NO: 2342 - protein, 9 aa, synthetic construct
  source 1..9: note = Description of Artificial Sequence: Synthetic peptide; note = XENP019991 vlCDR3
QQYGKSPWT

SEQ ID NO: 2343 - protein, 246 aa, synthetic construct
  source 1..246: note = Description of Artificial Sequence: Synthetic polypeptide; note = XENP019992 [CTLA-4]_H0_L0.104_scFv(GKPGS)4
QVQLVESGGGVVQPGRSLRLSCAASGFTFSSYTMHWVRQAPGKGLEWVTFISYDGNNKYYADSVKGRFTISRDNSKNTLYLQMNSLRAEDTAIYYCARTGWLGPFDYWGQGTLVTVSSGKPGSGKPGSGKPGSGKPGSEIVLTQSPGTLSLSPGERATLSCRASQSVGSSYLAWYQQKPGQAPRLLIYGAFSRATGIPDRFSGSGSGTDFTLTISRLEPEDFAVYYCQQYGSYPWTFGQGTKVEIK

SEQ ID NO: 2344 - protein, 118 aa, synthetic construct; identical to SEQ ID NO: 22
  source 1..118: note = Description of Artificial Sequence: Synthetic polypeptide; note = VH of XENP019992

SEQ ID NO: 2345 - protein, 108 aa, synthetic construct
  source 1..108: note = Description of Artificial Sequence: Synthetic polypeptide; note = VL of XENP019992
EIVLTQSPGTLSLSPGERATLSCRASQSVGSSYLAWYQQKPGQAPRLLIYGAFSRATGIPDRFSGSGSGTDFTLTISRLEPEDFAVYYCQQYGSYPWTFGQGTKVEIK

SEQ ID NO: 2346 - protein, 5 aa, synthetic construct
  source 1..5: note = Description of Artificial Sequence: Synthetic peptide; note = XENP019992 vhCDR1
SYTMH

SEQ ID NO: 2347 - protein, 17 aa, synthetic construct
  source 1..17: note = Description of Artificial Sequence: Synthetic peptide; note = XENP019992 vhCDR2
FISYDGNNKYYADSVKG

SEQ ID NO: 2348 - protein, 9 aa, synthetic construct
  source 1..9: note = Description of Artificial Sequence: Synthetic peptide; note = XENP019992 vhCDR3
TGWLGPFDY

SEQ ID NO: 2349 - protein, 12 aa, synthetic construct
  source 1..12: note = Description of Artificial Sequence: Synthetic peptide; note = XENP019992 vlCDR1
RASQSVGSSYLA

SEQ ID NO: 2350 - protein, 7 aa, synthetic construct
  source 1..7: note = Description of Artificial Sequence: Synthetic peptide; note = XENP019992 vlCDR2
GAFSRAT

SEQ ID NO: 2351 - protein, 9 aa, synthetic construct
  source 1..9: note = Description of Artificial Sequence: Synthetic peptide; note = XENP019992 vlCDR3
QQYGSYPWT

SEQ ID NO: 2352 - protein, 246 aa, synthetic construct
  source 1..246: note = Description of Artificial Sequence: Synthetic polypeptide; note = XENP019993 [CTLA-4]_H0_L0.105_scFv(GKPGS)4
QVQLVESGGGVVQPGRSLRLSCAASGFTFSSYTMHWVRQAPGKGLEWVTFISYDGNNKYYADSVKGRFTISRDNSKNTLYLQMNSLRAEDTAIYYCARTGWLGPFDYWGQGTLVTVSSGKPGSGKPGSGKPGSGKPGSEIVLTQSPGTLSLSPGERATLSCRASQSVGSSYLAWYQQKPGQAPRLLIYGAFSRATGIPDRFSGSGSGTDFTLTISRLEPEDFAVYYCQQYGSSHWTFGQGTKVEIK

SEQ ID NO: 2353 - protein, 118 aa, synthetic construct; identical to SEQ ID NO: 22
  source 1..118: note = Description of Artificial Sequence: Synthetic polypeptide; note = VH of XENP019993

SEQ ID NO: 2354 - protein, 108 aa, synthetic construct
  source 1..108: note = Description of Artificial Sequence: Synthetic polypeptide; note = VL of XENP019993
EIVLTQSPGTLSLSPGERATLSCRASQSVGSSYLAWYQQKPGQAPRLLIYGAFSRATGIPDRFSGSGSGTDFTLTISRLEPEDFAVYYCQQYGSSHWTFGQGTKVEIK

SEQ ID NO: 2355 - protein, 5 aa, synthetic construct
  source 1..5: note = Description of Artificial Sequence: Synthetic peptide; note = XENP019993 vhCDR1
SYTMH

SEQ ID NO: 2356 - protein, 17 aa, synthetic construct
  source 1..17: note = Description of Artificial Sequence: Synthetic peptide; note = XENP019993 vhCDR2
FISYDGNNKYYADSVKG

SEQ ID NO: 2357 - protein, 9 aa, synthetic construct
  source 1..9: note = Description of Artificial Sequence: Synthetic peptide; note = XENP019993 vhCDR3
TGWLGPFDY

SEQ ID NO: 2358 - protein, 12 aa, synthetic construct
  source 1..12: note = Description of Artificial Sequence: Synthetic peptide; note = XENP019993 vlCDR1
RASQSVGSSYLA

SEQ ID NO: 2359 - protein, 7 aa, synthetic construct
  source 1..7: note = Description of Artificial Sequence: Synthetic peptide; note = XENP019993 vlCDR2
GAFSRAT

SEQ ID NO: 2360 - protein, 9 aa, synthetic construct
  source 1..9: note = Description of Artificial Sequence: Synthetic peptide; note = XENP019993 vlCDR3
QQYGSSHWT

SEQ ID NO: 2361 - protein, 246 aa, synthetic construct
  source 1..246: note = Description of Artificial Sequence: Synthetic polypeptide; note = XENP019994 [CTLA-4]_H0_L0.106_scFv(GKPGS)4
QVQLVESGGGVVQPGRSLRLSCAASGFTFSSYTMHWVRQAPGKGLEWVTFISYDGNNKYYADSVKGRFTISRDNSKNTLYLQMNSLRAEDTAIYYCARTGWLGPFDYWGQGTLVTVSSGKPGSGKPGSGKPGSGKPGSEIVLTQSPGTLSLSPGERATLSCRASQSVGSSYLAWYQQKPGQAPRLLIYGAFSRATGIPDRFSGSGSGTDFTLTISRLEPEDFAVYYCQQYGSSPFTFGQGTKVEIK

SEQ ID NO: 2362 - protein, 118 aa, synthetic construct; identical to SEQ ID NO: 22
  source 1..118: note = Description of Artificial Sequence: Synthetic polypeptide; note = VH of XENP019994

SEQ ID NO: 2363 - protein, 108 aa, synthetic construct
  source 1..108: note = Description of Artificial Sequence: Synthetic polypeptide; note = VL of XENP019994
EIVLTQSPGTLSLSPGERATLSCRASQSVGSSYLAWYQQKPGQAPRLLIYGAFSRATGIPDRFSGSGSGTDFTLTISRLEPEDFAVYYCQQYGSSPFTFGQGTKVEIK

SEQ ID NO: 2364 - protein, 5 aa, synthetic construct
  source 1..5: note = Description of Artificial Sequence: Synthetic peptide; note = XENP019994 vhCDR1
SYTMH

SEQ ID NO: 2365 - protein, 17 aa, synthetic construct
  source 1..17: note = Description of Artificial Sequence: Synthetic peptide; note = XENP019994 vhCDR2
FISYDGNNKYYADSVKG

SEQ ID NO: 2366 - protein, 9 aa, synthetic construct
  source 1..9: note = Description of Artificial Sequence: Synthetic peptide; note = XENP019994 vhCDR3
TGWLGPFDY

SEQ ID NO: 2367 - protein, 12 aa, synthetic construct
  source 1..12: note = Description of Artificial Sequence: Synthetic peptide; note = XENP019994 vlCDR1
RASQSVGSSYLA

SEQ ID NO: 2368 - protein, 7 aa, synthetic construct
  source 1..7: note = Description of Artificial Sequence: Synthetic peptide; note = XENP019994 vlCDR2
GAFSRAT

SEQ ID NO: 2369 - protein, 9 aa, synthetic construct
  source 1..9: note = Description of Artificial Sequence: Synthetic peptide; note = XENP019994 vlCDR3
QQYGSSPFT

SEQ ID NO: 2370 - protein, 246 aa, synthetic construct
  source 1..246: note = Description of Artificial Sequence: Synthetic polypeptide; note = XENP019995 [CTLA-4]_H0_L0.107_scFv(GKPGS)4
QVQLVESGGGVVQPGRSLRLSCAASGFTFSSYTMHWVRQAPGKGLEWVTFISYDGNNKYYADSVKGRFTISRDNSKNTLYLQMNSLRAEDTAIYYCARTGWLGPFDYWGQGTLVTVSSGKPGSGKPGSGKPGSGKPGSEIVLTQSPGTLSLSPGERATLSCRASQSVGSSYLAWYQQKPGQAPRLLIYGAFSRATGIPDRFSGSGSGTDFTLTISRLEPEDFAVYYCQQYGSSPHTFGQGTKVEIK

SEQ ID NO: 2371 - protein, 118 aa, synthetic construct; identical to SEQ ID NO: 22
  source 1..118: note = Description of Artificial Sequence: Synthetic polypeptide; note = VH of XENP019995

SEQ ID NO: 2372 - protein, 108 aa, synthetic construct
  source 1..108: note = Description of Artificial Sequence: Synthetic polypeptide; note = VL of XENP019995
EIVLTQSPGTLSLSPGERATLSCRASQSVGSSYLAWYQQKPGQAPRLLIYGAFSRATGIPDRFSGSGSGTDFTLTISRLEPEDFAVYYCQQYGSSPHTFGQGTKVEIK

SEQ ID NO: 2373 - protein, 5 aa, synthetic construct
  source 1..5: note = Description of Artificial Sequence: Synthetic peptide; note = XENP019995 vhCDR1
SYTMH

SEQ ID NO: 2374 - protein, 17 aa, synthetic construct
  source 1..17: note = Description of Artificial Sequence: Synthetic peptide; note = XENP019995 vhCDR2
FISYDGNNKYYADSVKG

SEQ ID NO: 2375 - protein, 9 aa, synthetic construct
  source 1..9: note = Description of Artificial Sequence: Synthetic peptide; note = XENP019995 vhCDR3
TGWLGPFDY

SEQ ID NO: 2376 - protein, 12 aa, synthetic construct
  source 1..12: note = Description of Artificial Sequence: Synthetic peptide; note = XENP019995 vlCDR1
RASQSVGSSYLA

SEQ ID NO: 2377 - protein, 7 aa, synthetic construct
  source 1..7: note = Description of Artificial Sequence: Synthetic peptide; note = XENP019995 vlCDR2
GAFSRAT

SEQ ID NO: 2378 - protein, 9 aa, synthetic construct
  source 1..9: note = Description of Artificial Sequence: Synthetic peptide; note = XENP019995 vlCDR3
QQYGSSPHT

SEQ ID NO: 2379 - protein, 246 aa, synthetic construct
  source 1..246: note = Description of Artificial Sequence: Synthetic polypeptide; note = XENP019996 [CTLA-4]_H0_L0.108_scFv(GKPGS)4
QVQLVESGGGVVQPGRSLRLSCAASGFTFSSYTMHWVRQAPGKGLEWVTFISYDGNNKYYADSVKGRFTISRDNSKNTLYLQMNSLRAEDTAIYYCARTGWLGPFDYWGQGTLVTVSSGKPGSGKPGSGKPGSGKPGSEIVLTQSPGTLSLSPGERATLSCRASQSVGSSYLAWYQQKPGQAPRLLIYGAFSRATGIPDRFSGSGSGTDFTLTISRLEPEDFAVYYCQQYGSSPITFGQGTKVEIK

SEQ ID NO: 2380 - protein, 118 aa, synthetic construct; identical to SEQ ID NO: 22
  source 1..118: note = Description of Artificial Sequence: Synthetic polypeptide; note = VH of XENP019996

SEQ ID NO: 2381 - protein, 108 aa, synthetic construct
  source 1..108: note = Description of Artificial Sequence: Synthetic polypeptide; note = VL of XENP019996
EIVLTQSPGTLSLSPGERATLSCRASQSVGSSYLAWYQQKPGQAPRLLIYGAFSRATGIPDRFSGSGSGTDFTLTISRLEPEDFAVYYCQQYGSSPITFGQGTKVEIK

SEQ ID NO: 2382 - protein, 5 aa, synthetic construct
  source 1..5: note = Description of Artificial Sequence: Synthetic peptide; note = XENP019996 vhCDR1
SYTMH

SEQ ID NO: 2383 - protein, 17 aa, synthetic construct
  source 1..17: note = Description of Artificial Sequence: Synthetic peptide; note = XENP019996 vhCDR2
FISYDGNNKYYADSVKG

SEQ ID NO: 2384 - protein, 9 aa, synthetic construct
  source 1..9: note = Description of Artificial Sequence: Synthetic peptide; note = XENP019996 vhCDR3
TGWLGPFDY

SEQ ID NO: 2385 - protein, 12 aa, synthetic construct
  source 1..12: note = Description of Artificial Sequence: Synthetic peptide; note = XENP019996 vlCDR1
RASQSVGSSYLA

SEQ ID NO: 2386 - protein, 7 aa, synthetic construct
  source 1..7: note = Description of Artificial Sequence: Synthetic peptide; note = XENP019996 vlCDR2
GAFSRAT

SEQ ID NO: 2387 - protein, 9 aa, synthetic construct
  source 1..9: note = Description of Artificial Sequence: Synthetic peptide; note = XENP019996 vlCDR3
QQYGSSPIT

SEQ ID NO: 2388 - protein, 246 aa, synthetic construct
  source 1..246: note = Description of Artificial Sequence: Synthetic polypeptide; note = XENP020001 [CTLA-4]_H0_L0.109_scFv(GKPGS)4
QVQLVESGGGVVQPGRSLRLSCAASGFTFSSYTMHWVRQAPGKGLEWVTFISYDGNNKYYADSVKGRFTISRDNSKNTLYLQMNSLRAEDTAIYYCARTGWLGPFDYWGQGTLVTVSSGKPGSGKPGSGKPGSGKPGSEIVLTQSPGTLSLSPGERATLSCRASQSVGSSYLAWYQQKPGQAPRLLIYGAFSRATGIPDRFSGSGSGTDFTLTISRLEPEDFAVYYCQQYGSSPLTFGQGTKVEIK

SEQ ID NO: 2389 - protein, 118 aa, synthetic construct; identical to SEQ ID NO: 22
  source 1..118: note = Description of Artificial Sequence: Synthetic polypeptide; note = VH of XENP020001

SEQ ID NO: 2390 - protein, 108 aa, synthetic construct
  source 1..108: note = Description of Artificial Sequence: Synthetic polypeptide; note = VL of XENP020001
EIVLTQSPGTLSLSPGERATLSCRASQSVGSSYLAWYQQKPGQAPRLLIYGAFSRATGIPDRFSGSGSGTDFTLTISRLEPEDFAVYYCQQYGSSPLTFGQGTKVEIK

SEQ ID NO: 2391 - protein, 5 aa, synthetic construct
  source 1..5: note = Description of Artificial Sequence: Synthetic peptide; note = XENP020001 vhCDR1
SYTMH

SEQ ID NO: 2392 - protein, 17 aa, synthetic construct
  source 1..17: note = Description of Artificial Sequence: Synthetic peptide; note = XENP020001 vhCDR2
FISYDGNNKYYADSVKG

SEQ ID NO: 2393 - protein, 9 aa, synthetic construct
  source 1..9: note = Description of Artificial Sequence: Synthetic peptide; note = XENP020001 vhCDR3
TGWLGPFDY

SEQ ID NO: 2394 - protein, 12 aa, synthetic construct
  source 1..12: note = Description of Artificial Sequence: Synthetic peptide; note = XENP020001 vlCDR1
RASQSVGSSYLA

SEQ ID NO: 2395 - protein, 7 aa, synthetic construct
  source 1..7: note = Description of Artificial Sequence: Synthetic peptide; note = XENP020001 vlCDR2
GAFSRAT

SEQ ID NO: 2396 - protein, 9 aa, synthetic construct
  source 1..9: note = Description of Artificial Sequence: Synthetic peptide; note = XENP020001 vlCDR3
QQYGSSPLT

SEQ ID NO: 2397 - protein, 246 aa, synthetic construct
  source 1..246: note = Description of Artificial Sequence: Synthetic polypeptide; note = XENP020002 [CTLA-4]_H0_L0.110_scFv(GKPGS)4
QVQLVESGGGVVQPGRSLRLSCAASGFTFSSYTMHWVRQAPGKGLEWVTFISYDGNNKYYADSVKGRFTISRDNSKNTLYLQMNSLRAEDTAIYYCARTGWLGPFDYWGQGTLVTVSSGKPGSGKPGSGKPGSGKPGSEIVLTQSPGTLSLSPGERATLSCRASQSVGSSYLAWYQQKPGQAPRLLIYGAFSRATGIPDRFSGSGSGTDFTLTISRLEPEDFAVYYCQQYGSSPYTFGQGTKVEIK

SEQ ID NO: 2398 - protein, 118 aa, synthetic construct; identical to SEQ ID NO: 22
  source 1..118: note = Description of Artificial Sequence: Synthetic polypeptide; note = VH of XENP020002

SEQ ID NO: 2399 - protein, 108 aa, synthetic construct
  source 1..108: note = Description of Artificial Sequence: Synthetic polypeptide; note = VL of XENP020002
EIVLTQSPGTLSLSPGERATLSCRASQSVGSSYLAWYQQKPGQAPRLLIYGAFSRATGIPDRFSGSGSGTDFTLTISRLEPEDFAVYYCQQYGSSPYTFGQGTKVEIK

SEQ ID NO: 2400 - protein, 5 aa, synthetic construct
  source 1..5: note = Description of Artificial Sequence: Synthetic peptide; note = XENP020002 vhCDR1
SYTMH

SEQ ID NO: 2401 - protein, 17 aa, synthetic construct
  source 1..17: note = Description of Artificial Sequence: Synthetic peptide; note = XENP020002 vhCDR2
FISYDGNNKYYADSVKG

SEQ ID NO: 2402 - protein, 9 aa, synthetic construct
  source 1..9: note = Description of Artificial Sequence: Synthetic peptide; note = XENP020002 vhCDR3
TGWLGPFDY

SEQ ID NO: 2403 - protein, 12 aa, synthetic construct
  source 1..12: note = Description of Artificial Sequence: Synthetic peptide; note = XENP020002 vlCDR1
RASQSVGSSYLA

SEQ ID NO: 2404 - protein, 7 aa, synthetic construct
  source 1..7: note = Description of Artificial Sequence: Synthetic peptide; note = XENP020002 vlCDR2
GAFSRAT

SEQ ID NO: 2405 - protein, 9 aa, synthetic construct
  source 1..9: note = Description of Artificial Sequence: Synthetic peptide; note = XENP020002 vlCDR3
QQYGSSPYT

SEQ ID NO: 2406 - protein, 246 aa, synthetic construct
  source 1..246: note = Description of Artificial Sequence: Synthetic polypeptide; note = XENP020003 [CTLA-4]_H0_L0.111_scFv(GKPGS)4
QVQLVESGGGVVQPGRSLRLSCAASGFTFSSYTMHWVRQAPGKGLEWVTFISYDGNNKYYADSVKGRFTISRDNSKNTLYLQMNSLRAEDTAIYYCARTGWLGPFDYWGQGTLVTVSSGKPGSGKPGSGKPGSGKPGSEIVLTQSPGTLSLSPGERATLSCRASQSVGSSYLAWYQQKPGQAPRLLIYGAFSRATGIPDRFSGSGSGTDFTLTISRLEPEDFAVYYCQQYGSSPWVFGQGTKVEIK

SEQ ID NO: 2407 - protein, 118 aa, synthetic construct; identical to SEQ ID NO: 22
  source 1..118: note = Description of Artificial Sequence: Synthetic polypeptide; note = VH of XENP020003

SEQ ID NO: 2408 - protein, 108 aa, synthetic construct
  source 1..108: note = Description of Artificial Sequence: Synthetic polypeptide; note = VL of XENP020003
EIVLTQSPGTLSLSPGERATLSCRASQSVGSSYLAWYQQKPGQAPRLLIYGAFSRATGIPDRFSGSGSGTDFTLTISRLEPEDFAVYYCQQYGSSPWVFGQGTKVEIK

SEQ ID NO: 2409 - protein, 5 aa, synthetic construct
  source 1..5: note = Description of Artificial Sequence: Synthetic peptide; note = XENP020003 vhCDR1
SYTMH

SEQ ID NO: 2410 - protein, 17 aa, synthetic construct
  source 1..17: note = Description of Artificial Sequence: Synthetic peptide; note = XENP020003 vhCDR2
FISYDGNNKYYADSVKG

SEQ ID NO: 2411 - protein, 9 aa, synthetic construct
  source 1..9: note = Description of Artificial Sequence: Synthetic peptide; note = XENP020003 vhCDR3
TGWLGPFDY

SEQ ID NO: 2412 - protein, 12 aa, synthetic construct
  source 1..12: note = Description of Artificial Sequence: Synthetic peptide; note = XENP020003 vlCDR1
RASQSVGSSYLA

SEQ ID NO: 2413 - protein, 7 aa, synthetic construct
  source 1..7: note = Description of Artificial Sequence: Synthetic peptide; note = XENP020003 vlCDR2
GAFSRAT

SEQ ID NO: 2414 - protein, 9 aa, synthetic construct
  source 1..9: note = Description of Artificial Sequence: Synthetic peptide; note = XENP020003 vlCDR3
QQYGSSPWV

SEQ ID NO: 2415 - protein, 246 aa, synthetic construct
  source 1..246: note = Description of Artificial Sequence: Synthetic polypeptide; note = XENP020004 [CTLA-4]_H0_L0.112_scFv(GKPGS)4
QVQLVESGGGVVQPGRSLRLSCAASGFTFSSYTMHWVRQAPGKGLEWVTFISYDGNNKYYADSVKGRFTISRDNSKNTLYLQMNSLRAEDTAIYYCARTGWLGPFDYWGQGTLVTVSSGKPGSGKPGSGKPGSGKPGSEIVLTQSPGTLSLSPGERATLSCRASQSVGSSYLAWYQQKPGQAPRLLIYGAFSRATGIPDRFSGSGSGTDFTLTISRLEPEDFAVYYCQQYGSSPWTFGGGTKVEIK

SEQ ID NO: 2416 - protein, 118 aa, synthetic construct; identical to SEQ ID NO: 22
  source 1..118: note = Description of Artificial Sequence: Synthetic polypeptide; note = VH of XENP020004

SEQ ID NO: 2417 - protein, 108 aa, synthetic construct
  source 1..108: note = Description of Artificial Sequence: Synthetic polypeptide; note = VL of XENP020004
EIVLTQSPGTLSLSPGERATLSCRASQSVGSSYLAWYQQKPGQAPRLLIYGAFSRATGIPDRFSGSGSGTDFTLTISRLEPEDFAVYYCQQYGSSPWTFGGGTKVEIK

SEQ ID NO: 2418 - protein, 5 aa, synthetic construct
  source 1..5: note = Description of Artificial Sequence: Synthetic peptide; note = XENP020004 vhCDR1
SYTMH

SEQ ID NO: 2419 - protein, 17 aa, synthetic construct
  source 1..17: note = Description of Artificial Sequence: Synthetic peptide; note = XENP020004 vhCDR2
FISYDGNNKYYADSVKG

SEQ ID NO: 2420 - protein, 9 aa, synthetic construct
  source 1..9: note = Description of Artificial Sequence: Synthetic peptide; note = XENP020004 vhCDR3
TGWLGPFDY

SEQ ID NO: 2421 - protein, 12 aa, synthetic construct
  source 1..12: note = Description of Artificial Sequence: Synthetic peptide; note = XENP020004 vlCDR1
RASQSVGSSYLA

SEQ ID NO: 2422 - protein, 7 aa, synthetic construct
  source 1..7: note = Description of Artificial Sequence: Synthetic peptide; note = XENP020004 vlCDR2
GAFSRAT

SEQ ID NO: 2423 - protein, 9 aa, synthetic construct
  source 1..9: note = Description of Artificial Sequence: Synthetic peptide; note = XENP020004 vlCDR3
QQYGSSPWT

SEQ ID NO: 2424 - protein, 246 aa, synthetic construct
  source 1..246: note = Description of Artificial Sequence: Synthetic polypeptide; note = XENP020005 [CTLA-4]_H0_L0.113_scFv(GKPGS)4
QVQLVESGGGVVQPGRSLRLSCAASGFTFSSYTMHWVRQAPGKGLEWVTFISYDGNNKYYADSVKGRFTISRDNSKNTLYLQMNSLRAEDTAIYYCARTGWLGPFDYWGQGTLVTVSSGKPGSGKPGSGKPGSGKPGSEIVLTQSPGTLSLSPGERATLSCRASQSVGSSYLAWYQQKPGQAPRLLIYGAFSRATGIPDRFSGSGSGTDFTLTISRLEPEDFAVYYCQQYGSSPWTFGEGTKVEIK

SEQ ID NO: 2425 - protein, 118 aa, synthetic construct; identical to SEQ ID NO: 22
  source 1..118: note = Description of Artificial Sequence: Synthetic polypeptide; note = VH of XENP020005

SEQ ID NO: 2426 - protein, 108 aa, synthetic construct; identical to SEQ ID NO: 59
  source 1..108: note = Description of Artificial Sequence: Synthetic polypeptide; note = VL of XENP020005

SEQ ID NO: 2427 - protein, 5 aa, synthetic construct
  source 1..5: note = Description of Artificial Sequence: Synthetic peptide; note = XENP020005 vhCDR1
SYTMH

SEQ ID NO: 2428 - protein, 17 aa, synthetic construct
  source 1..17: note = Description of Artificial Sequence: Synthetic peptide; note = XENP020005 vhCDR2
FISYDGNNKYYADSVKG

SEQ ID NO: 2429 - protein, 9 aa, synthetic construct
  source 1..9: note = Description of Artificial Sequence: Synthetic peptide; note = XENP020005 vhCDR3
TGWLGPFDY

SEQ ID NO: 2430 - protein, 12 aa, synthetic construct
  source 1..12: note = Description of Artificial Sequence: Synthetic peptide; note = XENP020005 vlCDR1
RASQSVGSSYLA

SEQ ID NO: 2431 - protein, 7 aa, synthetic construct
  source 1..7: note = Description of Artificial Sequence: Synthetic peptide; note = XENP020005 vlCDR2
GAFSRAT

SEQ ID NO: 2432 - protein, 9 aa, synthetic construct
  source 1..9: note = Description of Artificial Sequence: Synthetic peptide; note = XENP020005 vlCDR3
QQYGSSPWT

SEQ ID NO: 2433 - protein, 246 aa, synthetic construct
  source 1..246: note = Description of Artificial Sequence: Synthetic polypeptide; note = XENP020075 [CTLA-4]_H3.1_L0.12_scFv(GKPGS)4
EVQLVESGGGLVKPGGSLRLSCAASGFTFSSYTMHWVRQAPGKGLEWVSFISYDGNHKYYADSVKGRFTISRDNAKNSLYLQMNSLRAEDTAVYYCARTGLLGPFDLWGQGTMVTVSSGKPGSGKPGSGKPGSGKPGSEIVLTQSPGTLSVSPGERATLSCRASQSVGSSYLAWYQQKPGQAPRLLIYGAFSRATGIPDRFSGSGSGTDFTLTISRLEPEDFAVYYCQQYGSSPWTFGQGTKVEIK

SEQ ID NO: 2434 - protein, 118 aa, synthetic construct
  source 1..118: note = Description of Artificial Sequence: Synthetic polypeptide; note = VH of XENP020075
EVQLVESGGGLVKPGGSLRLSCAASGFTFSSYTMHWVRQAPGKGLEWVSFISYDGNHKYYADSVKGRFTISRDNAKNSLYLQMNSLRAEDTAVYYCARTGLLGPFDLWGQGTMVTVSS

SEQ ID NO: 2435 - protein, 108 aa, synthetic construct; identical to SEQ ID NO: 1517
  source 1..108: note = Description of Artificial Sequence: Synthetic polypeptide; note = VL of XENP020075

SEQ ID NO: 2436 - protein, 5 aa, synthetic construct
  source 1..5: note = Description of Artificial Sequence: Synthetic peptide; note = XENP020075 vhCDR1
SYTMH

SEQ ID NO: 2437 - protein, 17 aa, synthetic construct
  source 1..17: note = Description of Artificial Sequence: Synthetic peptide; note = XENP020075 vhCDR2
FISYDGNHKYYADSVKG

SEQ ID NO: 2438 - protein, 9 aa, synthetic construct
  source 1..9: note = Description of Artificial Sequence: Synthetic peptide; note = XENP020075 vhCDR3
TGLLGPFDL

SEQ ID NO: 2439 - protein, 12 aa, synthetic construct
  source 1..12: note = Description of Artificial Sequence: Synthetic peptide; note = XENP020075 vlCDR1
RASQSVGSSYLA

SEQ ID NO: 2440 - protein, 7 aa, synthetic construct
  source 1..7: note = Description of Artificial Sequence: Synthetic peptide; note = XENP020075 vlCDR2
GAFSRAT

SEQ ID NO: 2441 - protein, 9 aa, synthetic construct
  source 1..9: note = Description of Artificial Sequence: Synthetic peptide; note = XENP020075 vlCDR3
QQYGSSPWT

SEQ ID NO: 2442 - protein, 246 aa, synthetic construct
  source 1..246: note = Description of Artificial Sequence: Synthetic polypeptide; note = XENP020076 [CTLA-4]_H3.2_L0.12_scFv(GKPGS)4
EVQLVESGGGLVKPGGSLRLSCAASGFTFSSYTMHWVRQAPGKGLEWVSFISYDGNTKYYADSVKGRFTISRDNAKNSLYLQMNSLRAEDTAVYYCARTGLLGPFDLWGQGTMVTVSSGKPGSGKPGSGKPGSGKPGSEIVLTQSPGTLSVSPGERATLSCRASQSVGSSYLAWYQQKPGQAPRLLIYGAFSRATGIPDRFSGSGSGTDFTLTISRLEPEDFAVYYCQQYGSSPWTFGQGTKVEIK

SEQ ID NO: 2443 - protein, 118 aa, synthetic construct
  source 1..118: note = Description of Artificial Sequence: Synthetic polypeptide; note = VH of XENP020076
EVQLVESGGGLVKPGGSLRLSCAASGFTFSSYTMHWVRQAPGKGLEWVSFISYDGNTKYYADSVKGRFTISRDNAKNSLYLQMNSLRAEDTAVYYCARTGLLGPFDLWGQGTMVTVSS

SEQ ID NO: 2444 - protein, 108 aa, synthetic construct; identical to SEQ ID NO: 1517
  source 1..108: note = Description of Artificial Sequence: Synthetic polypeptide; note = VL of XENP020076

SEQ ID NO: 2445 - protein, 5 aa, synthetic construct
  source 1..5: note = Description of Artificial Sequence: Synthetic peptide; note = XENP020076 vhCDR1
SYTMH

SEQ ID NO: 2446 - protein, 17 aa, synthetic construct
  source 1..17: note = Description of Artificial Sequence: Synthetic peptide; note = XENP020076 vhCDR2
FISYDGNTKYYADSVKG

SEQ ID NO: 2447 - protein, 9 aa, synthetic construct
  source 1..9: note = Description of Artificial Sequence: Synthetic peptide; note = XENP020076 vhCDR3
TGLLGPFDL

SEQ ID NO: 2448 - protein, 12 aa, synthetic construct
  source 1..12: note = Description of Artificial Sequence: Synthetic peptide; note = XENP020076 vlCDR1
RASQSVGSSYLA

SEQ ID NO: 2449 - protein, 7 aa, synthetic construct
  source 1..7: note = Description of Artificial Sequence: Synthetic peptide; note = XENP020076 vlCDR2
GAFSRAT

SEQ ID NO: 2450 - protein, 9 aa, synthetic construct
  source 1..9: note = Description of Artificial Sequence: Synthetic peptide; note = XENP020076 vlCDR3
QQYGSSPWT

SEQ ID NO: 2451 - protein, 246 aa, synthetic construct
  source 1..246: note = Description of Artificial Sequence: Synthetic polypeptide; note = XENP020077 [CTLA-4]_H3.3_L0.12_scFv(GKPGS)4
EVQLVESGGGLVKPGGSLRLSCAASGFTFSSYTMHWVRQAPGKGLEWVSFISYDGNQKYYADSVKGRFTISRDNAKNSLYLQMNSLRAEDTAVYYCARTGLLGPFDLWGQGTMVTVSSGKPGSGKPGSGKPGSGKPGSEIVLTQSPGTLSVSPGERATLSCRASQSVGSSYLAWYQQKPGQAPRLLIYGAFSRATGIPDRFSGSGSGTDFTLTISRLEPEDFAVYYCQQYGSSPWTFGQGTKVEIK

SEQ ID NO: 2452 - protein, 118 aa, synthetic construct
  source 1..118: note = Description of Artificial Sequence: Synthetic polypeptide; note = VH of XENP020077
EVQLVESGGGLVKPGGSLRLSCAASGFTFSSYTMHWVRQAPGKGLEWVSFISYDGNQKYYADSVKGRFTISRDNAKNSLYLQMNSLRAEDTAVYYCARTGLLGPFDLWGQGTMVTVSS

SEQ ID NO: 2453 - protein, 108 aa, synthetic construct; identical to SEQ ID NO: 1517
  source 1..108: note = Description of Artificial Sequence: Synthetic polypeptide; note = VL of XENP020077

SEQ ID NO: 2454 - protein, 5 aa, synthetic construct
  source 1..5: note = Description of Artificial Sequence: Synthetic peptide; note = XENP020077 vhCDR1
SYTMH

SEQ ID NO: 2455 - protein, 17 aa, synthetic construct
  source 1..17: note = Description of Artificial Sequence: Synthetic peptide; note = XENP020077 vhCDR2
FISYDGNQKYYADSVKG

SEQ ID NO: 2456 - protein, 9 aa, synthetic construct
  source 1..9: note = Description of Artificial Sequence: Synthetic peptide; note = XENP020077 vhCDR3
TGLLGPFDL

SEQ ID NO: 2457 - protein, 12 aa, synthetic construct
  source 1..12: note = Description of Artificial Sequence: Synthetic peptide; note = XENP020077 vlCDR1
RASQSVGSSYLA

SEQ ID NO: 2458 - protein, 7 aa, synthetic construct
  source 1..7: note = Description of Artificial Sequence: Synthetic peptide; note = XENP020077 vlCDR2
GAFSRAT

SEQ ID NO: 2459 - protein, 9 aa, synthetic construct
  source 1..9: note = Description of Artificial Sequence: Synthetic peptide; note = XENP020077 vlCDR3
QQYGSSPWT

SEQ ID NO: 2460 - protein, 246 aa, synthetic construct
  source 1..246: note = Description of Artificial Sequence: Synthetic polypeptide; note = XENP020078 [CTLA-4]_H3.4_L0.12_scFv(GKPGS)4
EVQLVESGGGLVKPGGSLRLSCAASGFTFSSYTMHWVRQAPGKGLEWVSFISYDGNHKYYADSVKGRFTISRDNAKNSLYLQMNSLRAEDTAVYYCARTGHLGPFDLWGQGTMVTVSSGKPGSGKPGSGKPGSGKPGSEIVLTQSPGTLSVSPGERATLSCRASQSVGSSYLAWYQQKPGQAPRLLIYGAFSRATGIPDRFSGSGSGTDFTLTISRLEPEDFAVYYCQQYGSSPWTFGQGTKVEIK

SEQ ID NO: 2461 - protein, 118 aa, synthetic construct
  source 1..118: note = Description of Artificial Sequence: Synthetic polypeptide; note = VH of XENP020078
EVQLVESGGGLVKPGGSLRLSCAASGFTFSSYTMHWVRQAPGKGLEWVSFISYDGNHKYYADSVKGRFTISRDNAKNSLYLQMNSLRAEDTAVYYCARTGHLGPFDLWGQGTMVTVSS

SEQ ID NO: 2462 - protein, 108 aa, synthetic construct; identical to SEQ ID NO: 1517
  source 1..108: note = Description of Artificial Sequence: Synthetic polypeptide; note = VL of XENP020078

SEQ ID NO: 2463 - protein, 5 aa, synthetic construct
  source 1..5: note = Description of Artificial Sequence: Synthetic peptide; note = XENP020078 vhCDR1
SYTMH

SEQ ID NO: 2464 - protein, 17 aa, synthetic construct
  source 1..17: note = Description of Artificial Sequence: Synthetic peptide; note = XENP020078 vhCDR2
FISYDGNHKYYADSVKG

SEQ ID NO: 2465 - protein, 9 aa, synthetic construct
  source 1..9: note = Description of Artificial Sequence: Synthetic peptide; note = XENP020078 vhCDR3
TGHLGPFDL

SEQ ID NO: 2466 - protein, 12 aa, synthetic construct
  source 1..12: note = Description of Artificial Sequence: Synthetic peptide; note = XENP020078 vlCDR1
RASQSVGSSYLA

SEQ ID NO: 2467 - protein, 7 aa, synthetic construct
  source 1..7: note = Description of Artificial Sequence: Synthetic peptide; note = XENP020078 vlCDR2
GAFSRAT

SEQ ID NO: 2468 - protein, 9 aa, synthetic construct
  source 1..9: note = Description of Artificial Sequence: Synthetic peptide; note = XENP020078 vlCDR3
QQYGSSPWT

SEQ ID NO: 2469 - protein, 246 aa, synthetic construct
  source 1..246: note = Description of Artificial Sequence: Synthetic polypeptide; note = XENP020079 [CTLA-4]_H3.5_L0.12_scFv(GKPGS)4
EVQLVESGGGLVKPGGSLRLSCAASGFTFSSYTMHWVRQAPGKGLEWVSFISYDGNTKYYADSVKGRFTISRDNAKNSLYLQMNSLRAEDTAVYYCARTGHLGPFDLWGQGTMVTVSSGKPGSGKPGSGKPGSGKPGSEIVLTQSPGTLSVSPGERATLSCRASQSVGSSYLAWYQQKPGQAPRLLIYGAFSRATGIPDRFSGSGSGTDFTLTISRLEPEDFAVYYCQQYGSSPWTFGQGTKVEIK

SEQ ID NO: 2470 - protein, 118 aa, synthetic construct
  source 1..118: note = Description of Artificial Sequence: Synthetic polypeptide; note = VH of XENP020079
EVQLVESGGGLVKPGGSLRLSCAASGFTFSSYTMHWVRQAPGKGLEWVSFISYDGNTKYYADSVKGRFTISRDNAKNSLYLQMNSLRAEDTAVYYCARTGHLGPFDLWGQGTMVTVSS

SEQ ID NO: 2471 - protein, 108 aa, synthetic construct; identical to SEQ ID NO: 1517
  source 1..108: note = Description of Artificial Sequence: Synthetic polypeptide; note = VL of XENP020079

SEQ ID NO: 2472 - protein, 5 aa, synthetic construct
  source 1..5: note = Description of Artificial Sequence: Synthetic peptide; note = XENP020079 vhCDR1
SYTMH

SEQ ID NO: 2473 - protein, 17 aa, synthetic construct
  source 1..17: note = Description of Artificial Sequence: Synthetic peptide; note = XENP020079 vhCDR2
FISYDGNTKYYADSVKG

SEQ ID NO: 2474 - protein, 9 aa, synthetic construct
  source 1..9: note = Description of Artificial Sequence: Synthetic peptide; note = XENP020079 vhCDR3
TGHLGPFDL

SEQ ID NO: 2475 - protein, 12 aa, synthetic construct
  source 1..12: note = Description of Artificial Sequence: Synthetic peptide; note = XENP020079 vlCDR1
RASQSVGSSYLA

SEQ ID NO: 2476 - protein, 7 aa, synthetic construct
  source 1..7: note = Description of Artificial Sequence: Synthetic peptide; note = XENP020079 vlCDR2
GAFSRAT

SEQ ID NO: 2477 - protein, 9 aa, synthetic construct
  source 1..9: note = Description of Artificial Sequence: Synthetic peptide; note = XENP020079 vlCDR3
QQYGSSPWT

SEQ ID NO: 2478 - protein, 246 aa, synthetic construct
  source 1..246: note = Description of Artificial Sequence: Synthetic polypeptide; note = XENP020080 [CTLA-4]_H3.6_L0.12_scFv(GKPGS)4
EVQLVESGGGLVKPGGSLRLSCAASGFTFSSYTMHWVRQAPGKGLEWVSFISYDGNQKYYADSVKGRFTISRDNAKNSLYLQMNSLRAEDTAVYYCARTGHLGPFDLWGQGTMVTVSSGKPGSGKPGSGKPGSGKPGSEIVLTQSPGTLSVSPGERATLSCRASQSVGSSYLAWYQQKPGQAPRLLIYGAFSRATGIPDRFSGSGSGTDFTLTISRLEPEDFAVYYCQQYGSSPWTFGQGTKVEIK

SEQ ID NO: 2479 - protein, 118 aa, synthetic construct
  source 1..118: note = Description of Artificial Sequence: Synthetic polypeptide; note = VH of XENP020080
EVQLVESGGGLVKPGGSLRLSCAASGFTFSSYTMHWVRQAPGKGLEWVSFISYDGNQKYYADSVKGRFTISRDNAKNSLYLQMNSLRAEDTAVYYCARTGHLGPFDLWGQGTMVTVSS

SEQ ID NO: 2480 - protein, 108 aa, synthetic construct; identical to SEQ ID NO: 1517
  source 1..108: note = Description of Artificial Sequence: Synthetic polypeptide; note = VL of XENP020080

SEQ ID NO: 2481 - protein, 5 aa, synthetic construct
  source 1..5: note = Description of Artificial Sequence: Synthetic peptide; note = XENP020080 vhCDR1
SYTMH

SEQ ID NO: 2482 - protein, 17 aa, synthetic construct
  source 1..17: note = Description of Artificial Sequence: Synthetic peptide; note = XENP020080 vhCDR2
FISYDGNQKYYADSVKG

SEQ ID NO: 2483 - protein, 9 aa, synthetic construct
  source 1..9: note = Description of Artificial Sequence: Synthetic peptide; note = XENP020080 vhCDR3
TGHLGPFDL

SEQ ID NO: 2484 - protein, 12 aa, synthetic construct
  source 1..12: note = Description of Artificial Sequence: Synthetic peptide; note = XENP020080 vlCDR1
RASQSVGSSYLA

SEQ ID NO: 2485 - protein, 7 aa, synthetic construct
  source 1..7: note = Description of Artificial Sequence: Synthetic peptide; note = XENP020080 vlCDR2
GAFSRAT

SEQ ID NO: 2486 - protein, 9 aa, synthetic construct
  source 1..9: note = Description of Artificial Sequence: Synthetic peptide; note = XENP020080 vlCDR3
QQYGSSPWT

SEQ ID NO: 2487 - protein, 246 aa, synthetic construct
  source 1..246: note = Description of Artificial Sequence: Synthetic polypeptide; note = XENP020081 [CTLA-4]_H3.7_L0.12_scFv(GKPGS)4
EVQLVESGGGLVKPGGSLRLSCAASGFTFSSYTMHWVRQAPGKGLEWVCFISYDGNNKYYADSVKGRFTCSRDNAKNSLYLQMNSLRAEDTAVYYCARTGWLGPFDYWGQGTLVTVSSGKPGSGKPGSGKPGSGKPGSEIVLTQSPGTLSVSPGERATLSCRASQSVGSSYLAWYQQKPGQAPRLLIYGAFSRATGIPDRFSGSGSGTDFTLTISRLEPEDFAVYYCQQYGSSPWTFGQGTKVEIK

SEQ ID NO: 2488 - protein, 118 aa, synthetic construct
  source 1..118: note = Description of Artificial Sequence: Synthetic polypeptide; note = VH of XENP020081
EVQLVESGGGLVKPGGSLRLSCAASGFTFSSYTMHWVRQAPGKGLEWVCFISYDGNNKYYADSVKGRFTCSRDNAKNSLYLQMNSLRAEDTAVYYCARTGWLGPFDYWGQGTLVTVSS

SEQ ID NO: 2489 - protein, 108 aa, synthetic construct; identical to SEQ ID NO: 1517
  source 1..108: note = Description of Artificial Sequence: Synthetic polypeptide; note = VL of XENP020081

SEQ ID NO: 2490 - protein, 5 aa, synthetic construct
  source 1..5: note = Description of Artificial Sequence: Synthetic peptide; note = XENP020081 vhCDR1
SYTMH

SEQ ID NO: 2491 - protein, 17 aa, synthetic construct
  source 1..17: note = Description of Artificial Sequence: Synthetic peptide; note = XENP020081 vhCDR2
FISYDGNNKYYADSVKG

SEQ ID NO: 2492 - protein, 9 aa, synthetic construct
  source 1..9: note = Description of Artificial Sequence: Synthetic peptide; note = XENP020081 vhCDR3
TGWLGPFDY

SEQ ID NO: 2493 - protein, 12 aa, synthetic construct
  source 1..12: note = Description of Artificial Sequence: Synthetic peptide; note = XENP020081 vlCDR1
RASQSVGSSYLA

SEQ ID NO: 2494 - protein, 7 aa, synthetic construct
  source 1..7: note = Description of Artificial Sequence: Synthetic peptide; note = XENP020081 vlCDR2
GAFSRAT

SEQ ID NO: 2495 - protein, 9 aa, synthetic construct
  source 1..9: note = Description of Artificial Sequence: Synthetic peptide; note = XENP020081 vlCDR3
QQYGSSPWT

SEQ ID NO: 2496 - protein, 246 aa, synthetic construct
  source 1..246: note = Description of Artificial Sequence: Synthetic polypeptide; note = XENP020082 [CTLA-4]_H3.8_L0.12_scFv(GKPGS)4
EVQLVESGGGLVKPGGSLRLSCAASGFTFSSYTMHWVRQAPGKCLEWVSFISYDGNNKYYADSVKGRFTISRDNAKNSLYLQMNSLRAEDTAVYYCARTGWLGPFDYWGQGTLVTVSSGKPGSGKPGSGKPGSGKPGSEIVLTQSPGTLSVSPGERATLSCRASQSVGSSYLAWYQQKPGQAPRLLIYGAFSRATGIPDRFSGSGSGTDFTLTISRLEPEDFAVYYCQQYGSSPWTFGQGTKVEIK

SEQ ID NO: 2497 - protein, 118 aa, synthetic construct
  source 1..118: note = Description of Artificial Sequence: Synthetic polypeptide; note = VH of XENP020082
EVQLVESGGGLVKPGGSLRLSCAASGFTFSSYTMHWVRQAPGKCLEWVSFISYDGNNKYYADSVKGRFTISRDNAKNSLYLQMNSLRAEDTAVYYCARTGWLGPFDYWGQGTLVTVSS

SEQ ID NO: 2498 - protein, 108 aa, synthetic construct; identical to SEQ ID NO: 1517
  source 1..108: note = Description of Artificial Sequence: Synthetic polypeptide; note = VL of XENP020082

SEQ ID NO: 2499 - protein, 5 aa, synthetic construct
  source 1..5: note = Description of Artificial Sequence: Synthetic peptide; note = XENP020082 vhCDR1
SYTMH

SEQ ID NO: 2500 - protein, 17 aa, synthetic construct
  source 1..17: note = Description of Artificial Sequence: Synthetic peptide; note = XENP020082 vhCDR2
FISYDGNNKYYADSVKG

SEQ ID NO: 2501 - protein, 9 aa, synthetic construct
  source 1..9: note = Description of Artificial Sequence: Synthetic peptide; note = XENP020082 vhCDR3
TGWLGPFDY

SEQ ID NO: 2502 - protein, 12 aa, synthetic construct
  source 1..12: note = Description of Artificial Sequence: Synthetic peptide; note = XENP020082 vlCDR1
RASQSVGSSYLA

SEQ ID NO: 2503 - protein, 7 aa, synthetic construct
  source 1..7: note = Description of Artificial Sequence: Synthetic peptide; note = XENP020082 vlCDR2
GAFSRAT

SEQ ID NO: 2504 - protein, 9 aa, synthetic construct
  source 1..9: note = Description of Artificial Sequence: Synthetic peptide; note = XENP020082 vlCDR3
QQYGSSPWT

SEQ ID NO: 2505 - protein, 246 aa, synthetic construct
  source 1..246: note = Description of Artificial Sequence: Synthetic polypeptide; note = XENP020360 [CTLA-4]_H3.9_L0.12_scFv(GKPGS)4
EVQLVESGGGLVKPGGSLRLSCAASGFTFSSYTMHWVRQAPGKGLEWVSFISYDGNYKYYADSVKGRFTISRDNAKNSLYLQMNSLRAEDTAVYYCARTGHLGPFDLWGQGTMVTVSSGKPGSGKPGSGKPGSGKPGSEIVLTQSPGTLSVSPGERATLSCRASQSVGSSYLAWYQQKPGQAPRLLIYGAFSRATGIPDRFSGSGSGTDFTLTISRLEPEDFAVYYCQQYGSSPWTFGQGTKVEIK

SEQ ID NO: 2506 - protein, 118 aa, synthetic construct
  source 1..118: note = Description of Artificial Sequence: Synthetic polypeptide; note = VH of XENP020360
EVQLVESGGGLVKPGGSLRLSCAASGFTFSSYTMHWVRQAPGKGLEWVSFISYDGNYKYYADSVKGRFTISRDNAKNSLYLQMNSLRAEDTAVYYCARTGHLGPFDLWGQGTMVTVSS

SEQ ID NO: 2507 - protein, 108 aa, synthetic construct; identical to SEQ ID NO: 1517
  source 1..108: note = Description of Artificial Sequence: Synthetic polypeptide; note = VL of XENP020360

SEQ ID NO: 2508 - protein, 5 aa, synthetic construct
  source 1..5: note = Description of Artificial Sequence: Synthetic peptide; note = XENP020360 vhCDR1
SYTMH

SEQ ID NO: 2509 - protein, 17 aa, synthetic construct
  source 1..17: note = Description of Artificial Sequence: Synthetic peptide; note = XENP020360 vhCDR2
FISYDGNYKYYADSVKG

SEQ ID NO: 2510 - protein, 9 aa, synthetic construct
  source 1..9: note = Description of Artificial Sequence: Synthetic peptide; note = XENP020360 vhCDR3
TGHLGPFDL

SEQ ID NO: 2511 - protein, 12 aa, synthetic construct
  source 1..12: note = Description of Artificial Sequence: Synthetic peptide; note = XENP020360 vlCDR1
RASQSVGSSYLA

SEQ ID NO: 2512 - protein, 7 aa, synthetic construct
  source 1..7: note = Description of Artificial Sequence: Synthetic peptide; note = XENP020360 vlCDR2
GAFSRAT

SEQ ID NO: 2513 - protein, 9 aa, synthetic construct
  source 1..9: note = Description of Artificial Sequence: Synthetic peptide; note = XENP020360 vlCDR3
QQYGSSPWT

SEQ ID NO: 2514 - protein, 246 aa, synthetic construct
  source 1..246: note = Description of Artificial Sequence: Synthetic polypeptide; note = XENP020361 [CTLA-4]_H3.10_L0.12_scFv(GKPGS)4
EVQLVESGGGLVKPGGSLRLSCAASGFTFSSYTMHWVRQAPGKGLEWVSFISYDGNYKYYADSVKGRFTISRDNAKNSLYLQMNSLRAEDTAVYYCARTGLLGPFDLWGQGTMVTVSSGKPGSGKPGSGKPGSGKPGSEIVLTQSPGTLSVSPGERATLSCRASQSVGSSYLAWYQQKPGQAPRLLIYGAFSRATGIPDRFSGSGSGTDFTLTISRLEPEDFAVYYCQQYGSSPWTFGQGTKVEIK

SEQ ID NO: 2515 - protein, 118 aa, synthetic construct
  source 1..118: note = Description of Artificial Sequence: Synthetic polypeptide; note = VH of XENP020361
EVQLVESGGGLVKPGGSLRLSCAASGFTFSSYTMHWVRQAPGKGLEWVSFISYDGNYKYYADSVKGRFTISRDNAKNSLYLQMNSLRAEDTAVYYCARTGLLGPFDLWGQGTMVTVSS

SEQ ID NO: 2516 - protein, 108 aa, synthetic construct; identical to SEQ ID NO: 1517
  source 1..108: note = Description of Artificial Sequence: Synthetic polypeptide; note = VL of XENP020361

SEQ ID NO: 2517 - protein, 5 aa, synthetic construct
  source 1..5: note = Description of Artificial Sequence: Synthetic peptide; note = XENP020361 vhCDR1
SYTMH

SEQ ID NO: 2518 - protein, 17 aa, synthetic construct
  source 1..17: note = Description of Artificial Sequence: Synthetic peptide; note = XENP020361 vhCDR2
FISYDGNYKYYADSVKG

SEQ ID NO: 2519 - protein, 9 aa, synthetic construct
  source 1..9: note = Description of Artificial Sequence: Synthetic peptide; note = XENP020361 vhCDR3
TGLLGPFDL

SEQ ID NO: 2520 - protein, 12 aa, synthetic construct
  source 1..12: note = Description of Artificial Sequence: Synthetic peptide; note = XENP020361 vlCDR1
RASQSVGSSYLA

SEQ ID NO: 2521 - protein, 7 aa, synthetic construct
  source 1..7: note = Description of Artificial Sequence: Synthetic peptide; note = XENP020361 vlCDR2
GAFSRAT

SEQ ID NO: 2522 - protein, 9 aa, synthetic construct
  source 1..9: note = Description of Artificial Sequence: Synthetic peptide; note = XENP020361 vlCDR3
QQYGSSPWT

SEQ ID NO: 2523 - protein, 246 aa, synthetic construct
  source 1..246: note = Description of Artificial Sequence: Synthetic polypeptide; note = XENP020362 [CTLA-4]_H3.11_L0.12_scFv(GKPGS)4
EVQLVESGGGLVKPGGSLRLSCAASGFTFSSYTMHWVRQAPGKGLEWVSFISYDGNHKYYADSVKGRFTISRDNAKNSLYLQMNSLRAEDTAVYYCARGGHLGPFDLWGQGTMVTVSSGKPGSGKPGSGKPGSGKPGSEIVLTQSPGTLSVSPGERATLSCRASQSVGSSYLAWYQQKPGQAPRLLIYGAFSRATGIPDRFSGSGSGTDFTLTISRLEPEDFAVYYCQQYGSSPWTFGQGTKVEIK

SEQ ID NO: 2524 - protein, 118 aa, synthetic construct
  source 1..118: note = Description of Artificial Sequence: Synthetic polypeptide; note = VH of XENP020362
EVQLVESGGGLVKPGGSLRLSCAASGFTFSSYTMHWVRQAPGKGLEWVSFISYDGNHKYYADSVKGRFTISRDNAKNSLYLQMNSLRAEDTAVYYCARGGHLGPFDLWGQGTMVTVSS

SEQ ID NO: 2525 - protein, 108 aa, synthetic construct; identical to SEQ ID NO: 1517
  source 1..108: note = Description of Artificial Sequence: Synthetic polypeptide; note = VL of XENP020362

SEQ ID NO: 2526 - protein, 5 aa, synthetic construct
  source 1..5: note = Description of Artificial Sequence: Synthetic peptide; note = XENP020362 vhCDR1
SYTMH

SEQ ID NO: 2527 - protein, 17 aa, synthetic construct
  source 1..17: note = Description of Artificial Sequence: Synthetic peptide; note = XENP020362 vhCDR2
FISYDGNHKYYADSVKG

SEQ ID NO: 2528 - protein, 9 aa, synthetic construct
  source 1..9: note = Description of Artificial Sequence: Synthetic peptide; note = XENP020362 vhCDR3
GGHLGPFDL

SEQ ID NO: 2529 - protein, 12 aa, synthetic construct
  source 1..12: note = Description of Artificial Sequence: Synthetic peptide; note = XENP020362 vlCDR1
RASQSVGSSYLA

SEQ ID NO: 2530 - protein, 7 aa, synthetic construct
  source 1..7: note = Description of Artificial Sequence: Synthetic peptide; note = XENP020362 vlCDR2
GAFSRAT

SEQ ID NO: 2531 - protein, 9 aa, synthetic construct
  source 1..9: note = Description of Artificial Sequence: Synthetic peptide; note = XENP020362 vlCDR3
QQYGSSPWT

SEQ ID NO: 2532 - protein, 246 aa, synthetic construct
  source 1..246: note = Description of Artificial Sequence: Synthetic polypeptide; note = XENP020363 [CTLA-4]_H3.12_L0.12_scFv(GKPGS)4
EVQLVESGGGLVKPGGSLRLSCAASGFTFSSYTMHWVRQAPGKGLEWVSFISYDGNHKYYADSVKGRFTISRDNAKNSLYLQMNSLRAEDTAVYYCARTSHLGPFDLWGQGTMVTVSSGKPGSGKPGSGKPGSGKPGSEIVLTQSPGTLSVSPGERATLSCRASQSVGSSYLAWYQQKPGQAPRLLIYGAFSRATGIPDRFSGSGSGTDFTLTISRLEPEDFAVYYCQQYGSSPWTFGQGTKVEIK

SEQ ID NO: 2533 - protein, 118 aa, synthetic construct
  source 1..118: note = Description of Artificial Sequence: Synthetic polypeptide; note = VH of XENP020363
EVQLVESGGGLVKPGGSLRLSCAASGFTFSSYTMHWVRQAPGKGLEWVSFISYDGNHKYYADSVKGRFTISRDNAKNSLYLQMNSLRAEDTAVYYCARTSHLGPFDLWGQGTMVTVSS

SEQ ID NO: 2534 - protein, 108 aa, synthetic construct; identical to SEQ ID NO: 1517
  source 1..108: note = Description of Artificial Sequence: Synthetic polypeptide; note = VL of XENP020363

SEQ ID NO: 2535 - protein, 5 aa, synthetic construct
  source 1..5: note = Description of Artificial Sequence: Synthetic peptide; note = XENP020363 vhCDR1
SYTMH

SEQ ID NO: 2536 - protein, 17 aa, synthetic construct
  source 1..17: note = Description of Artificial Sequence: Synthetic peptide; note = XENP020363 vhCDR2
FISYDGNHKYYADSVKG

SEQ ID NO: 2537 - protein, 9 aa, synthetic construct
  source 1..9: note = Description of Artificial Sequence: Synthetic peptide; note = XENP020363 vhCDR3
TSHLGPFDL

SEQ ID NO: 2538 - protein, 12 aa, synthetic construct
  source 1..12: note = Description of Artificial Sequence: Synthetic peptide; note = XENP020363 vlCDR1
RASQSVGSSYLA

SEQ ID NO: 2539 - protein, 7 aa, synthetic construct
  source 1..7: note = Description of Artificial Sequence: Synthetic peptide; note = XENP020363 vlCDR2
GAFSRAT

SEQ ID NO: 2540 - protein, 9 aa, synthetic construct
  source 1..9: note = Description of Artificial Sequence: Synthetic peptide; note = XENP020363 vlCDR3
QQYGSSPWT

SEQ ID NO: 2541 - protein, 246 aa, synthetic construct
  source 1..246: note = Description of Artificial Sequence: Synthetic polypeptide; note = XENP020364 [CTLA-4]_H3.13_L0.12_scFv(GKPGS)4
EVQLVESGGGLVKPGGSLRLSCAASGFTFSSYTMHWVRQAPGKGLEWVSFISYDGNHKYYADSVKGRFTISRDNAKNSLYLQMNSLRAEDTAVYYCARGGLLGPFDLWGQGTMVTVSSGKPGSGKPGSGKPGSGKPGSEIVLTQSPGTLSVSPGERATLSCRASQSVGSSYLAWYQQKPGQAPRLLIYGAFSRATGIPDRFSGSGSGTDFTLTISRLEPEDFAVYYCQQYGSSPWTFGQGTKVEIK

SEQ ID NO: 2542 - protein, 118 aa, synthetic construct
  source 1..118: note = Description of Artificial Sequence: Synthetic polypeptide; note = VH of XENP020364
EVQLVESGGGLVKPGGSLRLSCAASGFTFSSYTMHWVRQAPGKGLEWVSFISYDGNHKYYADSVKGRFTISRDNAKNSLYLQMNSLRAEDTAVYYCARGGLLGPFDLWGQGTMVTVSS

SEQ ID NO: 2543 - protein, 108 aa, synthetic construct; identical to SEQ ID NO: 1517
  source 1..108: note = Description of Artificial Sequence: Synthetic polypeptide; note = VL of XENP020364

SEQ ID NO: 2544 - protein, 5 aa, synthetic construct
  source 1..5: note = Description of Artificial Sequence: Synthetic peptide; note = XENP020364 vhCDR1
SYTMH

SEQ ID NO: 2545 - protein, 17 aa, synthetic construct
  source 1..17: note = Description of Artificial Sequence: Synthetic peptide; note = XENP020364 vhCDR2
FISYDGNHKYYADSVKG

SEQ ID NO: 2546 - protein, 9 aa, synthetic construct
  source 1..9: note = Description of Artificial Sequence: Synthetic peptide; note = XENP020364 vhCDR3
GGLLGPFDL

SEQ ID NO: 2547 - protein, 12 aa, synthetic construct
  source 1..12: note = Description of Artificial Sequence: Synthetic peptide; note = XENP020364 vlCDR1
RASQSVGSSYLA

SEQ ID NO: 2548 - protein, 7 aa, synthetic construct
  source 1..7: note = Description of Artificial Sequence: Synthetic peptide; note = XENP020364 vlCDR2
GAFSRAT

SEQ ID NO: 2549 - protein, 9 aa, synthetic construct
  source 1..9: note = Description of Artificial Sequence: Synthetic peptide; note = XENP020364 vlCDR3
QQYGSSPWT

SEQ ID NO: 2550 - protein, 246 aa, synthetic construct
  source 1..246: note = Description of Artificial Sequence: Synthetic polypeptide; note = XENP020365 [CTLA-4]_H3.14_L0.12_scFv(GKPGS)4
EVQLVESGGGLVKPGGSLRLSCAASGFTFSSYTMHWVRQAPGKGLEWVSFISYDGNHKYYADSVKGRFTISRDNAKNSLYLQMNSLRAEDTAVYYCARTSLLGPFDLWGQGTMVTVSSGKPGSGKPGSGKPGSGKPGSEIVLTQSPGTLSVSPGERATLSCRASQSVGSSYLAWYQQKPGQAPRLLIYGAFSRATGIPDRFSGSGSGTDFTLTISRLEPEDFAVYYCQQYGSSPWTFGQGTKVEIK

SEQ ID NO: 2551 - protein, 118 aa, synthetic construct
  source 1..118: note = Description of Artificial Sequence: Synthetic polypeptide; note = VH of XENP020365
EVQLVESGGGLVKPGGSLRLSCAASGFTFSSYTMHWVRQAPGKGLEWVSFISYDGNHKYYADSVKGRFTISRDNAKNSLYLQMNSLRAEDTAVYYCARTSLLGPFDLWGQGTMVTVSS

SEQ ID NO: 2552 - protein, 108 aa, synthetic construct; identical to SEQ ID NO: 1517
  source 1..108: note = Description of Artificial Sequence: Synthetic polypeptide; note = VL of XENP020365

SEQ ID NO: 2553 - protein, 5 aa, synthetic construct
  source 1..5: note = Description of Artificial Sequence: Synthetic peptide; note = XENP020365 vhCDR1
SYTMH

SEQ ID NO: 2554 - protein, 17 aa, synthetic construct
  source 1..17: note = Description of Artificial Sequence: Synthetic peptide; note = XENP020365 vhCDR2
FISYDGNHKYYADSVKG

SEQ ID NO: 2555 - protein, 9 aa, synthetic construct
  source 1..9: note = Description of Artificial Sequence: Synthetic peptide; note = XENP020365 vhCDR3
TSLLGPFDL

SEQ ID NO: 2556 - protein, 12 aa, synthetic construct
  source 1..12: note = Description of Artificial Sequence: Synthetic peptide; note = XENP020365 vlCDR1
RASQSVGSSYLA

SEQ ID NO: 2557 - protein, 7 aa, synthetic construct
  source 1..7: note = Description of Artificial Sequence: Synthetic peptide; note = XENP020365 vlCDR2
GAFSRAT

SEQ ID NO: 2558 - protein, 9 aa, synthetic construct
  source 1..9: note = Description of Artificial Sequence: Synthetic peptide; note = XENP020365 vlCDR3
QQYGSSPWT

SEQ ID NO: 2559 - protein, 246 aa, synthetic construct
  source 1..246: note = Description of Artificial Sequence: Synthetic polypeptide; note = XENP020366 [CTLA-4]_H3.15_L0.12_scFv(GKPGS)4
EVQLVESGGGLVKPGGSLRLSCAASGFTFSSYTMHWVRQAPGKGLEWVSFISYDGNQKYYADSVKGRFTISRDNAKNSLYLQMNSLRAEDTAVYYCARGGHLGPFDLWGQGTMVTVSSGKPGSGKPGSGKPGSGKPGSEIVLTQSPGTLSVSPGERATLSCRASQSVGSSYLAWYQQKPGQAPRLLIYGAFSRATGIPDRFSGSGSGTDFTLTISRLEPEDFAVYYCQQYGSSPWTFGQGTKVEIK

SEQ ID NO: 2560 - protein, 118 aa, synthetic construct
  source 1..118: note = Description of Artificial Sequence: Synthetic polypeptide; note = VH of XENP020366
EVQLVESGGGLVKPGGSLRLSCAASGFTFSSYTMHWVRQAPGKGLEWVSFISYDGNQKYYADSVKGRFTISRDNAKNSLYLQMNSLRAEDTAVYYCARGGHLGPFDLWGQGTMVTVSS

SEQ ID NO: 2561 - protein, 108 aa, synthetic construct; identical to SEQ ID NO: 1517
  source 1..108: note = Description of Artificial Sequence: Synthetic polypeptide; note = VL of XENP020366

SEQ ID NO: 2562 - protein, 5 aa, synthetic construct
  source 1..5: note = Description of Artificial Sequence: Synthetic peptide; note = XENP020366 vhCDR1
SYTMH

SEQ ID NO: 2563 - protein, 17 aa, synthetic construct
  source 1..17: note = Description of Artificial Sequence: Synthetic peptide; note = XENP020366 vhCDR2
FISYDGNQKYYADSVKG

SEQ ID NO: 2564 - protein, 9 aa, synthetic construct
  source 1..9: note = Description of Artificial Sequence: Synthetic peptide; note = XENP020366 vhCDR3
GGHLGPFDL

SEQ ID NO: 2565 - protein, 12 aa, synthetic construct
  source 1..12: note = Description of Artificial Sequence: Synthetic peptide; note = XENP020366 vlCDR1
RASQSVGSSYLA

SEQ ID NO: 2566 - protein, 7 aa, synthetic construct
  source 1..7: note = Description of Artificial Sequence: Synthetic peptide; note = XENP020366 vlCDR2
GAFSRAT

SEQ ID NO: 2567 - protein, 9 aa, synthetic construct
  source 1..9: note = Description of Artificial Sequence: Synthetic peptide; note = XENP020366 vlCDR3
QQYGSSPWT

SEQ ID NO: 2568 - protein, 246 aa, synthetic construct
  source 1..246: note = Description of Artificial Sequence: Synthetic polypeptide; note = XENP020367 [CTLA-4]_H3.16_L0.12_scFv(GKPGS)4
EVQLVESGGGLVKPGGSLRLSCAASGFTFSSYTMHWVRQAPGKGLEWVSFISYDGNQKYYADSVKGRFTISRDNAKNSLYLQMNSLRAEDTAVYYCARTSHLGPFDLWGQGTMVTVSSGKPGSGKPGSGKPGSGKPGSEIVLTQSPGTLSVSPGERATLSCRASQSVGSSYLAWYQQKPGQAPRLLIYGAFSRATGIPDRFSGSGSGTDFTLTISRLEPEDFAVYYCQQYGSSPWTFGQGTKVEIK

SEQ ID NO: 2569 - protein, 118 aa, synthetic construct
  source 1..118: note = Description of Artificial Sequence: Synthetic polypeptide; note = VH of XENP020367
EVQLVESGGGLVKPGGSLRLSCAASGFTFSSYTMHWVRQAPGKGLEWVSFISYDGNQKYYADSVKGRFTISRDNAKNSLYLQMNSLRAEDTAVYYCARTSHLGPFDLWGQGTMVTVSS

SEQ ID NO: 2570 - protein, 108 aa, synthetic construct; identical to SEQ ID NO: 1517
  source 1..108: note = Description of Artificial Sequence: Synthetic polypeptide; note = VL of XENP020367

SEQ ID NO: 2571 - protein, 5 aa, synthetic construct
  source 1..5: note = Description of Artificial Sequence: Synthetic peptide; note = XENP020367 vhCDR1
SYTMH

SEQ ID NO: 2572 - protein, 17 aa, synthetic construct
  source 1..17: note = Description of Artificial Sequence: Synthetic peptide; note = XENP020367 vhCDR2
FISYDGNQKYYADSVKG

SEQ ID NO: 2573 - protein, 9 aa, synthetic construct
  source 1..9: note = Description of Artificial Sequence: Synthetic peptide; note = XENP020367 vhCDR3
TSHLGPFDL

SEQ ID NO: 2574 - protein, 12 aa, synthetic construct
  source 1..12: note = Description of Artificial Sequence: Synthetic peptide; note = XENP020367 vlCDR1
RASQSVGSSYLA

SEQ ID NO: 2575 - protein, 7 aa, synthetic construct
  source 1..7: note = Description of Artificial Sequence: Synthetic peptide; note = XENP020367 vlCDR2
GAFSRAT

SEQ ID NO: 2576 - protein, 9 aa, synthetic construct
  source 1..9: note = Description of Artificial Sequence: Synthetic peptide; note = XENP020367 vlCDR3
QQYGSSPWT

SEQ ID NO: 2577 - protein, 246 aa, synthetic construct
  source 1..246: note = Description of Artificial Sequence: Synthetic polypeptide; note = XENP020368 [CTLA-4]_H3.17_L0.12_scFv(GKPGS)4
EVQLVESGGGLVKPGGSLRLSCAASGFTFSSYTMHWVRQAPGKGLEWVSFISYDGNQKYYADSVKGRFTISRDNAKNSLYLQMNSLRAEDTAVYYCARGGLLGPFDLWGQGTMVTVSSGKPGSGKPGSGKPGSGKPGSEIVLTQSPGTLSVSPGERATLSCRASQSVGSSYLAWYQQKPGQAPRLLIYGAFSRATGIPDRFSGSGSGTDFTLTISRLEPEDFAVYYCQQYGSSPWTFGQGTKVEIK

SEQ ID NO: 2578 - protein, 118 aa, synthetic construct
  source 1..118: note = Description of Artificial Sequence: Synthetic polypeptide; note = VH of XENP020368
EVQLVESGGGLVKPGGSLRLSCAASGFTFSSYTMHWVRQAPGKGLEWVSFISYDGNQKYYADSVKGRFTISRDNAKNSLYLQMNSLRAEDTAVYYCARGGLLGPFDLWGQGTMVTVSS

SEQ ID NO: 2579 - protein, 108 aa, synthetic construct; identical to SEQ ID NO: 1517
  source 1..108: note = Description of Artificial Sequence: Synthetic polypeptide; note = VL of XENP020368

SEQ ID NO: 2580 - protein, 5 aa, synthetic construct
  source 1..5: note = Description of Artificial Sequence: Synthetic peptide; note = XENP020368 vhCDR1
SYTMH

SEQ ID NO: 2581 - protein, 17 aa, synthetic construct
  source 1..17: note = Description of Artificial Sequence: Synthetic peptide; note = XENP020368 vhCDR2
FISYDGNQKYYADSVKG

SEQ ID NO: 2582 - protein, 9 aa, synthetic construct
  source 1..9: note = Description of Artificial Sequence: Synthetic peptide; note = XENP020368 vhCDR3
GGLLGPFDL

SEQ ID NO: 2583 - protein, 12 aa, synthetic construct
  source 1..12: note = Description of Artificial Sequence: Synthetic peptide; note = XENP020368 vlCDR1
RASQSVGSSYLA

SEQ ID NO: 2584 - protein, 7 aa, synthetic construct
  source 1..7: note = Description of Artificial Sequence: Synthetic peptide; note = XENP020368 vlCDR2
GAFSRAT

SEQ ID NO: 2585 - protein, 9 aa, synthetic construct
  source 1..9: note = Description of Artificial Sequence: Synthetic peptide; note = XENP020368 vlCDR3
QQYGSSPWT

SEQ ID NO: 2586 - protein, 246 aa, synthetic construct
  source 1..246: note = Description of Artificial Sequence: Synthetic polypeptide; note = XENP020369 [CTLA-4]_H3.18_L0.12_scFv(GKPGS)4
EVQLVESGGGLVKPGGSLRLSCAASGFTFSSYTMHWVRQAPGKGLEWVSFISYDGNQKYYADSVKGRFTISRDNAKNSLYLQMNSLRAEDTAVYYCARTSLLGPFDLWGQGTMVTVSSGKPGSGKPGSGKPGSGKPGSEIVLTQSPGTLSVSPGERATLSCRASQSVGSSYLAWYQQKPGQAPRLLIYGAFSRATGIPDRFSGSGSGTDFTLTISRLEPEDFAVYYCQQYGSSPWTFGQGTKVEIK

SEQ ID NO: 2587 - protein, 118 aa, synthetic construct
  source 1..118: note = Description of Artificial Sequence: Synthetic polypeptide; note = VH of XENP020369
EVQLVESGGGLVKPGGSLRLSCAASGFTFSSYTMHWVRQAPGKGLEWVSFISYDGNQKYYADSVKGRFTISRDNAKNSLYLQMNSLRAEDTAVYYCARTSLLGPFDLWGQGTMVTVSS

SEQ ID NO: 2588 - protein, 108 aa, synthetic construct; identical to SEQ ID NO: 1517
  source 1..108: note = Description of Artificial Sequence: Synthetic polypeptide; note = VL of XENP020369

SEQ ID NO: 2589 - protein, 5 aa, synthetic construct
  source 1..5: note = Description of Artificial Sequence: Synthetic peptide; note = XENP020369 vhCDR1
SYTMH

SEQ ID NO: 2590 - protein, 17 aa, synthetic construct
  source 1..17: note = Description of Artificial Sequence: Synthetic peptide; note = XENP020369 vhCDR2
FISYDGNQKYYADSVKG

SEQ ID NO: 2591 - protein, 9 aa, synthetic construct
  source 1..9: note = Description of Artificial Sequence: Synthetic peptide; note = XENP020369 vhCDR3
TSLLGPFDL

SEQ ID NO: 2592 - protein, 12 aa, synthetic construct
  source 1..12: note = Description of Artificial Sequence: Synthetic peptide; note = XENP020369 vlCDR1
RASQSVGSSYLA

SEQ ID NO: 2593 - protein, 7 aa, synthetic construct
  source 1..7: note = Description of Artificial Sequence: Synthetic peptide; note = XENP020369 vlCDR2
GAFSRAT

SEQ ID NO: 2594 - protein, 9 aa, synthetic construct
  source 1..9: note = Description of Artificial Sequence: Synthetic peptide; note = XENP020369 vlCDR3
QQYGSSPWT

SEQ ID NO: 2595 - protein, 246 aa, synthetic construct
  source 1..246: note = Description of Artificial Sequence: Synthetic polypeptide; note = XENP020370 [CTLA-4]_H3.19_L0.12_scFv(GKPGS)4
EVQLVESGGGLVKPGGSLRLSCAASGFTFSSYTMHWVRQAPGKGLEWVSFISYDGNTKYYADSVKGRFTISRDNAKNSLYLQMNSLRAEDTAVYYCARGGHLGPFDLWGQGTMVTVSSGKPGSGKPGSGKPGSGKPGSEIVLTQSPGTLSVSPGERATLSCRASQSVGSSYLAWYQQKPGQAPRLLIYGAFSRATGIPDRFSGSGSGTDFTLTISRLEPEDFAVYYCQQYGSSPWTFGQGTKVEIK

SEQ ID NO: 2596 - protein, 118 aa, synthetic construct
  source 1..118: note = Description of Artificial Sequence: Synthetic polypeptide; note = VH of XENP020370
EVQLVESGGGLVKPGGSLRLSCAASGFTFSSYTMHWVRQAPGKGLEWVSFISYDGNTKYYADSVKGRFTISRDNAKNSLYLQMNSLRAEDTAVYYCARGGHLGPFDLWGQGTMVTVSS

SEQ ID NO: 2597 - protein, 108 aa, synthetic construct; identical to SEQ ID NO: 1517
  source 1..108: note = Description of Artificial Sequence: Synthetic polypeptide; note = VL of XENP020370

SEQ ID NO: 2598 - protein, 5 aa, synthetic construct
  source 1..5: note = Description of Artificial Sequence: Synthetic peptide; note = XENP020370 vhCDR1
SYTMH

SEQ ID NO: 2599 - protein, 17 aa, synthetic construct
  source 1..17: note = Description of Artificial Sequence: Synthetic peptide; note = XENP020370 vhCDR2
FISYDGNTKYYADSVKG

SEQ ID NO: 2600 - protein, 9 aa, synthetic construct
  source 1..9: note = Description of Artificial Sequence: Synthetic peptide; note = XENP020370 vhCDR3
GGHLGPFDL

SEQ ID NO: 2601 - protein, 12 aa, synthetic construct
  source 1..12: note = Description of Artificial Sequence: Synthetic peptide; note = XENP020370 vlCDR1
RASQSVGSSYLA

SEQ ID NO: 2602 - protein, 7 aa, synthetic construct
  source 1..7: note = Description of Artificial Sequence: Synthetic peptide; note = XENP020370 vlCDR2
GAFSRAT

SEQ ID NO: 2603 - protein, 9 aa, synthetic construct
  source 1..9: note = Description of Artificial Sequence: Synthetic peptide; note = XENP020370 vlCDR3
QQYGSSPWT

SEQ ID NO: 2604 - protein, 246 aa, synthetic construct
  source 1..246: note = Description of Artificial Sequence: Synthetic polypeptide; note = XENP020371 [CTLA-4]_H3.20_L0.12_scFv(GKPGS)4
EVQLVESGGGLVKPGGSLRLSCAASGFTFSSYTMHWVRQAPGKGLEWVSFISYDGNTKYYADSVKGRFTISRDNAKNSLYLQMNSLRAEDTAVYYCARTSHLGPFDLWGQGTMVTVSSGKPGSGKPGSGKPGSGKPGSEIVLTQSPGTLSVSPGERATLSCRASQSVGSSYLAWYQQKPGQAPRLLIYGAFSRATGIPDRFSGSGSGTDFTLTISRLEPEDFAVYYCQQYGSSPWTFGQGTKVEIK

SEQ ID NO: 2605 - protein, 118 aa, synthetic construct
  source 1..118: note = Description of Artificial Sequence: Synthetic polypeptide; note = VH of XENP020371
EVQLVESGGGLVKPGGSLRLSCAASGFTFSSYTMHWVRQAPGKGLEWVSFISYDGNTKYYADSVKGRFTISRDNAKNSLYLQMNSLRAEDTAVYYCARTSHLGPFDLWGQGTMVTVSS

SEQ ID NO: 2606 - protein, 108 aa, synthetic construct; identical to SEQ ID NO: 1517
  source 1..108: note = Description of Artificial Sequence: Synthetic polypeptide; note = VL of XENP020371

SEQ ID NO: 2607 - protein, 5 aa, synthetic construct
  source 1..5: note = Description of Artificial Sequence: Synthetic peptide; note = XENP020371 vhCDR1
SYTMH

SEQ ID NO: 2608 - protein, 17 aa, synthetic construct
  source 1..17: note = Description of Artificial Sequence: Synthetic peptide; note = XENP020371 vhCDR2
FISYDGNTKYYADSVKG

SEQ ID NO: 2609 - protein, 9 aa, synthetic construct
  source 1..9: note = Description of Artificial Sequence: Synthetic peptide; note = XENP020371 vhCDR3
TSHLGPFDL

SEQ ID NO: 2610 - protein, 12 aa, synthetic construct
  source 1..12: note = Description of Artificial Sequence: Synthetic peptide; note = XENP020371 vlCDR1
RASQSVGSSYLA

SEQ ID NO: 2611 - protein, 7 aa, synthetic construct
  source 1..7: note = Description of Artificial Sequence: Synthetic peptide; note = XENP020371 vlCDR2
GAFSRAT

SEQ ID NO: 2612 - protein, 9 aa, synthetic construct
  source 1..9: note = Description of Artificial Sequence: Synthetic peptide; note = XENP020371 vlCDR3
QQYGSSPWT

SEQ ID NO: 2613 - protein, 246 aa, synthetic construct
  source 1..246: note = Description of Artificial Sequence: Synthetic polypeptide; note = XENP020372 [CTLA-4]_H3.21_L0.12_scFv(GKPGS)4
EVQLVESGGGLVKPGGSLRLSCAASGFTFSSYTMHWVRQAPGKGLEWVSFISYDGNTKYYADSVKGRFTISRDNAKNSLYLQMNSLRAEDTAVYYCARGGLLGPFDLWGQGTMVTVSSGKPGSGKPGSGKPGSGKPGSEIVLTQSPGTLSVSPGERATLSCRASQSVGSSYLAWYQQKPGQAPRLLIYGAFSRATGIPDRFSGSGSGTDFTLTISRLEPEDFAVYYCQQYGSSPWTFGQGTKVEIK

SEQ ID NO: 2614 - protein, 118 aa, synthetic construct
  source 1..118: note = Description of Artificial Sequence: Synthetic polypeptide; note = VH of XENP020372
EVQLVESGGGLVKPGGSLRLSCAASGFTFSSYTMHWVRQAPGKGLEWVSFISYDGNTKYYADSVKGRFTISRDNAKNSLYLQMNSLRAEDTAVYYCARGGLLGPFDLWGQGTMVTVSS

SEQ ID NO: 2615 - protein, 108 aa, synthetic construct; identical to SEQ ID NO: 1517
  source 1..108: note = Description of Artificial Sequence: Synthetic polypeptide; note = VL of XENP020372

SEQ ID NO: 2616 - protein, 5 aa, synthetic construct
  source 1..5: note = Description of Artificial Sequence: Synthetic peptide; note = XENP020372 vhCDR1
SYTMH

SEQ ID NO: 2617 - protein, 17 aa, synthetic construct
  source 1..17: note = Description of Artificial Sequence: Synthetic peptide; note = XENP020372 vhCDR2
FISYDGNTKYYADSVKG

SEQ ID NO: 2618 - protein, 9 aa, synthetic construct
  source 1..9: note = Description of Artificial Sequence: Synthetic peptide; note = XENP020372 vhCDR3
GGLLGPFDL

SEQ ID NO: 2619 - protein, 12 aa, synthetic construct
  source 1..12: note = Description of Artificial Sequence: Synthetic peptide; note = XENP020372 vlCDR1
RASQSVGSSYLA

SEQ ID NO: 2620 - protein, 7 aa, synthetic construct
  source 1..7: note = Description of Artificial Sequence: Synthetic peptide; note = XENP020372 vlCDR2
GAFSRAT

SEQ ID NO: 2621 - protein, 9 aa, synthetic construct
  source 1..9: note = Description of Artificial Sequence: Synthetic peptide; note = XENP020372 vlCDR3
QQYGSSPWT

SEQ ID NO: 2622 - protein, 246 aa, synthetic construct
  source 1..246: note = Description of Artificial Sequence: Synthetic polypeptide; note = XENP020373 [CTLA-4]_H3.22_L0.12_scFv(GKPGS)4
EVQLVESGGGLVKPGGSLRLSCAASGFTFSSYTMHWVRQAPGKGLEWVSFISYDGNTKYYADSVKGRFTISRDNAKNSLYLQMNSLRAEDTAVYYCARTSLLGPFDLWGQGTMVTVSSGKPGSGKPGSGKPGSGKPGSEIVLTQSPGTLSVSPGERATLSCRASQSVGSSYLAWYQQKPGQAPRLLIYGAFSRATGIPDRFSGSGSGTDFTLTISRLEPEDFAVYYCQQYGSSPWTFGQGTKVEIK

SEQ ID NO: 2623 - protein, 118 aa, synthetic construct
  source 1..118: note = Description of Artificial Sequence: Synthetic polypeptide; note = VH of XENP020373
EVQLVESGGGLVKPGGSLRLSCAASGFTFSSYTMHWVRQAPGKGLEWVSFISYDGNTKYYADSVKGRFTISRDNAKNSLYLQMNSLRAEDTAVYYCARTSLLGPFDLWGQGTMVTVSS

SEQ ID NO: 2624 - protein, 108 aa, synthetic construct; identical to SEQ ID NO: 1517
  source 1..108: note = Description of Artificial Sequence: Synthetic polypeptide; note = VL of XENP020373

SEQ ID NO: 2625 - protein, 5 aa, synthetic construct
  source 1..5: note = Description of Artificial Sequence: Synthetic peptide; note = XENP020373 vhCDR1
SYTMH

SEQ ID NO: 2626 - protein, 17 aa, synthetic construct
  source 1..17: note = Description of Artificial Sequence: Synthetic peptide; note = XENP020373 vhCDR2
FISYDGNTKYYADSVKG

SEQ ID NO: 2627 - protein, 9 aa, synthetic construct
  source 1..9: note = Description of Artificial Sequence: Synthetic peptide; note = XENP020373 vhCDR3
TSLLGPFDL

SEQ ID NO: 2628 - protein, 12 aa, synthetic construct
  source 1..12: note = Description of Artificial Sequence: Synthetic peptide; note = XENP020373 vlCDR1
RASQSVGSSYLA

SEQ ID NO: 2629 - protein, 7 aa, synthetic construct
  source 1..7: note = Description of Artificial Sequence: Synthetic peptide; note = XENP020373 vlCDR2
GAFSRAT

SEQ ID NO: 2630 - protein, 9 aa, synthetic construct
  source 1..9: note = Description of Artificial Sequence: Synthetic peptide; note = XENP020373 vlCDR3
QQYGSSPWT

SEQ ID NO: 2631 - protein, 246 aa, synthetic construct
  source 1..246: note = Description of Artificial Sequence: Synthetic polypeptide; note = XENP020374 [CTLA-4]_H3.23_L0.12_scFv(GKPGS)4
EVQLVESGGGLVKPGGSLRLSCAASGFTFSSYTMHWVRQAPGKGLEWVSFISYDGNYKYYADSVKGRFTISRDNAKNSLYLQMNSLRAEDTAVYYCARGGHLGPFDLWGQGTMVTVSSGKPGSGKPGSGKPGSGKPGSEIVLTQSPGTLSVSPGERATLSCRASQSVGSSYLAWYQQKPGQAPRLLIYGAFSRATGIPDRFSGSGSGTDFTLTISRLEPEDFAVYYCQQYGSSPWTFGQGTKVEIK

SEQ ID NO: 2632 - protein, 118 aa, synthetic construct
  source 1..118: note = Description of Artificial Sequence: Synthetic polypeptide; note = VH of XENP020374
EVQLVESGGGLVKPGGSLRLSCAASGFTFSSYTMHWVRQAPGKGLEWVSFISYDGNYKYYADSVKGRFTISRDNAKNSLYLQMNSLRAEDTAVYYCARGGHLGPFDLWGQGTMVTVSS

SEQ ID NO: 2633 - protein, 108 aa, synthetic construct; identical to SEQ ID NO: 1517
  source 1..108: note = Description of Artificial Sequence: Synthetic polypeptide; note = VL of XENP020374

SEQ ID NO: 2634 - protein, 5 aa, synthetic construct
  source 1..5: note = Description of Artificial Sequence: Synthetic peptide; note = XENP020374 vhCDR1
SYTMH

SEQ ID NO: 2635 - protein, 17 aa, synthetic construct
  source 1..17: note = Description of Artificial Sequence: Synthetic peptide; note = XENP020374 vhCDR2
FISYDGNYKYYADSVKG

SEQ ID NO: 2636 - protein, 9 aa, synthetic construct
  source 1..9: note = Description of Artificial Sequence: Synthetic peptide; note = XENP020374 vhCDR3
GGHLGPFDL

SEQ ID NO: 2637 - protein, 12 aa, synthetic construct
  source 1..12: note = Description of Artificial Sequence: Synthetic peptide; note = XENP020374 vlCDR1
RASQSVGSSYLA

SEQ ID NO: 2638 - protein, 7 aa, synthetic construct
  source 1..7: note = Description of Artificial Sequence: Synthetic peptide; note = XENP020374 vlCDR2
GAFSRAT

SEQ ID NO: 2639 - protein, 9 aa, synthetic construct
  source 1..9: note = Description of Artificial Sequence: Synthetic peptide; note = XENP020374 vlCDR3
QQYGSSPWT

SEQ ID NO: 2640 - protein, 246 aa, synthetic construct
  source 1..246: note = Description of Artificial Sequence: Synthetic polypeptide; note = XENP020375 [CTLA-4]_H3.24_L0.12_scFv(GKPGS)4
EVQLVESGGGLVKPGGSLRLSCAASGFTFSSYTMHWVRQAPGKGLEWVSFISYDGNYKYYADSVKGRFTISRDNAKNSLYLQMNSLRAEDTAVYYCARTSHLGPFDLWGQGTMVTVSSGKPGSGKPGSGKPGSGKPGSEIVLTQSPGTLSVSPGERATLSCRASQSVGSSYLAWYQQKPGQAPRLLIYGAFSRATGIPDRFSGSGSGTDFTLTISRLEPEDFAVYYCQQYGSSPWTFGQGTKVEIK

SEQ ID NO: 2641 - protein, 118 aa, synthetic construct
  source 1..118: note = Description of Artificial Sequence: Synthetic polypeptide; note = VH of XENP020375
EVQLVESGGGLVKPGGSLRLSCAASGFTFSSYTMHWVRQAPGKGLEWVSFISYDGNYKYYADSVKGRFTISRDNAKNSLYLQMNSLRAEDTAVYYCARTSHLGPFDLWGQGTMVTVSS

SEQ ID NO: 2642 - protein, 108 aa, synthetic construct; identical to SEQ ID NO: 1517
  source 1..108: note = Description of Artificial Sequence: Synthetic polypeptide; note = VL of XENP020375

SEQ ID NO: 2643 - protein, 5 aa, synthetic construct
  source 1..5: note = Description of Artificial Sequence: Synthetic peptide; note = XENP020375 vhCDR1
SYTMH

SEQ ID NO: 2644 - protein, 17 aa, synthetic construct
  source 1..17: note = Description of Artificial Sequence: Synthetic peptide; note = XENP020375 vhCDR2
FISYDGNYKYYADSVKG

SEQ ID NO: 2645 - protein, 9 aa, synthetic construct
  source 1..9: note = Description of Artificial Sequence: Synthetic peptide; note = XENP020375 vhCDR3
TSHLGPFDL

SEQ ID NO: 2646 - protein, 12 aa, synthetic construct
  source 1..12: note = Description of Artificial Sequence: Synthetic peptide; note = XENP020375 vlCDR1
RASQSVGSSYLA

SEQ ID NO: 2647 - protein, 7 aa, synthetic construct
  source 1..7: note = Description of Artificial Sequence: Synthetic peptide; note = XENP020375 vlCDR2
GAFSRAT

SEQ ID NO: 2648 - protein, 9 aa, synthetic construct
  source 1..9: note = Description of Artificial Sequence: Synthetic peptide; note = XENP020375 vlCDR3
QQYGSSPWT

SEQ ID NO: 2649 - protein, 246 aa, synthetic construct
  source 1..246: note = Description of Artificial Sequence: Synthetic polypeptide; note = XENP020376 [CTLA-4]_H3.25_L0.12_scFv(GKPGS)4
EVQLVESGGGLVKPGGSLRLSCAASGFTFSSYTMHWVRQAPGKGLEWVSFISYDGNYKYYADSVKGRFTISRDNAKNSLYLQMNSLRAEDTAVYYCARGGLLGPFDLWGQGTMVTVSSGKPGSGKPGSGKPGSGKPGSEIVLTQSPGTLSVSPGERATLSCRASQSVGSSYLAWYQQKPGQAPRLLIYGAFSRATGIPDRFSGSGSGTDFTLTISRLEPEDFAVYYCQQYGSSPWTFGQGTKVEIK

SEQ ID NO: 2650 - protein, 118 aa, synthetic construct
  source 1..118: note = Description of Artificial Sequence: Synthetic polypeptide; note = VH of XENP020376
EVQLVESGGGLVKPGGSLRLSCAASGFTFSSYTMHWVRQAPGKGLEWVSFISYDGNYKYYADSVKGRFTISRDNAKNSLYLQMNSLRAEDTAVYYCARGGLLGPFDLWGQGTMVTVSS

SEQ ID NO: 2651 - protein, 108 aa, synthetic construct; identical to SEQ ID NO: 1517
  source 1..108: note = Description of Artificial Sequence: Synthetic polypeptide; note = VL of XENP020376

SEQ ID NO: 2652 - protein, 5 aa, synthetic construct
  source 1..5: note = Description of Artificial Sequence: Synthetic peptide; note = XENP020376 vhCDR1
SYTMH

SEQ ID NO: 2653 - protein, 17 aa, synthetic construct
  source 1..17: note = Description of Artificial Sequence: Synthetic peptide; note = XENP020376 vhCDR2
FISYDGNYKYYADSVKG

SEQ ID NO: 2654 - protein, 9 aa, synthetic construct
  source 1..9: note = Description of Artificial Sequence: Synthetic peptide; note = XENP020376 vhCDR3
GGLLGPFDL

SEQ ID NO: 2655 - protein, 12 aa, synthetic construct
  source 1..12: note = Description of Artificial Sequence: Synthetic peptide; note = XENP020376 vlCDR1
RASQSVGSSYLA

SEQ ID NO: 2656 - protein, 7 aa, synthetic construct
  source 1..7: note = Description of Artificial Sequence: Synthetic peptide; note = XENP020376 vlCDR2
GAFSRAT

SEQ ID NO: 2657 - protein, 9 aa, synthetic construct
  source 1..9: note = Description of Artificial Sequence: Synthetic peptide; note = XENP020376 vlCDR3
QQYGSSPWT

SEQ ID NO: 2658 - protein, 246 aa, synthetic construct
  source 1..246: note = Description of Artificial Sequence: Synthetic polypeptide; note = XENP020377 [CTLA-4]_H3.26_L0.12_scFv(GKPGS)4
EVQLVESGGGLVKPGGSLRLSCAASGFTFSSYTMHWVRQAPGKGLEWVSFISYDGNYKYYADSVKGRFTISRDNAKNSLYLQMNSLRAEDTAVYYCARTSLLGPFDLWGQGTMVTVSSGKPGSGKPGSGKPGSGKPGSEIVLTQSPGTLSVSPGERATLSCRASQSVGSSYLAWYQQKPGQAPRLLIYGAFSRATGIPDRFSGSGSGTDFTLTISRLEPEDFAVYYCQQYGSSPWTFGQGTKVEIK

SEQ ID NO: 2659 - protein, 118 aa, synthetic construct
  source 1..118: note = Description of Artificial Sequence: Synthetic polypeptide; note = VH of XENP020377
EVQLVESGGGLVKPGGSLRLSCAASGFTFSSYTMHWVRQAPGKGLEWVSFISYDGNYKYYADSVKGRFTISRDNAKNSLYLQMNSLRAEDTAVYYCARTSLLGPFDLWGQGTMVTVSS

SEQ ID NO: 2660 - protein, 108 aa, synthetic construct; identical to SEQ ID NO: 1517
  source 1..108: note = Description of Artificial Sequence: Synthetic polypeptide; note = VL of XENP020377

SEQ ID NO: 2661 - protein, 5 aa, synthetic construct
  source 1..5: note = Description of Artificial Sequence: Synthetic peptide; note = XENP020377 vhCDR1
SYTMH

SEQ ID NO: 2662 - protein, 17 aa, synthetic construct
  source 1..17: note = Description of Artificial Sequence: Synthetic peptide; note = XENP020377 vhCDR2
FISYDGNYKYYADSVKG

SEQ ID NO: 2663 - protein, 9 aa, synthetic construct
  source 1..9: note = Description of Artificial Sequence: Synthetic peptide; note = XENP020377 vhCDR3
TSLLGPFDL

SEQ ID NO: 2664 - protein, 12 aa, synthetic construct
  source 1..12: note = Description of Artificial Sequence: Synthetic peptide; note = XENP020377 vlCDR1
RASQSVGSSYLA

SEQ ID NO: 2665 - protein, 7 aa, synthetic construct
  source 1..7: note = Description of Artificial Sequence: Synthetic peptide; note = XENP020377 vlCDR2
GAFSRAT

SEQ ID NO: 2666 - protein, 9 aa, synthetic construct
  source 1..9: note = Description of Artificial Sequence: Synthetic peptide; note = XENP020377 vlCDR3
QQYGSSPWT

SEQ ID NO: 2667 - protein, 246 aa, synthetic construct
  source 1..246: note = Description of Artificial Sequence: Synthetic polypeptide; note = XENP020378 [CTLA-4]_H3.4_L0.118_scFv(GKPGS)4
EVQLVESGGGLVKPGGSLRLSCAASGFTFSSYTMHWVRQAPGKGLEWVSFISYDGNHKYYADSVKGRFTISRDNAKNSLYLQMNSLRAEDTAVYYCARTGHLGPFDLWGQGTMVTVSSGKPGSGKPGSGKPGSGKPGSEIVLTQSPATLSVSPGERATLSCRASQSVGSSYLAWYQQKPGQAPRLLIYGAFSRATGIPDRFSGSGSGTDFTLTISRLEPEDFAVYYCQQYGSSPWTFGQGTKVEIK

SEQ ID NO: 2668 - protein, 118 aa, synthetic construct; identical to SEQ ID NO: 2461
  source 1..118: note = Description of Artificial Sequence: Synthetic polypeptide; note = VH of XENP020378

SEQ ID NO: 2669 - protein, 108 aa, synthetic construct
  source 1..108: note = Description of Artificial Sequence: Synthetic polypeptide; note = VL of XENP020378
EIVLTQSPATLSVSPGERATLSCRASQSVGSSYLAWYQQKPGQAPRLLIYGAFSRATGIPDRFSGSGSGTDFTLTISRLEPEDFAVYYCQQYGSSPWTFGQGTKVEIK

SEQ ID NO: 2670 - protein, 5 aa, synthetic construct
  source 1..5: note = Description of Artificial Sequence: Synthetic peptide; note = XENP020378 vhCDR1
SYTMH

SEQ ID NO: 2671 - protein, 17 aa, synthetic construct
  source 1..17: note = Description of Artificial Sequence: Synthetic peptide; note = XENP020378 vhCDR2
FISYDGNHKYYADSVKG

SEQ ID NO: 2672 - protein, 9 aa, synthetic construct
  source 1..9: note = Description of Artificial Sequence: Synthetic peptide; note = XENP020378 vhCDR3
TGHLGPFDL

SEQ ID NO: 2673 - protein, 12 aa, synthetic construct
  source 1..12: note = Description of Artificial Sequence: Synthetic peptide; note = XENP020378 vlCDR1
RASQSVGSSYLA

SEQ ID NO: 2674 - protein, 7 aa, synthetic construct
  source 1..7: note = Description of Artificial Sequence: Synthetic peptide; note = XENP020378 vlCDR2
GAFSRAT

SEQ ID NO: 2675 - protein, 9 aa, synthetic construct
  source 1..9: note = Description of Artificial Sequence: Synthetic peptide; note = XENP020378 vlCDR3
QQYGSSPWT

SEQ ID NO: 2676 - protein, 246 aa, synthetic construct
  source 1..246: note = Description of Artificial Sequence: Synthetic polypeptide; note = XENP020379 [CTLA-4]_H3.4_L0.119_scFv(GKPGS)4
EVQLVESGGGLVKPGGSLRLSCAASGFTFSSYTMHWVRQAPGKGLEWVSFISYDGNHKYYADSVKGRFTISRDNAKNSLYLQMNSLRAEDTAVYYCARTGHLGPFDLWGQGTMVTVSSGKPGSGKPGSGKPGSGKPGSEIVLTQSPGTLSLSPGERATLSCRASQSVGSSYLAWYQQKPGQAPRLLIYGAFSRATGIPDRFSGSGSGTDFTLTISRLEPEDFAVYYCQQYGSSPWTFGQGTKVEIK

SEQ ID NO: 2677 - protein, 118 aa, synthetic construct; identical to SEQ ID NO: 2461
  source 1..118: note = Description of Artificial Sequence: Synthetic polypeptide; note = VH of XENP020379

SEQ ID NO: 2678 - protein, 108 aa, synthetic construct; identical to SEQ ID NO: 23
  source 1..108: note = Description of Artificial Sequence: Synthetic polypeptide; note = VL of XENP020379

SEQ ID NO: 2679 - protein, 5 aa, synthetic construct
  source 1..5: note = Description of Artificial Sequence: Synthetic peptide; note = XENP020379 vhCDR1
SYTMH

SEQ ID NO: 2680 - protein, 17 aa, synthetic construct
  source 1..17: note = Description of Artificial Sequence: Synthetic peptide; note = XENP020379 vhCDR2
FISYDGNHKYYADSVKG

SEQ ID NO: 2681 - protein, 9 aa, synthetic construct
  source 1..9: note = Description of Artificial Sequence: Synthetic peptide; note = XENP020379 vhCDR3
TGHLGPFDL

SEQ ID NO: 2682 - protein, 12 aa, synthetic construct
  source 1..12: note = Description of Artificial Sequence: Synthetic peptide; note = XENP020379 vlCDR1
RASQSVGSSYLA

SEQ ID NO: 2683 - protein, 7 aa, synthetic construct
  source 1..7: note = Description of Artificial Sequence: Synthetic peptide; note = XENP020379 vlCDR2
GAFSRAT

SEQ ID NO: 2684 - protein, 9 aa, synthetic construct
  source 1..9: note = Description of Artificial Sequence: Synthetic peptide; note = XENP020379 vlCDR3
QQYGSSPWT

SEQ ID NO: 2685 - protein, 246 aa, synthetic construct
  source 1..246: note = Description of Artificial Sequence: Synthetic polypeptide; note = XENP020380 [CTLA-4]_H3.4_L0.120_scFv(GKPGS)4
EVQLVESGGGLVKPGGSLRLSCAASGFTFSSYTMHWVRQAPGKGLEWVSFISYDGNHKYYADSVKGRFTISRDNAKNSLYLQMNSLRAEDTAVYYCARTGHLGPFDLWGQGTMVTVSSGKPGSGKPGSGKPGSGKPGSEIVLTQSPGTLSVSPGERATLSCRASQSVSSSYLAWYQQKPGQAPRLLIYGAFSRATGIPDRFSGSGSGTDFTLTISRLEPEDFAVYYCQQYGSSPWTFGQGTKVEIK

SEQ ID NO: 2686 - protein, 118 aa, synthetic construct; identical to SEQ ID NO: 2461
  source 1..118: note = Description of Artificial Sequence: Synthetic polypeptide; note = VH of XENP020380

SEQ ID NO: 2687 - protein, 108 aa, synthetic construct
  source 1..108: note = Description of Artificial Sequence: Synthetic polypeptide; note = VL of XENP020380
EIVLTQSPGTLSVSPGERATLSCRASQSVSSSYLAWYQQKPGQAPRLLIYGAFSRATGIPDRFSGSGSGTDFTLTISRLEPEDFAVYYCQQYGSSPWTFGQGTKVEIK

SEQ ID NO: 2688 - protein, 5 aa, synthetic construct
  source 1..5: note = Description of Artificial Sequence: Synthetic peptide; note = XENP020380 vhCDR1
SYTMH

SEQ ID NO: 2689 - protein, 17 aa, synthetic construct
  source 1..17: note = Description of Artificial Sequence: Synthetic peptide; note = XENP020380 vhCDR2
FISYDGNHKYYADSVKG

SEQ ID NO: 2690 - protein, 9 aa, synthetic construct
  source 1..9: note = Description of Artificial Sequence: Synthetic peptide; note = XENP020380 vhCDR3
TGHLGPFDL

SEQ ID NO: 2691 - protein, 12 aa, synthetic construct
  source 1..12: note = Description of Artificial Sequence: Synthetic peptide; note = XENP020380 vlCDR1
RASQSVSSSYLA

SEQ ID NO: 2692 - protein, 7 aa, synthetic construct
  source 1..7: note = Description of Artificial Sequence: Synthetic peptide; note = XENP020380 vlCDR2
GAFSRAT

SEQ ID NO: 2693 - protein, 9 aa, synthetic construct
  source 1..9: note = Description of Artificial Sequence: Synthetic peptide; note = XENP020380 vlCDR3
QQYGSSPWT

SEQ ID NO: 2694 - protein, 246 aa, synthetic construct
  source 1..246: note = Description of Artificial Sequence: Synthetic polypeptide; note = XENP020381 [CTLA-4]_H3.4_L0.121_scFv(GKPGS)4
EVQLVESGGGLVKPGGSLRLSCAASGFTFSSYTMHWVRQAPGKGLEWVSFISYDGNHKYYADSVKGRFTISRDNAKNSLYLQMNSLRAEDTAVYYCARTGHLGPFDLWGQGTMVTVSSGKPGSGKPGSGKPGSGKPGSEIVLTQSPGTLSVSPGERATLSCRASQSVGSSYLAWYQQKPGQAPRLLIYGASSRATGIPDRFSGSGSGTDFTLTISRLEPEDFAVYYCQQYGSSPWTFGQGTKVEIK

SEQ ID NO: 2695 - protein, 118 aa, synthetic construct; identical to SEQ ID NO: 2461
  source 1..118: note = Description of Artificial Sequence: Synthetic polypeptide; note = VH of XENP020381

SEQ ID NO: 2696 - protein, 108 aa, synthetic construct
  source 1..108: note = Description of Artificial Sequence: Synthetic polypeptide; note = VL of XENP020381
EIVLTQSPGTLSVSPGERATLSCRASQSVGSSYLAWYQQKPGQAPRLLIYGASSRATGIPDRFSGSGSGTDFTLTISRLEPEDFAVYYCQQYGSSPWTFGQGTKVEIK

SEQ ID NO: 2697 - protein, 5 aa, synthetic construct
  source 1..5: note = Description of Artificial Sequence: Synthetic peptide; note = XENP020381 vhCDR1
SYTMH

SEQ ID NO: 2698 - protein, 17 aa, synthetic construct
  source 1..17: note = Description of Artificial Sequence: Synthetic peptide; note = XENP020381 vhCDR2
FISYDGNHKYYADSVKG

SEQ ID NO: 2699 - protein, 9 aa, synthetic construct
  source 1..9: note = Description of Artificial Sequence: Synthetic peptide; note = XENP020381 vhCDR3
TGHLGPFDL

SEQ ID NO: 2700 - protein, 12 aa, synthetic construct
  source 1..12: note = Description of Artificial Sequence: Synthetic peptide; note = XENP020381 vlCDR1
RASQSVGSSYLA

SEQ ID NO: 2701 - protein, 7 aa, synthetic construct
  source 1..7: note = Description of Artificial Sequence: Synthetic peptide; note = XENP020381 vlCDR2
GASSRAT

SEQ ID NO: 2702 - protein, 9 aa, synthetic construct
  source 1..9: note = Description of Artificial Sequence: Synthetic peptide; note = XENP020381 vlCDR3
QQYGSSPWT

SEQ ID NO: 2703 - protein, 246 aa, synthetic construct
  source 1..246: note = Description of Artificial Sequence: Synthetic polypeptide; note = XENP020382 [CTLA-4]_H3.4_L0.122_scFv(GKPGS)4
EVQLVESGGGLVKPGGSLRLSCAASGFTFSSYTMHWVRQAPGKGLEWVSFISYDGNHKYYADSVKGRFTISRDNAKNSLYLQMNSLRAEDTAVYYCARTGHLGPFDLWGQGTMVTVSSGKPGSGKPGSGKPGSGKPGSEIVLTQSPATLSLSPGERATLSCRASQSVGSSYLAWYQQKPGQAPRLLIYGAFSRATGIPDRFSGSGSGTDFTLTISRLEPEDFAVYYCQQYGSSPWTFGQGTKVEIK

SEQ ID NO: 2704 - protein, 118 aa, synthetic construct; identical to SEQ ID NO: 2461
  source 1..118: note = Description of Artificial Sequence: Synthetic polypeptide; note = VH of XENP020382

SEQ ID NO: 2705 - protein, 108 aa, synthetic construct; identical to SEQ ID NO: 1481
  source 1..108: note = Description of Artificial Sequence: Synthetic polypeptide; note = VL of XENP020382

SEQ ID NO: 2706 - protein, 5 aa, synthetic construct
  source 1..5: note = Description of Artificial Sequence: Synthetic peptide; note = XENP020382 vhCDR1
SYTMH

SEQ ID NO: 2707 - protein, 17 aa, synthetic construct
  source 1..17: note = Description of Artificial Sequence: Synthetic peptide; note = XENP020382 vhCDR2
FISYDGNHKYYADSVKG

SEQ ID NO: 2708 - protein, 9 aa, synthetic construct
  source 1..9: note = Description of Artificial Sequence: Synthetic peptide; note = XENP020382 vhCDR3
TGHLGPFDL

SEQ ID NO: 2709 - protein, 12 aa, synthetic construct
  source 1..12: note = Description of Artificial Sequence: Synthetic peptide; note = XENP020382 vlCDR1
RASQSVGSSYLA

SEQ ID NO: 2710 - protein, 7 aa, synthetic construct
  source 1..7: note = Description of Artificial Sequence: Synthetic peptide; note = XENP020382 vlCDR2
GAFSRAT

SEQ ID NO: 2711 - protein, 9 aa, synthetic construct
  source 1..9: note = Description of Artificial Sequence: Synthetic peptide; note = XENP020382 vlCDR3
QQYGSSPWT

SEQ ID NO: 2712 - protein, 246 aa, synthetic construct
  source 1..246: note = Description of Artificial Sequence: Synthetic polypeptide; note = XENP020383 [CTLA-4]_H3.4_L0.123_scFv(GKPGS)4
EVQLVESGGGLVKPGGSLRLSCAASGFTFSSYTMHWVRQAPGKGLEWVSFISYDGNHKYYADSVKGRFTISRDNAKNSLYLQMNSLRAEDTAVYYCARTGHLGPFDLWGQGTMVTVSSGKPGSGKPGSGKPGSGKPGSEIVLTQSPATLSVSPGERATLSCRASQSVSSSYLAWYQQKPGQAPRLLIYGAFSRATGIPDRFSGSGSGTDFTLTISRLEPEDFAVYYCQQYGSSPWTFGQGTKVEIK

SEQ ID NO: 2713 - protein, 118 aa, synthetic construct; identical to SEQ ID NO: 2461
  source 1..118: note = Description of Artificial Sequence: Synthetic polypeptide; note = VH of XENP020383

SEQ ID NO: 2714 - protein, 108 aa, synthetic construct
  source 1..108: note = Description of Artificial Sequence: Synthetic polypeptide; note = VL of XENP020383
EIVLTQSPATLSVSPGERATLSCRASQSVSSSYLAWYQQKPGQAPRLLIYGAFSRATGIPDRFSGSGSGTDFTLTISRLEPEDFAVYYCQQYGSSPWTFGQGTKVEIK

SEQ ID NO: 2715 - protein, 5 aa, synthetic construct
  source 1..5: note = Description of Artificial Sequence: Synthetic peptide; note = XENP020383 vhCDR1
SYTMH

SEQ ID NO: 2716 - protein, 17 aa, synthetic construct
  source 1..17: note = Description of Artificial Sequence: Synthetic peptide; note = XENP020383 vhCDR2
FISYDGNHKYYADSVKG

SEQ ID NO: 2717 - protein, 9 aa, synthetic construct
  source 1..9: note = Description of Artificial Sequence: Synthetic peptide; note = XENP020383 vhCDR3
TGHLGPFDL

SEQ ID NO: 2718 - protein, 12 aa, synthetic construct
  source 1..12: note = Description of Artificial Sequence: Synthetic peptide; note = XENP020383 vlCDR1
RASQSVSSSYLA

SEQ ID NO: 2719 - protein, 7 aa, synthetic construct
  source 1..7: note = Description of Artificial Sequence: Synthetic peptide; note = XENP020383 vlCDR2
GAFSRAT

SEQ ID NO: 2720 - protein, 9 aa, synthetic construct
  source 1..9: note = Description of Artificial Sequence: Synthetic peptide; note = XENP020383 vlCDR3
QQYGSSPWT

SEQ ID NO: 2721 - protein, 246 aa, synthetic construct
  source 1..246: note = Description of Artificial Sequence: Synthetic polypeptide; note = XENP020384 [CTLA-4]_H3.4_L0.124_scFv(GKPGS)4
EVQLVESGGGLVKPGGSLRLSCAASGFTFSSYTMHWVRQAPGKGLEWVSFISYDGNHKYYADSVKGRFTISRDNAKNSLYLQMNSLRAEDTAVYYCARTGHLGPFDLWGQGTMVTVSSGKPGSGKPGSGKPGSGKPGSEIVLTQSPATLSVSPGERATLSCRASQSVGSSYLAWYQQKPGQAPRLLIYGASSRATGIPDRFSGSGSGTDFTLTISRLEPEDFAVYYCQQYGSSPWTFGQGTKVEIK

SEQ ID NO: 2722 - protein, 118 aa, synthetic construct; identical to SEQ ID NO: 2461
  source 1..118: note = Description of Artificial Sequence: Synthetic polypeptide; note = VH of XENP020384

SEQ ID NO: 2723 - protein, 108 aa, synthetic construct
  source 1..108: note = Description of Artificial Sequence: Synthetic polypeptide; note = VL of XENP020384
EIVLTQSPATLSVSPGERATLSCRASQSVGSSYLAWYQQKPGQAPRLLIYGASSRATGIPDRFSGSGSGTDFTLTISRLEPEDFAVYYCQQYGSSPWTFGQGTKVEIK

SEQ ID NO: 2724 - protein, 5 aa, synthetic construct
  source 1..5: note = Description of Artificial Sequence: Synthetic peptide; note = XENP020384 vhCDR1
SYTMH

SEQ ID NO: 2725 - protein, 17 aa, synthetic construct
  source 1..17: note = Description of Artificial Sequence: Synthetic peptide; note = XENP020384 vhCDR2
FISYDGNHKYYADSVKG

SEQ ID NO: 2726 - protein, 9 aa, synthetic construct
  source 1..9: note = Description of Artificial Sequence: Synthetic peptide; note = XENP020384 vhCDR3
TGHLGPFDL

SEQ ID NO: 2727 - protein, 12 aa, synthetic construct
  source 1..12: note = Description of Artificial Sequence: Synthetic peptide; note = XENP020384 vlCDR1
RASQSVGSSYLA

SEQ ID NO: 2728 - protein, 7 aa, synthetic construct
  source 1..7: note = Description of Artificial Sequence: Synthetic peptide; note = XENP020384 vlCDR2
GASSRAT

SEQ ID NO: 2729 - protein, 9 aa, synthetic construct
  source 1..9: note = Description of Artificial Sequence: Synthetic peptide; note = XENP020384 vlCDR3
QQYGSSPWT

SEQ ID NO: 2730 - protein, 246 aa, synthetic construct
  source 1..246: note = Description of Artificial Sequence: Synthetic polypeptide; note = XENP020385 [CTLA-4]_H3.4_L0.125_scFv(GKPGS)4
EVQLVESGGGLVKPGGSLRLSCAASGFTFSSYTMHWVRQAPGKGLEWVSFISYDGNHKYYADSVKGRFTISRDNAKNSLYLQMNSLRAEDTAVYYCARTGHLGPFDLWGQGTMVTVSSGKPGSGKPGSGKPGSGKPGSEIVLTQSPGTLSLSPGERATLSCRASQSVSSSYLAWYQQKPGQAPRLLIYGAFSRATGIPDRFSGSGSGTDFTLTISRLEPEDFAVYYCQQYGSSPWTFGQGTKVEIK

SEQ ID NO: 2731 - protein, 118 aa, synthetic construct; identical to SEQ ID NO: 2461
  source 1..118: note = Description of Artificial Sequence: Synthetic polypeptide; note = VH of XENP020385

SEQ ID NO: 2732 - protein, 108 aa, synthetic construct; identical to SEQ ID NO: 1607
  source 1..108: note = Description of Artificial Sequence: Synthetic polypeptide; note = VL of XENP020385

SEQ ID NO: 2733 - protein, 5 aa, synthetic construct
  source 1..5: note = Description of Artificial Sequence: Synthetic peptide; note = XENP020385 vhCDR1
SYTMH

SEQ ID NO: 2734 - protein, 17 aa, synthetic construct
  source 1..17: note = Description of Artificial Sequence: Synthetic peptide; note = XENP020385 vhCDR2
FISYDGNHKYYADSVKG

SEQ ID NO: 2735 - protein, 9 aa, synthetic construct
  source 1..9: note = Description of Artificial Sequence: Synthetic peptide; note = XENP020385 vhCDR3
TGHLGPFDL

SEQ ID NO: 2736 - protein, 12 aa, synthetic construct
  source 1..12: note = Description of Artificial Sequence: Synthetic peptide; note = XENP020385 vlCDR1
RASQSVSSSYLA

SEQ ID NO: 2737 - protein, 7 aa, synthetic construct
  source 1..7: note = Description of Artificial Sequence: Synthetic peptide; note = XENP020385 vlCDR2
GAFSRAT

SEQ ID NO: 2738 - protein, 9 aa, synthetic construct
  source 1..9: note = Description of Artificial Sequence: Synthetic peptide; note = XENP020385 vlCDR3
QQYGSSPWT

SEQ ID NO: 2739 - protein, 246 aa, synthetic construct
  source 1..246: note = Description of Artificial Sequence: Synthetic polypeptide; note = XENP020386 [CTLA-4]_H3.4_L0.126_scFv(GKPGS)4
EVQLVESGGGLVKPGGSLRLSCAASGFTFSSYTMHWVRQAPGKGLEWVSFISYDGNHKYYADSVKGRFTISRDNAKNSLYLQMNSLRAEDTAVYYCARTGHLGPFDLWGQGTMVTVSSGKPGSGKPGSGKPGSGKPGSEIVLTQSPGTLSLSPGERATLSCRASQSVGSSYLAWYQQKPGQAPRLLIYGASSRATGIPDRFSGSGSGTDFTLTISRLEPEDFAVYYCQQYGSSPWTFGQGTKVEIK

SEQ ID NO: 2740 - protein, 118 aa, synthetic construct; identical to SEQ ID NO: 2461
  source 1..118: note = Description of Artificial Sequence: Synthetic polypeptide; note = VH of XENP020386

SEQ ID NO: 2741 - protein, 108 aa, synthetic construct; identical to SEQ ID NO: 2066
  source 1..108: note = Description of Artificial Sequence: Synthetic polypeptide; note = VL of XENP020386

SEQ ID NO: 2742 - protein, 5 aa, synthetic construct
  source 1..5: note = Description of Artificial Sequence: Synthetic peptide; note = XENP020386 vhCDR1
SYTMH

SEQ ID NO: 2743 - protein, 17 aa, synthetic construct
  source 1..17: note = Description of Artificial Sequence: Synthetic peptide; note = XENP020386 vhCDR2
FISYDGNHKYYADSVKG

SEQ ID NO: 2744 - protein, 9 aa, synthetic construct
  source 1..9: note = Description of Artificial Sequence: Synthetic peptide; note = XENP020386 vhCDR3
TGHLGPFDL

SEQ ID NO: 2745 - protein, 12 aa, synthetic construct
  source 1..12: note = Description of Artificial Sequence: Synthetic peptide; note = XENP020386 vlCDR1
RASQSVGSSYLA

SEQ ID NO: 2746 - protein, 7 aa, synthetic construct
  source 1..7: note = Description of Artificial Sequence: Synthetic peptide; note = XENP020386 vlCDR2
GASSRAT

SEQ ID NO: 2747 - protein, 9 aa, synthetic construct
  source 1..9: note = Description of Artificial Sequence: Synthetic peptide; note = XENP020386 vlCDR3
QQYGSSPWT

SEQ ID NO: 2748 - protein, 246 aa, synthetic construct
  source 1..246: note = Description of Artificial Sequence: Synthetic polypeptide; note = XENP020387 [CTLA-4]_H3.4_L0.127_scFv(GKPGS)4
EVQLVESGGGLVKPGGSLRLSCAASGFTFSSYTMHWVRQAPGKGLEWVSFISYDGNHKYYADSVKGRFTISRDNAKNSLYLQMNSLRAEDTAVYYCARTGHLGPFDLWGQGTMVTVSSGKPGSGKPGSGKPGSGKPGSEIVLTQSPGTLSVSPGERATLSCRASQSVSSSYLAWYQQKPGQAPRLLIYGASSRATGIPDRFSGSGSGTDFTLTISRLEPEDFAVYYCQQYGSSPWTFGQGTKVEIK

SEQ ID NO: 2749 - protein, 118 aa, synthetic construct; identical to SEQ ID NO: 2461
  source 1..118: note = Description of Artificial Sequence: Synthetic polypeptide; note = VH of XENP020387

SEQ ID NO: 2750 - protein, 108 aa, synthetic construct
  source 1..108: note = Description of Artificial Sequence: Synthetic polypeptide; note = VL of XENP020387
EIVLTQSPGTLSVSPGERATLSCRASQSVSSSYLAWYQQKPGQAPRLLIYGASSRATGIPDRFSGSGSGTDFTLTISRLEPEDFAVYYCQQYGSSPWTFGQGTKVEIK

SEQ ID NO: 2751 - protein, 5 aa, synthetic construct
  source 1..5: note = Description of Artificial Sequence: Synthetic peptide; note = XENP020387 vhCDR1
SYTMH

SEQ ID NO: 2752 - protein, 17 aa, synthetic construct
  source 1..17: note = Description of Artificial Sequence: Synthetic peptide; note = XENP020387 vhCDR2
FISYDGNHKYYADSVKG

SEQ ID NO: 2753 - protein, 9 aa, synthetic construct
  source 1..9: note = Description of Artificial Sequence: Synthetic peptide; note = XENP020387 vhCDR3
TGHLGPFDL

SEQ ID NO: 2754 - protein, 12 aa, synthetic construct
  source 1..12: note = Description of Artificial Sequence: Synthetic peptide; note = XENP020387 vlCDR1
RASQSVSSSYLA

SEQ ID NO: 2755 - protein, 7 aa, synthetic construct
  source 1..7: note = Description of Artificial Sequence: Synthetic peptide; note = XENP020387 vlCDR2
GASSRAT

SEQ ID NO: 2756 - protein, 9 aa, synthetic construct
  source 1..9: note = Description of Artificial Sequence: Synthetic peptide; note = XENP020387 vlCDR3
QQYGSSPWT

SEQ ID NO: 2757 - protein, 246 aa, synthetic construct
  source 1..246: note = Description of Artificial Sequence: Synthetic polypeptide; note = XENP020388 [CTLA-4]_H3.4_L0.128_scFv(GKPGS)4
EVQLVESGGGLVKPGGSLRLSCAASGFTFSSYTMHWVRQAPGKGLEWVSFISYDGNHKYYADSVKGRFTISRDNAKNSLYLQMNSLRAEDTAVYYCARTGHLGPFDLWGQGTMVTVSSGKPGSGKPGSGKPGSGKPGSEIVLTQSPATLSLSPGERATLSCRASQSVSSSYLAWYQQKPGQAPRLLIYGAFSRATGIPDRFSGSGSGTDFTLTISRLEPEDFAVYYCQQYGSSPWTFGQGTKVEIK

SEQ ID NO: 2758 - protein, 118 aa, synthetic construct; identical to SEQ ID NO: 2461
  source 1..118: note = Description of Artificial Sequence: Synthetic polypeptide; note = VH of XENP020388

SEQ ID NO: 2759 - protein, 108 aa, synthetic construct
  source 1..108: note = Description of Artificial Sequence: Synthetic polypeptide; note = VL of XENP020388
EIVLTQSPATLSLSPGERATLSCRASQSVSSSYLAWYQQKPGQAPRLLIYGAFSRATGIPDRFSGSGSGTDFTLTISRLEPEDFAVYYCQQYGSSPWTFGQGTKVEIK

SEQ ID NO: 2760 - protein, 5 aa, synthetic construct
  source 1..5: note = Description of Artificial Sequence: Synthetic peptide; note = XENP020388 vhCDR1
SYTMH

SEQ ID NO: 2761 - protein, 17 aa, synthetic construct
  source 1..17: note = Description of Artificial Sequence: Synthetic peptide; note = XENP020388 vhCDR2
FISYDGNHKYYADSVKG

SEQ ID NO: 2762 - protein, 9 aa, synthetic construct
  source 1..9: note = Description of Artificial Sequence: Synthetic peptide; note = XENP020388 vhCDR3
TGHLGPFDL

SEQ ID NO: 2763 - protein, 12 aa, synthetic construct
  source 1..12: note = Description of Artificial Sequence: Synthetic peptide; note = XENP020388 vlCDR1
RASQSVSSSYLA

SEQ ID NO: 2764 - protein, 7 aa, synthetic construct
  source 1..7: note = Description of Artificial Sequence: Synthetic peptide; note = XENP020388 vlCDR2
GAFSRAT

SEQ ID NO: 2765 - protein, 9 aa, synthetic construct
  source 1..9: note = Description of Artificial Sequence: Synthetic peptide; note = XENP020388 vlCDR3
QQYGSSPWT

SEQ ID NO: 2766 - protein, 246 aa, synthetic construct
  source 1..246: note = Description of Artificial Sequence: Synthetic polypeptide; note = XENP020389 [CTLA-4]_H3.4_L0.129_scFv(GKPGS)4
EVQLVESGGGLVKPGGSLRLSCAASGFTFSSYTMHWVRQAPGKGLEWVSFISYDGNHKYYADSVKGRFTISRDNAKNSLYLQMNSLRAEDTAVYYCARTGHLGPFDLWGQGTMVTVSSGKPGSGKPGSGKPGSGKPGSEIVLTQSPATLSLSPGERATLSCRASQSVGSSYLAWYQQKPGQAPRLLIYGASSRATGIPDRFSGSGSGTDFTLTISRLEPEDFAVYYCQQYGSSPWTFGQGTKVEIK

SEQ ID NO: 2767 - protein, 118 aa, synthetic construct; identical to SEQ ID NO: 2461
  source 1..118: note = Description of Artificial Sequence: Synthetic polypeptide; note = VH of XENP020389

SEQ ID NO: 2768 - protein, 108 aa, synthetic construct
  source 1..108: note = Description of Artificial Sequence: Synthetic polypeptide; note = VL of XENP020389
EIVLTQSPATLSLSPGERATLSCRASQSVGSSYLAWYQQKPGQAPRLLIYGASSRATGIPDRFSGSGSGTDFTLTISRLEPEDFAVYYCQQYGSSPWTFGQGTKVEIK

SEQ ID NO: 2769 - protein, 5 aa, synthetic construct
  source 1..5: note = Description of Artificial Sequence: Synthetic peptide; note = XENP020389 vhCDR1
SYTMH

SEQ ID NO: 2770 - protein, 17 aa, synthetic construct
  source 1..17: note = Description of Artificial Sequence: Synthetic peptide; note = XENP020389 vhCDR2
FISYDGNHKYYADSVKG

SEQ ID NO: 2771 - protein, 9 aa, synthetic construct
  source 1..9: note = Description of Artificial Sequence: Synthetic peptide; note = XENP020389 vhCDR3
TGHLGPFDL

SEQ ID NO: 2772 - protein, 12 aa, synthetic construct
  source 1..12: note = Description of Artificial Sequence: Synthetic peptide; note = XENP020389 vlCDR1
RASQSVGSSYLA

SEQ ID NO: 2773 - protein, 7 aa, synthetic construct
  source 1..7: note = Description of Artificial Sequence: Synthetic peptide; note = XENP020389 vlCDR2
GASSRAT

SEQ ID NO: 2774 - protein, 9 aa, synthetic construct
  source 1..9: note = Description of Artificial Sequence: Synthetic peptide; note = XENP020389 vlCDR3
QQYGSSPWT

SEQ ID NO: 2775 - protein, 246 aa, synthetic construct
  source 1..246: note = Description of Artificial Sequence: Synthetic polypeptide; note = XENP020390 [CTLA-4]_H3.4_L0.130_scFv(GKPGS)4
EVQLVESGGGLVKPGGSLRLSCAASGFTFSSYTMHWVRQAPGKGLEWVSFISYDGNHKYYADSVKGRFTISRDNAKNSLYLQMNSLRAEDTAVYYCARTGHLGPFDLWGQGTMVTVSSGKPGSGKPGSGKPGSGKPGSEIVLTQSPATLSVSPGERATLSCRASQSVSSSYLAWYQQKPGQAPRLLIYGASSRATGIPDRFSGSGSGTDFTLTISRLEPEDFAVYYCQQYGSSPWTFGQGTKVEIK

SEQ ID NO: 2776 - protein, 118 aa, synthetic construct; identical to SEQ ID NO: 2461
  source 1..118: note = Description of Artificial Sequence: Synthetic polypeptide; note = VH of XENP020390

SEQ ID NO: 2777 - protein, 108 aa, synthetic construct
  source 1..108: note = Description of Artificial Sequence: Synthetic polypeptide; note = VL of XENP020390
EIVLTQSPATLSVSPGERATLSCRASQSVSSSYLAWYQQKPGQAPRLLIYGASSRATGIPDRFSGSGSGTDFTLTISRLEPEDFAVYYCQQYGSSPWTFGQGTKVEIK

SEQ ID NO: 2778 - protein, 5 aa, synthetic construct
  source 1..5: note = Description of Artificial Sequence: Synthetic peptide; note = XENP020390 vhCDR1
SYTMH

SEQ ID NO: 2779 - protein, 17 aa, synthetic construct
  source 1..17: note = Description of Artificial Sequence: Synthetic peptide; note = XENP020390 vhCDR2
FISYDGNHKYYADSVKG

SEQ ID NO: 2780 - protein, 9 aa, synthetic construct
  source 1..9: note = Description of Artificial Sequence: Synthetic peptide; note = XENP020390 vhCDR3
TGHLGPFDL

SEQ ID NO: 2781 - protein, 12 aa, synthetic construct
  source 1..12: note = Description of Artificial Sequence: Synthetic peptide; note = XENP020390 vlCDR1
RASQSVSSSYLA

SEQ ID NO: 2782 - protein, 7 aa, synthetic construct
  source 1..7: note = Description of Artificial Sequence: Synthetic peptide; note = XENP020390 vlCDR2
GASSRAT

SEQ ID NO: 2783 - protein, 9 aa, synthetic construct
  source 1..9: note = Description of Artificial Sequence: Synthetic peptide; note = XENP020390 vlCDR3
QQYGSSPWT

SEQ ID NO: 2784 - protein, 246 aa, synthetic construct
  source 1..246: note = Description of Artificial Sequence: Synthetic polypeptide; note = XENP020391 [CTLA-4]_H3.4_L0.131_scFv(GKPGS)4
EVQLVESGGGLVKPGGSLRLSCAASGFTFSSYTMHWVRQAPGKGLEWVSFISYDGNHKYYADSVKGRFTISRDNAKNSLYLQMNSLRAEDTAVYYCARTGHLGPFDLWGQGTMVTVSSGKPGSGKPGSGKPGSGKPGSEIVLTQSPGTLSLSPGERATLSCRASQSVSSSYLAWYQQKPGQAPRLLIYGASSRATGIPDRFSGSGSGTDFTLTISRLEPEDFAVYYCQQYGSSPWTFGQGTKVEIK

SEQ ID NO: 2785 - protein, 118 aa, synthetic construct; identical to SEQ ID NO: 2461
  source 1..118: note = Description of Artificial Sequence: Synthetic polypeptide; note = VH of XENP020391

SEQ ID NO: 2786 - protein, 108 aa, synthetic construct
  source 1..108: note = Description of Artificial Sequence: Synthetic polypeptide; note = VL of XENP020391
EIVLTQSPGTLSLSPGERATLSCRASQSVSSSYLAWYQQKPGQAPRLLIYGASSRATGIPDRFSGSGSGTDFTLTISRLEPEDFAVYYCQQYGSSPWTFGQGTKVEIK

SEQ ID NO: 2787 - protein, 5 aa, synthetic construct
  source 1..5: note = Description of Artificial Sequence: Synthetic peptide; note = XENP020391 vhCDR1
SYTMH

SEQ ID NO: 2788 - protein, 17 aa, synthetic construct
  source 1..17: note = Description of Artificial Sequence: Synthetic peptide; note = XENP020391 vhCDR2
FISYDGNHKYYADSVKG

SEQ ID NO: 2789 - protein, 9 aa, synthetic construct
  source 1..9: note = Description of Artificial Sequence: Synthetic peptide; note = XENP020391 vhCDR3
TGHLGPFDL

SEQ ID NO: 2790 - protein, 12 aa, synthetic construct
  source 1..12: note = Description of Artificial Sequence: Synthetic peptide; note = XENP020391 vlCDR1
RASQSVSSSYLA

SEQ ID NO: 2791 - protein, 7 aa, synthetic construct
  source 1..7: note = Description of Artificial Sequence: Synthetic peptide; note = XENP020391 vlCDR2
GASSRAT

SEQ ID NO: 2792 - protein, 9 aa, synthetic construct
  source 1..9: note = Description of Artificial Sequence: Synthetic peptide; note = XENP020391 vlCDR3
QQYGSSPWT

SEQ ID NO: 2793 - protein, 246 aa, synthetic construct
  source 1..246: note = Description of Artificial Sequence: Synthetic polypeptide; note = XENP020392 [CTLA-4]_H3.4_L0.132_scFv(GKPGS)4
EVQLVESGGGLVKPGGSLRLSCAASGFTFSSYTMHWVRQAPGKGLEWVSFISYDGNHKYYADSVKGRFTISRDNAKNSLYLQMNSLRAEDTAVYYCARTGHLGPFDLWGQGTMVTVSSGKPGSGKPGSGKPGSGKPGSEIVLTQSPATLSLSPGERATLSCRASQSVSSSYLAWYQQKPGQAPRLLIYGASSRATGIPDRFSGSGSGTDFTLTISRLEPEDFAVYYCQQYGSSPWTFGQGTKVEIK

SEQ ID NO: 2794 - protein, 118 aa, synthetic construct; identical to SEQ ID NO: 2461
  source 1..118: note = Description of Artificial Sequence: Synthetic polypeptide; note = VH of XENP020392

SEQ ID NO: 2795 - protein, 108 aa, synthetic construct
  source 1..108: note = Description of Artificial Sequence: Synthetic polypeptide; note = VL of XENP020392
EIVLTQSPATLSLSPGERATLSCRASQSVSSSYLAWYQQKPGQAPRLLIYGASSRATGIPDRFSGSGSGTDFTLTISRLEPEDFAVYYCQQYGSSPWTFGQGTKVEIK

SEQ ID NO: 2796 - protein, 5 aa, synthetic construct
  source 1..5: note = Description of Artificial Sequence: Synthetic peptide; note = XENP020392 vhCDR1
SYTMH

SEQ ID NO: 2797 - protein, 17 aa, synthetic construct
  source 1..17: note = Description of Artificial Sequence: Synthetic peptide; note = XENP020392 vhCDR2
FISYDGNHKYYADSVKG

SEQ ID NO: 2798 - protein, 9 aa, synthetic construct
  source 1..9: note = Description of Artificial Sequence: Synthetic peptide; note = XENP020392 vhCDR3
TGHLGPFDL

SEQ ID NO: 2799 - protein, 12 aa, synthetic construct
  source 1..12: note = Description of Artificial Sequence: Synthetic peptide; note = XENP020392 vlCDR1
RASQSVSSSYLA

SEQ ID NO: 2800 - protein, 7 aa, synthetic construct
  source 1..7: note = Description of Artificial Sequence: Synthetic peptide; note = XENP020392 vlCDR2
GASSRAT

SEQ ID NO: 2801 - protein, 9 aa, synthetic construct
  source 1..9: note = Description of Artificial Sequence: Synthetic peptide; note = XENP020392 vlCDR3
QQYGSSPWT

SEQ ID NO: 2802 - protein, 246 aa, synthetic construct
  source 1..246: note = Description of Artificial Sequence: Synthetic polypeptide; note = XENP020393 [CTLA-4]_H3.5_L2_scFv(GKPGS)4
EVQLVESGGGLVKPGGSLRLSCAASGFTFSSYTMHWVRQAPGKGLEWVSFISYDGNTKYYADSVKGRFTISRDNAKNSLYLQMNSLRAEDTAVYYCARTGHLGPFDLWGQGTMVTVSSGKPGSGKPGSGKPGSGKPGSEIVMTQSPATLSVSPGERATLSCRASQSVGSSYLAWYQQKPGQAPRLLIYGAFSRATGIPARFSGSGSGTEFTLTISSLQSEDFAVYYCQQYGSSPWTFGQGTKVEIK

SEQ ID NO: 2803 - protein, 118 aa, synthetic construct; identical to SEQ ID NO: 2470
  source 1..118: note = Description of Artificial Sequence: Synthetic polypeptide; note = VH of XENP020393

SEQ ID NO: 2804 - protein, 108 aa, synthetic construct; identical to SEQ ID NO: 167
  source 1..108: note = Description of Artificial Sequence: Synthetic polypeptide; note = VL of XENP020393

SEQ ID NO: 2805 - protein, 5 aa, synthetic construct
  source 1..5: note = Description of Artificial Sequence: Synthetic peptide; note = XENP020393 vhCDR1
SYTMH

SEQ ID NO: 2806 - protein, 17 aa, synthetic construct
  source 1..17: note = Description of Artificial Sequence: Synthetic peptide; note = XENP020393 vhCDR2
FISYDGNTKYYADSVKG

SEQ ID NO: 2807 - protein, 9 aa, synthetic construct
  source 1..9: note = Description of Artificial Sequence: Synthetic peptide; note = XENP020393 vhCDR3
TGHLGPFDL

SEQ ID NO: 2808 - protein, 12 aa, synthetic construct
  source 1..12: note = Description of Artificial Sequence: Synthetic peptide; note = XENP020393 vlCDR1
RASQSVGSSYLA

SEQ ID NO: 2809 - protein, 7 aa, synthetic construct
  source 1..7: note = Description of Artificial Sequence: Synthetic peptide; note = XENP020393 vlCDR2
GAFSRAT

SEQ ID NO: 2810 - protein, 9 aa, synthetic construct
  source 1..9: note = Description of Artificial Sequence: Synthetic peptide; note = XENP020393 vlCDR3
QQYGSSPWT

SEQ ID NO: 2811 - protein, 246 aa, synthetic construct
  source 1..246: note = Description of Artificial Sequence: Synthetic polypeptide; note = XENP020394 [CTLA-4]_H3.5_L2.1_scFv(GKPGS)4
EVQLVESGGGLVKPGGSLRLSCAASGFTFSSYTMHWVRQAPGKGLEWVSFISYDGNTKYYADSVKGRFTISRDNAKNSLYLQMNSLRAEDTAVYYCARTGHLGPFDLWGQGTMVTVSSGKPGSGKPGSGKPGSGKPGSEIVMTQSPATLSVSPGERATLSCRASQSVSSSYLAWYQQKPGQAPRLLIYGAFSRATGIPARFSGSGSGTEFTLTISSLQSEDFAVYYCQQYGSSPWTFGQGTKVEIK

SEQ ID NO: 2812 - protein, 118 aa, synthetic construct; identical to SEQ ID NO: 2470
  source 1..118: note = Description of Artificial Sequence: Synthetic polypeptide; note = VH of XENP020394

SEQ ID NO: 2813 - protein, 108 aa, synthetic construct
  source 1..108: note = Description of Artificial Sequence: Synthetic polypeptide; note = VL of XENP020394
EIVMTQSPATLSVSPGERATLSCRASQSVSSSYLAWYQQKPGQAPRLLIYGAFSRATGIPARFSGSGSGTEFTLTISSLQSEDFAVYYCQQYGSSPWTFGQGTKVEIK

SEQ ID NO: 2814 - protein, 5 aa, synthetic construct
  source 1..5: note = Description of Artificial Sequence: Synthetic peptide; note = XENP020394 vhCDR1
SYTMH

SEQ ID NO: 2815 - protein, 17 aa, synthetic construct
  source 1..17: note = Description of Artificial Sequence: Synthetic peptide; note = XENP020394 vhCDR2
FISYDGNTKYYADSVKG

SEQ ID NO: 2816 - protein, 9 aa, synthetic construct
  source 1..9: note = Description of Artificial Sequence: Synthetic peptide; note = XENP020394 vhCDR3
TGHLGPFDL

SEQ ID NO: 2817 - protein, 12 aa, synthetic construct
  source 1..12: note = Description of Artificial Sequence: Synthetic peptide; note = XENP020394 vlCDR1
RASQSVSSSYLA

SEQ ID NO: 2818 - protein, 7 aa, synthetic construct
  source 1..7: note = Description of Artificial Sequence: Synthetic peptide; note = XENP020394 vlCDR2
GAFSRAT

SEQ ID NO: 2819 - protein, 9 aa, synthetic construct
  source 1..9: note = Description of Artificial Sequence: Synthetic peptide; note = XENP020394 vlCDR3
QQYGSSPWT

SEQ ID NO: 2820 - protein, 246 aa, synthetic construct
  source 1..246: note = Description of Artificial Sequence: Synthetic polypeptide; note = XENP020395 [CTLA-4]_H3.5_L2.2_scFv(GKPGS)4
EVQLVESGGGLVKPGGSLRLSCAASGFTFSSYTMHWVRQAPGKGLEWVSFISYDGNTKYYADSVKGRFTISRDNAKNSLYLQMNSLRAEDTAVYYCARTGHLGPFDLWGQGTMVTVSSGKPGSGKPGSGKPGSGKPGSEIVMTQSPATLSVSPGERATLSCRASQSVGSSYLAWYQQKPGQAPRLLIYGASSRATGIPARFSGSGSGTEFTLTISSLQSEDFAVYYCQQYGSSPWTFGQGTKVEIK

SEQ ID NO: 2821 - protein, 118 aa, synthetic construct; identical to SEQ ID NO: 2470
  source 1..118: note = Description of Artificial Sequence: Synthetic polypeptide; note = VH of XENP020395

SEQ ID NO: 2822 - protein, 108 aa, synthetic construct
  source 1..108: note = Description of Artificial Sequence: Synthetic polypeptide; note = VL of XENP020395
EIVMTQSPATLSVSPGERATLSCRASQSVGSSYLAWYQQKPGQAPRLLIYGASSRATGIPARFSGSGSGTEFTLTISSLQSEDFAVYYCQQYGSSPWTFGQGTKVEIK

SEQ ID NO: 2823 - protein, 5 aa, synthetic construct
  source 1..5: note = Description of Artificial Sequence: Synthetic peptide; note = XENP020395 vhCDR1
SYTMH

SEQ ID NO: 2824 - protein, 17 aa, synthetic construct
  source 1..17: note = Description of Artificial Sequence: Synthetic peptide; note = XENP020395 vhCDR2
FISYDGNTKYYADSVKG

SEQ ID NO: 2825 - protein, 9 aa, synthetic construct
  source 1..9: note = Description of Artificial Sequence: Synthetic peptide; note = XENP020395 vhCDR3
TGHLGPFDL

SEQ ID NO: 2826 - protein, 12 aa, synthetic construct
  source 1..12: note = Description of Artificial Sequence: Synthetic peptide; note = XENP020395 vlCDR1
RASQSVGSSYLA

SEQ ID NO: 2827 - protein, 7 aa, synthetic construct
  source 1..7: note = Description of Artificial Sequence: Synthetic peptide; note = XENP020395 vlCDR2
GASSRAT

SEQ ID NO: 2828 - protein, 9 aa, synthetic construct
  source 1..9: note = Description of Artificial Sequence: Synthetic peptide; note = XENP020395 vlCDR3
QQYGSSPWT

SEQ ID NO: 2829 - protein, 246 aa, synthetic construct
  source 1..246: note = Description of Artificial Sequence: Synthetic polypeptide; note = XENP020396 [CTLA-4]_H3.5_L2.3_scFv(GKPGS)4
EVQLVESGGGLVKPGGSLRLSCAASGFTFSSYTMHWVRQAPGKGLEWVSFISYDGNTKYYADSVKGRFTISRDNAKNSLYLQMNSLRAEDTAVYYCARTGHLGPFDLWGQGTMVTVSSGKPGSGKPGSGKPGSGKPGSEIVMTQSPATLSVSPGERATLSCRASQSVSSSYLAWYQQKPGQAPRLLIYGASSRATGIPARFSGSGSGTEFTLTISSLQSEDFAVYYCQQYGSSPWTFGQGTKVEIK

SEQ ID NO: 2830 - protein, 118 aa, synthetic construct; identical to SEQ ID NO: 2470
  source 1..118: note = Description of Artificial Sequence: Synthetic polypeptide; note = VH of XENP020396

SEQ ID NO: 2831 - protein, 108 aa, synthetic construct
  source 1..108: note = Description of Artificial Sequence: Synthetic polypeptide; note = VL of XENP020396
EIVMTQSPATLSVSPGERATLSCRASQSVSSSYLAWYQQKPGQAPRLLIYGASSRATGIPARFSGSGSGTEFTLTISSLQSEDFAVYYCQQYGSSPWTFGQGTKVEIK

SEQ ID NO: 2832 - protein, 5 aa, synthetic construct
  source 1..5: note = Description of Artificial Sequence: Synthetic peptide; note = XENP020396 vhCDR1
SYTMH

SEQ ID NO: 2833 - protein, 17 aa, synthetic construct
  source 1..17: note = Description of Artificial Sequence: Synthetic peptide; note = XENP020396 vhCDR2
FISYDGNTKYYADSVKG

SEQ ID NO: 2834 - protein, 9 aa, synthetic construct
  source 1..9: note = Description of Artificial Sequence: Synthetic peptide; note = XENP020396 vhCDR3
TGHLGPFDL

SEQ ID NO: 2835 - protein, 12 aa, synthetic construct
  source 1..12: note = Description of Artificial Sequence: Synthetic peptide; note = XENP020396 vlCDR1
RASQSVSSSYLA

SEQ ID NO: 2836 - protein, 7 aa, synthetic construct
  source 1..7: note = Description of Artificial Sequence: Synthetic peptide; note = XENP020396 vlCDR2
GASSRAT

SEQ ID NO: 2837 - protein, 9 aa, synthetic construct
  source 1..9: note = Description of Artificial Sequence: Synthetic peptide; note = XENP020396 vlCDR3
QQYGSSPWT

SEQ ID NO: 2838 - protein, 246 aa, synthetic construct
  source 1..246: note = Description of Artificial Sequence: Synthetic polypeptide; note = XENP020431 [CTLA-4]_H3.21_L0.124_scFv(GKPGS)4
EVQLVESGGGLVKPGGSLRLSCAASGFTFSSYTMHWVRQAPGKGLEWVSFISYDGNTKYYADSVKGRFTISRDNAKNSLYLQMNSLRAEDTAVYYCARGGLLGPFDLWGQGTMVTVSSGKPGSGKPGSGKPGSGKPGSEIVLTQSPATLSVSPGERATLSCRASQSVGSSYLAWYQQKPGQAPRLLIYGASSRATGIPDRFSGSGSGTDFTLTISRLEPEDFAVYYCQQYGSSPWTFGQGTKVEIK

SEQ ID NO: 2839 - protein, 118 aa, synthetic construct; identical to SEQ ID NO: 2614
  source 1..118: note = Description of Artificial Sequence: Synthetic polypeptide; note = VH of XENP020431

SEQ ID NO: 2840 - protein, 108 aa, synthetic construct; identical to SEQ ID NO: 2723
  source 1..108: note = Description of Artificial Sequence: Synthetic polypeptide; note = VL of XENP020431

SEQ ID NO: 2841 - protein, 5 aa, synthetic construct
  source 1..5: note = Description of Artificial Sequence: Synthetic peptide; note = XENP020431 vhCDR1
SYTMH

SEQ ID NO: 2842 - protein, 17 aa, synthetic construct
  source 1..17: note = Description of Artificial Sequence: Synthetic peptide; note = XENP020431 vhCDR2
FISYDGNTKYYADSVKG

SEQ ID NO: 2843 - protein, 9 aa, synthetic construct
  source 1..9: note = Description of Artificial Sequence: Synthetic peptide; note = XENP020431 vhCDR3
GGLLGPFDL

SEQ ID NO: 2844 - protein, 12 aa, synthetic construct
  source 1..12: note = Description of Artificial Sequence: Synthetic peptide; note = XENP020431 vlCDR1
RASQSVGSSYLA

SEQ ID NO: 2845 - protein, 7 aa, synthetic construct
  source 1..7: note = Description of Artificial Sequence: Synthetic peptide; note = XENP020431 vlCDR2
GASSRAT

SEQ ID NO: 2846 - protein, 9 aa, synthetic construct
  source 1..9: note = Description of Artificial Sequence: Synthetic peptide; note = XENP020431 vlCDR3
QQYGSSPWT

SEQ ID NO: 2847 - protein, 246 aa, synthetic construct
  source 1..246: note = Description of Artificial Sequence: Synthetic polypeptide; note = XENP020432 [CTLA-4]_H3.21_L0.129_scFv(GKPGS)4
EVQLVESGGGLVKPGGSLRLSCAASGFTFSSYTMHWVRQAPGKGLEWVSFISYDGNTKYYADSVKGRFTISRDNAKNSLYLQMNSLRAEDTAVYYCARGGLLGPFDLWGQGTMVTVSSGKPGSGKPGSGKPGSGKPGSEIVLTQSPATLSLSPGERATLSCRASQSVGSSYLAWYQQKPGQAPRLLIYGASSRATGIPDRFSGSGSGTDFTLTISRLEPEDFAVYYCQQYGSSPWTFGQGTKVEIK

SEQ ID NO: 2848 - protein, 118 aa, synthetic construct; identical to SEQ ID NO: 2614
  source 1..118: note = Description of Artificial Sequence: Synthetic polypeptide; note = VH of XENP020432

SEQ ID NO: 2849 - protein, 108 aa, synthetic construct; identical to SEQ ID NO: 2768
  source 1..108: note = Description of Artificial Sequence: Synthetic polypeptide; note = VL of XENP020432

SEQ ID NO: 2850 - protein, 5 aa, synthetic construct
  source 1..5: note = Description of Artificial Sequence: Synthetic peptide; note = XENP020432 vhCDR1
SYTMH

SEQ ID NO: 2851 - protein, 17 aa, synthetic construct
  source 1..17: note = Description of Artificial Sequence: Synthetic peptide; note = XENP020432 vhCDR2
FISYDGNTKYYADSVKG

SEQ ID NO: 2852 - protein, 9 aa, synthetic construct
  source 1..9: note = Description of Artificial Sequence: Synthetic peptide; note = XENP020432 vhCDR3
GGLLGPFDL

SEQ ID NO: 2853 - protein, 12 aa, synthetic construct
  source 1..12: note = Description of Artificial Sequence: Synthetic peptide; note = XENP020432 vlCDR1
RASQSVGSSYLA

SEQ ID NO: 2854 - protein, 7 aa, synthetic construct
  source 1..7: note = Description of Artificial Sequence: Synthetic peptide; note = XENP020432 vlCDR2
GASSRAT

SEQ ID NO: 2855 - protein, 9 aa, synthetic construct
  source 1..9: note = Description of Artificial Sequence: Synthetic peptide; note = XENP020432 vlCDR3
QQYGSSPWT

SEQ ID NO: 2856 - protein, 246 aa, synthetic construct
  source 1..246: note = Description of Artificial Sequence: Synthetic polypeptide; note = XENP020433 [CTLA-4]_H3.21_L0.132_scFv(GKPGS)4
EVQLVESGGGLVKPGGSLRLSCAASGFTFSSYTMHWVRQAPGKGLEWVSFISYDGNTKYYADSVKGRFTISRDNAKNSLYLQMNSLRAEDTAVYYCARGGLLGPFDLWGQGTMVTVSSGKPGSGKPGSGKPGSGKPGSEIVLTQSPATLSLSPGERATLSCRASQSVSSSYLAWYQQKPGQAPRLLIYGASSRATGIPDRFSGSGSGTDFTLTISRLEPEDFAVYYCQQYGSSPWTFGQGTKVEIK

SEQ ID NO: 2857 - protein, 118 aa, synthetic construct; identical to SEQ ID NO: 2614
  source 1..118: note = Description of Artificial Sequence: Synthetic polypeptide; note = VH of XENP020433

SEQ ID NO: 2858 - protein, 108 aa, synthetic construct; identical to SEQ ID NO: 2795
  source 1..108: note = Description of Artificial Sequence: Synthetic polypeptide; note = VL of XENP020433

SEQ ID NO: 2859 - protein, 5 aa, synthetic construct
  source 1..5: note = Description of Artificial Sequence: Synthetic peptide; note = XENP020433 vhCDR1
SYTMH

SEQ ID NO: 2860 - protein, 17 aa, synthetic construct
  source 1..17: note = Description of Artificial Sequence: Synthetic peptide; note = XENP020433 vhCDR2
FISYDGNTKYYADSVKG

SEQ ID NO: 2861 - protein, 9 aa, synthetic construct
  source 1..9: note = Description of Artificial Sequence: Synthetic peptide; note = XENP020433 vhCDR3
GGLLGPFDL

SEQ ID NO: 2862 - protein, 12 aa, synthetic construct
  source 1..12: note = Description of Artificial Sequence: Synthetic peptide; note = XENP020433 vlCDR1
RASQSVSSSYLA

SEQ ID NO: 2863 - protein, 7 aa, synthetic construct
  source 1..7: note = Description of Artificial Sequence: Synthetic peptide; note = XENP020433 vlCDR2
GASSRAT

SEQ ID NO: 2864 - protein, 9 aa, synthetic construct
  source 1..9: note = Description of Artificial Sequence: Synthetic peptide; note = XENP020433 vlCDR3
QQYGSSPWT

SEQ ID NO: 2865 - protein, 246 aa, synthetic construct
  source 1..246: note = Description of Artificial Sequence: Synthetic polypeptide; note = XENP020434 [CTLA-4]_H3.23_L0.124_scFv(GKPGS)4
EVQLVESGGGLVKPGGSLRLSCAASGFTFSSYTMHWVRQAPGKGLEWVSFISYDGNYKYYADSVKGRFTISRDNAKNSLYLQMNSLRAEDTAVYYCARGGHLGPFDLWGQGTMVTVSSGKPGSGKPGSGKPGSGKPGSEIVLTQSPATLSVSPGERATLSCRASQSVGSSYLAWYQQKPGQAPRLLIYGASSRATGIPDRFSGSGSGTDFTLTISRLEPEDFAVYYCQQYGSSPWTFGQGTKVEIK

SEQ ID NO: 2866 - protein, 118 aa, synthetic construct; identical to SEQ ID NO: 2632
  source 1..118: note = Description of Artificial Sequence: Synthetic polypeptide; note = VH of XENP020434

SEQ ID NO: 2867 - protein, 108 aa, synthetic construct; identical to SEQ ID NO: 2723
  source 1..108: note = Description of Artificial Sequence: Synthetic polypeptide; note = VL of XENP020434

SEQ ID NO: 2868 - protein, 5 aa, synthetic construct
  source 1..5: note = Description of Artificial Sequence: Synthetic peptide; note = XENP020434 vhCDR1
SYTMH

SEQ ID NO: 2869 - protein, 17 aa, synthetic construct
  source 1..17: note = Description of Artificial Sequence: Synthetic peptide; note = XENP020434 vhCDR2
FISYDGNYKYYADSVKG

SEQ ID NO: 2870 - protein, 9 aa, synthetic construct
  source 1..9: note = Description of Artificial Sequence: Synthetic peptide; note = XENP020434 vhCDR3
GGHLGPFDL

SEQ ID NO: 2871 - protein, 12 aa, synthetic construct
  source 1..12: note = Description of Artificial Sequence: Synthetic peptide; note = XENP020434 vlCDR1
RASQSVGSSYLA

SEQ ID NO: 2872 - protein, 7 aa, synthetic construct
  source 1..7: note = Description of Artificial Sequence: Synthetic peptide; note = XENP020434 vlCDR2
GASSRAT

SEQ ID NO: 2873 - protein, 9 aa, synthetic construct
  source 1..9: note = Description of Artificial Sequence: Synthetic peptide; note = XENP020434 vlCDR3
QQYGSSPWT

SEQ ID NO: 2874 - protein, 246 aa, synthetic construct
  source 1..246: note = Description of Artificial Sequence: Synthetic polypeptide; note = XENP020435 [CTLA-4]_H3.23_L0.129_scFv(GKPGS)4
EVQLVESGGGLVKPGGSLRLSCAASGFTFSSYTMHWVRQAPGKGLEWVSFISYDGNYKYYADSVKGRFTISRDNAKNSLYLQMNSLRAEDTAVYYCARGGHLGPFDLWGQGTMVTVSSGKPGSGKPGSGKPGSGKPGSEIVLTQSPATLSLSPGERATLSCRASQSVGSSYLAWYQQKPGQAPRLLIYGASSRATGIPDRFSGSGSGTDFTLTISRLEPEDFAVYYCQQYGSSPWTFGQGTKVEIK

SEQ ID NO: 2875 - protein, 118 aa, synthetic construct; identical to SEQ ID NO: 2632
  source 1..118: note = Description of Artificial Sequence: Synthetic polypeptide; note = VH of XENP020435

SEQ ID NO: 2876 - protein, 108 aa, synthetic construct; identical to SEQ ID NO: 2768
  source 1..108: note = Description of Artificial Sequence: Synthetic polypeptide; note = VL of XENP020435

SEQ ID NO: 2877 - protein, 5 aa, synthetic construct
  source 1..5: note = Description of Artificial Sequence: Synthetic peptide; note = XENP020435 vhCDR1
SYTMH

SEQ ID NO: 2878 - protein, 17 aa, synthetic construct
  source 1..17: note = Description of Artificial Sequence: Synthetic peptide; note = XENP020435 vhCDR2
FISYDGNYKYYADSVKG

SEQ ID NO: 2879 - protein, 9 aa, synthetic construct
  source 1..9: note = Description of Artificial Sequence: Synthetic peptide; note = XENP020435 vhCDR3
GGHLGPFDL

SEQ ID NO: 2880 - protein, 12 aa, synthetic construct
  source 1..12: note = Description of Artificial Sequence: Synthetic peptide; note = XENP020435 vlCDR1
RASQSVGSSYLA

SEQ ID NO: 2881 - protein, 7 aa, synthetic construct
  source 1..7: note = Description of Artificial Sequence: Synthetic peptide; note = XENP020435 vlCDR2
GASSRAT

SEQ ID NO: 2882 - protein, 9 aa, synthetic construct
  source 1..9: note = Description of Artificial Sequence: Synthetic peptide; note = XENP020435 vlCDR3
QQYGSSPWT

SEQ ID NO: 2883 - protein, 246 aa, synthetic construct
  source 1..246: note = Description of Artificial Sequence: Synthetic polypeptide; note = XENP020436 [CTLA-4]_H3.23_L0.132_scFv(GKPGS)4
EVQLVESGGGLVKPGGSLRLSCAASGFTFSSYTMHWVRQAPGKGLEWVSFISYDGNYKYYADSVKGRFTISRDNAKNSLYLQMNSLRAEDTAVYYCARGGHLGPFDLWGQGTMVTVSSGKPGSGKPGSGKPGSGKPGSEIVLTQSPATLSLSPGERATLSCRASQSVSSSYLAWYQQKPGQAPRLLIYGASSRATGIPDRFSGSGSGTDFTLTISRLEPEDFAVYYCQQYGSSPWTFGQGTKVEIK

SEQ ID NO: 2884 - protein, 118 aa, synthetic construct; identical to SEQ ID NO: 2632
  source 1..118: note = Description of Artificial Sequence: Synthetic polypeptide; note = VH of XENP020436

SEQ ID NO: 2885 - protein, 108 aa, synthetic construct; identical to SEQ ID NO: 2795
  source 1..108: note = Description of Artificial Sequence: Synthetic polypeptide; note = VL of XENP020436

SEQ ID NO: 2886 - protein, 5 aa, synthetic construct
  source 1..5: note = Description of Artificial Sequence: Synthetic peptide; note = XENP020436 vhCDR1
SYTMH

SEQ ID NO: 2887 - protein, 17 aa, synthetic construct
  source 1..17: note = Description of Artificial Sequence: Synthetic peptide; note = XENP020436 vhCDR2
FISYDGNYKYYADSVKG

SEQ ID NO: 2888 - protein, 9 aa, synthetic construct
  source 1..9: note = Description of Artificial Sequence: Synthetic peptide; note = XENP020436 vhCDR3
GGHLGPFDL

SEQ ID NO: 2889 - protein, 12 aa, synthetic construct
  source 1..12: note = Description of Artificial Sequence: Synthetic peptide; note = XENP020436 vlCDR1
RASQSVSSSYLA

SEQ ID NO: 2890 - protein, 7 aa, synthetic construct
  source 1..7: note = Description of Artificial Sequence: Synthetic peptide; note = XENP020436 vlCDR2
GASSRAT

SEQ ID NO: 2891 - protein, 9 aa, synthetic construct
  source 1..9: note = Description of Artificial Sequence: Synthetic peptide; note = XENP020436 vlCDR3
QQYGSSPWT

SEQ ID NO: 2892 - protein, 246 aa, synthetic construct
  source 1..246: note = Description of Artificial Sequence: Synthetic polypeptide; note = XENP020437 [CTLA-4]_H3.25_L0.124_scFv(GKPGS)4
EVQLVESGGGLVKPGGSLRLSCAASGFTFSSYTMHWVRQAPGKGLEWVSFISYDGNYKYYADSVKGRFTISRDNAKNSLYLQMNSLRAEDTAVYYCARGGLLGPFDLWGQGTMVTVSSGKPGSGKPGSGKPGSGKPGSEIVLTQSPATLSVSPGERATLSCRASQSVGSSYLAWYQQKPGQAPRLLIYGASSRATGIPDRFSGSGSGTDFTLTISRLEPEDFAVYYCQQYGSSPWTFGQGTKVEIK

SEQ ID NO: 2893 - protein, 118 aa, synthetic construct; identical to SEQ ID NO: 2650
  source 1..118: note = Description of Artificial Sequence: Synthetic polypeptide; note = VH of XENP020437

SEQ ID NO: 2894 - protein, 108 aa, synthetic construct; identical to SEQ ID NO: 2723
  source 1..108: note = Description of Artificial Sequence: Synthetic polypeptide; note = VL of XENP020437

SEQ ID NO: 2895 - protein, 5 aa, synthetic construct
  source 1..5: note = Description of Artificial Sequence: Synthetic peptide; note = XENP020437 vhCDR1
SYTMH

SEQ ID NO: 2896 - protein, 17 aa, synthetic construct
  source 1..17: note = Description of Artificial Sequence: Synthetic peptide; note = XENP020437 vhCDR2
FISYDGNYKYYADSVKG

SEQ ID NO: 2897 - protein, 9 aa, synthetic construct
  source 1..9: note = Description of Artificial Sequence: Synthetic peptide; note = XENP020437 vhCDR3
GGLLGPFDL

SEQ ID NO: 2898 - protein, 12 aa, synthetic construct
  source 1..12: note = Description of Artificial Sequence: Synthetic peptide; note = XENP020437 vlCDR1
RASQSVGSSYLA

SEQ ID NO: 2899 - protein, 7 aa, synthetic construct
  source 1..7: note = Description of Artificial Sequence: Synthetic peptide; note = XENP020437 vlCDR2
GASSRAT

SEQ ID NO: 2900 - protein, 9 aa, synthetic construct
  source 1..9: note = Description of Artificial Sequence: Synthetic peptide; note = XENP020437 vlCDR3
QQYGSSPWT

SEQ ID NO: 2901 - protein, 246 aa, synthetic construct
  source 1..246: note = Description of Artificial Sequence: Synthetic polypeptide; note = XENP020438 [CTLA-4]_H3.25_L0.129_scFv(GKPGS)4
EVQLVESGGGLVKPGGSLRLSCAASGFTFSSYTMHWVRQAPGKGLEWVSFISYDGNYKYYADSVKGRFTISRDNAKNSLYLQMNSLRAEDTAVYYCARGGLLGPFDLWGQGTMVTVSSGKPGSGKPGSGKPGSGKPGSEIVLTQSPATLSLSPGERATLSCRASQSVGSSYLAWYQQKPGQAPRLLIYGASSRATGIPDRFSGSGSGTDFTLTISRLEPEDFAVYYCQQYGSSPWTFGQGTKVEIK

SEQ ID NO: 2902 - protein, 118 aa, synthetic construct; identical to SEQ ID NO: 2650
  source 1..118: note = Description of Artificial Sequence: Synthetic polypeptide; note = VH of XENP020438

SEQ ID NO: 2903 - protein, 108 aa, synthetic construct; identical to SEQ ID NO: 2768
  source 1..108: note = Description of Artificial Sequence: Synthetic polypeptide; note = VL of XENP020438

SEQ ID NO: 2904 - protein, 5 aa, synthetic construct
  source 1..5: note = Description of Artificial Sequence: Synthetic peptide; note = XENP020438 vhCDR1
SYTMH

SEQ ID NO: 2905 - protein, 17 aa, synthetic construct
  source 1..17: note = Description of Artificial Sequence: Synthetic peptide; note = XENP020438 vhCDR2
FISYDGNYKYYADSVKG

SEQ ID NO: 2906 - protein, 9 aa, synthetic construct
  source 1..9: note = Description of Artificial Sequence: Synthetic peptide; note = XENP020438 vhCDR3
GGLLGPFDL

SEQ ID NO: 2907 - protein, 12 aa, synthetic construct
  source 1..12: note = Description of Artificial Sequence: Synthetic peptide; note = XENP020438 vlCDR1
RASQSVGSSYLA

SEQ ID NO: 2908 - protein, 7 aa, synthetic construct
  source 1..7: note = Description of Artificial Sequence: Synthetic peptide; note = XENP020438 vlCDR2
GASSRAT

SEQ ID NO: 2909 - protein, 9 aa, synthetic construct
  source 1..9: note = Description of Artificial Sequence: Synthetic peptide; note = XENP020438 vlCDR3
QQYGSSPWT

SEQ ID NO: 2910 - protein, 246 aa, synthetic construct
  source 1..246: note = Description of Artificial Sequence: Synthetic polypeptide; note = XENP020439 [CTLA-4]_H3.25_L0.132_scFv(GKPGS)4
EVQLVESGGGLVKPGGSLRLSCAASGFTFSSYTMHWVRQAPGKGLEWVSFISYDGNYKYYADSVKGRFTISRDNAKNSLYLQMNSLRAEDTAVYYCARGGLLGPFDLWGQGTMVTVSSGKPGSGKPGSGKPGSGKPGSEIVLTQSPATLSLSPGERATLSCRASQSVSSSYLAWYQQKPGQAPRLLIYGASSRATGIPDRFSGSGSGTDFTLTISRLEPEDFAVYYCQQYGSSPWTFGQGTKVEIK

SEQ ID NO: 2911 - protein, 118 aa, synthetic construct; identical to SEQ ID NO: 2650
  source 1..118: note = Description of Artificial Sequence: Synthetic polypeptide; note = VH of XENP020439

SEQ ID NO: 2912 - protein, 108 aa, synthetic construct; identical to SEQ ID NO: 2795
  source 1..108: note = Description of Artificial Sequence: Synthetic polypeptide; note = VL of XENP020439

SEQ ID NO: 2913 - protein, 5 aa, synthetic construct
  source 1..5: note = Description of Artificial Sequence: Synthetic peptide; note = XENP020439 vhCDR1
SYTMH

SEQ ID NO: 2914 - protein, 17 aa, synthetic construct
  source 1..17: note = Description of Artificial Sequence: Synthetic peptide; note = XENP020439 vhCDR2
FISYDGNYKYYADSVKG

SEQ ID NO: 2915 - protein, 9 aa, synthetic construct
  source 1..9: note = Description of Artificial Sequence: Synthetic peptide; note = XENP020439 vhCDR3
GGLLGPFDL

SEQ ID NO: 2916 - protein, 12 aa, synthetic construct
  source 1..12: note = Description of Artificial Sequence: Synthetic peptide; note = XENP020439 vlCDR1
RASQSVSSSYLA

SEQ ID NO: 2917 - protein, 7 aa, synthetic construct
  source 1..7: note = Description of Artificial Sequence: Synthetic peptide; note = XENP020439 vlCDR2
GASSRAT

SEQ ID NO: 2918 - protein, 9 aa, synthetic construct
  source 1..9: note = Description of Artificial Sequence: Synthetic peptide; note = XENP020439 vlCDR3
QQYGSSPWT

SEQ ID NO: 2919 - protein, 221 aa, synthetic construct
  source 1..221: note = Description of Artificial Sequence: Synthetic polypeptide; note = XENP009950 [CTLA-4]_H0_L0_Fab_Heavy Chain
QVQLVESGGGVVQPGRSLRLSCAASGFTFSSYTMHWVRQAPGKGLEWVTFISYDGNNKYYADSVKGRFTISRDNSKNTLYLQMNSLRAEDTAIYYCARTGWLGPFDYWGQGTLVTVSSASTKGPSVFPLAPSSKSTSGGTAALGCLVKDYFPEPVTVSWNSGALTSGVHTFPAVLQSSGLYSLSSVVTVPSSSLGTQTYICNVNHKPSNTKVDKKVEPKSC

SEQ ID NO: 2920 - protein, 118 aa, synthetic construct; identical to SEQ ID NO: 22
  source 1..118: note = Description of Artificial Sequence: Synthetic polypeptide; note = VH of XENP009950

SEQ ID NO: 2921 - protein, 5 aa, synthetic construct
  source 1..5: note = Description of Artificial Sequence: Synthetic peptide; note = XENP009950 vhCDR1
SYTMH

SEQ ID NO: 2922 - protein, 17 aa, synthetic construct
  source 1..17: note = Description of Artificial Sequence: Synthetic peptide; note = XENP009950 vhCDR2
FISYDGNNKYYADSVKG

SEQ ID NO: 2923 - protein, 9 aa, synthetic construct
  source 1..9: note = Description of Artificial Sequence: Synthetic peptide; note = XENP009950 vhCDR3
TGWLGPFDY

SEQ ID NO: 2924 - protein, 215 aa, synthetic construct
  source 1..215: note = Description of Artificial Sequence: Synthetic polypeptide; note = XENP009950 [CTLA-4]_H0_L0_Fab Light Chain
EIVLTQSPGTLSLSPGERATLSCRASQSVGSSYLAWYQQKPGQAPRLLIYGAFSRATGIPDRFSGSGSGTDFTLTISRLEPEDFAVYYCQQYGSSPWTFGQGTKVEIKRTVAAPSVFIFPPSDEQLKSGTASVVCLLNNFYPREAKVQWKVDNALQSGNSQESVTEQDSKDSTYSLSSTLTLSKADYEKHKVYACEVTHQGLSSPVTKSFNRGEC

SEQ ID NO: 2925 - protein, 108 aa, synthetic construct; identical to SEQ ID NO: 23
  source 1..108: note = Description of Artificial Sequence: Synthetic polypeptide; note = VL of XENP009950

SEQ ID NO: 2926 - protein, 12 aa, synthetic construct
  source 1..12: note = Description of Artificial Sequence: Synthetic peptide; note = XENP009950 vlCDR1
RASQSVGSSYLA

SEQ ID NO: 2927 - protein, 7 aa, synthetic construct
  source 1..7: note = Description of Artificial Sequence: Synthetic peptide; note = XENP009950 vlCDR2
GAFSRAT

SEQ ID NO: 2928 - protein, 9 aa, synthetic construct
  source 1..9: note = Description of Artificial Sequence: Synthetic peptide; note = XENP009950 vlCDR3
QQYGSSPWT

SEQ ID NO: 2929 - protein, 221 aa, synthetic construct
  source 1..221: note = Description of Artificial Sequence: Synthetic polypeptide; note = XENP019211 [CTLA-4]_H0.1_L0_Fab Heavy Chain
EVQLVESGGGVVQPGRSLRLSCAASGFTFSSYTMHWVRQAPGKGLEWVTFISYDGNNKYYADSVKGRFTISRDNSKNTLYLQMNSLRAEDTAIYYCARTGWLGPFDYWGQGTLVTVSSASTKGPSVFPLAPSSKSTSGGTAALGCLVKDYFPEPVTVSWNSGALTSGVHTFPAVLQSSGLYSLSSVVTVPSSSLGTQTYICNVNHKPSNTKVDKKVEPKSC

SEQ ID NO: 2930 - protein, 118 aa, synthetic construct; identical to SEQ ID NO: 193
  source 1..118: note = Description of Artificial Sequence: Synthetic polypeptide; note = VH of XENP019211

SEQ ID NO: 2931 - protein, 5 aa, synthetic construct
  source 1..5: note = Description of Artificial Sequence: Synthetic peptide; note = XENP019211 vhCDR1
SYTMH

SEQ ID NO: 2932 - protein, 17 aa, synthetic construct
  source 1..17: note = Description of Artificial Sequence: Synthetic peptide; note = XENP019211 vhCDR2
FISYDGNNKYYADSVKG

SEQ ID NO: 2933 - protein, 9 aa, synthetic construct
  source 1..9: note = Description of Artificial Sequence: Synthetic peptide; note = XENP019211 vhCDR3
TGWLGPFDY

SEQ ID NO: 2934 - protein, 215 aa, synthetic construct; identical to SEQ ID NO: 2924
  source 1..215: note = Description of Artificial Sequence: Synthetic polypeptide; note = XENP019211 [CTLA-4]_H0.1_L0_Fab Light Chain

SEQ ID NO: 2935 - protein, 108 aa, synthetic construct; identical to SEQ ID NO: 23
  source 1..108: note = Description of Artificial Sequence: Synthetic polypeptide; note = VL of XENP019211

SEQ ID NO: 2936 - protein, 12 aa, synthetic construct
  source 1..12: note = Description of Artificial Sequence: Synthetic peptide; note = XENP019211 vlCDR1
RASQSVGSSYLA

SEQ ID NO: 2937 - protein, 7 aa, synthetic construct
  source 1..7: note = Description of Artificial Sequence: Synthetic peptide; note = XENP019211 vlCDR2
GAFSRAT

SEQ ID NO: 2938 - protein, 9 aa, synthetic construct
  source 1..9: note = Description of Artificial Sequence: Synthetic peptide; note = XENP019211 vlCDR3
QQYGSSPWT

SEQ ID NO: 2939 - protein, 221 aa, synthetic construct
  source 1..221: note = Description of Artificial Sequence: Synthetic polypeptide; note = XENP019212 [CTLA-4]_H0.2_L0_Fab Heavy Chain
QVQLLESGGGVVQPGRSLRLSCAASGFTFSSYTMHWVRQAPGKGLEWVTFISYDGNNKYYADSVKGRFTISRDNSKNTLYLQMNSLRAEDTAIYYCARTGWLGPFDYWGQGTLVTVSSASTKGPSVFPLAPSSKSTSGGTAALGCLVKDYFPEPVTVSWNSGALTSGVHTFPAVLQSSGLYSLSSVVTVPSSSLGTQTYICNVNHKPSNTKVDKKVEPKSC

SEQ ID NO: 2940 - protein, 118 aa, synthetic construct; identical to SEQ ID NO: 202
  source 1..118: note = Description of Artificial Sequence: Synthetic polypeptide; note = VH of XENP019212

SEQ ID NO: 2941 - protein, 5 aa, synthetic construct
  source 1..5: note = Description of Artificial Sequence: Synthetic peptide; note = XENP019212 vhCDR1
SYTMH

SEQ ID NO: 2942 - protein, 17 aa, synthetic construct
  source 1..17: note = Description of Artificial Sequence: Synthetic peptide; note = XENP019212 vhCDR2
FISYDGNNKYYADSVKG

SEQ ID NO: 2943 - protein, 9 aa, synthetic construct
  source 1..9: note = Description of Artificial Sequence: Synthetic peptide; note = XENP019212 vhCDR3
TGWLGPFDY

SEQ ID NO: 2944 - protein, 215 aa, synthetic construct; identical to SEQ ID NO: 2924
  source 1..215: note = Description of Artificial Sequence: Synthetic polypeptide; note = XENP019212 [CTLA-4]_H0.2_L0_Fab Light Chain

SEQ ID NO: 2945 - protein, 108 aa, synthetic construct; identical to SEQ ID NO: 23
  source 1..108: note = Description of Artificial Sequence: Synthetic polypeptide; note = VL of XENP019212

SEQ ID NO: 2946 - protein, 12 aa, synthetic construct
  source 1..12: note = Description of Artificial Sequence: Synthetic peptide; note = XENP019212 vlCDR1
RASQSVGSSYLA

SEQ ID NO: 2947 - protein, 7 aa, synthetic construct
  source 1..7: note = Description of Artificial Sequence: Synthetic peptide; note = XENP019212 vlCDR2
GAFSRAT

SEQ ID NO: 2948 - protein, 9 aa, synthetic construct
  source 1..9: note = Description of Artificial Sequence: Synthetic peptide; note = XENP019212 vlCDR3
QQYGSSPWT

SEQ ID NO: 2949 - protein, 221 aa, synthetic construct
  source 1..221: note = Description of Artificial Sequence: Synthetic polypeptide; note = XENP019213 [CTLA-4]_H0.3_L0_Fab Heavy Chain
QVQLVESGGGLVQPGRSLRLSCAASGFTFSSYTMHWVRQAPGKGLEWVTFISYDGNNKYYADSVKGRFTISRDNSKNTLYLQMNSLRAEDTAIYYCARTGWLGPFDYWGQGTLVTVSSASTKGPSVFPLAPSSKSTSGGTAALGCLVKDYFPEPVTVSWNSGALTSGVHTFPAVLQSSGLYSLSSVVTVPSSSLGTQTYICNVNHKPSNTKVDKKVEPKSC

SEQ ID NO: 2950 - protein, 118 aa, synthetic construct; identical to SEQ ID NO: 211
  source 1..118: note = Description of Artificial Sequence: Synthetic polypeptide; note = VH of XENP019213

SEQ ID NO: 2951 - protein, 5 aa, synthetic construct
  source 1..5: note = Description of Artificial Sequence: Synthetic peptide; note = XENP019213 vhCDR1
SYTMH

SEQ ID NO: 2952 - protein, 17 aa, synthetic construct
  source 1..17: note = Description of Artificial Sequence: Synthetic peptide; note = XENP019213 vhCDR2
FISYDGNNKYYADSVKG

SEQ ID NO: 2953 - protein, 9 aa, synthetic construct
  source 1..9: note = Description of Artificial Sequence: Synthetic peptide; note = XENP019213 vhCDR3
TGWLGPFDY

SEQ ID NO: 2954 - protein, 215 aa, synthetic construct; identical to SEQ ID NO: 2924
  source 1..215: note = Description of Artificial Sequence: Synthetic polypeptide; note = XENP019213 [CTLA-4]_H0.3_L0_Fab Light Chain

SEQ ID NO: 2955 - protein, 108 aa, synthetic construct; identical to SEQ ID NO: 23
  source 1..108: note = Description of Artificial Sequence: Synthetic polypeptide; note = VL of XENP019213

SEQ ID NO: 2956 - protein, 12 aa, synthetic construct
  source 1..12: note = Description of Artificial Sequence: Synthetic peptide; note = XENP019213 vlCDR1
RASQSVGSSYLA

SEQ ID NO: 2957 - protein, 7 aa, synthetic construct
  source 1..7: note = Description of Artificial Sequence: Synthetic peptide; note = XENP019213 vlCDR2
GAFSRAT

SEQ ID NO: 2958 - protein, 9 aa, synthetic construct
  source 1..9: note = Description of Artificial Sequence: Synthetic peptide; note = XENP019213 vlCDR3
QQYGSSPWT

SEQ ID NO: 2959 - protein, 221 aa, synthetic construct
  source 1..221: note = Description of Artificial Sequence: Synthetic polypeptide; note = XENP019214 [CTLA-4]_H0.4_L0_Fab Heavy Chain
QVQLVESGGGVKQPGRSLRLSCAASGFTFSSYTMHWVRQAPGKGLEWVTFISYDGNNKYYADSVKGRFTISRDNSKNTLYLQMNSLRAEDTAIYYCARTGWLGPFDYWGQGTLVTVSSASTKGPSVFPLAPSSKSTSGGTAALGCLVKDYFPEPVTVSWNSGALTSGVHTFPAVLQSSGLYSLSSVVTVPSSSLGTQTYICNVNHKPSNTKVDKKVEPKSC

SEQ ID NO: 2960 - protein, 118 aa, synthetic construct; identical to SEQ ID NO: 220
  source 1..118: note = Description of Artificial Sequence: Synthetic polypeptide; note = VH of XENP019214

SEQ ID NO: 2961 - protein, 5 aa, synthetic construct
  source 1..5: note = Description of Artificial Sequence: Synthetic peptide; note = XENP019214 vhCDR1
SYTMH

SEQ ID NO: 2962 - protein, 17 aa, synthetic construct
  source 1..17: note = Description of Artificial Sequence: Synthetic peptide; note = XENP019214 vhCDR2
FISYDGNNKYYADSVKG

SEQ ID NO: 2963 - protein, 9 aa, synthetic construct
  source 1..9: note = Description of Artificial Sequence: Synthetic peptide; note = XENP019214 vhCDR3
TGWLGPFDY

SEQ ID NO: 2964 - protein, 215 aa, synthetic construct; identical to SEQ ID NO: 2924
  source 1..215: note = Description of Artificial Sequence: Synthetic polypeptide; note = XENP019214 [CTLA-4]_H0.4_L0_Fab Light Chain

SEQ ID NO: 2965 - protein, 108 aa, synthetic construct; identical to SEQ ID NO: 23
  source 1..108: note = Description of Artificial Sequence: Synthetic polypeptide; note = VL of XENP019214

SEQ ID NO: 2966 - protein, 12 aa, synthetic construct
  source 1..12: note = Description of Artificial Sequence: Synthetic peptide; note = XENP019214 vlCDR1
RASQSVGSSYLA

SEQ ID NO: 2967 - protein, 7 aa, synthetic construct
  source 1..7: note = Description of Artificial Sequence: Synthetic peptide; note = XENP019214 vlCDR2
GAFSRAT

SEQ ID NO: 2968 - protein, 9 aa, synthetic construct
  source 1..9: note = Description of Artificial Sequence: Synthetic peptide; note = XENP019214 vlCDR3
QQYGSSPWT

SEQ ID NO: 2969 - protein, 221 aa, synthetic construct
  source 1..221: note = Description of Artificial Sequence: Synthetic polypeptide; note = XENP019215 [CTLA-4]_H0.5_L0_Fab Heavy Chain
QVQLVESGGGVKQPGESLRLSCAASGFTFSSYTMHWVRQAPGKGLEWVTFISYDGNNKYYADSVKGRFTISRDNSKNTLYLQMNSLRAEDTAIYYCARTGWLGPFDYWGQGTLVTVSSASTKGPSVFPLAPSSKSTSGGTAALGCLVKDYFPEPVTVSWNSGALTSGVHTFPAVLQSSGLYSLSSVVTVPSSSLGTQTYICNVNHKPSNTKVDKKVEPKSC

SEQ ID NO: 2970 - protein, 118 aa, synthetic construct; identical to SEQ ID NO: 229
  source 1..118: note = Description of Artificial Sequence: Synthetic polypeptide; note = VH of XENP019215

SEQ ID NO: 2971 - protein, 5 aa, synthetic construct
  source 1..5: note = Description of Artificial Sequence: Synthetic peptide; note = XENP019215 vhCDR1
SYTMH

SEQ ID NO: 2972 - protein, 17 aa, synthetic construct
  source 1..17: note = Description of Artificial Sequence: Synthetic peptide; note = XENP019215 vhCDR2
FISYDGNNKYYADSVKG

SEQ ID NO: 2973 - protein, 9 aa, synthetic construct
  source 1..9: note = Description of Artificial Sequence: Synthetic peptide; note = XENP019215 vhCDR3
TGWLGPFDY

SEQ ID NO: 2974 - protein, 215 aa, synthetic construct; identical to SEQ ID NO: 2924
  source 1..215: note = Description of Artificial Sequence: Synthetic polypeptide; note = XENP019215 [CTLA-4]_H0.5_L0_Fab Light Chain

SEQ ID NO: 2975 - protein, 108 aa, synthetic construct; identical to SEQ ID NO: 23
  source 1..108: note = Description of Artificial Sequence: Synthetic polypeptide; note = VL of XENP019215

SEQ ID NO: 2976 - protein, 12 aa, synthetic construct
  source 1..12: note = Description of Artificial Sequence: Synthetic peptide; note = XENP019215 vlCDR1
RASQSVGSSYLA

SEQ ID NO: 2977 - protein, 7 aa, synthetic construct
  source 1..7: note = Description of Artificial Sequence: Synthetic peptide; note = XENP019215 vlCDR2
GAFSRAT

SEQ ID NO: 2978 - protein, 9 aa, synthetic construct
  source 1..9: note = Description of Artificial Sequence: Synthetic peptide; note = XENP019215 vlCDR3
QQYGSSPWT

SEQ ID NO: 2979 - protein, 221 aa, synthetic construct
  source 1..221: note = Description of Artificial Sequence: Synthetic polypeptide; note = XENP019216 [CTLA-4]_H0.6_L0_Fab Heavy Chain
QVQLVESGGGVVKPGRSLRLSCAASGFTFSSYTMHWVRQAPGKGLEWVTFISYDGNNKYYADSVKGRFTISRDNSKNTLYLQMNSLRAEDTAIYYCARTGWLGPFDYWGQGTLVTVSSASTKGPSVFPLAPSSKSTSGGTAALGCLVKDYFPEPVTVSWNSGALTSGVHTFPAVLQSSGLYSLSSVVTVPSSSLGTQTYICNVNHKPSNTKVDKKVEPKSC

SEQ ID NO: 2980 - protein, 118 aa, synthetic construct; identical to SEQ ID NO: 238
  source 1..118: note = Description of Artificial Sequence: Synthetic polypeptide; note = VH of XENP019216

SEQ ID NO: 2981 - protein, 5 aa, synthetic construct
  source 1..5: note = Description of Artificial Sequence: Synthetic peptide; note = XENP019216 vhCDR1
SYTMH

SEQ ID NO: 2982 - protein, 17 aa, synthetic construct
  source 1..17: note = Description of Artificial Sequence: Synthetic peptide; note = XENP019216 vhCDR2
FISYDGNNKYYADSVKG

SEQ ID NO: 2983 - protein, 9 aa, synthetic construct
  source 1..9: note = Description of Artificial Sequence: Synthetic peptide; note = XENP019216 vhCDR3
TGWLGPFDY

SEQ ID NO: 2984 - protein, 215 aa, synthetic construct; identical to SEQ ID NO: 2924
  source 1..215: note = Description of Artificial Sequence: Synthetic polypeptide; note = XENP019216 [CTLA-4]_H0.6_L0_Fab Light Chain

SEQ ID NO: 2985 - protein, 108 aa, synthetic construct; identical to SEQ ID NO: 23
  source 1..108: note = Description of Artificial Sequence: Synthetic polypeptide; note = VL of XENP019216

SEQ ID NO: 2986 - protein, 12 aa, synthetic construct
  source 1..12: note = Description of Artificial Sequence: Synthetic peptide; note = XENP019216 vlCDR1
RASQSVGSSYLA

SEQ ID NO: 2987 - protein, 7 aa, synthetic construct
  source 1..7: note = Description of Artificial Sequence: Synthetic peptide; note = XENP019216 vlCDR2
GAFSRAT

SEQ ID NO: 2988 - protein, 9 aa, synthetic construct
  source 1..9: note = Description of Artificial Sequence: Synthetic peptide; note = XENP019216 vlCDR3
QQYGSSPWT

SEQ ID NO: 2989 - protein, 221 aa, synthetic construct
  source 1..221: note = Description of Artificial Sequence: Synthetic polypeptide; note = XENP019217 [CTLA-4]_H0.7_L0_Fab Heavy Chain
QVQLVESGGGVVEPGRSLRLSCAASGFTFSSYTMHWVRQAPGKGLEWVTFISYDGNNKYYADSVKGRFTISRDNSKNTLYLQMNSLRAEDTAIYYCARTGWLGPFDYWGQGTLVTVSSASTKGPSVFPLAPSSKSTSGGTAALGCLVKDYFPEPVTVSWNSGALTSGVHTFPAVLQSSGLYSLSSVVTVPSSSLGTQTYICNVNHKPSNTKVDKKVEPKSC

SEQ ID NO: 2990 - protein, 118 aa, synthetic construct; identical to SEQ ID NO: 247
  source 1..118: note = Description of Artificial Sequence: Synthetic polypeptide; note = VH of XENP019217

SEQ ID NO: 2991 - protein, 5 aa, synthetic construct
  source 1..5: note = Description of Artificial Sequence: Synthetic peptide; note = XENP019217 vhCDR1
SYTMH

SEQ ID NO: 2992 - protein, 17 aa, synthetic construct
  source 1..17: note = Description of Artificial Sequence: Synthetic peptide; note = XENP019217 vhCDR2
FISYDGNNKYYADSVKG

SEQ ID NO: 2993 - protein, 9 aa, synthetic construct
  source 1..9: note = Description of Artificial Sequence: Synthetic peptide; note = XENP019217 vhCDR3
TGWLGPFDY

SEQ ID NO: 2994 - protein, 215 aa, synthetic construct; identical to SEQ ID NO: 2924
  source 1..215: note = Description of Artificial Sequence: Synthetic polypeptide; note = XENP019217 [CTLA-4]_H0.7_L0_Fab Light Chain

SEQ ID NO: 2995 - protein, 108 aa, synthetic construct; identical to SEQ ID NO: 23
  source 1..108: note = Description of Artificial Sequence: Synthetic polypeptide; note = VL of XENP019217

SEQ ID NO: 2996 - protein, 12 aa, synthetic construct
  source 1..12: note = Description of Artificial Sequence: Synthetic peptide; note = XENP019217 vlCDR1
RASQSVGSSYLA

SEQ ID NO: 2997 - protein, 7 aa, synthetic construct
  source 1..7: note = Description of Artificial Sequence: Synthetic peptide; note = XENP019217 vlCDR2
GAFSRAT

SEQ ID NO: 2998 - protein, 9 aa, synthetic construct
  source 1..9: note = Description of Artificial Sequence: Synthetic peptide; note = XENP019217 vlCDR3
QQYGSSPWT

SEQ ID NO: 2999 - protein, 221 aa, synthetic construct
  source 1..221: note = Description of Artificial Sequence: Synthetic polypeptide; note = XENP019218 [CTLA-4]_H0.8_L0_Fab Heavy Chain
QVQLVESGGGVVQPGGSLRLSCAASGFTFSSYTMHWVRQAPGKGLEWVTFISYDGNNKYYADSVKGRFTISRDNSKNTLYLQMNSLRAEDTAIYYCARTGWLGPFDYWGQGTLVTVSSASTKGPSVFPLAPSSKSTSGGTAALGCLVKDYFPEPVTVSWNSGALTSGVHTFPAVLQSSGLYSLSSVVTVPSSSLGTQTYICNVNHKPSNTKVDKKVEPKSC

SEQ ID NO: 3000 - protein, 118 aa, synthetic construct; identical to SEQ ID NO: 256
  source 1..118: note = Description of Artificial Sequence: Synthetic polypeptide; note = VH of XENP019218

SEQ ID NO: 3001 - protein, 5 aa, synthetic construct
  source 1..5: note = Description of Artificial Sequence: Synthetic peptide; note = XENP019218 vhCDR1
SYTMH

SEQ ID NO: 3002 - protein, 17 aa, synthetic construct
  source 1..17: note = Description of Artificial Sequence: Synthetic peptide; note = XENP019218 vhCDR2
FISYDGNNKYYADSVKG

SEQ ID NO: 3003 - protein, 9 aa, synthetic construct
  source 1..9: note = Description of Artificial Sequence: Synthetic peptide; note = XENP019218 vhCDR3
TGWLGPFDY

SEQ ID NO: 3004 - protein, 215 aa, synthetic construct; identical to SEQ ID NO: 2924
  source 1..215: note = Description of Artificial Sequence: Synthetic polypeptide; note = XENP019218 [CTLA-4]_H0.8_L0_Fab Light Chain

SEQ ID NO: 3005 - protein, 108 aa, synthetic construct; identical to SEQ ID NO: 23
  source 1..108: note = Description of Artificial Sequence: Synthetic polypeptide; note = VL of XENP019218

SEQ ID NO: 3006 - protein, 12 aa, synthetic construct
  source 1..12: note = Description of Artificial Sequence: Synthetic peptide; note = XENP019218 vlCDR1
RASQSVGSSYLA

SEQ ID NO: 3007 - protein, 7 aa, synthetic construct
  source 1..7: note = Description of Artificial Sequence: Synthetic peptide; note = XENP019218 vlCDR2
GAFSRAT

SEQ ID NO: 3008 - protein, 9 aa, synthetic construct
  source 1..9: note = Description of Artificial Sequence: Synthetic peptide; note = XENP019218 vlCDR3
QQYGSSPWT

SEQ ID NO: 3009 - protein, 221 aa, synthetic construct
  source 1..221: note = Description of Artificial Sequence: Synthetic polypeptide; note = XENP019219 [CTLA-4]_H0.9_L0_Fab Heavy Chain
QVQLVESGGGVVQPGESLRLSCAASGFTFSSYTMHWVRQAPGKGLEWVTFISYDGNNKYYADSVKGRFTISRDNSKNTLYLQMNSLRAEDTAIYYCARTGWLGPFDYWGQGTLVTVSSASTKGPSVFPLAPSSKSTSGGTAALGCLVKDYFPEPVTVSWNSGALTSGVHTFPAVLQSSGLYSLSSVVTVPSSSLGTQTYICNVNHKPSNTKVDKKVEPKSC

SEQ ID NO: 3010 - protein, 118 aa, synthetic construct; identical to SEQ ID NO: 265
  source 1..118: note = Description of Artificial Sequence: Synthetic polypeptide; note = VH of XENP019219

SEQ ID NO: 3011 - protein, 5 aa, synthetic construct
  source 1..5: note = Description of Artificial Sequence: Synthetic peptide; note = XENP019219 vhCDR1
SYTMH

SEQ ID NO: 3012 - protein, 17 aa, synthetic construct
  source 1..17: note = Description of Artificial Sequence: Synthetic peptide; note = XENP019219 vhCDR2
FISYDGNNKYYADSVKG

SEQ ID NO: 3013 - protein, 9 aa, synthetic construct
  source 1..9: note = Description of Artificial Sequence: Synthetic peptide; note = XENP019219 vhCDR3
TGWLGPFDY

SEQ ID NO: 3014 - protein, 215 aa, synthetic construct; identical to SEQ ID NO: 2924
  source 1..215: note = Description of Artificial Sequence: Synthetic polypeptide; note = XENP019219 [CTLA-4]_H0.9_L0_Fab Light Chain

SEQ ID NO: 3015 - protein, 108 aa, synthetic construct; identical to SEQ ID NO: 23
  source 1..108: note = Description of Artificial Sequence: Synthetic polypeptide; note = VL of XENP019219

SEQ ID NO: 3016 - protein, 12 aa, synthetic construct
  source 1..12: note = Description of Artificial Sequence: Synthetic peptide; note = XENP019219 vlCDR1
RASQSVGSSYLA

SEQ ID NO: 3017 - protein, 7 aa, synthetic construct
  source 1..7: note = Description of Artificial Sequence: Synthetic peptide; note = XENP019219 vlCDR2
GAFSRAT

SEQ ID NO: 3018 - protein, 9 aa, synthetic construct
  source 1..9: note = Description of Artificial Sequence: Synthetic peptide; note = XENP019219 vlCDR3
QQYGSSPWT

SEQ ID NO: 3019 - protein, 221 aa, synthetic construct
  source 1..221: note = Description of Artificial Sequence: Synthetic polypeptide; note = XENP019220 [CTLA-4]_H0.10_L0_Fab Heavy Chain
QVQLVESGGGVVQPGRSLKLSCAASGFTFSSYTMHWVRQAPGKGLEWVTFISYDGNNKYYADSVKGRFTISRDNSKNTLYLQMNSLRAEDTAIYYCARTGWLGPFDYWGQGTLVTVSSASTKGPSVFPLAPSSKSTSGGTAALGCLVKDYFPEPVTVSWNSGALTSGVHTFPAVLQSSGLYSLSSVVTVPSSSLGTQTYICNVNHKPSNTKVDKKVEPKSC

SEQ ID NO: 3020 - protein, 118 aa, synthetic construct; identical to SEQ ID NO: 274
  source 1..118: note = Description of Artificial Sequence: Synthetic polypeptide; note = VH of XENP019220

SEQ ID NO: 3021 - protein, 5 aa, synthetic construct
  source 1..5: note = Description of Artificial Sequence: Synthetic peptide; note = XENP019220 vhCDR1
SYTMH

SEQ ID NO: 3022 - protein, 17 aa, synthetic construct
  source 1..17: note = Description of Artificial Sequence: Synthetic peptide; note = XENP019220 vhCDR2
FISYDGNNKYYADSVKG

SEQ ID NO: 3023 - protein, 9 aa, synthetic construct
  source 1..9: note = Description of Artificial Sequence: Synthetic peptide; note = XENP019220 vhCDR3
TGWLGPFDY

SEQ ID NO: 3024 - protein, 215 aa, synthetic construct; identical to SEQ ID NO: 2924
  source 1..215: note = Description of Artificial Sequence: Synthetic polypeptide; note = XENP019220 [CTLA-4]_H0.10_L0_Fab Light Chain

SEQ ID NO: 3025 - protein, 108 aa, synthetic construct; identical to SEQ ID NO: 23
  source 1..108: note = Description of Artificial Sequence: Synthetic polypeptide; note = VL of XENP019220

SEQ ID NO: 3026 - protein, 12 aa, synthetic construct
  source 1..12: note = Description of Artificial Sequence: Synthetic peptide; note = XENP019220 vlCDR1
RASQSVGSSYLA

SEQ ID NO: 3027 - protein, 7 aa, synthetic construct
  source 1..7: note = Description of Artificial Sequence: Synthetic peptide; note = XENP019220 vlCDR2
GAFSRAT

SEQ ID NO: 3028 - protein, 9 aa, synthetic construct
  source 1..9: note = Description of Artificial Sequence: Synthetic peptide; note = XENP019220 vlCDR3
QQYGSSPWT

SEQ ID NO: 3029 - protein, 221 aa, synthetic construct
  source 1..221: note = Description of Artificial Sequence: Synthetic polypeptide; note = XENP019221 [CTLA-4]_H0.11_L0_Fab Heavy Chain
QVQLVESGGGVVQPGRSLRLSCAASGFTVSSYTMHWVRQAPGKGLEWVTFISYDGNNKYYADSVKGRFTISRDNSKNTLYLQMNSLRAEDTAIYYCARTGWLGPFDYWGQGTLVTVSSASTKGPSVFPLAPSSKSTSGGTAALGCLVKDYFPEPVTVSWNSGALTSGVHTFPAVLQSSGLYSLSSVVTVPSSSLGTQTYICNVNHKPSNTKVDKKVEPKSC

SEQ ID NO: 3030 - protein, 118 aa, synthetic construct; identical to SEQ ID NO: 283
  source 1..118: note = Description of Artificial Sequence: Synthetic polypeptide; note = VH of XENP019221

SEQ ID NO: 3031 - protein, 5 aa, synthetic construct
  source 1..5: note = Description of Artificial Sequence: Synthetic peptide; note = XENP019221 vhCDR1
SYTMH

SEQ ID NO: 3032 - protein, 17 aa, synthetic construct
  source 1..17: note = Description of Artificial Sequence: Synthetic peptide; note = XENP019221 vhCDR2
FISYDGNNKYYADSVKG

SEQ ID NO: 3033 - protein, 9 aa, synthetic construct
  source 1..9: note = Description of Artificial Sequence: Synthetic peptide; note = XENP019221 vhCDR3
TGWLGPFDY

SEQ ID NO: 3034 - protein, 215 aa, synthetic construct; identical to SEQ ID NO: 2924
  source 1..215: note = Description of Artificial Sequence: Synthetic polypeptide; note = XENP019221 [CTLA-4]_H0.11_L0_Fab Light Chain

SEQ ID NO: 3035 - protein, 108 aa, synthetic construct; identical to SEQ ID NO: 23
  source 1..108: note = Description of Artificial Sequence: Synthetic polypeptide; note = VL of XENP019221

SEQ ID NO: 3036 - protein, 12 aa, synthetic construct
  source 1..12: note = Description of Artificial Sequence: Synthetic peptide; note = XENP019221 vlCDR1
RASQSVGSSYLA

SEQ ID NO: 3037 - protein, 7 aa, synthetic construct
  source 1..7: note = Description of Artificial Sequence: Synthetic peptide; note = XENP019221 vlCDR2
GAFSRAT

SEQ ID NO: 3038 - protein, 9 aa, synthetic construct
  source 1..9: note = Description of Artificial Sequence: Synthetic peptide; note = XENP019221 vlCDR3
QQYGSSPWT

SEQ ID NO: 3039 - protein, 221 aa, synthetic construct
  source 1..221: note = Description of Artificial Sequence: Synthetic polypeptide; note = XENP019222 [CTLA-4]_H0.12_L0_Fab Heavy Chain
QVQLVESGGGVVQPGRSLRLSCAASGFTFSAYTMHWVRQAPGKGLEWVTFISYDGNNKYYADSVKGRFTISRDNSKNTLYLQMNSLRAEDTAIYYCARTGWLGPFDYWGQGTLVTVSSASTKGPSVFPLAPSSKSTSGGTAALGCLVKDYFPEPVTVSWNSGALTSGVHTFPAVLQSSGLYSLSSVVTVPSSSLGTQTYICNVNHKPSNTKVDKKVEPKSC

SEQ ID NO: 3040 - protein, 118 aa, synthetic construct; identical to SEQ ID NO: 292
  source 1..118: note = Description of Artificial Sequence: Synthetic polypeptide; note = VH of XENP019222

SEQ ID NO: 3041 - protein, 5 aa, synthetic construct
  source 1..5: note = Description of Artificial Sequence: Synthetic peptide; note = XENP019222 vhCDR1
AYTMH

SEQ ID NO: 3042 - protein, 17 aa, synthetic construct
  source 1..17: note = Description of Artificial Sequence: Synthetic peptide; note = XENP019222 vhCDR2
FISYDGNNKYYADSVKG

SEQ ID NO: 3043 - protein, 9 aa, synthetic construct
  source 1..9: note = Description of Artificial Sequence: Synthetic peptide; note = XENP019222 vhCDR3
TGWLGPFDY

SEQ ID NO: 3044 - protein, 215 aa, synthetic construct; identical to SEQ ID NO: 2924
  source 1..215: note = Description of Artificial Sequence: Synthetic polypeptide; note = XENP019222 [CTLA-4]_H0.12_L0_Fab Light Chain

SEQ ID NO: 3045 - protein, 108 aa, synthetic construct; identical to SEQ ID NO: 23
  source 1..108: note = Description of Artificial Sequence: Synthetic polypeptide; note = VL of XENP019222

SEQ ID NO: 3046 - protein, 12 aa, synthetic construct
  source 1..12: note = Description of Artificial Sequence: Synthetic peptide; note = XENP019222 vlCDR1
RASQSVGSSYLA

SEQ ID NO: 3047 - protein, 7 aa, synthetic construct
  source 1..7: note = Description of Artificial Sequence: Synthetic peptide; note = XENP019222 vlCDR2
GAFSRAT

SEQ ID NO: 3048 - protein, 9 aa, synthetic construct
  source 1..9: note = Description of Artificial Sequence: Synthetic peptide; note = XENP019222 vlCDR3
QQYGSSPWT

SEQ ID NO: 3049 - protein, 221 aa, synthetic construct
  source 1..221: note = Description of Artificial Sequence: Synthetic polypeptide; note = XENP019223 [CTLA-4]_H0.13_L0_Fab Heavy Chain
QVQLVESGGGVVQPGRSLRLSCAASGFTFSDYTMHWVRQAPGKGLEWVTFISYDGNNKYYADSVKGRFTISRDNSKNTLYLQMNSLRAEDTAIYYCARTGWLGPFDYWGQGTLVTVSSASTKGPSVFPLAPSSKSTSGGTAALGCLVKDYFPEPVTVSWNSGALTSGVHTFPAVLQSSGLYSLSSVVTVPSSSLGTQTYICNVNHKPSNTKVDKKVEPKSC

SEQ ID NO: 3050 - protein, 118 aa, synthetic construct; identical to SEQ ID NO: 301
  source 1..118: note = Description of Artificial Sequence: Synthetic polypeptide; note = VH of XENP019223

SEQ ID NO: 3051 - protein, 5 aa, synthetic construct
  source 1..5: note = Description of Artificial Sequence: Synthetic peptide; note = XENP019223 vhCDR1
DYTMH

SEQ ID NO: 3052 - protein, 17 aa, synthetic construct
  source 1..17: note = Description of Artificial Sequence: Synthetic peptide; note = XENP019223 vhCDR2
FISYDGNNKYYADSVKG

SEQ ID NO: 3053 - protein, 9 aa, synthetic construct
  source 1..9: note = Description of Artificial Sequence: Synthetic peptide; note = XENP019223 vhCDR3
TGWLGPFDY

SEQ ID NO: 3054 - protein, 215 aa, synthetic construct; identical to SEQ ID NO: 2924
  source 1..215: note = Description of Artificial Sequence: Synthetic polypeptide; note = XENP019223 [CTLA-4]_H0.13_L0_Fab Light Chain

SEQ ID NO: 3055 - protein, 108 aa, synthetic construct; identical to SEQ ID NO: 23
  source 1..108: note = Description of Artificial Sequence: Synthetic polypeptide; note = VL of XENP019223

SEQ ID NO: 3056 - protein, 12 aa, synthetic construct
  source 1..12: note = Description of Artificial Sequence: Synthetic peptide; note = XENP019223 vlCDR1
RASQSVGSSYLA

SEQ ID NO: 3057 - protein, 7 aa, synthetic construct
  source 1..7: note = Description of Artificial Sequence: Synthetic peptide; note = XENP019223 vlCDR2
GAFSRAT

SEQ ID NO: 3058 - protein, 9 aa, synthetic construct
  source 1..9: note = Description of Artificial Sequence: Synthetic peptide; note = XENP019223 vlCDR3
QQYGSSPWT

SEQ ID NO: 3059 - protein, 221 aa, synthetic construct
  source 1..221: note = Description of Artificial Sequence: Synthetic polypeptide; note = XENP019224 [CTLA-4]_H0.14_L0_Fab Heavy Chain
QVQLVESGGGVVQPGRSLRLSCAASGFTFSGYTMHWVRQAPGKGLEWVTFISYDGNNKYYADSVKGRFTISRDNSKNTLYLQMNSLRAEDTAIYYCARTGWLGPFDYWGQGTLVTVSSASTKGPSVFPLAPSSKSTSGGTAALGCLVKDYFPEPVTVSWNSGALTSGVHTFPAVLQSSGLYSLSSVVTVPSSSLGTQTYICNVNHKPSNTKVDKKVEPKSC

SEQ ID NO: 3060 - protein, 118 aa, synthetic construct; identical to SEQ ID NO: 310
  source 1..118: note = Description of Artificial Sequence: Synthetic polypeptide; note = VH of XENP019224

SEQ ID NO: 3061 - protein, 5 aa, synthetic construct
  source 1..5: note = Description of Artificial Sequence: Synthetic peptide; note = XENP019224 vhCDR1
GYTMH

SEQ ID NO: 3062 - protein, 17 aa, synthetic construct
  source 1..17: note = Description of Artificial Sequence: Synthetic peptide; note = XENP019224 vhCDR2
FISYDGNNKYYADSVKG

SEQ ID NO: 3063 - protein, 9 aa, synthetic construct
  source 1..9: note = Description of Artificial Sequence: Synthetic peptide; note = XENP019224 vhCDR3
TGWLGPFDY

SEQ ID NO: 3064 - protein, 215 aa, synthetic construct; identical to SEQ ID NO: 2924
  source 1..215: note = Description of Artificial Sequence: Synthetic polypeptide; note = XENP019224 [CTLA-4]_H0.14_L0_Fab Light Chain

SEQ ID NO: 3065 - protein, 108 aa, synthetic construct; identical to SEQ ID NO: 23
  source 1..108: note = Description of Artificial Sequence: Synthetic polypeptide; note = VL of XENP019224

SEQ ID NO: 3066 - protein, 12 aa, synthetic construct
  source 1..12: note = Description of Artificial Sequence: Synthetic peptide; note = XENP019224 vlCDR1
RASQSVGSSYLA

SEQ ID NO: 3067 - protein, 7 aa, synthetic construct
  source 1..7: note = Description of Artificial Sequence: Synthetic peptide; note = XENP019224 vlCDR2
GAFSRAT

SEQ ID NO: 3068 - protein, 9 aa, synthetic construct
  source 1..9: note = Description of Artificial Sequence: Synthetic peptide; note = XENP019224 vlCDR3
QQYGSSPWT

SEQ ID NO: 3069 - protein, 221 aa, synthetic construct
  source 1..221: note = Description of Artificial Sequence: Synthetic polypeptide; note = XENP019225 [CTLA-4]_H0.15_L0_Fab Heavy Chain
QVQLVESGGGVVQPGRSLRLSCAASGFTFSNYTMHWVRQAPGKGLEWVTFISYDGNNKYYADSVKGRFTISRDNSKNTLYLQMNSLRAEDTAIYYCARTGWLGPFDYWGQGTLVTVSSASTKGPSVFPLAPSSKSTSGGTAALGCLVKDYFPEPVTVSWNSGALTSGVHTFPAVLQSSGLYSLSSVVTVPSSSLGTQTYICNVNHKPSNTKVDKKVEPKSC

SEQ ID NO: 3070 - protein, 118 aa, synthetic construct; identical to SEQ ID NO: 319
  source 1..118: note = Description of Artificial Sequence: Synthetic polypeptide; note = VH of XENP019225

SEQ ID NO: 3071 - protein, 5 aa, synthetic construct
  source 1..5: note = Description of Artificial Sequence: Synthetic peptide; note = XENP019225 vhCDR1
NYTMH

SEQ ID NO: 3072 - protein, 17 aa, synthetic construct
  source 1..17: note = Description of Artificial Sequence: Synthetic peptide; note = XENP019225 vhCDR2
FISYDGNNKYYADSVKG

SEQ ID NO: 3073 - protein, 9 aa, synthetic construct
  source 1..9: note = Description of Artificial Sequence: Synthetic peptide; note = XENP019225 vhCDR3
TGWLGPFDY

SEQ ID NO: 3074 - protein, 215 aa, synthetic construct; identical to SEQ ID NO: 2924
  source 1..215: note = Description of Artificial Sequence: Synthetic polypeptide; note = XENP019225 [CTLA-4]_H0.15_L0_Fab Light Chain

SEQ ID NO: 3075 - protein, 108 aa, synthetic construct; identical to SEQ ID NO: 23
  source 1..108: note = Description of Artificial Sequence: Synthetic polypeptide; note = VL of XENP019225

SEQ ID NO: 3076 - protein, 12 aa, synthetic construct
  source 1..12: note = Description of Artificial Sequence: Synthetic peptide; note = XENP019225 vlCDR1
RASQSVGSSYLA

SEQ ID NO: 3077 - protein, 7 aa, synthetic construct
  source 1..7: note = Description of Artificial Sequence: Synthetic peptide; note = XENP019225 vlCDR2
GAFSRAT

SEQ ID NO: 3078 - protein, 9 aa, synthetic construct
  source 1..9: note = Description of Artificial Sequence: Synthetic peptide; note = XENP019225 vlCDR3
QQYGSSPWT

SEQ ID NO: 3079 - protein, 221 aa, synthetic construct
  source 1..221: note = Description of Artificial Sequence: Synthetic polypeptide; note = XENP019226 [CTLA-4]_H0.16_L0_Fab Heavy Chain
QVQLVESGGGVVQPGRSLRLSCAASGFTFSQYTMHWVRQAPGKGLEWVTFISYDGNNKYYADSVKGRFTISRDNSKNTLYLQMNSLRAEDTAIYYCARTGWLGPFDYWGQGTLVTVSSASTKGPSVFPLAPSSKSTSGGTAALGCLVKDYFPEPVTVSWNSGALTSGVHTFPAVLQSSGLYSLSSVVTVPSSSLGTQTYICNVNHKPSNTKVDKKVEPKSC

SEQ ID NO: 3080 - protein, 118 aa, synthetic construct; identical to SEQ ID NO: 328
  source 1..118: note = Description of Artificial Sequence: Synthetic polypeptide; note = VH of XENP019226

SEQ ID NO: 3081 - protein, 5 aa, synthetic construct
  source 1..5: note = Description of Artificial Sequence: Synthetic peptide; note = XENP019226 vhCDR1
QYTMH

SEQ ID NO: 3082 - protein, 17 aa, synthetic construct
  source 1..17: note = Description of Artificial Sequence: Synthetic peptide; note = XENP019226 vhCDR2
FISYDGNNKYYADSVKG

SEQ ID NO: 3083 - protein, 9 aa, synthetic construct
  source 1..9: note = Description of Artificial Sequence: Synthetic peptide; note = XENP019226 vhCDR3
TGWLGPFDY

SEQ ID NO: 3084 - protein, 215 aa, synthetic construct; identical to SEQ ID NO: 2924
  source 1..215: note = Description of Artificial Sequence: Synthetic polypeptide; note = XENP019226 [CTLA-4]_H0.16_L0_Fab Light Chain

SEQ ID NO: 3085 - protein, 108 aa, synthetic construct; identical to SEQ ID NO: 23
  source 1..108: note = Description of Artificial Sequence: Synthetic polypeptide; note = VL of XENP019226

SEQ ID NO: 3086 - protein, 12 aa, synthetic construct
  source 1..12: note = Description of Artificial Sequence: Synthetic peptide; note = XENP019226 vlCDR1
RASQSVGSSYLA

SEQ ID NO: 3087 - protein, 7 aa, synthetic construct
  source 1..7: note = Description of Artificial Sequence: Synthetic peptide; note = XENP019226 vlCDR2
GAFSRAT

SEQ ID NO: 3088 - protein, 9 aa, synthetic construct
  source 1..9: note = Description of Artificial Sequence: Synthetic peptide; note = XENP019226 vlCDR3
QQYGSSPWT

SEQ ID NO: 3089 - protein, 221 aa, synthetic construct
  source 1..221: note = Description of Artificial Sequence: Synthetic polypeptide; note = XENP019227 [CTLA-4]_H0.17_L0_Fab Heavy Chain
QVQLVESGGGVVQPGRSLRLSCAASGFTFSTYTMHWVRQAPGKGLEWVTFISYDGNNKYYADSVKGRFTISRDNSKNTLYLQMNSLRAEDTAIYYCARTGWLGPFDYWGQGTLVTVSSASTKGPSVFPLAPSSKSTSGGTAALGCLVKDYFPEPVTVSWNSGALTSGVHTFPAVLQSSGLYSLSSVVTVPSSSLGTQTYICNVNHKPSNTKVDKKVEPKSC

SEQ ID NO: 3090 - protein, 118 aa, synthetic construct; identical to SEQ ID NO: 337
  source 1..118: note = Description of Artificial Sequence: Synthetic polypeptide; note = VH of XENP019227

SEQ ID NO: 3091 - protein, 5 aa, synthetic construct
  source 1..5: note = Description of Artificial Sequence: Synthetic peptide; note = XENP019227 vhCDR1
TYTMH

SEQ ID NO: 3092 - protein, 17 aa, synthetic construct
  source 1..17: note = Description of Artificial Sequence: Synthetic peptide; note = XENP019227 vhCDR2
FISYDGNNKYYADSVKG

SEQ ID NO: 3093 - protein, 9 aa, synthetic construct
  source 1..9: note = Description of Artificial Sequence: Synthetic peptide; note = XENP019227 vhCDR3
TGWLGPFDY

SEQ ID NO: 3094 - protein, 215 aa, synthetic construct; identical to SEQ ID NO: 2924
  source 1..215: note = Description of Artificial Sequence: Synthetic polypeptide; note = XENP019227 [CTLA-4]_H0.17_L0_Fab Light Chain

SEQ ID NO: 3095 - protein, 108 aa, synthetic construct; identical to SEQ ID NO: 23
  source 1..108: note = Description of Artificial Sequence: Synthetic polypeptide; note = VL of XENP019227

SEQ ID NO: 3096 - protein, 12 aa, synthetic construct
  source 1..12: note = Description of Artificial Sequence: Synthetic peptide; note = XENP019227 vlCDR1
RASQSVGSSYLA

SEQ ID NO: 3097 - protein, 7 aa, synthetic construct
  source 1..7: note = Description of Artificial Sequence: Synthetic peptide; note = XENP019227 vlCDR2
GAFSRAT

SEQ ID NO: 3098 - protein, 9 aa, synthetic construct
  source 1..9: note = Description of Artificial Sequence: Synthetic peptide; note = XENP019227 vlCDR3
QQYGSSPWT

SEQ ID NO: 3099 - protein, 221 aa, synthetic construct
  source 1..221: note = Description of Artificial Sequence: Synthetic polypeptide; note = XENP019228 [CTLA-4]_H0.18_L0_Fab Heavy Chain
QVQLVESGGGVVQPGRSLRLSCAASGFTFSSATMHWVRQAPGKGLEWVTFISYDGNNKYYADSVKGRFTISRDNSKNTLYLQMNSLRAEDTAIYYCARTGWLGPFDYWGQGTLVTVSSASTKGPSVFPLAPSSKSTSGGTAALGCLVKDYFPEPVTVSWNSGALTSGVHTFPAVLQSSGLYSLSSVVTVPSSSLGTQTYICNVNHKPSNTKVDKKVEPKSC

SEQ ID NO: 3100 - protein, 118 aa, synthetic construct; identical to SEQ ID NO: 346
  source 1..118: note = Description of Artificial Sequence: Synthetic polypeptide; note = VH of XENP019228

SEQ ID NO: 3101 - protein, 5 aa, synthetic construct
  source 1..5: note = Description of Artificial Sequence: Synthetic peptide; note = XENP019228 vhCDR1
SATMH

SEQ ID NO: 3102 - protein, 17 aa, synthetic construct
  source 1..17: note = Description of Artificial Sequence: Synthetic peptide; note = XENP019228 vhCDR2
FISYDGNNKYYADSVKG

SEQ ID NO: 3103 - protein, 9 aa, synthetic construct
  source 1..9: note = Description of Artificial Sequence: Synthetic peptide; note = XENP019228 vhCDR3
TGWLGPFDY

SEQ ID NO: 3104 - protein, 215 aa, synthetic construct; identical to SEQ ID NO: 2924
  source 1..215: note = Description of Artificial Sequence: Synthetic polypeptide; note = XENP019228 [CTLA-4]_H0.18_L0_Fab Light Chain

SEQ ID NO: 3105 - protein, 108 aa, synthetic construct; identical to SEQ ID NO: 23
  source 1..108: note = Description of Artificial Sequence: Synthetic polypeptide; note = VL of XENP019228

SEQ ID NO: 3106 - protein, 12 aa, synthetic construct
  source 1..12: note = Description of Artificial Sequence: Synthetic peptide; note = XENP019228 vlCDR1
RASQSVGSSYLA

SEQ ID NO: 3107 - protein, 7 aa, synthetic construct
  source 1..7: note = Description of Artificial Sequence: Synthetic peptide; note = XENP019228 vlCDR2
GAFSRAT

SEQ ID NO: 3108 - protein, 9 aa, synthetic construct
  source 1..9: note = Description of Artificial Sequence: Synthetic peptide; note = XENP019228 vlCDR3
QQYGSSPWT

SEQ ID NO: 3109 - protein, 221 aa, synthetic construct
  source 1..221: note = Description of Artificial Sequence: Synthetic polypeptide; note = XENP019229 [CTLA-4]_H0.19_L0_Fab Heavy Chain
QVQLVESGGGVVQPGRSLRLSCAASGFTFSSHTMHWVRQAPGKGLEWVTFISYDGNNKYYADSVKGRFTISRDNSKNTLYLQMNSLRAEDTAIYYCARTGWLGPFDYWGQGTLVTVSSASTKGPSVFPLAPSSKSTSGGTAALGCLVKDYFPEPVTVSWNSGALTSGVHTFPAVLQSSGLYSLSSVVTVPSSSLGTQTYICNVNHKPSNTKVDKKVEPKSC

SEQ ID NO: 3110 - protein, 118 aa, synthetic construct; identical to SEQ ID NO: 355
  source 1..118: note = Description of Artificial Sequence: Synthetic polypeptide; note = VH of XENP019229

SEQ ID NO: 3111 - protein, 5 aa, synthetic construct
  source 1..5: note = Description of Artificial Sequence: Synthetic peptide; note = XENP019229 vhCDR1
SHTMH

SEQ ID NO: 3112 - protein, 17 aa, synthetic construct
  source 1..17: note = Description of Artificial Sequence: Synthetic peptide; note = XENP019229 vhCDR2
FISYDGNNKYYADSVKG

SEQ ID NO: 3113 - protein, 9 aa, synthetic construct
  source 1..9: note = Description of Artificial Sequence: Synthetic peptide; note = XENP019229 vhCDR3
TGWLGPFDY

SEQ ID NO: 3114 - protein, 215 aa, synthetic construct; identical to SEQ ID NO: 2924
  source 1..215: note = Description of Artificial Sequence: Synthetic polypeptide; note = XENP019229 [CTLA-4]_H0.19_L0_Fab Light Chain

SEQ ID NO: 3115 - protein, 108 aa, synthetic construct; identical to SEQ ID NO: 23
  source 1..108: note = Description of Artificial Sequence: Synthetic polypeptide; note = VL of XENP019229

SEQ ID NO: 3116 - protein, 12 aa, synthetic construct
  source 1..12: note = Description of Artificial Sequence: Synthetic peptide; note = XENP019229 vlCDR1
RASQSVGSSYLA

SEQ ID NO: 3117 - protein, 7 aa, synthetic construct
  source 1..7: note = Description of Artificial Sequence: Synthetic peptide; note = XENP019229 vlCDR2
GAFSRAT

SEQ ID NO: 3118 - protein, 9 aa, synthetic construct
  source 1..9: note = Description of Artificial Sequence: Synthetic peptide; note = XENP019229 vlCDR3
QQYGSSPWT

SEQ ID NO: 3119 - protein, 221 aa, synthetic construct
  source 1..221: note = Description of Artificial Sequence: Synthetic polypeptide; note = XENP019230 [CTLA-4]_H0.20_L0_Fab Heavy Chain
QVQLVESGGGVVQPGRSLRLSCAASGFTFSSFTMHWVRQAPGKGLEWVTFISYDGNNKYYADSVKGRFTISRDNSKNTLYLQMNSLRAEDTAIYYCARTGWLGPFDYWGQGTLVTVSSASTKGPSVFPLAPSSKSTSGGTAALGCLVKDYFPEPVTVSWNSGALTSGVHTFPAVLQSSGLYSLSSVVTVPSSSLGTQTYICNVNHKPSNTKVDKKVEPKSC

SEQ ID NO: 3120 - protein, 118 aa, synthetic construct; identical to SEQ ID NO: 364
  source 1..118: note = Description of Artificial Sequence: Synthetic polypeptide; note = VH of XENP019230

SEQ ID NO: 3121 - protein, 5 aa, synthetic construct
  source 1..5: note = Description of Artificial Sequence: Synthetic peptide; note = XENP019230 vhCDR1
SFTMH

SEQ ID NO: 3122 - protein, 17 aa, synthetic construct
  source 1..17: note = Description of Artificial Sequence: Synthetic peptide; note = XENP019230 vhCDR2
FISYDGNNKYYADSVKG

SEQ ID NO: 3123 - protein, 9 aa, synthetic construct
  source 1..9: note = Description of Artificial Sequence: Synthetic peptide; note = XENP019230 vhCDR3
TGWLGPFDY

SEQ ID NO: 3124 - protein, 215 aa, synthetic construct; identical to SEQ ID NO: 2924
  source 1..215: note = Description of Artificial Sequence: Synthetic polypeptide; note = XENP019230 [CTLA-4]_H0.20_L0_Fab Light Chain

SEQ ID NO: 3125 - protein, 108 aa, synthetic construct; identical to SEQ ID NO: 23
  source 1..108: note = Description of Artificial Sequence: Synthetic polypeptide; note = VL of XENP019230

SEQ ID NO: 3126 - protein, 12 aa, synthetic construct
  source 1..12: note = Description of Artificial Sequence: Synthetic peptide; note = XENP019230 vlCDR1
RASQSVGSSYLA

SEQ ID NO: 3127 - protein, 7 aa, synthetic construct
  source 1..7: note = Description of Artificial Sequence: Synthetic peptide; note = XENP019230 vlCDR2
GAFSRAT

SEQ ID NO: 3128 - protein, 9 aa, synthetic construct
  source 1..9: note = Description of Artificial Sequence: Synthetic peptide; note = XENP019230 vlCDR3
QQYGSSPWT

SEQ ID NO: 3129 - protein, 221 aa, synthetic construct
  source 1..221: note = Description of Artificial Sequence: Synthetic polypeptide; note = XENP019231 [CTLA-4]_H0.21_L0_Fab Heavy Chain
QVQLVESGGGVVQPGRSLRLSCAASGFTFSSLTMHWVRQAPGKGLEWVTFISYDGNNKYYADSVKGRFTISRDNSKNTLYLQMNSLRAEDTAIYYCARTGWLGPFDYWGQGTLVTVSSASTKGPSVFPLAPSSKSTSGGTAALGCLVKDYFPEPVTVSWNSGALTSGVHTFPAVLQSSGLYSLSSVVTVPSSSLGTQTYICNVNHKPSNTKVDKKVEPKSC

SEQ ID NO: 3130 - protein, 118 aa, synthetic construct; identical to SEQ ID NO: 373
  source 1..118: note = Description of Artificial Sequence: Synthetic polypeptide; note = VH of XENP019231

SEQ ID NO: 3131 - protein, 5 aa, synthetic construct
  source 1..5: note = Description of Artificial Sequence: Synthetic peptide; note = XENP019231 vhCDR1
SLTMH

SEQ ID NO: 3132 - protein, 17 aa, synthetic construct
  source 1..17: note = Description of Artificial Sequence: Synthetic peptide; note = XENP019231 vhCDR2
FISYDGNNKYYADSVKG

SEQ ID NO: 3133 - protein, 9 aa, synthetic construct
  source 1..9: note = Description of Artificial Sequence: Synthetic peptide; note = XENP019231 vhCDR3
TGWLGPFDY

SEQ ID NO: 3134 - protein, 215 aa, synthetic construct; identical to SEQ ID NO: 2924
  source 1..215: note = Description of Artificial Sequence: Synthetic polypeptide; note = XENP019231 [CTLA-4]_H0.21_L0_Fab Light Chain

SEQ ID NO: 3135 - protein, 108 aa, synthetic construct; identical to SEQ ID NO: 23
  source 1..108: note = Description of Artificial Sequence: Synthetic polypeptide; note = VL of XENP019231

SEQ ID NO: 3136 - protein, 12 aa, synthetic construct
  source 1..12: note = Description of Artificial Sequence: Synthetic peptide; note = XENP019231 vlCDR1
RASQSVGSSYLA

SEQ ID NO: 3137 - protein, 7 aa, synthetic construct
  source 1..7: note = Description of Artificial Sequence: Synthetic peptide; note = XENP019231 vlCDR2
GAFSRAT

SEQ ID NO: 3138 - protein, 9 aa, synthetic construct
  source 1..9: note = Description of Artificial Sequence: Synthetic peptide; note = XENP019231 vlCDR3
QQYGSSPWT

SEQ ID NO: 3139 - protein, 221 aa, synthetic construct
  source 1..221: note = Description of Artificial Sequence: Synthetic polypeptide; note = XENP019232 [CTLA-4]_H0.22_L0_Fab Heavy Chain
QVQLVESGGGVVQPGRSLRLSCAASGFTFSSNTMHWVRQAPGKGLEWVTFISYDGNNKYYADSVKGRFTISRDNSKNTLYLQMNSLRAEDTAIYYCARTGWLGPFDYWGQGTLVTVSSASTKGPSVFPLAPSSKSTSGGTAALGCLVKDYFPEPVTVSWNSGALTSGVHTFPAVLQSSGLYSLSSVVTVPSSSLGTQTYICNVNHKPSNTKVDKKVEPKSC

SEQ ID NO: 3140 - protein, 118 aa, synthetic construct; identical to SEQ ID NO: 382
  source 1..118: note = Description of Artificial Sequence: Synthetic polypeptide; note = VH of XENP019232

SEQ ID NO: 3141 - protein, 5 aa, synthetic construct
  source 1..5: note = Description of Artificial Sequence: Synthetic peptide; note = XENP019232 vhCDR1
SNTMH

SEQ ID NO: 3142 - protein, 17 aa, synthetic construct
  source 1..17: note = Description of Artificial Sequence: Synthetic peptide; note = XENP019232 vhCDR2
FISYDGNNKYYADSVKG

SEQ ID NO: 3143 - protein, 9 aa, synthetic construct
  source 1..9: note = Description of Artificial Sequence: Synthetic peptide; note = XENP019232 vhCDR3
TGWLGPFDY

SEQ ID NO: 3144 - protein, 215 aa, synthetic construct; identical to SEQ ID NO: 2924
  source 1..215: note = Description of Artificial Sequence: Synthetic polypeptide; note = XENP019232 [CTLA-4]_H0.22_L0_Fab Light Chain

SEQ ID NO: 3145 - protein, 108 aa, synthetic construct; identical to SEQ ID NO: 23
  source 1..108: note = Description of Artificial Sequence: Synthetic polypeptide; note = VL of XENP019232

SEQ ID NO: 3146 - protein, 12 aa, synthetic construct
  source 1..12: note = Description of Artificial Sequence: Synthetic peptide; note = XENP019232 vlCDR1
RASQSVGSSYLA

SEQ ID NO: 3147 - protein, 7 aa, synthetic construct
  source 1..7: note = Description of Artificial Sequence: Synthetic peptide; note = XENP019232 vlCDR2
GAFSRAT

SEQ ID NO: 3148 - protein, 9 aa, synthetic construct
  source 1..9: note = Description of Artificial Sequence: Synthetic peptide; note = XENP019232 vlCDR3
QQYGSSPWT

SEQ ID NO: 3149 - protein, 221 aa, synthetic construct
  source 1..221: note = Description of Artificial Sequence: Synthetic polypeptide; note = XENP019233 [CTLA-4]_H0.23_L0_Fab Heavy Chain
QVQLVESGGGVVQPGRSLRLSCAASGFTFSSSTMHWVRQAPGKGLEWVTFISYDGNNKYYADSVKGRFTISRDNSKNTLYLQMNSLRAEDTAIYYCARTGWLGPFDYWGQGTLVTVSSASTKGPSVFPLAPSSKSTSGGTAALGCLVKDYFPEPVTVSWNSGALTSGVHTFPAVLQSSGLYSLSSVVTVPSSSLGTQTYICNVNHKPSNTKVDKKVEPKSC

SEQ ID NO: 3150 - protein, 118 aa, synthetic construct; identical to SEQ ID NO: 391
  source 1..118: note = Description of Artificial Sequence: Synthetic polypeptide; note = VH of XENP019233

SEQ ID NO: 3151 - protein, 5 aa, synthetic construct
  source 1..5: note = Description of Artificial Sequence: Synthetic peptide; note = XENP019233 vhCDR1
SSTMH

SEQ ID NO: 3152 - protein, 17 aa, synthetic construct
  source 1..17: note = Description of Artificial Sequence: Synthetic peptide; note = XENP019233 vhCDR2
FISYDGNNKYYADSVKG

SEQ ID NO: 3153 - protein, 9 aa, synthetic construct
  source 1..9: note = Description of Artificial Sequence: Synthetic peptide; note = XENP019233 vhCDR3
TGWLGPFDY

SEQ ID NO: 3154 - protein, 215 aa, synthetic construct; identical to SEQ ID NO: 2924
  source 1..215: note = Description of Artificial Sequence: Synthetic polypeptide; note = XENP019233 [CTLA-4]_H0.23_L0_Fab Light Chain

SEQ ID NO: 3155 - protein, 108 aa, synthetic construct; identical to SEQ ID NO: 23
  source 1..108: note = Description of Artificial Sequence: Synthetic polypeptide; note = VL of XENP019233

SEQ ID NO: 3156 - protein, 12 aa, synthetic construct
  source 1..12: note = Description of Artificial Sequence: Synthetic peptide; note = XENP019233 vlCDR1
RASQSVGSSYLA

SEQ ID NO: 3157 - protein, 7 aa, synthetic construct
  source 1..7: note = Description of Artificial Sequence: Synthetic peptide; note = XENP019233 vlCDR2
GAFSRAT

SEQ ID NO: 3158 - protein, 9 aa, synthetic construct
  source 1..9: note = Description of Artificial Sequence: Synthetic peptide; note = XENP019233 vlCDR3
QQYGSSPWT

SEQ ID NO: 3159 - protein, 221 aa, synthetic construct
  source 1..221: note = Description of Artificial Sequence: Synthetic polypeptide; note = XENP019234 [CTLA-4]_H0.24_L0_Fab Heavy Chain
QVQLVESGGGVVQPGRSLRLSCAASGFTFSSVTMHWVRQAPGKGLEWVTFISYDGNNKYYADSVKGRFTISRDNSKNTLYLQMNSLRAEDTAIYYCARTGWLGPFDYWGQGTLVTVSSASTKGPSVFPLAPSSKSTSGGTAALGCLVKDYFPEPVTVSWNSGALTSGVHTFPAVLQSSGLYSLSSVVTVPSSSLGTQTYICNVNHKPSNTKVDKKVEPKSC

SEQ ID NO: 3160 - protein, 118 aa, synthetic construct; identical to SEQ ID NO: 400
  source 1..118: note = Description of Artificial Sequence: Synthetic polypeptide; note = VH of XENP019234

SEQ ID NO: 3161 - protein, 5 aa, synthetic construct
  source 1..5: note = Description of Artificial Sequence: Synthetic peptide; note = XENP019234 vhCDR1
SVTMH

SEQ ID NO: 3162 - protein, 17 aa, synthetic construct
  source 1..17: note = Description of Artificial Sequence: Synthetic peptide; note = XENP019234 vhCDR2
FISYDGNNKYYADSVKG

SEQ ID NO: 3163 - protein, 9 aa, synthetic construct
  source 1..9: note = Description of Artificial Sequence: Synthetic peptide; note = XENP019234 vhCDR3
TGWLGPFDY

SEQ ID NO: 3164 - protein, 215 aa, synthetic construct; identical to SEQ ID NO: 2924
  source 1..215: note = Description of Artificial Sequence: Synthetic polypeptide; note = XENP019234 [CTLA-4]_H0.24_L0_Fab Light Chain

SEQ ID NO: 3165 - protein, 108 aa, synthetic construct; identical to SEQ ID NO: 23
  source 1..108: note = Description of Artificial Sequence: Synthetic polypeptide; note = VL of XENP019234

SEQ ID NO: 3166 - protein, 12 aa, synthetic construct
  source 1..12: note = Description of Artificial Sequence: Synthetic peptide; note = XENP019234 vlCDR1
RASQSVGSSYLA

SEQ ID NO: 3167 - protein, 7 aa, synthetic construct
  source 1..7: note = Description of Artificial Sequence: Synthetic peptide; note = XENP019234 vlCDR2
GAFSRAT

SEQ ID NO: 3168 - protein, 9 aa, synthetic construct
  source 1..9: note = Description of Artificial Sequence: Synthetic peptide; note = XENP019234 vlCDR3
QQYGSSPWT

SEQ ID NO: 3169 - protein, 221 aa, synthetic construct
  source 1..221: note = Description of Artificial Sequence: Synthetic polypeptide; note = XENP019235 [CTLA-4]_H0.25_L0_Fab Heavy Chain
QVQLVESGGGVVQPGRSLRLSCAASGFTFSSYAMHWVRQAPGKGLEWVTFISYDGNNKYYADSVKGRFTISRDNSKNTLYLQMNSLRAEDTAIYYCARTGWLGPFDYWGQGTLVTVSSASTKGPSVFPLAPSSKSTSGGTAALGCLVKDYFPEPVTVSWNSGALTSGVHTFPAVLQSSGLYSLSSVVTVPSSSLGTQTYICNVNHKPSNTKVDKKVEPKSC

SEQ ID NO: 3170 - protein, 118 aa, synthetic construct; identical to SEQ ID NO: 409
  source 1..118: note = Description of Artificial Sequence: Synthetic polypeptide; note = VH of XENP019235

SEQ ID NO: 3171 - protein, 5 aa, synthetic construct
  source 1..5: note = Description of Artificial Sequence: Synthetic peptide; note = XENP019235 vhCDR1
SYAMH

SEQ ID NO: 3172 - protein, 17 aa, synthetic construct
  source 1..17: note = Description of Artificial Sequence: Synthetic peptide; note = XENP019235 vhCDR2
FISYDGNNKYYADSVKG

SEQ ID NO: 3173 - protein, 9 aa, synthetic construct
  source 1..9: note = Description of Artificial Sequence: Synthetic peptide; note = XENP019235 vhCDR3
TGWLGPFDY

SEQ ID NO: 3174 - protein, 215 aa, synthetic construct; identical to SEQ ID NO: 2924
  source 1..215: note = Description of Artificial Sequence: Synthetic polypeptide; note = XENP019235 [CTLA-4]_H0.25_L0_Fab Light Chain

SEQ ID NO: 3175 - protein, 108 aa, synthetic construct; identical to SEQ ID NO: 23
  source 1..108: note = Description of Artificial Sequence: Synthetic polypeptide; note = VL of XENP019235

SEQ ID NO: 3176 - protein, 12 aa, synthetic construct
  source 1..12: note = Description of Artificial Sequence: Synthetic peptide; note = XENP019235 vlCDR1
RASQSVGSSYLA

SEQ ID NO: 3177 - protein, 7 aa, synthetic construct
  source 1..7: note = Description of Artificial Sequence: Synthetic peptide; note = XENP019235 vlCDR2
GAFSRAT

SEQ ID NO: 3178 - protein, 9 aa, synthetic construct
  source 1..9: note = Description of Artificial Sequence: Synthetic peptide; note = XENP019235 vlCDR3
QQYGSSPWT

SEQ ID NO: 3179 - protein, 221 aa, synthetic construct
  source 1..221: note = Description of Artificial Sequence: Synthetic polypeptide; note = XENP019236 [CTLA-4]_H0.26_L0_Fab Heavy Chain
QVQLVESGGGVVQPGRSLRLSCAASGFTFSSYGMHWVRQAPGKGLEWVTFISYDGNNKYYADSVKGRFTISRDNSKNTLYLQMNSLRAEDTAIYYCARTGWLGPFDYWGQGTLVTVSSASTKGPSVFPLAPSSKSTSGGTAALGCLVKDYFPEPVTVSWNSGALTSGVHTFPAVLQSSGLYSLSSVVTVPSSSLGTQTYICNVNHKPSNTKVDKKVEPKSC

SEQ ID NO: 3180 - protein, 118 aa, synthetic construct; identical to SEQ ID NO: 418
  source 1..118: note = Description of Artificial Sequence: Synthetic polypeptide; note = VH of XENP019236

SEQ ID NO: 3181 - protein, 5 aa, synthetic construct
  source 1..5: note = Description of Artificial Sequence: Synthetic peptide; note = XENP019236 vhCDR1
SYGMH

SEQ ID NO: 3182 - protein, 17 aa, synthetic construct
  source 1..17: note = Description of Artificial Sequence: Synthetic peptide; note = XENP019236 vhCDR2
FISYDGNNKYYADSVKG

SEQ ID NO: 3183 - protein, 9 aa, synthetic construct
  source 1..9: note = Description of Artificial Sequence: Synthetic peptide; note = XENP019236 vhCDR3
TGWLGPFDY

SEQ ID NO: 3184 - protein, 215 aa, synthetic construct; identical to SEQ ID NO: 2924
  source 1..215: note = Description of Artificial Sequence: Synthetic polypeptide; note = XENP019236 [CTLA-4]_H0.26_L0_Fab Light Chain

SEQ ID NO: 3185 - protein, 108 aa, synthetic construct; identical to SEQ ID NO: 23
  source 1..108: note = Description of Artificial Sequence: Synthetic polypeptide; note = VL of XENP019236

SEQ ID NO: 3186 - protein, 12 aa, synthetic construct
  source 1..12: note = Description of Artificial Sequence: Synthetic peptide; note = XENP019236 vlCDR1
RASQSVGSSYLA

SEQ ID NO: 3187 - protein, 7 aa, synthetic construct
  source 1..7: note = Description of Artificial Sequence: Synthetic peptide; note = XENP019236 vlCDR2
GAFSRAT

SEQ ID NO: 3188 - protein, 9 aa, synthetic construct
  source 1..9: note = Description of Artificial Sequence: Synthetic peptide; note = XENP019236 vlCDR3
QQYGSSPWT

SEQ ID NO: 3189 - protein, 221 aa, synthetic construct
  source 1..221: note = Description of Artificial Sequence: Synthetic polypeptide; note = XENP019237 [CTLA-4]_H0.27_L0_Fab Heavy Chain
QVQLVESGGGVVQPGRSLRLSCAASGFTFSSYSMHWVRQAPGKGLEWVTFISYDGNNKYYADSVKGRFTISRDNSKNTLYLQMNSLRAEDTAIYYCARTGWLGPFDYWGQGTLVTVSSASTKGPSVFPLAPSSKSTSGGTAALGCLVKDYFPEPVTVSWNSGALTSGVHTFPAVLQSSGLYSLSSVVTVPSSSLGTQTYICNVNHKPSNTKVDKKVEPKSC

SEQ ID NO: 3190 - protein, 118 aa, synthetic construct; identical to SEQ ID NO: 427
  source 1..118: note = Description of Artificial Sequence: Synthetic polypeptide; note = VH of XENP019237

SEQ ID NO: 3191 - protein, 5 aa, synthetic construct
  source 1..5: note = Description of Artificial Sequence: Synthetic peptide; note = XENP019237 vhCDR1
SYSMH

SEQ ID NO: 3192 - protein, 17 aa, synthetic construct
  source 1..17: note = Description of Artificial Sequence: Synthetic peptide; note = XENP019237 vhCDR2
FISYDGNNKYYADSVKG

SEQ ID NO: 3193 - protein, 9 aa, synthetic construct
  source 1..9: note = Description of Artificial Sequence: Synthetic peptide; note = XENP019237 vhCDR3
TGWLGPFDY

SEQ ID NO: 3194 - protein, 215 aa, synthetic construct; identical to SEQ ID NO: 2924
  source 1..215: note = Description of Artificial Sequence: Synthetic polypeptide; note = XENP019237 [CTLA-4]_H0.27_L0_Fab Light Chain

SEQ ID NO: 3195 - protein, 108 aa, synthetic construct; identical to SEQ ID NO: 23
  source 1..108: note = Description of Artificial Sequence: Synthetic polypeptide; note = VL of XENP019237

SEQ ID NO: 3196 - protein, 12 aa, synthetic construct
  source 1..12: note = Description of Artificial Sequence: Synthetic peptide; note = XENP019237 vlCDR1
RASQSVGSSYLA

SEQ ID NO: 3197 - protein, 7 aa, synthetic construct
  source 1..7: note = Description of Artificial Sequence: Synthetic peptide; note = XENP019237 vlCDR2
GAFSRAT

SEQ ID NO: 3198 - protein, 9 aa, synthetic construct
  source 1..9: note = Description of Artificial Sequence: Synthetic peptide; note = XENP019237 vlCDR3
QQYGSSPWT

SEQ ID NO: 3199 - protein, 221 aa, synthetic construct
  source 1..221: note = Description of Artificial Sequence: Synthetic polypeptide; note = XENP019238 [CTLA-4]_H0.28_L0_Fab Heavy Chain
QVQLVESGGGVVQPGRSLRLSCAASGFTFSSYVMHWVRQAPGKGLEWVTFISYDGNNKYYADSVKGRFTISRDNSKNTLYLQMNSLRAEDTAIYYCARTGWLGPFDYWGQGTLVTVSSASTKGPSVFPLAPSSKSTSGGTAALGCLVKDYFPEPVTVSWNSGALTSGVHTFPAVLQSSGLYSLSSVVTVPSSSLGTQTYICNVNHKPSNTKVDKKVEPKSC

SEQ ID NO: 3200 - protein, 118 aa, synthetic construct; identical to SEQ ID NO: 436
  source 1..118: note = Description of Artificial Sequence: Synthetic polypeptide; note = VH of XENP019238

SEQ ID NO: 3201 - protein, 5 aa, synthetic construct
  source 1..5: note = Description of Artificial Sequence: Synthetic peptide; note = XENP019238 vhCDR1
SYVMH

SEQ ID NO: 3202 - protein, 17 aa, synthetic construct
  source 1..17: note = Description of Artificial Sequence: Synthetic peptide; note = XENP019238 vhCDR2
FISYDGNNKYYADSVKG

SEQ ID NO: 3203 - protein, 9 aa, synthetic construct
  source 1..9: note = Description of Artificial Sequence: Synthetic peptide; note = XENP019238 vhCDR3
TGWLGPFDY

SEQ ID NO: 3204 - protein, 215 aa, synthetic construct; identical to SEQ ID NO: 2924
  source 1..215: note = Description of Artificial Sequence: Synthetic polypeptide; note = XENP019238 [CTLA-4]_H0.28_L0_Fab Light Chain

SEQ ID NO: 3205 - protein, 108 aa, synthetic construct; identical to SEQ ID NO: 23
  source 1..108: note = Description of Artificial Sequence: Synthetic polypeptide; note = VL of XENP019238

SEQ ID NO: 3206 - protein, 12 aa, synthetic construct
  source 1..12: note = Description of Artificial Sequence: Synthetic peptide; note = XENP019238 vlCDR1
RASQSVGSSYLA

SEQ ID NO: 3207 - protein, 7 aa, synthetic construct
  source 1..7: note = Description of Artificial Sequence: Synthetic peptide; note = XENP019238 vlCDR2
GAFSRAT

SEQ ID NO: 3208 - protein, 9 aa, synthetic construct
  source 1..9: note = Description of Artificial Sequence: Synthetic peptide; note = XENP019238 vlCDR3
QQYGSSPWT

SEQ ID NO: 3209 - protein, 221 aa, synthetic construct
  source 1..221: note = Description of Artificial Sequence: Synthetic polypeptide; note = XENP019239 [CTLA-4]_H0.29_L0_Fab Heavy Chain
QVQLVESGGGVVQPGRSLRLSCAASGFTFSSYYMHWVRQAPGKGLEWVTFISYDGNNKYYADSVKGRFTISRDNSKNTLYLQMNSLRAEDTAIYYCARTGWLGPFDYWGQGTLVTVSSASTKGPSVFPLAPSSKSTSGGTAALGCLVKDYFPEPVTVSWNSGALTSGVHTFPAVLQSSGLYSLSSVVTVPSSSLGTQTYICNVNHKPSNTKVDKKVEPKSC

SEQ ID NO: 3210 - protein, 118 aa, synthetic construct; identical to SEQ ID NO: 445
  source 1..118: note = Description of Artificial Sequence: Synthetic polypeptide; note = VH of XENP019239

SEQ ID NO: 3211 - protein, 5 aa, synthetic construct
  source 1..5: note = Description of Artificial Sequence: Synthetic peptide; note = XENP019239 vhCDR1
SYYMH

SEQ ID NO: 3212 - protein, 17 aa, synthetic construct
  source 1..17: note = Description of Artificial Sequence: Synthetic peptide; note = XENP019239 vhCDR2
FISYDGNNKYYADSVKG

SEQ ID NO: 3213 - protein, 9 aa, synthetic construct
  source 1..9: note = Description of Artificial Sequence: Synthetic peptide; note = XENP019239 vhCDR3
TGWLGPFDY

SEQ ID NO: 3214 - protein, 215 aa, synthetic construct; identical to SEQ ID NO: 2924
  source 1..215: note = Description of Artificial Sequence: Synthetic polypeptide; note = XENP019239 [CTLA-4]_H0.29_L0_Fab Light Chain

SEQ ID NO: 3215 - protein, 108 aa, synthetic construct; identical to SEQ ID NO: 23
  source 1..108: note = Description of Artificial Sequence: Synthetic polypeptide; note = VL of XENP019239

SEQ ID NO: 3216 - protein, 12 aa, synthetic construct
  source 1..12: note = Description of Artificial Sequence: Synthetic peptide; note = XENP019239 vlCDR1
RASQSVGSSYLA

SEQ ID NO: 3217 - protein, 7 aa, synthetic construct
  source 1..7: note = Description of Artificial Sequence: Synthetic peptide; note = XENP019239 vlCDR2
GAFSRAT

SEQ ID NO: 3218 - protein, 9 aa, synthetic construct
  source 1..9: note = Description of Artificial Sequence: Synthetic peptide; note = XENP019239 vlCDR3
QQYGSSPWT

SEQ ID NO: 3219 - protein, 221 aa, synthetic construct
  source 1..221: note = Description of Artificial Sequence: Synthetic polypeptide; note = XENP019240 [CTLA-4]_H0.30_L0_Fab Heavy Chain
QVQLVESGGGVVQPGRSLRLSCAASGFTFSSYTMDWVRQAPGKGLEWVTFISYDGNNKYYADSVKGRFTISRDNSKNTLYLQMNSLRAEDTAIYYCARTGWLGPFDYWGQGTLVTVSSASTKGPSVFPLAPSSKSTSGGTAALGCLVKDYFPEPVTVSWNSGALTSGVHTFPAVLQSSGLYSLSSVVTVPSSSLGTQTYICNVNHKPSNTKVDKKVEPKSC

SEQ ID NO: 3220 - protein, 118 aa, synthetic construct; identical to SEQ ID NO: 454
  source 1..118: note = Description of Artificial Sequence: Synthetic polypeptide; note = VH of XENP019240

SEQ ID NO: 3221 - protein, 5 aa, synthetic construct
  source 1..5: note = Description of Artificial Sequence: Synthetic peptide; note = XENP019240 vhCDR1
SYTMD

SEQ ID NO: 3222 - protein, 17 aa, synthetic construct
  source 1..17: note = Description of Artificial Sequence: Synthetic peptide; note = XENP019240 vhCDR2
FISYDGNNKYYADSVKG

SEQ ID NO: 3223 - protein, 9 aa, synthetic construct
  source 1..9: note = Description of Artificial Sequence: Synthetic peptide; note = XENP019240 vhCDR3
TGWLGPFDY

SEQ ID NO: 3224 - protein, 215 aa, synthetic construct; identical to SEQ ID NO: 2924
  source 1..215: note = Description of Artificial Sequence: Synthetic polypeptide; note = XENP019240 [CTLA-4]_H0.30_L0_Fab Light Chain

SEQ ID NO: 3225 - protein, 108 aa, synthetic construct; identical to SEQ ID NO: 23
  source 1..108: note = Description of Artificial Sequence: Synthetic polypeptide; note = VL of XENP019240

SEQ ID NO: 3226 - protein, 12 aa, synthetic construct
  source 1..12: note = Description of Artificial Sequence: Synthetic peptide; note = XENP019240 vlCDR1
RASQSVGSSYLA

SEQ ID NO: 3227 - protein, 7 aa, synthetic construct
  source 1..7: note = Description of Artificial Sequence: Synthetic peptide; note = XENP019240 vlCDR2
GAFSRAT

SEQ ID NO: 3228 - protein, 9 aa, synthetic construct
  source 1..9: note = Description of Artificial Sequence: Synthetic peptide; note = XENP019240 vlCDR3
QQYGSSPWT

SEQ ID NO: 3229 - protein, 221 aa, synthetic construct
  source 1..221: note = Description of Artificial Sequence: Synthetic polypeptide; note = XENP019241 [CTLA-4]_H0.31_L0_Fab Heavy Chain
QVQLVESGGGVVQPGRSLRLSCAASGFTFSSYTMFWVRQAPGKGLEWVTFISYDGNNKYYADSVKGRFTISRDNSKNTLYLQMNSLRAEDTAIYYCARTGWLGPFDYWGQGTLVTVSSASTKGPSVFPLAPSSKSTSGGTAALGCLVKDYFPEPVTVSWNSGALTSGVHTFPAVLQSSGLYSLSSVVTVPSSSLGTQTYICNVNHKPSNTKVDKKVEPKSC

SEQ ID NO: 3230 - protein, 118 aa, synthetic construct; identical to SEQ ID NO: 463
  source 1..118: note = Description of Artificial Sequence: Synthetic polypeptide; note = VH of XENP019241

SEQ ID NO: 3231 - protein, 5 aa, synthetic construct
  source 1..5: note = Description of Artificial Sequence: Synthetic peptide; note = XENP019241 vhCDR1
SYTMF

SEQ ID NO: 3232 - protein, 17 aa, synthetic construct
  source 1..17: note = Description of Artificial Sequence: Synthetic peptide; note = XENP019241 vhCDR2
FISYDGNNKYYADSVKG

SEQ ID NO: 3233 - protein, 9 aa, synthetic construct
  source 1..9: note = Description of Artificial Sequence: Synthetic peptide; note = XENP019241 vhCDR3
TGWLGPFDY

SEQ ID NO: 3234 - protein, 215 aa, synthetic construct; identical to SEQ ID NO: 2924
  source 1..215: note = Description of Artificial Sequence: Synthetic polypeptide; note = XENP019241 [CTLA-4]_H0.31_L0_Fab Light Chain

SEQ ID NO: 3235 - protein, 108 aa, synthetic construct; identical to SEQ ID NO: 23
  source 1..108: note = Description of Artificial Sequence: Synthetic polypeptide; note = VL of XENP019241

SEQ ID NO: 3236 - protein, 12 aa, synthetic construct
  source 1..12: note = Description of Artificial Sequence: Synthetic peptide; note = XENP019241 vlCDR1
RASQSVGSSYLA

SEQ ID NO: 3237 - protein, 7 aa, synthetic construct
  source 1..7: note = Description of Artificial Sequence: Synthetic peptide; note = XENP019241 vlCDR2
GAFSRAT

SEQ ID NO: 3238 - protein, 9 aa, synthetic construct
  source 1..9: note = Description of Artificial Sequence: Synthetic peptide; note = XENP019241 vlCDR3
QQYGSSPWT

SEQ ID NO: 3239 - protein, 221 aa, synthetic construct
  source 1..221: note = Description of Artificial Sequence: Synthetic polypeptide; note = XENP019242 [CTLA-4]_H0.32_L0_Fab Heavy Chain
QVQLVESGGGVVQPGRSLRLSCAASGFTFSSYTMNWVRQAPGKGLEWVTFISYDGNNKYYADSVKGRFTISRDNSKNTLYLQMNSLRAEDTAIYYCARTGWLGPFDYWGQGTLVTVSSASTKGPSVFPLAPSSKSTSGGTAALGCLVKDYFPEPVTVSWNSGALTSGVHTFPAVLQSSGLYSLSSVVTVPSSSLGTQTYICNVNHKPSNTKVDKKVEPKSC

SEQ ID NO: 3240 - protein, 118 aa, synthetic construct; identical to SEQ ID NO: 472
  source 1..118: note = Description of Artificial Sequence: Synthetic polypeptide; note = VH of XENP019242

SEQ ID NO: 3241 - protein, 5 aa, synthetic construct
  source 1..5: note = Description of Artificial Sequence: Synthetic peptide; note = XENP019242 vhCDR1
SYTMN

SEQ ID NO: 3242 - protein, 17 aa, synthetic construct
  source 1..17: note = Description of Artificial Sequence: Synthetic peptide; note = XENP019242 vhCDR2
FISYDGNNKYYADSVKG

SEQ ID NO: 3243 - protein, 9 aa, synthetic construct
  source 1..9: note = Description of Artificial Sequence: Synthetic peptide; note = XENP019242 vhCDR3
TGWLGPFDY

SEQ ID NO: 3244 - protein, 215 aa, synthetic construct; identical to SEQ ID NO: 2924
  source 1..215: note = Description of Artificial Sequence: Synthetic polypeptide; note = XENP019242 [CTLA-4]_H0.32_L0_Fab Light Chain

SEQ ID NO: 3245 - protein, 108 aa, synthetic construct; identical to SEQ ID NO: 23
  source 1..108: note = Description of Artificial Sequence: Synthetic polypeptide; note = VL of XENP019242

SEQ ID NO: 3246 - protein, 12 aa, synthetic construct
  source 1..12: note = Description of Artificial Sequence: Synthetic peptide; note = XENP019242 vlCDR1
RASQSVGSSYLA

SEQ ID NO: 3247 - protein, 7 aa, synthetic construct
  source 1..7: note = Description of Artificial Sequence: Synthetic peptide; note = XENP019242 vlCDR2
GAFSRAT

SEQ ID NO: 3248 - protein, 9 aa, synthetic construct
  source 1..9: note = Description of Artificial Sequence: Synthetic peptide; note = XENP019242 vlCDR3
QQYGSSPWT

SEQ ID NO: 3249 - protein, 221 aa, synthetic construct
  source 1..221: note = Description of Artificial Sequence: Synthetic polypeptide; note = XENP019243 [CTLA-4]_H0.33_L0_Fab Heavy Chain
QVQLVESGGGVVQPGRSLRLSCAASGFTFSSYTMSWVRQAPGKGLEWVTFISYDGNNKYYADSVKGRFTISRDNSKNTLYLQMNSLRAEDTAIYYCARTGWLGPFDYWGQGTLVTVSSASTKGPSVFPLAPSSKSTSGGTAALGCLVKDYFPEPVTVSWNSGALTSGVHTFPAVLQSSGLYSLSSVVTVPSSSLGTQTYICNVNHKPSNTKVDKKVEPKSC

SEQ ID NO: 3250 - protein, 118 aa, synthetic construct; identical to SEQ ID NO: 481
  source 1..118: note = Description of Artificial Sequence: Synthetic polypeptide; note = VH of XENP019243

SEQ ID NO: 3251 - protein, 5 aa, synthetic construct
  source 1..5: note = Description of Artificial Sequence: Synthetic peptide; note = XENP019243 vhCDR1
SYTMS

SEQ ID NO: 3252 - protein, 17 aa, synthetic construct
  source 1..17: note = Description of Artificial Sequence: Synthetic peptide; note = XENP019243 vhCDR2
FISYDGNNKYYADSVKG

SEQ ID NO: 3253 - protein, 9 aa, synthetic construct
  source 1..9: note = Description of Artificial Sequence: Synthetic peptide; note = XENP019243 vhCDR3
TGWLGPFDY

SEQ ID NO: 3254 - protein, 215 aa, synthetic construct; identical to SEQ ID NO: 2924
  source 1..215: note = Description of Artificial Sequence: Synthetic polypeptide; note = XENP019243 [CTLA-4]_H0.33_L0_Fab Light Chain

SEQ ID NO: 3255 - protein, 108 aa, synthetic construct; identical to SEQ ID NO: 23
  source 1..108: note = Description of Artificial Sequence: Synthetic polypeptide; note = VL of XENP019243

SEQ ID NO: 3256 - protein, 12 aa, synthetic construct
  source 1..12: note = Description of Artificial Sequence: Synthetic peptide; note = XENP019243 vlCDR1
RASQSVGSSYLA

SEQ ID NO: 3257 - protein, 7 aa, synthetic construct
  source 1..7: note = Description of Artificial Sequence: Synthetic peptide; note = XENP019243 vlCDR2
GAFSRAT

SEQ ID NO: 3258 - protein, 9 aa, synthetic construct
  source 1..9: note = Description of Artificial Sequence: Synthetic peptide; note = XENP019243 vlCDR3
QQYGSSPWT

SEQ ID NO: 3259 - protein, 221 aa, synthetic construct
  source 1..221: note = Description of Artificial Sequence: Synthetic polypeptide; note = XENP019244 [CTLA-4]_H0.34_L0_Fab Heavy Chain
QVQLVESGGGVVQPGRSLRLSCAASGFTFSSYTMYWVRQAPGKGLEWVTFISYDGNNKYYADSVKGRFTISRDNSKNTLYLQMNSLRAEDTAIYYCARTGWLGPFDYWGQGTLVTVSSASTKGPSVFPLAPSSKSTSGGTAALGCLVKDYFPEPVTVSWNSGALTSGVHTFPAVLQSSGLYSLSSVVTVPSSSLGTQTYICNVNHKPSNTKVDKKVEPKSC

SEQ ID NO: 3260 - protein, 118 aa, synthetic construct; identical to SEQ ID NO: 490
  source 1..118: note = Description of Artificial Sequence: Synthetic polypeptide; note = VH of XENP019244

SEQ ID NO: 3261 - protein, 5 aa, synthetic construct
  source 1..5: note = Description of Artificial Sequence: Synthetic peptide; note = XENP019244 vhCDR1
SYTMY

SEQ ID NO: 3262 - protein, 17 aa, synthetic construct
  source 1..17: note = Description of Artificial Sequence: Synthetic peptide; note = XENP019244 vhCDR2
FISYDGNNKYYADSVKG

SEQ ID NO: 3263 - protein, 9 aa, synthetic construct
  source 1..9: note = Description of Artificial Sequence: Synthetic peptide; note = XENP019244 vhCDR3
TGWLGPFDY

SEQ ID NO: 3264 - protein, 215 aa, synthetic construct; identical to SEQ ID NO: 2924
  source 1..215: note = Description of Artificial Sequence: Synthetic polypeptide; note = XENP019244 [CTLA-4]_H0.34_L0_Fab Light Chain

SEQ ID NO: 3265 - protein, 108 aa, synthetic construct; identical to SEQ ID NO: 23
  source 1..108: note = Description of Artificial Sequence: Synthetic polypeptide; note = VL of XENP019244

SEQ ID NO: 3266 - protein, 12 aa, synthetic construct
  source 1..12: note = Description of Artificial Sequence: Synthetic peptide; note = XENP019244 vlCDR1
RASQSVGSSYLA

SEQ ID NO: 3267 - protein, 7 aa, synthetic construct
  source 1..7: note = Description of Artificial Sequence: Synthetic peptide; note = XENP019244 vlCDR2
GAFSRAT

SEQ ID NO: 3268 - protein, 9 aa, synthetic construct
  source 1..9: note = Description of Artificial Sequence: Synthetic peptide; note = XENP019244 vlCDR3
QQYGSSPWT

SEQ ID NO: 3269 - protein, 221 aa, synthetic construct
  source 1..221: note = Description of Artificial Sequence: Synthetic polypeptide; note = XENP019245 [CTLA-4]_H0.35_L0_Fab Heavy Chain
QVQLVESGGGVVQPGRSLRLSCAASGFTFSSYTMHWIRQAPGKGLEWVTFISYDGNNKYYADSVKGRFTISRDNSKNTLYLQMNSLRAEDTAIYYCARTGWLGPFDYWGQGTLVTVSSASTKGPSVFPLAPSSKSTSGGTAALGCLVKDYFPEPVTVSWNSGALTSGVHTFPAVLQSSGLYSLSSVVTVPSSSLGTQTYICNVNHKPSNTKVDKKVEPKSC

SEQ ID NO: 3270 - protein, 118 aa, synthetic construct; identical to SEQ ID NO: 499
  source 1..118: note = Description of Artificial Sequence: Synthetic polypeptide; note = VH of XENP019245

SEQ ID NO: 3271 - protein, 5 aa, synthetic construct
  source 1..5: note = Description of Artificial Sequence: Synthetic peptide; note = XENP019245 vhCDR1
SYTMH

SEQ ID NO: 3272 - protein, 17 aa, synthetic construct
  source 1..17: note = Description of Artificial Sequence: Synthetic peptide; note = XENP019245 vhCDR2
FISYDGNNKYYADSVKG

SEQ ID NO: 3273 - protein, 9 aa, synthetic construct
  source 1..9: note = Description of Artificial Sequence: Synthetic peptide; note = XENP019245 vhCDR3
TGWLGPFDY

SEQ ID NO: 3274 - protein, 215 aa, synthetic construct; identical to SEQ ID NO: 2924
  source 1..215: note = Description of Artificial Sequence: Synthetic polypeptide; note = XENP019245 [CTLA-4]_H0.35_L0_Fab Light Chain

SEQ ID NO: 3275 - protein, 108 aa, synthetic construct; identical to SEQ ID NO: 23
  source 1..108: note = Description of Artificial Sequence: Synthetic polypeptide; note = VL of XENP019245

SEQ ID NO: 3276 - protein, 12 aa, synthetic construct
  source 1..12: note = Description of Artificial Sequence: Synthetic peptide; note = XENP019245 vlCDR1
RASQSVGSSYLA

SEQ ID NO: 3277 - protein, 7 aa, synthetic construct
  source 1..7: note = Description of Artificial Sequence: Synthetic peptide; note = XENP019245 vlCDR2
GAFSRAT

SEQ ID NO: 3278 - protein, 9 aa, synthetic construct
  source 1..9: note = Description of Artificial Sequence: Synthetic peptide; note = XENP019245 vlCDR3
QQYGSSPWT

SEQ ID NO: 3279 - protein, 221 aa, synthetic construct
  source 1..221: note = Description of Artificial Sequence: Synthetic polypeptide; note = XENP019246 [CTLA-4]_H0.36_L0_Fab Heavy Chain
QVQLVESGGGVVQPGRSLRLSCAASGFTFSSYTMHWVRKAPGKGLEWVTFISYDGNNKYYADSVKGRFTISRDNSKNTLYLQMNSLRAEDTAIYYCARTGWLGPFDYWGQGTLVTVSSASTKGPSVFPLAPSSKSTSGGTAALGCLVKDYFPEPVTVSWNSGALTSGVHTFPAVLQSSGLYSLSSVVTVPSSSLGTQTYICNVNHKPSNTKVDKKVEPKSC

SEQ ID NO: 3280 - protein, 118 aa, synthetic construct; identical to SEQ ID NO: 31
  source 1..118: note = Description of Artificial Sequence: Synthetic polypeptide; note = VH of XENP019246

SEQ ID NO: 3281 - protein, 5 aa, synthetic construct
  source 1..5: note = Description of Artificial Sequence: Synthetic peptide; note = XENP019246 vhCDR1
SYTMH

SEQ ID NO: 3282 - protein, 17 aa, synthetic construct
  source 1..17: note = Description of Artificial Sequence: Synthetic peptide; note = XENP019246 vhCDR2
FISYDGNNKYYADSVKG

SEQ ID NO: 3283 - protein, 9 aa, synthetic construct
  source 1..9: note = Description of Artificial Sequence: Synthetic peptide; note = XENP019246 vhCDR3
TGWLGPFDY

SEQ ID NO: 3284 - protein, 215 aa, synthetic construct; identical to SEQ ID NO: 2924
  source 1..215: note = Description of Artificial Sequence: Synthetic polypeptide; note = XENP019246 [CTLA-4]_H0.36_L0_Fab Light Chain

SEQ ID NO: 3285 - protein, 108 aa, synthetic construct; identical to SEQ ID NO: 23
  source 1..108: note = Description of Artificial Sequence: Synthetic polypeptide; note = VL of XENP019246

SEQ ID NO: 3286 - protein, 12 aa, synthetic construct
  source 1..12: note = Description of Artificial Sequence: Synthetic peptide; note = XENP019246 vlCDR1
RASQSVGSSYLA

SEQ ID NO: 3287 - protein, 7 aa, synthetic construct
  source 1..7: note = Description of Artificial Sequence: Synthetic peptide; note = XENP019246 vlCDR2
GAFSRAT

SEQ ID NO: 3288 - protein, 9 aa, synthetic construct
  source 1..9: note = Description of Artificial Sequence: Synthetic peptide; note = XENP019246 vlCDR3
QQYGSSPWT

SEQ ID NO: 3289 - protein, 221 aa, synthetic construct
  source 1..221: note = Description of Artificial Sequence: Synthetic polypeptide; note = XENP019247 [CTLA-4]_H0.37_L0_Fab Heavy Chain
QVQLVESGGGVVQPGRSLRLSCAASGFTFSSYTMHWVRQAPGKRLEWVTFISYDGNNKYYADSVKGRFTISRDNSKNTLYLQMNSLRAEDTAIYYCARTGWLGPFDYWGQGTLVTVSSASTKGPSVFPLAPSSKSTSGGTAALGCLVKDYFPEPVTVSWNSGALTSGVHTFPAVLQSSGLYSLSSVVTVPSSSLGTQTYICNVNHKPSNTKVDKKVEPKSC

SEQ ID NO: 3290 - protein, 118 aa, synthetic construct; identical to SEQ ID NO: 49
  source 1..118: note = Description of Artificial Sequence: Synthetic polypeptide; note = VH of XENP019247

SEQ ID NO: 3291 - protein, 5 aa, synthetic construct
  source 1..5: note = Description of Artificial Sequence: Synthetic peptide; note = XENP019247 vhCDR1
SYTMH

SEQ ID NO: 3292 - protein, 17 aa, synthetic construct
  source 1..17: note = Description of Artificial Sequence: Synthetic peptide; note = XENP019247 vhCDR2
FISYDGNNKYYADSVKG

SEQ ID NO: 3293 - protein, 9 aa, synthetic construct
  source 1..9: note = Description of Artificial Sequence: Synthetic peptide; note = XENP019247 vhCDR3
TGWLGPFDY

SEQ ID NO: 3294 - protein, 215 aa, synthetic construct; identical to SEQ ID NO: 2924
  source 1..215: note = Description of Artificial Sequence: Synthetic polypeptide; note = XENP019247 [CTLA-4]_H0.37_L0_Fab Light Chain

SEQ ID NO: 3295 - protein, 108 aa, synthetic construct; identical to SEQ ID NO: 23
  source 1..108: note = Description of Artificial Sequence: Synthetic polypeptide; note = VL of XENP019247

SEQ ID NO: 3296 - protein, 12 aa, synthetic construct
  source 1..12: note = Description of Artificial Sequence: Synthetic peptide; note = XENP019247 vlCDR1
RASQSVGSSYLA

SEQ ID NO: 3297 - protein, 7 aa, synthetic construct
  source 1..7: note = Description of Artificial Sequence: Synthetic peptide; note = XENP019247 vlCDR2
GAFSRAT

SEQ ID NO: 3298 - protein, 9 aa, synthetic construct
  source 1..9: note = Description of Artificial Sequence: Synthetic peptide; note = XENP019247 vlCDR3
QQYGSSPWT

SEQ ID NO: 3299 - protein, 221 aa, synthetic construct
  source 1..221: note = Description of Artificial Sequence: Synthetic polypeptide; note = XENP019248 [CTLA-4]_H0.38_L0_Fab Heavy Chain
QVQLVESGGGVVQPGRSLRLSCAASGFTFSSYTMHWVRQAPGKGLEWVAFISYDGNNKYYADSVKGRFTISRDNSKNTLYLQMNSLRAEDTAIYYCARTGWLGPFDYWGQGTLVTVSSASTKGPSVFPLAPSSKSTSGGTAALGCLVKDYFPEPVTVSWNSGALTSGVHTFPAVLQSSGLYSLSSVVTVPSSSLGTQTYICNVNHKPSNTKVDKKVEPKSC

SEQ ID NO: 3300 - protein, 118 aa, synthetic construct; identical to SEQ ID NO: 526
  source 1..118: note = Description of Artificial Sequence: Synthetic polypeptide; note = VH of XENP019248

SEQ ID NO: 3301 - protein, 5 aa, synthetic construct
  source 1..5: note = Description of Artificial Sequence: Synthetic peptide; note = XENP019248 vhCDR1
SYTMH

SEQ ID NO: 3302 - protein, 17 aa, synthetic construct
  source 1..17: note = Description of Artificial Sequence: Synthetic peptide; note = XENP019248 vhCDR2
FISYDGNNKYYADSVKG

SEQ ID NO: 3303 - protein, 9 aa, synthetic construct
  source 1..9: note = Description of Artificial Sequence: Synthetic peptide; note = XENP019248 vhCDR3
TGWLGPFDY

SEQ ID NO: 3304 - protein, 215 aa, synthetic construct; identical to SEQ ID NO: 2924
  source 1..215: note = Description of Artificial Sequence: Synthetic polypeptide; note = XENP019248 [CTLA-4]_H0.38_L0_Fab Light Chain

SEQ ID NO: 3305 - protein, 108 aa, synthetic construct; identical to SEQ ID NO: 23
  source 1..108: note = Description of Artificial Sequence: Synthetic polypeptide; note = VL of XENP019248

SEQ ID NO: 3306 - protein, 12 aa, synthetic construct
  source 1..12: note = Description of Artificial Sequence: Synthetic peptide; note = XENP019248 vlCDR1
RASQSVGSSYLA

SEQ ID NO: 3307 - protein, 7 aa, synthetic construct
  source 1..7: note = Description of Artificial Sequence: Synthetic peptide; note = XENP019248 vlCDR2
GAFSRAT

SEQ ID NO: 3308 - protein, 9 aa, synthetic construct
  source 1..9: note = Description of Artificial Sequence: Synthetic peptide; note = XENP019248 vlCDR3
QQYGSSPWT

SEQ ID NO: 3309 - protein, 221 aa, synthetic construct
  source 1..221: note = Description of Artificial Sequence: Synthetic polypeptide; note = XENP019249 [CTLA-4]_H0.39_L0_Fab Heavy Chain
QVQLVESGGGVVQPGRSLRLSCAASGFTFSSYTMHWVRQAPGKGLEWVGFISYDGNNKYYADSVKGRFTISRDNSKNTLYLQMNSLRAEDTAIYYCARTGWLGPFDYWGQGTLVTVSSASTKGPSVFPLAPSSKSTSGGTAALGCLVKDYFPEPVTVSWNSGALTSGVHTFPAVLQSSGLYSLSSVVTVPSSSLGTQTYICNVNHKPSNTKVDKKVEPKSC

SEQ ID NO: 3310 - protein, 118 aa, synthetic construct; identical to SEQ ID NO: 535
  source 1..118: note = Description of Artificial Sequence: Synthetic polypeptide; note = VH of XENP019249

SEQ ID NO: 3311 - protein, 5 aa, synthetic construct
  source 1..5: note = Description of Artificial Sequence: Synthetic peptide; note = XENP019249 vhCDR1
SYTMH

SEQ ID NO: 3312 - protein, 17 aa, synthetic construct
  source 1..17: note = Description of Artificial Sequence: Synthetic peptide; note = XENP019249 vhCDR2
FISYDGNNKYYADSVKG

SEQ ID NO: 3313 - protein, 9 aa, synthetic construct
  source 1..9: note = Description of Artificial Sequence: Synthetic peptide; note = XENP019249 vhCDR3
TGWLGPFDY

SEQ ID NO: 3314 - protein, 215 aa, synthetic construct; identical to SEQ ID NO: 2924
  source 1..215: note = Description of Artificial Sequence: Synthetic polypeptide; note = XENP019249 [CTLA-4]_H0.39_L0_Fab Light Chain

SEQ ID NO: 3315 - protein, 108 aa, synthetic construct; identical to SEQ ID NO: 23
  source 1..108: note = Description of Artificial Sequence: Synthetic polypeptide; note = VL of XENP019249

SEQ ID NO: 3316 - protein, 12 aa, synthetic construct
  source 1..12: note = Description of Artificial Sequence: Synthetic peptide; note = XENP019249 vlCDR1
RASQSVGSSYLA

SEQ ID NO: 3317 - protein, 7 aa, synthetic construct
  source 1..7: note = Description of Artificial Sequence: Synthetic peptide; note = XENP019249 vlCDR2
GAFSRAT

SEQ ID NO: 3318 - protein, 9 aa, synthetic construct
  source 1..9: note = Description of Artificial Sequence: Synthetic peptide; note = XENP019249 vlCDR3
QQYGSSPWT

SEQ ID NO: 3319 - protein, 221 aa, synthetic construct
  source 1..221: note = Description of Artificial Sequence: Synthetic polypeptide; note = XENP019250 [CTLA-4]_H0.40_L0_Fab Heavy Chain
QVQLVESGGGVVQPGRSLRLSCAASGFTFSSYTMHWVRQAPGKGLEWVSFISYDGNNKYYADSVKGRFTISRDNSKNTLYLQMNSLRAEDTAIYYCARTGWLGPFDYWGQGTLVTVSSASTKGPSVFPLAPSSKSTSGGTAALGCLVKDYFPEPVTVSWNSGALTSGVHTFPAVLQSSGLYSLSSVVTVPSSSLGTQTYICNVNHKPSNTKVDKKVEPKSC

SEQ ID NO: 3320 - protein, 118 aa, synthetic construct; identical to SEQ ID NO: 544
  source 1..118: note = Description of Artificial Sequence: Synthetic polypeptide; note = VH of XENP019250

SEQ ID NO: 3321 - protein, 5 aa, synthetic construct
  source 1..5: note = Description of Artificial Sequence: Synthetic peptide; note = XENP019250 vhCDR1
SYTMH

SEQ ID NO: 3322 - protein, 17 aa, synthetic construct
  source 1..17: note = Description of Artificial Sequence: Synthetic peptide; note = XENP019250 vhCDR2
FISYDGNNKYYADSVKG

SEQ ID NO: 3323 - protein, 9 aa, synthetic construct
  source 1..9: note = Description of Artificial Sequence: Synthetic peptide; note = XENP019250 vhCDR3
TGWLGPFDY

SEQ ID NO: 3324 - protein, 215 aa, synthetic construct; identical to SEQ ID NO: 2924
  source 1..215: note = Description of Artificial Sequence: Synthetic polypeptide; note = XENP019250 [CTLA-4]_H0.40_L0_Fab Light Chain

SEQ ID NO: 3325 - protein, 108 aa, synthetic construct; identical to SEQ ID NO: 23
  source 1..108: note = Description of Artificial Sequence: Synthetic polypeptide; note = VL of XENP019250

SEQ ID NO: 3326 - protein, 12 aa, synthetic construct
  source 1..12: note = Description of Artificial Sequence: Synthetic peptide; note = XENP019250 vlCDR1
RASQSVGSSYLA

SEQ ID NO: 3327 - protein, 7 aa, synthetic construct
  source 1..7: note = Description of Artificial Sequence: Synthetic peptide; note = XENP019250 vlCDR2
GAFSRAT

SEQ ID NO: 3328 - protein, 9 aa, synthetic construct
  source 1..9: note = Description of Artificial Sequence: Synthetic peptide; note = XENP019250 vlCDR3
QQYGSSPWT

SEQ ID NO: 3329 - protein, 221 aa, synthetic construct
  source 1..221: note = Description of Artificial Sequence: Synthetic polypeptide; note = XENP019251 [CTLA-4]_H0.41_L0_Fab Heavy Chain
QVQLVESGGGVVQPGRSLRLSCAASGFTFSSYTMHWVRQAPGKGLEWVVFISYDGNNKYYADSVKGRFTISRDNSKNTLYLQMNSLRAEDTAIYYCARTGWLGPFDYWGQGTLVTVSSASTKGPSVFPLAPSSKSTSGGTAALGCLVKDYFPEPVTVSWNSGALTSGVHTFPAVLQSSGLYSLSSVVTVPSSSLGTQTYICNVNHKPSNTKVDKKVEPKSC

SEQ ID NO: 3330 - protein, 118 aa, synthetic construct; identical to SEQ ID NO: 553
  source 1..118: note = Description of Artificial Sequence: Synthetic polypeptide; note = VH of XENP019251

SEQ ID NO: 3331 - protein, 5 aa, synthetic construct
  source 1..5: note = Description of Artificial Sequence: Synthetic peptide; note = XENP019251 vhCDR1
SYTMH

SEQ ID NO: 3332 - protein, 17 aa, synthetic construct
  source 1..17: note = Description of Artificial Sequence: Synthetic peptide; note = XENP019251 vhCDR2
FISYDGNNKYYADSVKG

SEQ ID NO: 3333 - protein, 9 aa, synthetic construct
  source 1..9: note = Description of Artificial Sequence: Synthetic peptide; note = XENP019251 vhCDR3
TGWLGPFDY

SEQ ID NO: 3334 - protein, 215 aa, synthetic construct; identical to SEQ ID NO: 2924
  source 1..215: note = Description of Artificial Sequence: Synthetic polypeptide; note = XENP019251 [CTLA-4]_H0.41_L0_Fab Light Chain

SEQ ID NO: 3335 - protein, 108 aa, synthetic construct; identical to SEQ ID NO: 23
  source 1..108: note = Description of Artificial Sequence: Synthetic polypeptide; note = VL of XENP019251

SEQ ID NO: 3336 - protein, 12 aa, synthetic construct
  source 1..12: note = Description of Artificial Sequence: Synthetic peptide; note = XENP019251 vlCDR1
RASQSVGSSYLA

SEQ ID NO: 3337 - protein, 7 aa, synthetic construct
  source 1..7: note = Description of Artificial Sequence: Synthetic peptide; note = XENP019251 vlCDR2
GAFSRAT

SEQ ID NO: 3338 - protein, 9 aa, synthetic construct
  source 1..9: note = Description of Artificial Sequence: Synthetic peptide; note = XENP019251 vlCDR3
QQYGSSPWT

SEQ ID NO: 3339 - protein, 221 aa, synthetic construct
  source 1..221: note = Description of Artificial Sequence: Synthetic polypeptide; note = XENP019252 [CTLA-4]_H0.42_L0_Fab Heavy Chain
QVQLVESGGGVVQPGRSLRLSCAASGFTFSSYTMHWVRQAPGKGLEWVTAISYDGNNKYYADSVKGRFTISRDNSKNTLYLQMNSLRAEDTAIYYCARTGWLGPFDYWGQGTLVTVSSASTKGPSVFPLAPSSKSTSGGTAALGCLVKDYFPEPVTVSWNSGALTSGVHTFPAVLQSSGLYSLSSVVTVPSSSLGTQTYICNVNHKPSNTKVDKKVEPKSC

SEQ ID NO: 3340 - protein, 118 aa, synthetic construct; identical to SEQ ID NO: 562
  source 1..118: note = Description of Artificial Sequence: Synthetic polypeptide; note = VH of XENP019252

SEQ ID NO: 3341 - protein, 5 aa, synthetic construct
  source 1..5: note = Description of Artificial Sequence: Synthetic peptide; note = XENP019252 vhCDR1
SYTMH

SEQ ID NO: 3342 - protein, 17 aa, synthetic construct
  source 1..17: note = Description of Artificial Sequence: Synthetic peptide; note = XENP019252 vhCDR2
AISYDGNNKYYADSVKG

SEQ ID NO: 3343 - protein, 9 aa, synthetic construct
  source 1..9: note = Description of Artificial Sequence: Synthetic peptide; note = XENP019252 vhCDR3
TGWLGPFDY

SEQ ID NO: 3344 - protein, 215 aa, synthetic construct; identical to SEQ ID NO: 2924
  source 1..215: note = Description of Artificial Sequence: Synthetic polypeptide; note = XENP019252 [CTLA-4]_H0.42_L0_Fab Light Chain

SEQ ID NO: 3345 - protein, 108 aa, synthetic construct; identical to SEQ ID NO: 23
  source 1..108: note = Description of Artificial Sequence: Synthetic polypeptide; note = VL of XENP019252

SEQ ID NO: 3346 - protein, 12 aa, synthetic construct
  source 1..12: note = Description of Artificial Sequence: Synthetic peptide; note = XENP019252 vlCDR1
RASQSVGSSYLA

SEQ ID NO: 3347 - protein, 7 aa, synthetic construct
  source 1..7: note = Description of Artificial Sequence: Synthetic peptide; note = XENP019252 vlCDR2
GAFSRAT

SEQ ID NO: 3348 - protein, 9 aa, synthetic construct
  source 1..9: note = Description of Artificial Sequence: Synthetic peptide; note = XENP019252 vlCDR3
QQYGSSPWT

SEQ ID NO: 3349 - protein, 221 aa, synthetic construct
  source 1..221: note = Description of Artificial Sequence: Synthetic polypeptide; note = XENP019253 [CTLA-4]_H0.43_L0_Fab Heavy Chain
QVQLVESGGGVVQPGRSLRLSCAASGFTFSSYTMHWVRQAPGKGLEWVTGISYDGNNKYYADSVKGRFTISRDNSKNTLYLQMNSLRAEDTAIYYCARTGWLGPFDYWGQGTLVTVSSASTKGPSVFPLAPSSKSTSGGTAALGCLVKDYFPEPVTVSWNSGALTSGVHTFPAVLQSSGLYSLSSVVTVPSSSLGTQTYICNVNHKPSNTKVDKKVEPKSC

SEQ ID NO: 3350 - protein, 118 aa, synthetic construct; identical to SEQ ID NO: 571
  source 1..118: note = Description of Artificial Sequence: Synthetic polypeptide; note = VH of XENP019253

SEQ ID NO: 3351 - protein, 5 aa, synthetic construct
  source 1..5: note = Description of Artificial Sequence: Synthetic peptide; note = XENP019253 vhCDR1
SYTMH

SEQ ID NO: 3352 - protein, 17 aa, synthetic construct
  source 1..17: note = Description of Artificial Sequence: Synthetic peptide; note = XENP019253 vhCDR2
GISYDGNNKYYADSVKG

SEQ ID NO: 3353 - protein, 9 aa, synthetic construct
  source 1..9: note = Description of Artificial Sequence: Synthetic peptide; note = XENP019253 vhCDR3
TGWLGPFDY

SEQ ID NO: 3354 - protein, 215 aa, synthetic construct; identical to SEQ ID NO: 2924
  source 1..215: note = Description of Artificial Sequence: Synthetic polypeptide; note = XENP019253 [CTLA-4]_H0.43_L0_Fab Light Chain

SEQ ID NO: 3355 - protein, 108 aa, synthetic construct; identical to SEQ ID NO: 23
  source 1..108: note = Description of Artificial Sequence: Synthetic polypeptide; note = VL of XENP019253

SEQ ID NO: 3356 - protein, 12 aa, synthetic construct
  source 1..12: note = Description of Artificial Sequence: Synthetic peptide; note = XENP019253 vlCDR1
RASQSVGSSYLA

SEQ ID NO: 3357 - protein, 7 aa, synthetic construct
  source 1..7: note = Description of Artificial Sequence: Synthetic peptide; note = XENP019253 vlCDR2
GAFSRAT

SEQ ID NO: 3358 - protein, 9 aa, synthetic construct
  source 1..9: note = Description of Artificial Sequence: Synthetic peptide; note = XENP019253 vlCDR3
QQYGSSPWT

SEQ ID NO: 3359 - protein, 221 aa, synthetic construct
  source 1..221: note = Description of Artificial Sequence: Synthetic polypeptide; note = XENP019254 [CTLA-4]_H0.44_L0_Fab Heavy Chain
QVQLVESGGGVVQPGRSLRLSCAASGFTFSSYTMHWVRQAPGKGLEWVTLISYDGNNKYYADSVKGRFTISRDNSKNTLYLQMNSLRAEDTAIYYCARTGWLGPFDYWGQGTLVTVSSASTKGPSVFPLAPSSKSTSGGTAALGCLVKDYFPEPVTVSWNSGALTSGVHTFPAVLQSSGLYSLSSVVTVPSSSLGTQTYICNVNHKPSNTKVDKKVEPKSC

SEQ ID NO: 3360 - protein, 118 aa, synthetic construct; identical to SEQ ID NO: 580
  source 1..118: note = Description of Artificial Sequence: Synthetic polypeptide; note = VH of XENP019254

SEQ ID NO: 3361 - protein, 5 aa, synthetic construct
  source 1..5: note = Description of Artificial Sequence: Synthetic peptide; note = XENP019254 vhCDR1
SYTMH

SEQ ID NO: 3362 - protein, 17 aa, synthetic construct
  source 1..17: note = Description of Artificial Sequence: Synthetic peptide; note = XENP019254 vhCDR2
LISYDGNNKYYADSVKG

SEQ ID NO: 3363 - protein, 9 aa, synthetic construct
  source 1..9: note = Description of Artificial Sequence: Synthetic peptide; note = XENP019254 vhCDR3
TGWLGPFDY

SEQ ID NO: 3364 - protein, 215 aa, synthetic construct; identical to SEQ ID NO: 2924
  source 1..215: note = Description of Artificial Sequence: Synthetic polypeptide; note = XENP019254 [CTLA-4]_H0.44_L0_Fab Light Chain

SEQ ID NO: 3365 - protein, 108 aa, synthetic construct; identical to SEQ ID NO: 23
  source 1..108: note = Description of Artificial Sequence: Synthetic polypeptide; note = VL of XENP019254

SEQ ID NO: 3366 - protein, 12 aa, synthetic construct
  source 1..12: note = Description of Artificial Sequence: Synthetic peptide; note = XENP019254 vlCDR1
RASQSVGSSYLA

SEQ ID NO: 3367 - protein, 7 aa, synthetic construct
  source 1..7: note = Description of Artificial Sequence: Synthetic peptide; note = XENP019254 vlCDR2
GAFSRAT

SEQ ID NO: 3368 - protein, 9 aa, synthetic construct
  source 1..9: note = Description of Artificial Sequence: Synthetic peptide; note = XENP019254 vlCDR3
QQYGSSPWT

SEQ ID NO: 3369 - protein, 221 aa, synthetic construct
  source 1..221: note = Description of Artificial Sequence: Synthetic polypeptide; note = XENP019255 [CTLA-4]_H0.45_L0_Fab Heavy Chain
QVQLVESGGGVVQPGRSLRLSCAASGFTFSSYTMHWVRQAPGKGLEWVTIISYDGNNKYYADSVKGRFTISRDNSKNTLYLQMNSLRAEDTAIYYCARTGWLGPFDYWGQGTLVTVSSASTKGPSVFPLAPSSKSTSGGTAALGCLVKDYFPEPVTVSWNSGALTSGVHTFPAVLQSSGLYSLSSVVTVPSSSLGTQTYICNVNHKPSNTKVDKKVEPKSC

SEQ ID NO: 3370 - protein, 118 aa, synthetic construct; identical to SEQ ID NO: 589
  source 1..118: note = Description of Artificial Sequence: Synthetic polypeptide; note = VH of XENP019255

SEQ ID NO: 3371 - protein, 5 aa, synthetic construct
  source 1..5: note = Description of Artificial Sequence: Synthetic peptide; note = XENP019255 vhCDR1
SYTMH

SEQ ID NO: 3372 - protein, 17 aa, synthetic construct
  source 1..17: note = Description of Artificial Sequence: Synthetic peptide; note = XENP019255 vhCDR2
IISYDGNNKYYADSVKG

SEQ ID NO: 3373 - protein, 9 aa, synthetic construct
  source 1..9: note = Description of Artificial Sequence: Synthetic peptide; note = XENP019255 vhCDR3
TGWLGPFDY

SEQ ID NO: 3374 - protein, 215 aa, synthetic construct; identical to SEQ ID NO: 2924
  source 1..215: note = Description of Artificial Sequence: Synthetic polypeptide; note = XENP019255 [CTLA-4]_H0.45_L0_Fab Light Chain

SEQ ID NO: 3375 - protein, 108 aa, synthetic construct; identical to SEQ ID NO: 23
  source 1..108: note = Description of Artificial Sequence: Synthetic polypeptide; note = VL of XENP019255

SEQ ID NO: 3376 - protein, 12 aa, synthetic construct
  source 1..12: note = Description of Artificial Sequence: Synthetic peptide; note = XENP019255 vlCDR1
RASQSVGSSYLA

SEQ ID NO: 3377 - protein, 7 aa, synthetic construct
  source 1..7: note = Description of Artificial Sequence: Synthetic peptide; note = XENP019255 vlCDR2
GAFSRAT

SEQ ID NO: 3378 - protein, 9 aa, synthetic construct
  source 1..9: note = Description of Artificial Sequence: Synthetic peptide; note = XENP019255 vlCDR3
QQYGSSPWT

SEQ ID NO: 3379 - protein, 221 aa, synthetic construct
  source 1..221: note = Description of Artificial Sequence: Synthetic polypeptide; note = XENP019256 [CTLA-4]_H0.46_L0_Fab Heavy Chain
QVQLVESGGGVVQPGRSLRLSCAASGFTFSSYTMHWVRQAPGKGLEWVTRISYDGNNKYYADSVKGRFTISRDNSKNTLYLQMNSLRAEDTAIYYCARTGWLGPFDYWGQGTLVTVSSASTKGPSVFPLAPSSKSTSGGTAALGCLVKDYFPEPVTVSWNSGALTSGVHTFPAVLQSSGLYSLSSVVTVPSSSLGTQTYICNVNHKPSNTKVDKKVEPKSC

SEQ ID NO: 3380 - protein, 118 aa, synthetic construct; identical to SEQ ID NO: 598
  source 1..118: note = Description of Artificial Sequence: Synthetic polypeptide; note = VH of XENP019256

SEQ ID NO: 3381 - protein, 5 aa, synthetic construct
  source 1..5: note = Description of Artificial Sequence: Synthetic peptide; note = XENP019256 vhCDR1
SYTMH

SEQ ID NO: 3382 - protein, 17 aa, synthetic construct
  source 1..17: note = Description of Artificial Sequence: Synthetic peptide; note = XENP019256 vhCDR2
RISYDGNNKYYADSVKG

SEQ ID NO: 3383 - protein, 9 aa, synthetic construct
  source 1..9: note = Description of Artificial Sequence: Synthetic peptide; note = XENP019256 vhCDR3
TGWLGPFDY

SEQ ID NO: 3384 - protein, 215 aa, synthetic construct; identical to SEQ ID NO: 2924
  source 1..215: note = Description of Artificial Sequence: Synthetic polypeptide; note = XENP019256 [CTLA-4]_H0.46_L0_Fab Light Chain

SEQ ID NO: 3385 - protein, 108 aa, synthetic construct; identical to SEQ ID NO: 23
  source 1..108: note = Description of Artificial Sequence: Synthetic polypeptide; note = VL of XENP019256

SEQ ID NO: 3386 - protein, 12 aa, synthetic construct
  source 1..12: note = Description of Artificial Sequence: Synthetic peptide; note = XENP019256 vlCDR1
RASQSVGSSYLA

SEQ ID NO: 3387 - protein, 7 aa, synthetic construct
  source 1..7: note = Description of Artificial Sequence: Synthetic peptide; note = XENP019256 vlCDR2
GAFSRAT

SEQ ID NO: 3388 - protein, 9 aa, synthetic construct
  source 1..9: note = Description of Artificial Sequence: Synthetic peptide; note = XENP019256 vlCDR3
QQYGSSPWT

SEQ ID NO: 3389 - protein, 221 aa, synthetic construct
  source 1..221: note = Description of Artificial Sequence: Synthetic polypeptide; note = XENP019257 [CTLA-4]_H0.47_L0_Fab Heavy Chain
QVQLVESGGGVVQPGRSLRLSCAASGFTFSSYTMHWVRQAPGKGLEWVTVISYDGNNKYYADSVKGRFTISRDNSKNTLYLQMNSLRAEDTAIYYCARTGWLGPFDYWGQGTLVTVSSASTKGPSVFPLAPSSKSTSGGTAALGCLVKDYFPEPVTVSWNSGALTSGVHTFPAVLQSSGLYSLSSVVTVPSSSLGTQTYICNVNHKPSNTKVDKKVEPKSC

SEQ ID NO: 3390 - protein, 118 aa, synthetic construct; identical to SEQ ID NO: 607
  source 1..118: note = Description of Artificial Sequence: Synthetic polypeptide; note = VH of XENP019257

SEQ ID NO: 3391 - protein, 5 aa, synthetic construct
  source 1..5: note = Description of Artificial Sequence: Synthetic peptide; note = XENP019257 vhCDR1
SYTMH

SEQ ID NO: 3392 - protein, 17 aa, synthetic construct
  source 1..17: note = Description of Artificial Sequence: Synthetic peptide; note = XENP019257 vhCDR2
VISYDGNNKYYADSVKG

SEQ ID NO: 3393 - protein, 9 aa, synthetic construct
  source 1..9: note = Description of Artificial Sequence: Synthetic peptide; note = XENP019257 vhCDR3
TGWLGPFDY

SEQ ID NO: 3394 - protein, 215 aa, synthetic construct; identical to SEQ ID NO: 2924
  source 1..215: note = Description of Artificial Sequence: Synthetic polypeptide; note = XENP019257 [CTLA-4]_H0.47_L0_Fab Light Chain

SEQ ID NO: 3395 - protein, 108 aa, synthetic construct; identical to SEQ ID NO: 23
  source 1..108: note = Description of Artificial Sequence: Synthetic polypeptide; note = VL of XENP019257

SEQ ID NO: 3396 - protein, 12 aa, synthetic construct
  source 1..12: note = Description of Artificial Sequence: Synthetic peptide; note = XENP019257 vlCDR1
RASQSVGSSYLA

SEQ ID NO: 3397 - protein, 7 aa, synthetic construct
  source 1..7: note = Description of Artificial Sequence: Synthetic peptide; note = XENP019257 vlCDR2
GAFSRAT

SEQ ID NO: 3398 - protein, 9 aa, synthetic construct
  source 1..9: note = Description of Artificial Sequence: Synthetic peptide; note = XENP019257 vlCDR3
QQYGSSPWT

SEQ ID NO: 3399 - protein, 221 aa, synthetic construct
  source 1..221: note = Description of Artificial Sequence: Synthetic polypeptide; note = XENP019258 [CTLA-4]_H0.48_L0_Fab Heavy Chain
QVQLVESGGGVVQPGRSLRLSCAASGFTFSSYTMHWVRQAPGKGLEWVTYISYDGNNKYYADSVKGRFTISRDNSKNTLYLQMNSLRAEDTAIYYCARTGWLGPFDYWGQGTLVTVSSASTKGPSVFPLAPSSKSTSGGTAALGCLVKDYFPEPVTVSWNSGALTSGVHTFPAVLQSSGLYSLSSVVTVPSSSLGTQTYICNVNHKPSNTKVDKKVEPKSC

SEQ ID NO: 3400 - protein, 118 aa, synthetic construct; identical to SEQ ID NO: 616
  source 1..118: note = Description of Artificial Sequence: Synthetic polypeptide; note = VH of XENP019258

SEQ ID NO: 3401 - protein, 5 aa, synthetic construct
  source 1..5: note = Description of Artificial Sequence: Synthetic peptide; note = XENP019258 vhCDR1
SYTMH

SEQ ID NO: 3402 - protein, 17 aa, synthetic construct
  source 1..17: note = Description of Artificial Sequence: Synthetic peptide; note = XENP019258 vhCDR2
YISYDGNNKYYADSVKG

SEQ ID NO: 3403 - protein, 9 aa, synthetic construct
  source 1..9: note = Description of Artificial Sequence: Synthetic peptide; note = XENP019258 vhCDR3
TGWLGPFDY

SEQ ID NO: 3404 - protein, 215 aa, synthetic construct; identical to SEQ ID NO: 2924
  source 1..215: note = Description of Artificial Sequence: Synthetic polypeptide; note = XENP019258 [CTLA-4]_H0.48_L0_Fab Light Chain

SEQ ID NO: 3405 - protein, 108 aa, synthetic construct; identical to SEQ ID NO: 23
  source 1..108: note = Description of Artificial Sequence: Synthetic polypeptide; note = VL of XENP019258

SEQ ID NO: 3406 - protein, 12 aa, synthetic construct
  source 1..12: note = Description of Artificial Sequence: Synthetic peptide; note = XENP019258 vlCDR1
RASQSVGSSYLA

SEQ ID NO: 3407 - protein, 7 aa, synthetic construct
  source 1..7: note = Description of Artificial Sequence: Synthetic peptide; note = XENP019258 vlCDR2
GAFSRAT

SEQ ID NO: 3408 - protein, 9 aa, synthetic construct
  source 1..9: note = Description of Artificial Sequence: Synthetic peptide; note = XENP019258 vlCDR3
QQYGSSPWT

SEQ ID NO: 3409 - protein, 221 aa, synthetic construct
  source 1..221: note = Description of Artificial Sequence: Synthetic polypeptide; note = XENP019259 [CTLA-4]_H0.49_L0_Fab Heavy Chain
QVQLVESGGGVVQPGRSLRLSCAASGFTFSSYTMHWVRQAPGKGLEWVTFESYDGNNKYYADSVKGRFTISRDNSKNTLYLQMNSLRAEDTAIYYCARTGWLGPFDYWGQGTLVTVSSASTKGPSVFPLAPSSKSTSGGTAALGCLVKDYFPEPVTVSWNSGALTSGVHTFPAVLQSSGLYSLSSVVTVPSSSLGTQTYICNVNHKPSNTKVDKKVEPKSC

SEQ ID NO: 3410 - protein, 118 aa, synthetic construct; identical to SEQ ID NO: 625
  source 1..118: note = Description of Artificial Sequence: Synthetic polypeptide; note = VH of XENP019259

SEQ ID NO: 3411 - protein, 5 aa, synthetic construct
  source 1..5: note = Description of Artificial Sequence: Synthetic peptide; note = XENP019259 vhCDR1
SYTMH

SEQ ID NO: 3412 - protein, 17 aa, synthetic construct
  source 1..17: note = Description of Artificial Sequence: Synthetic peptide; note = XENP019259 vhCDR2
FESYDGNNKYYADSVKG

SEQ ID NO: 3413 - protein, 9 aa, synthetic construct
  source 1..9: note = Description of Artificial Sequence: Synthetic peptide; note = XENP019259 vhCDR3
TGWLGPFDY

SEQ ID NO: 3414 - protein, 215 aa, synthetic construct; identical to SEQ ID NO: 2924
  source 1..215: note = Description of Artificial Sequence: Synthetic polypeptide; note = XENP019259 [CTLA-4]_H0.49_L0_Fab Light Chain

SEQ ID NO: 3415 - protein, 108 aa, synthetic construct; identical to SEQ ID NO: 23
  source 1..108: note = Description of Artificial Sequence: Synthetic polypeptide; note = VL of XENP019259

SEQ ID NO: 3416 - protein, 12 aa, synthetic construct
  source 1..12: note = Description of Artificial Sequence: Synthetic peptide; note = XENP019259 vlCDR1
RASQSVGSSYLA

SEQ ID NO: 3417 - protein, 7 aa, synthetic construct
  source 1..7: note = Description of Artificial Sequence: Synthetic peptide; note = XENP019259 vlCDR2
GAFSRAT

SEQ ID NO: 3418 - protein, 9 aa, synthetic construct
  source 1..9: note = Description of Artificial Sequence: Synthetic peptide; note = XENP019259 vlCDR3
QQYGSSPWT

SEQ ID NO: 3419 - protein, 221 aa, synthetic construct
  source 1..221: note = Description of Artificial Sequence: Synthetic polypeptide; note = XENP019260 [CTLA-4]_H0.50_L0_Fab Heavy Chain
QVQLVESGGGVVQPGRSLRLSCAASGFTFSSYTMHWVRQAPGKGLEWVTFHSYDGNNKYYADSVKGRFTISRDNSKNTLYLQMNSLRAEDTAIYYCARTGWLGPFDYWGQGTLVTVSSASTKGPSVFPLAPSSKSTSGGTAALGCLVKDYFPEPVTVSWNSGALTSGVHTFPAVLQSSGLYSLSSVVTVPSSSLGTQTYICNVNHKPSNTKVDKKVEPKSC

SEQ ID NO: 3420 - protein, 118 aa, synthetic construct; identical to SEQ ID NO: 634
  source 1..118: note = Description of Artificial Sequence: Synthetic polypeptide; note = VH of XENP019260

SEQ ID NO: 3421 - protein, 5 aa, synthetic construct
  source 1..5: note = Description of Artificial Sequence: Synthetic peptide; note = XENP019260 vhCDR1
SYTMH

SEQ ID NO: 3422 - protein, 17 aa, synthetic construct
  source 1..17: note = Description of Artificial Sequence: Synthetic peptide; note = XENP019260 vhCDR2
FHSYDGNNKYYADSVKG

SEQ ID NO: 3423 - protein, 9 aa, synthetic construct
  source 1..9: note = Description of Artificial Sequence: Synthetic peptide; note = XENP019260 vhCDR3
TGWLGPFDY

SEQ ID NO: 3424 - protein, 215 aa, synthetic construct; identical to SEQ ID NO: 2924
  source 1..215: note = Description of Artificial Sequence: Synthetic polypeptide; note = XENP019260 [CTLA-4]_H0.50_L0_Fab Light Chain

SEQ ID NO: 3425 - protein, 108 aa, synthetic construct; identical to SEQ ID NO: 23
  source 1..108: note = Description of Artificial Sequence: Synthetic polypeptide; note = VL of XENP019260

SEQ ID NO: 3426 - protein, 12 aa, synthetic construct
  source 1..12: note = Description of Artificial Sequence: Synthetic peptide; note = XENP019260 vlCDR1
RASQSVGSSYLA

SEQ ID NO: 3427 - protein, 7 aa, synthetic construct
  source 1..7: note = Description of Artificial Sequence: Synthetic peptide; note = XENP019260 vlCDR2
GAFSRAT

SEQ ID NO: 3428 - protein, 9 aa, synthetic construct
  source 1..9: note = Description of Artificial Sequence: Synthetic peptide; note = XENP019260 vlCDR3
QQYGSSPWT

SEQ ID NO: 3429 - protein, 221 aa, synthetic construct
  source 1..221: note = Description of Artificial Sequence: Synthetic polypeptide; note = XENP019261 [CTLA-4]_H0.51_L0_Fab Heavy Chain
QVQLVESGGGVVQPGRSLRLSCAASGFTFSSYTMHWVRQAPGKGLEWVTFTSYDGNNKYYADSVKGRFTISRDNSKNTLYLQMNSLRAEDTAIYYCARTGWLGPFDYWGQGTLVTVSSASTKGPSVFPLAPSSKSTSGGTAALGCLVKDYFPEPVTVSWNSGALTSGVHTFPAVLQSSGLYSLSSVVTVPSSSLGTQTYICNVNHKPSNTKVDKKVEPKSC

SEQ ID NO: 3430 - protein, 118 aa, synthetic construct; identical to SEQ ID NO: 643
  source 1..118: note = Description of Artificial Sequence: Synthetic polypeptide; note = VH of XENP019261

SEQ ID NO: 3431 - protein, 5 aa, synthetic construct
  source 1..5: note = Description of Artificial Sequence: Synthetic peptide; note = XENP019261 vhCDR1
SYTMH

SEQ ID NO: 3432 - protein, 17 aa, synthetic construct
  source 1..17: note = Description of Artificial Sequence: Synthetic peptide; note = XENP019261 vhCDR2
FTSYDGNNKYYADSVKG

SEQ ID NO: 3433 - protein, 9 aa, synthetic construct
  source 1..9: note = Description of Artificial Sequence: Synthetic peptide; note = XENP019261 vhCDR3
TGWLGPFDY

SEQ ID NO: 3434 - protein, 215 aa, synthetic construct; identical to SEQ ID NO: 2924
  source 1..215: note = Description of Artificial Sequence: Synthetic polypeptide; note = XENP019261 [CTLA-4]_H0.51_L0_Fab Light Chain

SEQ ID NO: 3435 - protein, 108 aa, synthetic construct; identical to SEQ ID NO: 23
  source 1..108: note = Description of Artificial Sequence: Synthetic polypeptide; note = VL of XENP019261

SEQ ID NO: 3436 - protein, 12 aa, synthetic construct
  source 1..12: note = Description of Artificial Sequence: Synthetic peptide; note = XENP019261 vlCDR1
RASQSVGSSYLA

SEQ ID NO: 3437 - protein, 7 aa, synthetic construct
  source 1..7: note = Description of Artificial Sequence: Synthetic peptide; note = XENP019261 vlCDR2
GAFSRAT

SEQ ID NO: 3438 - protein, 9 aa, synthetic construct
  source 1..9: note = Description of Artificial Sequence: Synthetic peptide; note = XENP019261 vlCDR3
QQYGSSPWT

SEQ ID NO: 3439 - protein, 221 aa, synthetic construct
  source 1..221: note = Description of Artificial Sequence: Synthetic polypeptide; note = XENP019262 [CTLA-4]_H0.52_L0_Fab Heavy Chain
QVQLVESGGGVVQPGRSLRLSCAASGFTFSSYTMHWVRQAPGKGLEWVTFVSYDGNNKYYADSVKGRFTISRDNSKNTLYLQMNSLRAEDTAIYYCARTGWLGPFDYWGQGTLVTVSSASTKGPSVFPLAPSSKSTSGGTAALGCLVKDYFPEPVTVSWNSGALTSGVHTFPAVLQSSGLYSLSSVVTVPSSSLGTQTYICNVNHKPSNTKVDKKVEPKSC

SEQ ID NO: 3440 - protein, 118 aa, synthetic construct; identical to SEQ ID NO: 652
  source 1..118: note = Description of Artificial Sequence: Synthetic polypeptide; note = VH of XENP019262

SEQ ID NO: 3441 - protein, 5 aa, synthetic construct
  source 1..5: note = Description of Artificial Sequence: Synthetic peptide; note = XENP019262 vhCDR1
SYTMH

SEQ ID NO: 3442 - protein, 17 aa, synthetic construct
  source 1..17: note = Description of Artificial Sequence: Synthetic peptide; note = XENP019262 vhCDR2
FVSYDGNNKYYADSVKG

SEQ ID NO: 3443 - protein, 9 aa, synthetic construct
  source 1..9: note = Description of Artificial Sequence: Synthetic peptide; note = XENP019262 vhCDR3
TGWLGPFDY

SEQ ID NO: 3444 - protein, 215 aa, synthetic construct; identical to SEQ ID NO: 2924
  source 1..215: note = Description of Artificial Sequence: Synthetic polypeptide; note = XENP019262 [CTLA-4]_H0.52_L0_Fab Light Chain

SEQ ID NO: 3445 - protein, 108 aa, synthetic construct; identical to SEQ ID NO: 23
  source 1..108: note = Description of Artificial Sequence: Synthetic polypeptide; note = VL of XENP019262

SEQ ID NO: 3446 - protein, 12 aa, synthetic construct
  source 1..12: note = Description of Artificial Sequence: Synthetic peptide; note = XENP019262 vlCDR1
RASQSVGSSYLA

SEQ ID NO: 3447 - protein, 7 aa, synthetic construct
  source 1..7: note = Description of Artificial Sequence: Synthetic peptide; note = XENP019262 vlCDR2
GAFSRAT

SEQ ID NO: 3448 - protein, 9 aa, synthetic construct
  source 1..9: note = Description of Artificial Sequence: Synthetic peptide; note = XENP019262 vlCDR3
QQYGSSPWT

SEQ ID NO: 3449 - protein, 221 aa, synthetic construct
  source 1..221: note = Description of Artificial Sequence: Synthetic polypeptide; note = XENP019263 [CTLA-4]_H0.53_L0_Fab Heavy Chain
QVQLVESGGGVVQPGRSLRLSCAASGFTFSSYTMHWVRQAPGKGLEWVTFYSYDGNNKYYADSVKGRFTISRDNSKNTLYLQMNSLRAEDTAIYYCARTGWLGPFDYWGQGTLVTVSSASTKGPSVFPLAPSSKSTSGGTAALGCLVKDYFPEPVTVSWNSGALTSGVHTFPAVLQSSGLYSLSSVVTVPSSSLGTQTYICNVNHKPSNTKVDKKVEPKSC

SEQ ID NO: 3450 - protein, 118 aa, synthetic construct; identical to SEQ ID NO: 661
  source 1..118: note = Description of Artificial Sequence: Synthetic polypeptide; note = VH of XENP019263

SEQ ID NO: 3451 - protein, 5 aa, synthetic construct
  source 1..5: note = Description of Artificial Sequence: Synthetic peptide; note = XENP019263 vhCDR1
SYTMH

SEQ ID NO: 3452 - protein, 17 aa, synthetic construct
  source 1..17: note = Description of Artificial Sequence: Synthetic peptide; note = XENP019263 vhCDR2
FYSYDGNNKYYADSVKG

SEQ ID NO: 3453 - protein, 9 aa, synthetic construct
  source 1..9: note = Description of Artificial Sequence: Synthetic peptide; note = XENP019263 vhCDR3
TGWLGPFDY

SEQ ID NO: 3454 - protein, 215 aa, synthetic construct; identical to SEQ ID NO: 2924
  source 1..215: note = Description of Artificial Sequence: Synthetic polypeptide; note = XENP019263 [CTLA-4]_H0.53_L0_Fab Light Chain

SEQ ID NO: 3455 - protein, 108 aa, synthetic construct; identical to SEQ ID NO: 23
  source 1..108: note = Description of Artificial Sequence: Synthetic polypeptide; note = VL of XENP019263

SEQ ID NO: 3456 - protein, 12 aa, synthetic construct
  source 1..12: note = Description of Artificial Sequence: Synthetic peptide; note = XENP019263 vlCDR1
RASQSVGSSYLA

SEQ ID NO: 3457 - protein, 7 aa, synthetic construct
  source 1..7: note = Description of Artificial Sequence: Synthetic peptide; note = XENP019263 vlCDR2
GAFSRAT

SEQ ID NO: 3458 - protein, 9 aa, synthetic construct
  source 1..9: note = Description of Artificial Sequence: Synthetic peptide; note = XENP019263 vlCDR3
QQYGSSPWT

SEQ ID NO: 3459 - protein, 221 aa, synthetic construct
  source 1..221: note = Description of Artificial Sequence: Synthetic polypeptide; note = XENP019264 [CTLA-4]_H0.54_L0_Fab Heavy Chain
QVQLVESGGGVVQPGRSLRLSCAASGFTFSSYTMHWVRQAPGKGLEWVTFISGDGNNKYYADSVKGRFTISRDNSKNTLYLQMNSLRAEDTAIYYCARTGWLGPFDYWGQGTLVTVSSASTKGPSVFPLAPSSKSTSGGTAALGCLVKDYFPEPVTVSWNSGALTSGVHTFPAVLQSSGLYSLSSVVTVPSSSLGTQTYICNVNHKPSNTKVDKKVEPKSC

SEQ ID NO: 3460 - protein, 118 aa, synthetic construct; identical to SEQ ID NO: 670
  source 1..118: note = Description of Artificial Sequence: Synthetic polypeptide; note = VH of XENP019264

SEQ ID NO: 3461 - protein, 5 aa, synthetic construct
  source 1..5: note = Description of Artificial Sequence: Synthetic peptide; note = XENP019264 vhCDR1
SYTMH

SEQ ID NO: 3462 - protein, 17 aa, synthetic construct
  source 1..17: note = Description of Artificial Sequence: Synthetic peptide; note = XENP019264 vhCDR2
FISGDGNNKYYADSVKG

SEQ ID NO: 3463 - protein, 9 aa, synthetic construct
  source 1..9: note = Description of Artificial Sequence: Synthetic peptide; note = XENP019264 vhCDR3
TGWLGPFDY

SEQ ID NO: 3464 - protein, 215 aa, synthetic construct; identical to SEQ ID NO: 2924
  source 1..215: note = Description of Artificial Sequence: Synthetic polypeptide; note = XENP019264 [CTLA-4]_H0.54_L0_Fab Light Chain

SEQ ID NO: 3465 - protein, 108 aa, synthetic construct; identical to SEQ ID NO: 23
  source 1..108: note = Description of Artificial Sequence: Synthetic polypeptide; note = VL of XENP019264

SEQ ID NO: 3466 - protein, 12 aa, synthetic construct
  source 1..12: note = Description of Artificial Sequence: Synthetic peptide; note = XENP019264 vlCDR1
RASQSVGSSYLA

SEQ ID NO: 3467 - protein, 7 aa, synthetic construct
  source 1..7: note = Description of Artificial Sequence: Synthetic peptide; note = XENP019264 vlCDR2
GAFSRAT

SEQ ID NO: 3468 - protein, 9 aa, synthetic construct
  source 1..9: note = Description of Artificial Sequence: Synthetic peptide; note = XENP019264 vlCDR3
QQYGSSPWT

SEQ ID NO: 3469 - protein, 221 aa, synthetic construct
  source 1..221: note = Description of Artificial Sequence: Synthetic polypeptide; note = XENP019265 [CTLA-4]_H0.55_L0_Fab Heavy Chain
QVQLVESGGGVVQPGRSLRLSCAASGFTFSSYTMHWVRQAPGKGLEWVTFISNDGNNKYYADSVKGRFTISRDNSKNTLYLQMNSLRAEDTAIYYCARTGWLGPFDYWGQGTLVTVSSASTKGPSVFPLAPSSKSTSGGTAALGCLVKDYFPEPVTVSWNSGALTSGVHTFPAVLQSSGLYSLSSVVTVPSSSLGTQTYICNVNHKPSNTKVDKKVEPKSC

SEQ ID NO: 3470 - protein, 118 aa, synthetic construct; identical to SEQ ID NO: 679
  source 1..118: note = Description of Artificial Sequence: Synthetic polypeptide; note = VH of XENP019265

SEQ ID NO: 3471 - protein, 5 aa, synthetic construct
  source 1..5: note = Description of Artificial Sequence: Synthetic peptide; note = XENP019265 vhCDR1
SYTMH

SEQ ID NO: 3472 - protein, 17 aa, synthetic construct
  source 1..17: note = Description of Artificial Sequence: Synthetic peptide; note = XENP019265 vhCDR2
FISNDGNNKYYADSVKG

SEQ ID NO: 3473 - protein, 9 aa, synthetic construct
  source 1..9: note = Description of Artificial Sequence: Synthetic peptide; note = XENP019265 vhCDR3
TGWLGPFDY

SEQ ID NO: 3474 - protein, 215 aa, synthetic construct; identical to SEQ ID NO: 2924
  source 1..215: note = Description of Artificial Sequence: Synthetic polypeptide; note = XENP019265 [CTLA-4]_H0.55_L0_Fab Light Chain

SEQ ID NO: 3475 - protein, 108 aa, synthetic construct; identical to SEQ ID NO: 23
  source 1..108: note = Description of Artificial Sequence: Synthetic polypeptide; note = VL of XENP019265

SEQ ID NO: 3476 - protein, 12 aa, synthetic construct
  source 1..12: note = Description of Artificial Sequence: Synthetic peptide; note = XENP019265 vlCDR1
RASQSVGSSYLA

SEQ ID NO: 3477 - protein, 7 aa, synthetic construct
  source 1..7: note = Description of Artificial Sequence: Synthetic peptide; note = XENP019265 vlCDR2
GAFSRAT

SEQ ID NO: 3478 - protein, 9 aa, synthetic construct
  source 1..9: note = Description of Artificial Sequence: Synthetic peptide; note = XENP019265 vlCDR3
QQYGSSPWT

SEQ ID NO: 3479 - protein, 221 aa, synthetic construct
  source 1..221: note = Description of Artificial Sequence: Synthetic polypeptide; note = XENP019266 [CTLA-4]_H0.56_L0_Fab Heavy Chain
QVQLVESGGGVVQPGRSLRLSCAASGFTFSSYTMHWVRQAPGKGLEWVTFISSDGNNKYYADSVKGRFTISRDNSKNTLYLQMNSLRAEDTAIYYCARTGWLGPFDYWGQGTLVTVSSASTKGPSVFPLAPSSKSTSGGTAALGCLVKDYFPEPVTVSWNSGALTSGVHTFPAVLQSSGLYSLSSVVTVPSSSLGTQTYICNVNHKPSNTKVDKKVEPKSC

SEQ ID NO: 3480 - protein, 118 aa, synthetic construct; identical to SEQ ID NO: 688
  source 1..118: note = Description of Artificial Sequence: Synthetic polypeptide; note = VH of XENP019266

SEQ ID NO: 3481 - protein, 5 aa, synthetic construct
  source 1..5: note = Description of Artificial Sequence: Synthetic peptide; note = XENP019266 vhCDR1
SYTMH

SEQ ID NO: 3482 - protein, 17 aa, synthetic construct
  source 1..17: note = Description of Artificial Sequence: Synthetic peptide; note = XENP019266 vhCDR2
FISSDGNNKYYADSVKG

SEQ ID NO: 3483 - protein, 9 aa, synthetic construct
  source 1..9: note = Description of Artificial Sequence: Synthetic peptide; note = XENP019266 vhCDR3
TGWLGPFDY

SEQ ID NO: 3484 - protein, 215 aa, synthetic construct; identical to SEQ ID NO: 2924
  source 1..215: note = Description of Artificial Sequence: Synthetic polypeptide; note = XENP019266 [CTLA-4]_H0.56_L0_Fab Light Chain

SEQ ID NO: 3485 - protein, 108 aa, synthetic construct; identical to SEQ ID NO: 23
  source 1..108: note = Description of Artificial Sequence: Synthetic polypeptide; note = VL of XENP019266

SEQ ID NO: 3486 - protein, 12 aa, synthetic construct
  source 1..12: note = Description of Artificial Sequence: Synthetic peptide; note = XENP019266 vlCDR1
RASQSVGSSYLA

SEQ ID NO: 3487 - protein, 7 aa, synthetic construct
  source 1..7: note = Description of Artificial Sequence: Synthetic peptide; note = XENP019266 vlCDR2
GAFSRAT

SEQ ID NO: 3488 - protein, 9 aa, synthetic construct
  source 1..9: note = Description of Artificial Sequence: Synthetic peptide; note = XENP019266 vlCDR3
QQYGSSPWT

SEQ ID NO: 3489 - protein, 221 aa, synthetic construct
  source 1..221: note = Description of Artificial Sequence: Synthetic polypeptide; note = XENP019267 [CTLA-4]_H0.57_L0_Fab Heavy Chain
QVQLVESGGGVVQPGRSLRLSCAASGFTFSSYTMHWVRQAPGKGLEWVTFISYNGNNKYYADSVKGRFTISRDNSKNTLYLQMNSLRAEDTAIYYCARTGWLGPFDYWGQGTLVTVSSASTKGPSVFPLAPSSKSTSGGTAALGCLVKDYFPEPVTVSWNSGALTSGVHTFPAVLQSSGLYSLSSVVTVPSSSLGTQTYICNVNHKPSNTKVDKKVEPKSC

SEQ ID NO: 3490 - protein, 118 aa, synthetic construct; identical to SEQ ID NO: 697
  source 1..118: note = Description of Artificial Sequence: Synthetic polypeptide; note = VH of XENP019267

SEQ ID NO: 3491 - protein, 5 aa, synthetic construct
  source 1..5: note = Description of Artificial Sequence: Synthetic peptide; note = XENP019267 vhCDR1
SYTMH

SEQ ID NO: 3492 - protein, 17 aa, synthetic construct
  source 1..17: note = Description of Artificial Sequence: Synthetic peptide; note = XENP019267 vhCDR2
FISYNGNNKYYADSVKG

SEQ ID NO: 3493 - protein, 9 aa, synthetic construct
  source 1..9: note = Description of Artificial Sequence: Synthetic peptide; note = XENP019267 vhCDR3
TGWLGPFDY

SEQ ID NO: 3494 - protein, 215 aa, synthetic construct; identical to SEQ ID NO: 2924
  source 1..215: note = Description of Artificial Sequence: Synthetic polypeptide; note = XENP019267 [CTLA-4]_H0.57_L0_Fab Light Chain

SEQ ID NO: 3495 - protein, 108 aa, synthetic construct; identical to SEQ ID NO: 23
  source 1..108: note = Description of Artificial Sequence: Synthetic polypeptide; note = VL of XENP019267

SEQ ID NO: 3496 - protein, 12 aa, synthetic construct
  source 1..12: note = Description of Artificial Sequence: Synthetic peptide; note = XENP019267 vlCDR1
RASQSVGSSYLA

SEQ ID NO: 3497 - protein, 7 aa, synthetic construct
  source 1..7: note = Description of Artificial Sequence: Synthetic peptide; note = XENP019267 vlCDR2
GAFSRAT

SEQ ID NO: 3498 - protein, 9 aa, synthetic construct
  source 1..9: note = Description of Artificial Sequence: Synthetic peptide; note = XENP019267 vlCDR3
QQYGSSPWT

SEQ ID NO: 3499 - protein, 221 aa, synthetic construct
  source 1..221: note = Description of Artificial Sequence: Synthetic polypeptide; note = XENP019268 [CTLA-4]_H0.58_L0_Fab Heavy Chain
QVQLVESGGGVVQPGRSLRLSCAASGFTFSSYTMHWVRQAPGKGLEWVTFISYSGNNKYYADSVKGRFTISRDNSKNTLYLQMNSLRAEDTAIYYCARTGWLGPFDYWGQGTLVTVSSASTKGPSVFPLAPSSKSTSGGTAALGCLVKDYFPEPVTVSWNSGALTSGVHTFPAVLQSSGLYSLSSVVTVPSSSLGTQTYICNVNHKPSNTKVDKKVEPKSC

SEQ ID NO: 3500 - protein, 118 aa, synthetic construct; identical to SEQ ID NO: 706
  source 1..118: note = Description of Artificial Sequence: Synthetic polypeptide; note = VH of XENP019268

SEQ ID NO: 3501 - protein, 5 aa, synthetic construct
  source 1..5: note = Description of Artificial Sequence: Synthetic peptide; note = XENP019268 vhCDR1
SYTMH

SEQ ID NO: 3502 - protein, 17 aa, synthetic construct
  source 1..17: note = Description of Artificial Sequence: Synthetic peptide; note = XENP019268 vhCDR2
FISYSGNNKYYADSVKG

SEQ ID NO: 3503 - protein, 9 aa, synthetic construct
  source 1..9: note = Description of Artificial Sequence: Synthetic peptide; note = XENP019268 vhCDR3
TGWLGPFDY

SEQ ID NO: 3504 - protein, 215 aa, synthetic construct; identical to SEQ ID NO: 2924
  source 1..215: note = Description of Artificial Sequence: Synthetic polypeptide; note = XENP019268 [CTLA-4]_H0.58_L0_Fab Light Chain

SEQ ID NO: 3505 - protein, 108 aa, synthetic construct; identical to SEQ ID NO: 23
  source 1..108: note = Description of Artificial Sequence: Synthetic polypeptide; note = VL of XENP019268

SEQ ID NO: 3506 - protein, 12 aa, synthetic construct
  source 1..12: note = Description of Artificial Sequence: Synthetic peptide; note = XENP019268 vlCDR1
RASQSVGSSYLA

SEQ ID NO: 3507 - protein, 7 aa, synthetic construct
  source 1..7: note = Description of Artificial Sequence: Synthetic peptide; note = XENP019268 vlCDR2
GAFSRAT

SEQ ID NO: 3508 - protein, 9 aa, synthetic construct
  source 1..9: note = Description of Artificial Sequence: Synthetic peptide; note = XENP019268 vlCDR3
QQYGSSPWT

SEQ ID NO: 3509 - protein, 221 aa, synthetic construct
  source 1..221: note = Description of Artificial Sequence: Synthetic polypeptide; note = XENP019269 [CTLA-4]_H0.59_L0_Fab Heavy Chain
QVQLVESGGGVVQPGRSLRLSCAASGFTFSSYTMHWVRQAPGKGLEWVTFISYEGNNKYYADSVKGRFTISRDNSKNTLYLQMNSLRAEDTAIYYCARTGWLGPFDYWGQGTLVTVSSASTKGPSVFPLAPSSKSTSGGTAALGCLVKDYFPEPVTVSWNSGALTSGVHTFPAVLQSSGLYSLSSVVTVPSSSLGTQTYICNVNHKPSNTKVDKKVEPKSC

SEQ ID NO: 3510 - protein, 118 aa, synthetic construct; identical to SEQ ID NO: 715
  source 1..118: note = Description of Artificial Sequence: Synthetic polypeptide; note = VH of XENP019269

SEQ ID NO: 3511 - protein, 5 aa, synthetic construct
  source 1..5: note = Description of Artificial Sequence: Synthetic peptide; note = XENP019269 vhCDR1
SYTMH

SEQ ID NO: 3512 - protein, 17 aa, synthetic construct
  source 1..17: note = Description of Artificial Sequence: Synthetic peptide; note = XENP019269 vhCDR2
FISYEGNNKYYADSVKG

SEQ ID NO: 3513 - protein, 9 aa, synthetic construct
  source 1..9: note = Description of Artificial Sequence: Synthetic peptide; note = XENP019269 vhCDR3
TGWLGPFDY

SEQ ID NO: 3514 - protein, 215 aa, synthetic construct; identical to SEQ ID NO: 2924
  source 1..215: note = Description of Artificial Sequence: Synthetic polypeptide; note = XENP019269 [CTLA-4]_H0.59_L0_Fab Light Chain

SEQ ID NO: 3515 - protein, 108 aa, synthetic construct; identical to SEQ ID NO: 23
  source 1..108: note = Description of Artificial Sequence: Synthetic polypeptide; note = VL of XENP019269

SEQ ID NO: 3516 - protein, 12 aa, synthetic construct
  source 1..12: note = Description of Artificial Sequence: Synthetic peptide; note = XENP019269 vlCDR1
RASQSVGSSYLA

SEQ ID NO: 3517 - protein, 7 aa, synthetic construct
  source 1..7: note = Description of Artificial Sequence: Synthetic peptide; note = XENP019269 vlCDR2
GAFSRAT

SEQ ID NO: 3518 - protein, 9 aa, synthetic construct
  source 1..9: note = Description of Artificial Sequence: Synthetic peptide; note = XENP019269 vlCDR3
QQYGSSPWT

SEQ ID NO: 3519 - protein, 221 aa, synthetic construct
  source 1..221: note = Description of Artificial Sequence: Synthetic polypeptide; note = XENP019270 [CTLA-4]_H0.60_L0_Fab Heavy Chain
QVQLVESGGGVVQPGRSLRLSCAASGFTFSSYTMHWVRQAPGKGLEWVTFISYHGNNKYYADSVKGRFTISRDNSKNTLYLQMNSLRAEDTAIYYCARTGWLGPFDYWGQGTLVTVSSASTKGPSVFPLAPSSKSTSGGTAALGCLVKDYFPEPVTVSWNSGALTSGVHTFPAVLQSSGLYSLSSVVTVPSSSLGTQTYICNVNHKPSNTKVDKKVEPKSC

SEQ ID NO: 3520 - protein, 118 aa, synthetic construct; identical to SEQ ID NO: 724
  source 1..118: note = Description of Artificial Sequence: Synthetic polypeptide; note = VH of XENP019270

SEQ ID NO: 3521 - protein, 5 aa, synthetic construct
  source 1..5: note = Description of Artificial Sequence: Synthetic peptide; note = XENP019270 vhCDR1
SYTMH

SEQ ID NO: 3522 - protein, 17 aa, synthetic construct
  source 1..17: note = Description of Artificial Sequence: Synthetic peptide; note = XENP019270 vhCDR2
FISYHGNNKYYADSVKG

SEQ ID NO: 3523 - protein, 9 aa, synthetic construct
  source 1..9: note = Description of Artificial Sequence: Synthetic peptide; note = XENP019270 vhCDR3
TGWLGPFDY

SEQ ID NO: 3524 - protein, 215 aa, synthetic construct; identical to SEQ ID NO: 2924
  source 1..215: note = Description of Artificial Sequence: Synthetic polypeptide; note = XENP019270 [CTLA-4]_H0.60_L0_Fab Light Chain

SEQ ID NO: 3525 - protein, 108 aa, synthetic construct; identical to SEQ ID NO: 23
  source 1..108: note = Description of Artificial Sequence: Synthetic polypeptide; note = VL of XENP019270

SEQ ID NO: 3526 - protein, 12 aa, synthetic construct
  source 1..12: note = Description of Artificial Sequence: Synthetic peptide; note = XENP019270 vlCDR1
RASQSVGSSYLA

SEQ ID NO: 3527 - protein, 7 aa, synthetic construct
  source 1..7: note = Description of Artificial Sequence: Synthetic peptide; note = XENP019270 vlCDR2
GAFSRAT

SEQ ID NO: 3528 - protein, 9 aa, synthetic construct
  source 1..9: note = Description of Artificial Sequence: Synthetic peptide; note = XENP019270 vlCDR3
QQYGSSPWT

SEQ ID NO: 3529 - protein, 221 aa, synthetic construct
  source 1..221: note = Description of Artificial Sequence: Synthetic polypeptide; note = XENP019271 [CTLA-4]_H0.61_L0_Fab Heavy Chain
QVQLVESGGGVVQPGRSLRLSCAASGFTFSSYTMHWVRQAPGKGLEWVTFISYKGNNKYYADSVKGRFTISRDNSKNTLYLQMNSLRAEDTAIYYCARTGWLGPFDYWGQGTLVTVSSASTKGPSVFPLAPSSKSTSGGTAALGCLVKDYFPEPVTVSWNSGALTSGVHTFPAVLQSSGLYSLSSVVTVPSSSLGTQTYICNVNHKPSNTKVDKKVEPKSC

SEQ ID NO: 3530 - protein, 118 aa, synthetic construct; identical to SEQ ID NO: 733
  source 1..118: note = Description of Artificial Sequence: Synthetic polypeptide; note = VH of XENP019271

SEQ ID NO: 3531 - protein, 5 aa, synthetic construct
  source 1..5: note = Description of Artificial Sequence: Synthetic peptide; note = XENP019271 vhCDR1
SYTMH

SEQ ID NO: 3532 - protein, 17 aa, synthetic construct
  source 1..17: note = Description of Artificial Sequence: Synthetic peptide; note = XENP019271 vhCDR2
FISYKGNNKYYADSVKG

SEQ ID NO: 3533 - protein, 9 aa, synthetic construct
  source 1..9: note = Description of Artificial Sequence: Synthetic peptide; note = XENP019271 vhCDR3
TGWLGPFDY

SEQ ID NO: 3534 - protein, 215 aa, synthetic construct; identical to SEQ ID NO: 2924
  source 1..215: note = Description of Artificial Sequence: Synthetic polypeptide; note = XENP019271 [CTLA-4]_H0.61_L0_Fab Light Chain

SEQ ID NO: 3535 - protein, 108 aa, synthetic construct; identical to SEQ ID NO: 23
  source 1..108: note = Description of Artificial Sequence: Synthetic polypeptide; note = VL of XENP019271

SEQ ID NO: 3536 - protein, 12 aa, synthetic construct
  source 1..12: note = Description of Artificial Sequence: Synthetic peptide; note = XENP019271 vlCDR1
RASQSVGSSYLA

SEQ ID NO: 3537 - protein, 7 aa, synthetic construct
  source 1..7: note = Description of Artificial Sequence: Synthetic peptide; note = XENP019271 vlCDR2
GAFSRAT

SEQ ID NO: 3538 - protein, 9 aa, synthetic construct
  source 1..9: note = Description of Artificial Sequence: Synthetic peptide; note = XENP019271 vlCDR3
QQYGSSPWT

SEQ ID NO: 3539 - protein, 221 aa, synthetic construct
  source 1..221: note = Description of Artificial Sequence: Synthetic polypeptide; note = XENP019272 [CTLA-4]_H0.62_L0_Fab Heavy Chain
QVQLVESGGGVVQPGRSLRLSCAASGFTFSSYTMHWVRQAPGKGLEWVTFISYKGNNKYYADSVKGRFTISEDNSKNTLYLQMNSLRAEDTAIYYCARTGWLGPFDYWGQGTLVTVSSASTKGPSVFPLAPSSKSTSGGTAALGCLVKDYFPEPVTVSWNSGALTSGVHTFPAVLQSSGLYSLSSVVTVPSSSLGTQTYICNVNHKPSNTKVDKKVEPKSC

SEQ ID NO: 3540 - protein, 118 aa, synthetic construct; identical to SEQ ID NO: 742
  source 1..118: note = Description of Artificial Sequence: Synthetic polypeptide; note = VH of XENP019272

SEQ ID NO: 3541 - protein, 5 aa, synthetic construct
  source 1..5: note = Description of Artificial Sequence: Synthetic peptide; note = XENP019272 vhCDR1
SYTMH

SEQ ID NO: 3542 - protein, 17 aa, synthetic construct
  source 1..17: note = Description of Artificial Sequence: Synthetic peptide; note = XENP019272 vhCDR2
FISYKGNNKYYADSVKG

SEQ ID NO: 3543 - protein, 9 aa, synthetic construct
  source 1..9: note = Description of Artificial Sequence: Synthetic peptide; note = XENP019272 vhCDR3
TGWLGPFDY

SEQ ID NO: 3544 - protein, 215 aa, synthetic construct; identical to SEQ ID NO: 2924
  source 1..215: note = Description of Artificial Sequence: Synthetic polypeptide; note = XENP019272 [CTLA-4]_H0.62_L0_Fab Light Chain

SEQ ID NO: 3545 - protein, 108 aa, synthetic construct; identical to SEQ ID NO: 23
  source 1..108: note = Description of Artificial Sequence: Synthetic polypeptide; note = VL of XENP019272

SEQ ID NO: 3546 - protein, 12 aa, synthetic construct
  source 1..12: note = Description of Artificial Sequence: Synthetic peptide; note = XENP019272 vlCDR1
RASQSVGSSYLA

SEQ ID NO: 3547 - protein, 7 aa, synthetic construct
  source 1..7: note = Description of Artificial Sequence: Synthetic peptide; note = XENP019272 vlCDR2
GAFSRAT

SEQ ID NO: 3548 - protein, 9 aa, synthetic construct
  source 1..9: note = Description of Artificial Sequence: Synthetic peptide; note = XENP019272 vlCDR3
QQYGSSPWT

SEQ ID NO: 3549 - protein, 221 aa, synthetic construct
  source 1..221: note = Description of Artificial Sequence: Synthetic polypeptide; note = XENP019273 [CTLA-4]_H0.63_L0_Fab Heavy Chain
QVQLVESGGGVVQPGRSLRLSCAASGFTFSSYTMHWVRQAPGKGLEWVTFISYQGNNKYYADSVKGRFTISRDNSKNTLYLQMNSLRAEDTAIYYCARTGWLGPFDYWGQGTLVTVSSASTKGPSVFPLAPSSKSTSGGTAALGCLVKDYFPEPVTVSWNSGALTSGVHTFPAVLQSSGLYSLSSVVTVPSSSLGTQTYICNVNHKPSNTKVDKKVEPKSC

SEQ ID NO: 3550 - protein, 118 aa, synthetic construct; identical to SEQ ID NO: 751
  source 1..118: note = Description of Artificial Sequence: Synthetic polypeptide; note = VH of XENP019273

SEQ ID NO: 3551 - protein, 5 aa, synthetic construct
  source 1..5: note = Description of Artificial Sequence: Synthetic peptide; note = XENP019273 vhCDR1
SYTMH

SEQ ID NO: 3552 - protein, 17 aa, synthetic construct
  source 1..17: note = Description of Artificial Sequence: Synthetic peptide; note = XENP019273 vhCDR2
FISYQGNNKYYADSVKG

SEQ ID NO: 3553 - protein, 9 aa, synthetic construct
  source 1..9: note = Description of Artificial Sequence: Synthetic peptide; note = XENP019273 vhCDR3
TGWLGPFDY

SEQ ID NO: 3554 - protein, 215 aa, synthetic construct; identical to SEQ ID NO: 2924
  source 1..215: note = Description of Artificial Sequence: Synthetic polypeptide; note = XENP019273 [CTLA-4]_H0.63_L0_Fab Light Chain

SEQ ID NO: 3555 - protein, 108 aa, synthetic construct; identical to SEQ ID NO: 23
  source 1..108: note = Description of Artificial Sequence: Synthetic polypeptide; note = VL of XENP019273

SEQ ID NO: 3556 - protein, 12 aa, synthetic construct
  source 1..12: note = Description of Artificial Sequence: Synthetic peptide; note = XENP019273 vlCDR1
RASQSVGSSYLA

SEQ ID NO: 3557 - protein, 7 aa, synthetic construct
  source 1..7: note = Description of Artificial Sequence: Synthetic peptide; note = XENP019273 vlCDR2
GAFSRAT

SEQ ID NO: 3558 - protein, 9 aa, synthetic construct
  source 1..9: note = Description of Artificial Sequence: Synthetic peptide; note = XENP019273 vlCDR3
QQYGSSPWT

SEQ ID NO: 3559 - protein, 221 aa, synthetic construct
  source 1..221: note = Description of Artificial Sequence: Synthetic polypeptide; note = XENP019274 [CTLA-4]_H0.64_L0_Fab Heavy Chain
QVQLVESGGGVVQPGRSLRLSCAASGFTFSSYTMHWVRQAPGKGLEWVTFISYDKNNKYYADSVKGRFTISRDNSKNTLYLQMNSLRAEDTAIYYCARTGWLGPFDYWGQGTLVTVSSASTKGPSVFPLAPSSKSTSGGTAALGCLVKDYFPEPVTVSWNSGALTSGVHTFPAVLQSSGLYSLSSVVTVPSSSLGTQTYICNVNHKPSNTKVDKKVEPKSC

SEQ ID NO: 3560 - protein, 118 aa, synthetic construct; identical to SEQ ID NO: 760
  source 1..118: note = Description of Artificial Sequence: Synthetic polypeptide; note = VH of XENP019274

SEQ ID NO: 3561 - protein, 5 aa, synthetic construct
  source 1..5: note = Description of Artificial Sequence: Synthetic peptide; note = XENP019274 vhCDR1
SYTMH

SEQ ID NO: 3562 - protein, 17 aa, synthetic construct
  source 1..17: note = Description of Artificial Sequence: Synthetic peptide; note = XENP019274 vhCDR2
FISYDKNNKYYADSVKG

SEQ ID NO: 3563 - protein, 9 aa, synthetic construct
  source 1..9: note = Description of Artificial Sequence: Synthetic peptide; note = XENP019274 vhCDR3
TGWLGPFDY

SEQ ID NO: 3564 - protein, 215 aa, synthetic construct; identical to SEQ ID NO: 2924
  source 1..215: note = Description of Artificial Sequence: Synthetic polypeptide; note = XENP019274 [CTLA-4]_H0.64_L0_Fab Light Chain

SEQ ID NO: 3565 - protein, 108 aa, synthetic construct; identical to SEQ ID NO: 23
  source 1..108: note = Description of Artificial Sequence: Synthetic polypeptide; note = VL of XENP019274

SEQ ID NO: 3566 - protein, 12 aa, synthetic construct
  source 1..12: note = Description of Artificial Sequence: Synthetic peptide; note = XENP019274 vlCDR1
RASQSVGSSYLA

SEQ ID NO: 3567 - protein, 7 aa, synthetic construct
  source 1..7: note = Description of Artificial Sequence: Synthetic peptide; note = XENP019274 vlCDR2
GAFSRAT

SEQ ID NO: 3568 - protein, 9 aa, synthetic construct
  source 1..9: note = Description of Artificial Sequence: Synthetic peptide; note = XENP019274 vlCDR3
QQYGSSPWT

SEQ ID NO: 3569 - protein, 221 aa, synthetic construct
  source 1..221: note = Description of Artificial Sequence: Synthetic polypeptide; note = XENP019275 [CTLA-4]_H0.65_L0_Fab Heavy Chain
QVQLVESGGGVVQPGRSLRLSCAASGFTFSSYTMHWVRQAPGKGLEWVTFISYDKNNKYYADSVKGRFTISEDNSKNTLYLQMNSLRAEDTAIYYCARTGWLGPFDYWGQGTLVTVSSASTKGPSVFPLAPSSKSTSGGTAALGCLVKDYFPEPVTVSWNSGALTSGVHTFPAVLQSSGLYSLSSVVTVPSSSLGTQTYICNVNHKPSNTKVDKKVEPKSC

SEQ ID NO: 3570 - protein, 118 aa, synthetic construct; identical to SEQ ID NO: 769
  source 1..118: note = Description of Artificial Sequence: Synthetic polypeptide; note = VH of XENP019275

SEQ ID NO: 3571 - protein, 5 aa, synthetic construct
  source 1..5: note = Description of Artificial Sequence: Synthetic peptide; note = XENP019275 vhCDR1
SYTMH

SEQ ID NO: 3572 - protein, 17 aa, synthetic construct
  source 1..17: note = Description of Artificial Sequence: Synthetic peptide; note = XENP019275 vhCDR2
FISYDKNNKYYADSVKG

SEQ ID NO: 3573 - protein, 9 aa, synthetic construct
  source 1..9: note = Description of Artificial Sequence: Synthetic peptide; note = XENP019275 vhCDR3
TGWLGPFDY

SEQ ID NO: 3574 - protein, 215 aa, synthetic construct; identical to SEQ ID NO: 2924
  source 1..215: note = Description of Artificial Sequence: Synthetic polypeptide; note = XENP019275 [CTLA-4]_H0.65_L0_Fab Light Chain

SEQ ID NO: 3575 - protein, 108 aa, synthetic construct; identical to SEQ ID NO: 23
  source 1..108: note = Description of Artificial Sequence: Synthetic polypeptide; note = VL of XENP019275

SEQ ID NO: 3576 - protein, 12 aa, synthetic construct
  source 1..12: note = Description of Artificial Sequence: Synthetic peptide; note = XENP019275 vlCDR1
RASQSVGSSYLA

SEQ ID NO: 3577 - protein, 7 aa, synthetic construct
  source 1..7: note = Description of Artificial Sequence: Synthetic peptide; note = XENP019275 vlCDR2
GAFSRAT

SEQ ID NO: 3578 - protein, 9 aa, synthetic construct
  source 1..9: note = Description of Artificial Sequence: Synthetic peptide; note = XENP019275 vlCDR3
QQYGSSPWT

SEQ ID NO: 3579 - protein, 221 aa, synthetic construct
  source 1..221: note = Description of Artificial Sequence: Synthetic polypeptide; note = XENP019276 [CTLA-4]_H0.66_L0_Fab Heavy Chain
QVQLVESGGGVVQPGRSLRLSCAASGFTFSSYTMHWVRQAPGKGLEWVTFISYDGDNKYYADSVKGRFTISRDNSKNTLYLQMNSLRAEDTAIYYCARTGWLGPFDYWGQGTLVTVSSASTKGPSVFPLAPSSKSTSGGTAALGCLVKDYFPEPVTVSWNSGALTSGVHTFPAVLQSSGLYSLSSVVTVPSSSLGTQTYICNVNHKPSNTKVDKKVEPKSC

SEQ ID NO: 3580 - protein, 118 aa, synthetic construct; identical to SEQ ID NO: 778
  source 1..118: note = Description of Artificial Sequence: Synthetic polypeptide; note = VH of XENP019276

SEQ ID NO: 3581 - protein, 5 aa, synthetic construct
  source 1..5: note = Description of Artificial Sequence: Synthetic peptide; note = XENP019276 vhCDR1
SYTMH

SEQ ID NO: 3582 - protein, 17 aa, synthetic construct
  source 1..17: note = Description of Artificial Sequence: Synthetic peptide; note = XENP019276 vhCDR2
FISYDGDNKYYADSVKG

SEQ ID NO: 3583 - protein, 9 aa, synthetic construct
  source 1..9: note = Description of Artificial Sequence: Synthetic peptide; note = XENP019276 vhCDR3
TGWLGPFDY

SEQ ID NO: 3584 - protein, 215 aa, synthetic construct; identical to SEQ ID NO: 2924
  source 1..215: note = Description of Artificial Sequence: Synthetic polypeptide; note = XENP019276 [CTLA-4]_H0.66_L0_Fab Light Chain

SEQ ID NO: 3585 - protein, 108 aa, synthetic construct; identical to SEQ ID NO: 23
  source 1..108: note = Description of Artificial Sequence: Synthetic polypeptide; note = VL of XENP019276

SEQ ID NO: 3586 - protein, 12 aa, synthetic construct
  source 1..12: note = Description of Artificial Sequence: Synthetic peptide; note = XENP019276 vlCDR1
RASQSVGSSYLA

SEQ ID NO: 3587 - protein, 7 aa, synthetic construct
  source 1..7: note = Description of Artificial Sequence: Synthetic peptide; note = XENP019276 vlCDR2
GAFSRAT

SEQ ID NO: 3588 - protein, 9 aa, synthetic construct
  source 1..9: note = Description of Artificial Sequence: Synthetic peptide; note = XENP019276 vlCDR3
QQYGSSPWT

SEQ ID NO: 3589 - protein, 221 aa, synthetic construct
  source 1..221: note = Description of Artificial Sequence: Synthetic polypeptide; note = XENP019277 [CTLA-4]_H0.67_L0_Fab Heavy Chain
QVQLVESGGGVVQPGRSLRLSCAASGFTFSSYTMHWVRQAPGKGLEWVTFISYDGGNKYYADSVKGRFTISRDNSKNTLYLQMNSLRAEDTAIYYCARTGWLGPFDYWGQGTLVTVSSASTKGPSVFPLAPSSKSTSGGTAALGCLVKDYFPEPVTVSWNSGALTSGVHTFPAVLQSSGLYSLSSVVTVPSSSLGTQTYICNVNHKPSNTKVDKKVEPKSC

SEQ ID NO: 3590 - protein, 118 aa, synthetic construct; identical to SEQ ID NO: 787
  source 1..118: note = Description of Artificial Sequence: Synthetic polypeptide; note = VH of XENP019277

SEQ ID NO: 3591 - protein, 5 aa, synthetic construct
  source 1..5: note = Description of Artificial Sequence: Synthetic peptide; note = XENP019277 vhCDR1
SYTMH

SEQ ID NO: 3592 - protein, 17 aa, synthetic construct
  source 1..17: note = Description of Artificial Sequence: Synthetic peptide; note = XENP019277 vhCDR2
FISYDGGNKYYADSVKG

SEQ ID NO: 3593 - protein, 9 aa, synthetic construct
  source 1..9: note = Description of Artificial Sequence: Synthetic peptide; note = XENP019277 vhCDR3
TGWLGPFDY

SEQ ID NO: 3594 - protein, 215 aa, synthetic construct; identical to SEQ ID NO: 2924
  source 1..215: note = Description of Artificial Sequence: Synthetic polypeptide; note = XENP019277 [CTLA-4]_H0.67_L0_Fab Light Chain

SEQ ID NO: 3595 - protein, 108 aa, synthetic construct; identical to SEQ ID NO: 23
  source 1..108: note = Description of Artificial Sequence: Synthetic polypeptide; note = VL of XENP019277

SEQ ID NO: 3596 - protein, 12 aa, synthetic construct
  source 1..12: note = Description of Artificial Sequence: Synthetic peptide; note = XENP019277 vlCDR1
RASQSVGSSYLA

SEQ ID NO: 3597 - protein, 7 aa, synthetic construct
  source 1..7: note = Description of Artificial Sequence: Synthetic peptide; note = XENP019277 vlCDR2
GAFSRAT

SEQ ID NO: 3598 - protein, 9 aa, synthetic construct
  source 1..9: note = Description of Artificial Sequence: Synthetic peptide; note = XENP019277 vlCDR3
QQYGSSPWT

SEQ ID NO: 3599 - protein, 221 aa, synthetic construct
  source 1..221: note = Description of Artificial Sequence: Synthetic polypeptide; note = XENP019278 [CTLA-4]_H0.68_L0_Fab Heavy Chain
QVQLVESGGGVVQPGRSLRLSCAASGFTFSSYTMHWVRQAPGKGLEWVTFISYDGHNKYYADSVKGRFTISRDNSKNTLYLQMNSLRAEDTAIYYCARTGWLGPFDYWGQGTLVTVSSASTKGPSVFPLAPSSKSTSGGTAALGCLVKDYFPEPVTVSWNSGALTSGVHTFPAVLQSSGLYSLSSVVTVPSSSLGTQTYICNVNHKPSNTKVDKKVEPKSC

SEQ ID NO: 3600 - protein, 118 aa, synthetic construct; identical to SEQ ID NO: 796
  source 1..118: note = Description of Artificial Sequence: Synthetic polypeptide; note = VH of XENP019278

SEQ ID NO: 3601 - protein, 5 aa, synthetic construct
  source 1..5: note = Description of Artificial Sequence: Synthetic peptide; note = XENP019278 vhCDR1
SYTMH

SEQ ID NO: 3602 - protein, 17 aa, synthetic construct
  source 1..17: note = Description of Artificial Sequence: Synthetic peptide; note = XENP019278 vhCDR2
FISYDGHNKYYADSVKG

SEQ ID NO: 3603 - protein, 9 aa, synthetic construct
  source 1..9: note = Description of Artificial Sequence: Synthetic peptide; note = XENP019278 vhCDR3
TGWLGPFDY

SEQ ID NO: 3604 - protein, 215 aa, synthetic construct; identical to SEQ ID NO: 2924
  source 1..215: note = Description of Artificial Sequence: Synthetic polypeptide; note = XENP019278 [CTLA-4]_H0.68_L0_Fab Light Chain

SEQ ID NO: 3605 - protein, 108 aa, synthetic construct; identical to SEQ ID NO: 23
  source 1..108: note = Description of Artificial Sequence: Synthetic polypeptide; note = VL of XENP019278

SEQ ID NO: 3606 - protein, 12 aa, synthetic construct
  source 1..12: note = Description of Artificial Sequence: Synthetic peptide; note = XENP019278 vlCDR1
RASQSVGSSYLA

SEQ ID NO: 3607 - protein, 7 aa, synthetic construct
  source 1..7: note = Description of Artificial Sequence: Synthetic peptide; note = XENP019278 vlCDR2
GAFSRAT

SEQ ID NO: 3608 - protein, 9 aa, synthetic construct
  source 1..9: note = Description of Artificial Sequence: Synthetic peptide; note = XENP019278 vlCDR3
QQYGSSPWT

SEQ ID NO: 3609 - protein, 221 aa, synthetic construct
  source 1..221: note = Description of Artificial Sequence: Synthetic polypeptide; note = XENP019279 [CTLA-4]_H0.69_L0_Fab Heavy Chain
QVQLVESGGGVVQPGRSLRLSCAASGFTFSSYTMHWVRQAPGKGLEWVTFISYDGQNKYYADSVKGRFTISRDNSKNTLYLQMNSLRAEDTAIYYCARTGWLGPFDYWGQGTLVTVSSASTKGPSVFPLAPSSKSTSGGTAALGCLVKDYFPEPVTVSWNSGALTSGVHTFPAVLQSSGLYSLSSVVTVPSSSLGTQTYICNVNHKPSNTKVDKKVEPKSC

SEQ ID NO: 3610 - protein, 118 aa, synthetic construct; identical to SEQ ID NO: 805
  source 1..118: note = Description of Artificial Sequence: Synthetic polypeptide; note = VH of XENP019279

SEQ ID NO: 3611 - protein, 5 aa, synthetic construct
  source 1..5: note = Description of Artificial Sequence: Synthetic peptide; note = XENP019279 vhCDR1
SYTMH

SEQ ID NO: 3612 - protein, 17 aa, synthetic construct
  source 1..17: note = Description of Artificial Sequence: Synthetic peptide; note = XENP019279 vhCDR2
FISYDGQNKYYADSVKG

SEQ ID NO: 3613 - protein, 9 aa, synthetic construct
  source 1..9: note = Description of Artificial Sequence: Synthetic peptide; note = XENP019279 vhCDR3
TGWLGPFDY

SEQ ID NO: 3614 - protein, 215 aa, synthetic construct; identical to SEQ ID NO: 2924
  source 1..215: note = Description of Artificial Sequence: Synthetic polypeptide; note = XENP019279 [CTLA-4]_H0.69_L0_Fab Light Chain

SEQ ID NO: 3615 - protein, 108 aa, synthetic construct; identical to SEQ ID NO: 23
  source 1..108: note = Description of Artificial Sequence: Synthetic polypeptide; note = VL of XENP019279

SEQ ID NO: 3616 - protein, 12 aa, synthetic construct
  source 1..12: note = Description of Artificial Sequence: Synthetic peptide; note = XENP019279 vlCDR1
RASQSVGSSYLA

SEQ ID NO: 3617 - protein, 7 aa, synthetic construct
  source 1..7: note = Description of Artificial Sequence: Synthetic peptide; note = XENP019279 vlCDR2
GAFSRAT

SEQ ID NO: 3618 - protein, 9 aa, synthetic construct
  source 1..9: note = Description of Artificial Sequence: Synthetic peptide; note = XENP019279 vlCDR3
QQYGSSPWT

SEQ ID NO: 3619 - protein, 221 aa, synthetic construct
  source 1..221: note = Description of Artificial Sequence: Synthetic polypeptide; note = XENP019280 [CTLA-4]_H0.70_L0_Fab Heavy Chain
QVQLVESGGGVVQPGRSLRLSCAASGFTFSSYTMHWVRQAPGKGLEWVTFISYDGSNKYYADSVKGRFTISRDNSKNTLYLQMNSLRAEDTAIYYCARTGWLGPFDYWGQGTLVTVSSASTKGPSVFPLAPSSKSTSGGTAALGCLVKDYFPEPVTVSWNSGALTSGVHTFPAVLQSSGLYSLSSVVTVPSSSLGTQTYICNVNHKPSNTKVDKKVEPKSC

SEQ ID NO: 3620 - protein, 118 aa, synthetic construct; identical to SEQ ID NO: 814
  source 1..118: note = Description of Artificial Sequence: Synthetic polypeptide; note = VH of XENP019280

SEQ ID NO: 3621 - protein, 5 aa, synthetic construct
  source 1..5: note = Description of Artificial Sequence: Synthetic peptide; note = XENP019280 vhCDR1
SYTMH

SEQ ID NO: 3622 - protein, 17 aa, synthetic construct
  source 1..17: note = Description of Artificial Sequence: Synthetic peptide; note = XENP019280 vhCDR2
FISYDGSNKYYADSVKG

SEQ ID NO: 3623 - protein, 9 aa, synthetic construct
  source 1..9: note = Description of Artificial Sequence: Synthetic peptide; note = XENP019280 vhCDR3
TGWLGPFDY

SEQ ID NO: 3624 - protein, 215 aa, synthetic construct; identical to SEQ ID NO: 2924
  source 1..215: note = Description of Artificial Sequence: Synthetic polypeptide; note = XENP019280 [CTLA-4]_H0.70_L0_Fab Light Chain

SEQ ID NO: 3625 - protein, 108 aa, synthetic construct; identical to SEQ ID NO: 23
  source 1..108: note = Description of Artificial Sequence: Synthetic polypeptide; note = VL of XENP019280

SEQ ID NO: 3626 - protein, 12 aa, synthetic construct
  source 1..12: note = Description of Artificial Sequence: Synthetic peptide; note = XENP019280 vlCDR1
RASQSVGSSYLA

SEQ ID NO: 3627 - protein, 7 aa, synthetic construct
  source 1..7: note = Description of Artificial Sequence: Synthetic peptide; note = XENP019280 vlCDR2
GAFSRAT

SEQ ID NO: 3628 - protein, 9 aa, synthetic construct
  source 1..9: note = Description of Artificial Sequence: Synthetic peptide; note = XENP019280 vlCDR3
QQYGSSPWT

SEQ ID NO: 3629 - protein, 221 aa, synthetic construct
  source 1..221: note = Description of Artificial Sequence: Synthetic polypeptide; note = XENP019281 [CTLA-4]_H0.71_L0_Fab Heavy Chain
QVQLVESGGGVVQPGRSLRLSCAASGFTFSSYTMHWVRQAPGKGLEWVTFISYDGNDKYYADSVKGRFTISRDNSKNTLYLQMNSLRAEDTAIYYCARTGWLGPFDYWGQGTLVTVSSASTKGPSVFPLAPSSKSTSGGTAALGCLVKDYFPEPVTVSWNSGALTSGVHTFPAVLQSSGLYSLSSVVTVPSSSLGTQTYICNVNHKPSNTKVDKKVEPKSC

SEQ ID NO: 3630 - protein, 118 aa, synthetic construct; identical to SEQ ID NO: 823
  source 1..118: note = Description of Artificial Sequence: Synthetic polypeptide; note = VH of XENP019281

SEQ ID NO: 3631 - protein, 5 aa, synthetic construct
  source 1..5: note = Description of Artificial Sequence: Synthetic peptide; note = XENP019281 vhCDR1
SYTMH

SEQ ID NO: 3632 - protein, 17 aa, synthetic construct
  source 1..17: note = Description of Artificial Sequence: Synthetic peptide; note = XENP019281 vhCDR2
FISYDGNDKYYADSVKG

SEQ ID NO: 3633 - protein, 9 aa, synthetic construct
  source 1..9: note = Description of Artificial Sequence: Synthetic peptide; note = XENP019281 vhCDR3
TGWLGPFDY

SEQ ID NO: 3634 - protein, 215 aa, synthetic construct; identical to SEQ ID NO: 2924
  source 1..215: note = Description of Artificial Sequence: Synthetic polypeptide; note = XENP019281 [CTLA-4]_H0.71_L0_Fab Light Chain

SEQ ID NO: 3635 - protein, 108 aa, synthetic construct; identical to SEQ ID NO: 23
  source 1..108: note = Description of Artificial Sequence: Synthetic polypeptide; note = VL of XENP019281

SEQ ID NO: 3636 - protein, 12 aa, synthetic construct
  source 1..12: note = Description of Artificial Sequence: Synthetic peptide; note = XENP019281 vlCDR1
RASQSVGSSYLA

SEQ ID NO: 3637 - protein, 7 aa, synthetic construct
  source 1..7: note = Description of Artificial Sequence: Synthetic peptide; note = XENP019281 vlCDR2
GAFSRAT

SEQ ID NO: 3638 - protein, 9 aa, synthetic construct
  source 1..9: note = Description of Artificial Sequence: Synthetic peptide; note = XENP019281 vlCDR3
QQYGSSPWT

SEQ ID NO: 3639 - protein, 221 aa, synthetic construct
  source 1..221: note = Description of Artificial Sequence: Synthetic polypeptide; note = XENP019282 [CTLA-4]_H0.72_L0_Fab Heavy Chain
QVQLVESGGGVVQPGRSLRLSCAASGFTFSSYTMHWVRQAPGKGLEWVTFISYDGNEKYYADSVKGRFTISRDNSKNTLYLQMNSLRAEDTAIYYCARTGWLGPFDYWGQGTLVTVSSASTKGPSVFPLAPSSKSTSGGTAALGCLVKDYFPEPVTVSWNSGALTSGVHTFPAVLQSSGLYSLSSVVTVPSSSLGTQTYICNVNHKPSNTKVDKKVEPKSC

SEQ ID NO: 3640 - protein, 118 aa, synthetic construct; identical to SEQ ID NO: 832
  source 1..118: note = Description of Artificial Sequence: Synthetic polypeptide; note = VH of XENP019282

SEQ ID NO: 3641 - protein, 5 aa, synthetic construct
  source 1..5: note = Description of Artificial Sequence: Synthetic peptide; note = XENP019282 vhCDR1
SYTMH

SEQ ID NO: 3642 - protein, 17 aa, synthetic construct
  source 1..17: note = Description of Artificial Sequence: Synthetic peptide; note = XENP019282 vhCDR2
FISYDGNEKYYADSVKG

SEQ ID NO: 3643 - protein, 9 aa, synthetic construct
  source 1..9: note = Description of Artificial Sequence: Synthetic peptide; note = XENP019282 vhCDR3
TGWLGPFDY

SEQ ID NO: 3644 - protein, 215 aa, synthetic construct; identical to SEQ ID NO: 2924
  source 1..215: note = Description of Artificial Sequence: Synthetic polypeptide; note = XENP019282 [CTLA-4]_H0.72_L0_Fab Light Chain

SEQ ID NO: 3645 - protein, 108 aa, synthetic construct; identical to SEQ ID NO: 23
  source 1..108: note = Description of Artificial Sequence: Synthetic polypeptide; note = VL of XENP019282

SEQ ID NO: 3646 - protein, 12 aa, synthetic construct
  source 1..12: note = Description of Artificial Sequence: Synthetic peptide; note = XENP019282 vlCDR1
RASQSVGSSYLA

SEQ ID NO: 3647 - protein, 7 aa, synthetic construct
  source 1..7: note = Description of Artificial Sequence: Synthetic peptide; note = XENP019282 vlCDR2
GAFSRAT

SEQ ID NO: 3648 - protein, 9 aa, synthetic construct
  source 1..9: note = Description of Artificial Sequence: Synthetic peptide; note = XENP019282 vlCDR3
QQYGSSPWT

SEQ ID NO: 3649 - protein, 221 aa, synthetic construct
  source 1..221: note = Description of Artificial Sequence: Synthetic polypeptide; note = XENP019283 [CTLA-4]_H0.73_L0_Fab Heavy Chain
QVQLVESGGGVVQPGRSLRLSCAASGFTFSSYTMHWVRQAPGKGLEWVTFISYDGNHKYYADSVKGRFTISRDNSKNTLYLQMNSLRAEDTAIYYCARTGWLGPFDYWGQGTLVTVSSASTKGPSVFPLAPSSKSTSGGTAALGCLVKDYFPEPVTVSWNSGALTSGVHTFPAVLQSSGLYSLSSVVTVPSSSLGTQTYICNVNHKPSNTKVDKKVEPKSC

SEQ ID NO: 3650 - protein, 118 aa, synthetic construct; identical to SEQ ID NO: 841
  source 1..118: note = Description of Artificial Sequence: Synthetic polypeptide; note = VH of XENP019283

SEQ ID NO: 3651 - protein, 5 aa, synthetic construct
  source 1..5: note = Description of Artificial Sequence: Synthetic peptide; note = XENP019283 vhCDR1
SYTMH

SEQ ID NO: 3652 - protein, 17 aa, synthetic construct
  source 1..17: note = Description of Artificial Sequence: Synthetic peptide; note = XENP019283 vhCDR2
FISYDGNHKYYADSVKG

SEQ ID NO: 3653 - protein, 9 aa, synthetic construct
  source 1..9: note = Description of Artificial Sequence: Synthetic peptide; note = XENP019283 vhCDR3
TGWLGPFDY

SEQ ID NO: 3654 - protein, 215 aa, synthetic construct; identical to SEQ ID NO: 2924
  source 1..215: note = Description of Artificial Sequence: Synthetic polypeptide; note = XENP019283 [CTLA-4]_H0.73_L0_Fab Light Chain

SEQ ID NO: 3655 - protein, 108 aa, synthetic construct; identical to SEQ ID NO: 23
  source 1..108: note = Description of Artificial Sequence: Synthetic polypeptide; note = VL of XENP019283

SEQ ID NO: 3656 - protein, 12 aa, synthetic construct
  source 1..12: note = Description of Artificial Sequence: Synthetic peptide; note = XENP019283 vlCDR1
RASQSVGSSYLA

SEQ ID NO: 3657 - protein, 7 aa, synthetic construct
  source 1..7: note = Description of Artificial Sequence: Synthetic peptide; note = XENP019283 vlCDR2
GAFSRAT

SEQ ID NO: 3658 - protein, 9 aa, synthetic construct
  source 1..9: note = Description of Artificial Sequence: Synthetic peptide; note = XENP019283 vlCDR3
QQYGSSPWT

SEQ ID NO: 3659 - protein, 221 aa, synthetic construct
  source 1..221: note = Description of Artificial Sequence: Synthetic polypeptide; note = XENP019284 [CTLA-4]_H0.74_L0_Fab Heavy Chain
QVQLVESGGGVVQPGRSLRLSCAASGFTFSSYTMHWVRQAPGKGLEWVTFISYDGNSKYYADSVKGRFTISRDNSKNTLYLQMNSLRAEDTAIYYCARTGWLGPFDYWGQGTLVTVSSASTKGPSVFPLAPSSKSTSGGTAALGCLVKDYFPEPVTVSWNSGALTSGVHTFPAVLQSSGLYSLSSVVTVPSSSLGTQTYICNVNHKPSNTKVDKKVEPKSC

SEQ ID NO: 3660 - protein, 118 aa, synthetic construct; identical to SEQ ID NO: 850
  source 1..118: note = Description of Artificial Sequence: Synthetic polypeptide; note = VH of XENP019284

SEQ ID NO: 3661 - protein, 5 aa, synthetic construct
  source 1..5: note = Description of Artificial Sequence: Synthetic peptide; note = XENP019284 vhCDR1
SYTMH

SEQ ID NO: 3662 - protein, 17 aa, synthetic construct
  source 1..17: note = Description of Artificial Sequence: Synthetic peptide; note = XENP019284 vhCDR2
FISYDGNSKYYADSVKG

SEQ ID NO: 3663 - protein, 9 aa, synthetic construct
  source 1..9: note = Description of Artificial Sequence: Synthetic peptide; note = XENP019284 vhCDR3
TGWLGPFDY

SEQ ID NO: 3664 - protein, 215 aa, synthetic construct; identical to SEQ ID NO: 2924
  source 1..215: note = Description of Artificial Sequence: Synthetic polypeptide; note = XENP019284 [CTLA-4]_H0.74_L0_Fab Light Chain

SEQ ID NO: 3665 - protein, 108 aa, synthetic construct; identical to SEQ ID NO: 23
  source 1..108: note = Description of Artificial Sequence: Synthetic polypeptide; note = VL of XENP019284

SEQ ID NO: 3666 - protein, 12 aa, synthetic construct
  source 1..12: note = Description of Artificial Sequence: Synthetic peptide; note = XENP019284 vlCDR1
RASQSVGSSYLA

SEQ ID NO: 3667 - protein, 7 aa, synthetic construct
  source 1..7: note = Description of Artificial Sequence: Synthetic peptide; note = XENP019284 vlCDR2
GAFSRAT

SEQ ID NO: 3668 - protein, 9 aa, synthetic construct
  source 1..9: note = Description of Artificial Sequence: Synthetic peptide; note = XENP019284 vlCDR3
QQYGSSPWT

SEQ ID NO: 3669 - protein, 221 aa, synthetic construct
  source 1..221: note = Description of Artificial Sequence: Synthetic polypeptide; note = XENP019285 [CTLA-4]_H0.75_L0_Fab Heavy Chain
QVQLVESGGGVVQPGRSLRLSCAASGFTFSSYTMHWVRQAPGKGLEWVTFISYDGNTKYYADSVKGRFTISRDNSKNTLYLQMNSLRAEDTAIYYCARTGWLGPFDYWGQGTLVTVSSASTKGPSVFPLAPSSKSTSGGTAALGCLVKDYFPEPVTVSWNSGALTSGVHTFPAVLQSSGLYSLSSVVTVPSSSLGTQTYICNVNHKPSNTKVDKKVEPKSC

SEQ ID NO: 3670 - protein, 118 aa, synthetic construct; identical to SEQ ID NO: 859
  source 1..118: note = Description of Artificial Sequence: Synthetic polypeptide; note = VH of XENP019285

SEQ ID NO: 3671 - protein, 5 aa, synthetic construct
  source 1..5: note = Description of Artificial Sequence: Synthetic peptide; note = XENP019285 vhCDR1
SYTMH

SEQ ID NO: 3672 - protein, 17 aa, synthetic construct
  source 1..17: note = Description of Artificial Sequence: Synthetic peptide; note = XENP019285 vhCDR2
FISYDGNTKYYADSVKG

SEQ ID NO: 3673 - protein, 9 aa, synthetic construct
  source 1..9: note = Description of Artificial Sequence: Synthetic peptide; note = XENP019285 vhCDR3
TGWLGPFDY

SEQ ID NO: 3674 - protein, 215 aa, synthetic construct; identical to SEQ ID NO: 2924
  source 1..215: note = Description of Artificial Sequence: Synthetic polypeptide; note = XENP019285 [CTLA-4]_H0.75_L0_Fab Light Chain

SEQ ID NO: 3675 - protein, 108 aa, synthetic construct; identical to SEQ ID NO: 23
  source 1..108: note = Description of Artificial Sequence: Synthetic polypeptide; note = VL of XENP019285

SEQ ID NO: 3676 - protein, 12 aa, synthetic construct
  source 1..12: note = Description of Artificial Sequence: Synthetic peptide; note = XENP019285 vlCDR1
RASQSVGSSYLA

SEQ ID NO: 3677 - protein, 7 aa, synthetic construct
  source 1..7: note = Description of Artificial Sequence: Synthetic peptide; note = XENP019285 vlCDR2
GAFSRAT

SEQ ID NO: 3678 - protein, 9 aa, synthetic construct
  source 1..9: note = Description of Artificial Sequence: Synthetic peptide; note = XENP019285 vlCDR3
QQYGSSPWT

SEQ ID NO: 3679 - protein, 221 aa, synthetic construct
  source 1..221: note = Description of Artificial Sequence: Synthetic polypeptide; note = XENP019286 [CTLA-4]_H0.76_L0_Fab Heavy Chain
QVQLVESGGGVVQPGRSLRLSCAASGFTFSSYTMHWVRQAPGKGLEWVTFISYDGNQKYYADSVKGRFTISRDNSKNTLYLQMNSLRAEDTAIYYCARTGWLGPFDYWGQGTLVTVSSASTKGPSVFPLAPSSKSTSGGTAALGCLVKDYFPEPVTVSWNSGALTSGVHTFPAVLQSSGLYSLSSVVTVPSSSLGTQTYICNVNHKPSNTKVDKKVEPKSC

SEQ ID NO: 3680 - protein, 118 aa, synthetic construct; identical to SEQ ID NO: 868
  source 1..118: note = Description of Artificial Sequence: Synthetic polypeptide; note = VH of XENP019286

SEQ ID NO: 3681 - protein, 5 aa, synthetic construct
  source 1..5: note = Description of Artificial Sequence: Synthetic peptide; note = XENP019286 vhCDR1
SYTMH

SEQ ID NO: 3682 - protein, 17 aa, synthetic construct
  source 1..17: note = Description of Artificial Sequence: Synthetic peptide; note = XENP019286 vhCDR2
FISYDGNQKYYADSVKG

SEQ ID NO: 3683 - protein, 9 aa, synthetic construct
  source 1..9: note = Description of Artificial Sequence: Synthetic peptide; note = XENP019286 vhCDR3
TGWLGPFDY

SEQ ID NO: 3684 - protein, 215 aa, synthetic construct; identical to SEQ ID NO: 2924
  source 1..215: note = Description of Artificial Sequence: Synthetic polypeptide; note = XENP019286 [CTLA-4]_H0.76_L0_Fab Light Chain

SEQ ID NO: 3685 - protein, 108 aa, synthetic construct; identical to SEQ ID NO: 23
  source 1..108: note = Description of Artificial Sequence: Synthetic polypeptide; note = VL of XENP019286

SEQ ID NO: 3686 - protein, 12 aa, synthetic construct
  source 1..12: note = Description of Artificial Sequence: Synthetic peptide; note = XENP019286 vlCDR1
RASQSVGSSYLA

SEQ ID NO: 3687 - protein, 7 aa, synthetic construct
  source 1..7: note = Description of Artificial Sequence: Synthetic peptide; note = XENP019286 vlCDR2
GAFSRAT

SEQ ID NO: 3688 - protein, 9 aa, synthetic construct
  source 1..9: note = Description of Artificial Sequence: Synthetic peptide; note = XENP019286 vlCDR3
QQYGSSPWT

SEQ ID NO: 3689 - protein, 221 aa, synthetic construct
  source 1..221: note = Description of Artificial Sequence: Synthetic polypeptide; note = XENP019287 [CTLA-4]_H0.77_L0_Fab Heavy Chain
QVQLVESGGGVVQPGRSLRLSCAASGFTFSSYTMHWVRQAPGKGLEWVTFISYDGNNIYYADSVKGRFTISRDNSKNTLYLQMNSLRAEDTAIYYCARTGWLGPFDYWGQGTLVTVSSASTKGPSVFPLAPSSKSTSGGTAALGCLVKDYFPEPVTVSWNSGALTSGVHTFPAVLQSSGLYSLSSVVTVPSSSLGTQTYICNVNHKPSNTKVDKKVEPKSC

SEQ ID NO: 3690 - protein, 118 aa, synthetic construct; identical to SEQ ID NO: 877
  source 1..118: note = Description of Artificial Sequence: Synthetic polypeptide; note = VH of XENP019287

SEQ ID NO: 3691 - protein, 5 aa, synthetic construct
  source 1..5: note = Description of Artificial Sequence: Synthetic peptide; note = XENP019287 vhCDR1
SYTMH

SEQ ID NO: 3692 - protein, 17 aa, synthetic construct
  source 1..17: note = Description of Artificial Sequence: Synthetic peptide; note = XENP019287 vhCDR2
FISYDGNNIYYADSVKG

SEQ ID NO: 3693 - protein, 9 aa, synthetic construct
  source 1..9: note = Description of Artificial Sequence: Synthetic peptide; note = XENP019287 vhCDR3
TGWLGPFDY

SEQ ID NO: 3694 - protein, 215 aa, synthetic construct; identical to SEQ ID NO: 2924
  source 1..215: note = Description of Artificial Sequence: Synthetic polypeptide; note = XENP019287 [CTLA-4]_H0.77_L0_Fab Light Chain

SEQ ID NO: 3695 - protein, 108 aa, synthetic construct; identical to SEQ ID NO: 23
  source 1..108: note = Description of Artificial Sequence: Synthetic polypeptide; note = VL of XENP019287

SEQ ID NO: 3696 - protein, 12 aa, synthetic construct
  source 1..12: note = Description of Artificial Sequence: Synthetic peptide; note = XENP019287 vlCDR1
RASQSVGSSYLA

SEQ ID NO: 3697 - protein, 7 aa, synthetic construct
  source 1..7: note = Description of Artificial Sequence: Synthetic peptide; note = XENP019287 vlCDR2
GAFSRAT

SEQ ID NO: 3698 - protein, 9 aa, synthetic construct
  source 1..9: note = Description of Artificial Sequence: Synthetic peptide; note = XENP019287 vlCDR3
QQYGSSPWT

SEQ ID NO: 3699 - protein, 221 aa, synthetic construct
  source 1..221: note = Description of Artificial Sequence: Synthetic polypeptide; note = XENP019288 [CTLA-4]_H0.78_L0_Fab Heavy Chain
QVQLVESGGGVVQPGRSLRLSCAASGFTFSSYTMHWVRQAPGKGLEWVTFISYDGNNTYYADSVKGRFTISRDNSKNTLYLQMNSLRAEDTAIYYCARTGWLGPFDYWGQGTLVTVSSASTKGPSVFPLAPSSKSTSGGTAALGCLVKDYFPEPVTVSWNSGALTSGVHTFPAVLQSSGLYSLSSVVTVPSSSLGTQTYICNVNHKPSNTKVDKKVEPKSC

SEQ ID NO: 3700 - protein, 118 aa, synthetic construct; identical to SEQ ID NO: 886
  source 1..118: note = Description of Artificial Sequence: Synthetic polypeptide; note = VH of XENP019288

SEQ ID NO: 3701 - protein, 5 aa, synthetic construct
  source 1..5: note = Description of Artificial Sequence: Synthetic peptide; note = XENP019288 vhCDR1
SYTMH

SEQ ID NO: 3702 - protein, 17 aa, synthetic construct
  source 1..17: note = Description of Artificial Sequence: Synthetic peptide; note = XENP019288 vhCDR2
FISYDGNNTYYADSVKG

SEQ ID NO: 3703 - protein, 9 aa, synthetic construct
  source 1..9: note = Description of Artificial Sequence: Synthetic peptide; note = XENP019288 vhCDR3
TGWLGPFDY

SEQ ID NO: 3704 - protein, 215 aa, synthetic construct; identical to SEQ ID NO: 2924
  source 1..215: note = Description of Artificial Sequence: Synthetic polypeptide; note = XENP019288 [CTLA-4]_H0.78_L0_Fab Light Chain

SEQ ID NO: 3705 - protein, 108 aa, synthetic construct; identical to SEQ ID NO: 23
  source 1..108: note = Description of Artificial Sequence: Synthetic polypeptide; note = VL of XENP019288

SEQ ID NO: 3706 - protein, 12 aa, synthetic construct
  source 1..12: note = Description of Artificial Sequence: Synthetic peptide; note = XENP019288 vlCDR1
RASQSVGSSYLA

SEQ ID NO: 3707 - protein, 7 aa, synthetic construct
  source 1..7: note = Description of Artificial Sequence: Synthetic peptide; note = XENP019288 vlCDR2
GAFSRAT

SEQ ID NO: 3708 - protein, 9 aa, synthetic construct
  source 1..9: note = Description of Artificial Sequence: Synthetic peptide; note = XENP019288 vlCDR3
QQYGSSPWT

SEQ ID NO: 3709 - protein, 221 aa, synthetic construct
  source 1..221: note = Description of Artificial Sequence: Synthetic polypeptide; note = XENP019289 [CTLA-4]_H0.79_L0_Fab Heavy Chain
QVQLVESGGGVVQPGRSLRLSCAASGFTFSSYTMHWVRQAPGKGLEWVTFISYDGNNKAYADSVKGRFTISRDNSKNTLYLQMNSLRAEDTAIYYCARTGWLGPFDYWGQGTLVTVSSASTKGPSVFPLAPSSKSTSGGTAALGCLVKDYFPEPVTVSWNSGALTSGVHTFPAVLQSSGLYSLSSVVTVPSSSLGTQTYICNVNHKPSNTKVDKKVEPKSC

SEQ ID NO: 3710 - protein, 118 aa, synthetic construct; identical to SEQ ID NO: 895
  source 1..118: note = Description of Artificial Sequence: Synthetic polypeptide; note = VH of XENP019289

SEQ ID NO: 3711 - protein, 5 aa, synthetic construct
  source 1..5: note = Description of Artificial Sequence: Synthetic peptide; note = XENP019289 vhCDR1
SYTMH

SEQ ID NO: 3712 - protein, 17 aa, synthetic construct
  source 1..17: note = Description of Artificial Sequence: Synthetic peptide; note = XENP019289 vhCDR2
FISYDGNNKAYADSVKG

SEQ ID NO: 3713 - protein, 9 aa, synthetic construct
  source 1..9: note = Description of Artificial Sequence: Synthetic peptide; note = XENP019289 vhCDR3
TGWLGPFDY

SEQ ID NO: 3714 - protein, 215 aa, synthetic construct; identical to SEQ ID NO: 2924
  source 1..215: note = Description of Artificial Sequence: Synthetic polypeptide; note = XENP019289 [CTLA-4]_H0.79_L0_Fab Light Chain

SEQ ID NO: 3715 - protein, 108 aa, synthetic construct; identical to SEQ ID NO: 23
  source 1..108: note = Description of Artificial Sequence: Synthetic polypeptide; note = VL of XENP019289

SEQ ID NO: 3716 - protein, 12 aa, synthetic construct
  source 1..12: note = Description of Artificial Sequence: Synthetic peptide; note = XENP019289 vlCDR1
RASQSVGSSYLA

SEQ ID NO: 3717 - protein, 7 aa, synthetic construct
  source 1..7: note = Description of Artificial Sequence: Synthetic peptide; note = XENP019289 vlCDR2
GAFSRAT

SEQ ID NO: 3718 - protein, 9 aa, synthetic construct
  source 1..9: note = Description of Artificial Sequence: Synthetic peptide; note = XENP019289 vlCDR3
QQYGSSPWT

SEQ ID NO: 3719 - protein, 221 aa, synthetic construct
  source 1..221: note = Description of Artificial Sequence: Synthetic polypeptide; note = XENP019290 [CTLA-4]_H0.80_L0_Fab Heavy Chain
QVQLVESGGGVVQPGRSLRLSCAASGFTFSSYTMHWVRQAPGKGLEWVTFISYDGNNKYYAASVKGRFTISRDNSKNTLYLQMNSLRAEDTAIYYCARTGWLGPFDYWGQGTLVTVSSASTKGPSVFPLAPSSKSTSGGTAALGCLVKDYFPEPVTVSWNSGALTSGVHTFPAVLQSSGLYSLSSVVTVPSSSLGTQTYICNVNHKPSNTKVDKKVEPKSC

SEQ ID NO: 3720 - protein, 118 aa, synthetic construct; identical to SEQ ID NO: 904
  source 1..118: note = Description of Artificial Sequence: Synthetic polypeptide; note = VH of XENP019290

SEQ ID NO: 3721 - protein, 5 aa, synthetic construct
  source 1..5: note = Description of Artificial Sequence: Synthetic peptide; note = XENP019290 vhCDR1
SYTMH

SEQ ID NO: 3722 - protein, 17 aa, synthetic construct
  source 1..17: note = Description of Artificial Sequence: Synthetic peptide; note = XENP019290 vhCDR2
FISYDGNNKYYAASVKG

SEQ ID NO: 3723 - protein, 9 aa, synthetic construct
  source 1..9: note = Description of Artificial Sequence: Synthetic peptide; note = XENP019290 vhCDR3
TGWLGPFDY

SEQ ID NO: 3724 - protein, 215 aa, synthetic construct; identical to SEQ ID NO: 2924
  source 1..215: note = Description of Artificial Sequence: Synthetic polypeptide; note = XENP019290 [CTLA-4]_H0.80_L0_Fab Light Chain

SEQ ID NO: 3725 - protein, 108 aa, synthetic construct; identical to SEQ ID NO: 23
  source 1..108: note = Description of Artificial Sequence: Synthetic polypeptide; note = VL of XENP019290

SEQ ID NO: 3726 - protein, 12 aa, synthetic construct
  source 1..12: note = Description of Artificial Sequence: Synthetic peptide; note = XENP019290 vlCDR1
RASQSVGSSYLA

SEQ ID NO: 3727 - protein, 7 aa, synthetic construct
  source 1..7: note = Description of Artificial Sequence: Synthetic peptide; note = XENP019290 vlCDR2
GAFSRAT

SEQ ID NO: 3728 - protein, 9 aa, synthetic construct
  source 1..9: note = Description of Artificial Sequence: Synthetic peptide; note = XENP019290 vlCDR3
QQYGSSPWT

SEQ ID NO: 3729 - protein, 221 aa, synthetic construct
  source 1..221: note = Description of Artificial Sequence: Synthetic polypeptide; note = XENP019291 [CTLA-4]_H0.81_L0_Fab Heavy Chain
QVQLVESGGGVVQPGRSLRLSCAASGFTFSSYTMHWVRQAPGKGLEWVTFISYDGNNKYYAKSVKGRFTISRDNSKNTLYLQMNSLRAEDTAIYYCARTGWLGPFDYWGQGTLVTVSSASTKGPSVFPLAPSSKSTSGGTAALGCLVKDYFPEPVTVSWNSGALTSGVHTFPAVLQSSGLYSLSSVVTVPSSSLGTQTYICNVNHKPSNTKVDKKVEPKSC

SEQ ID NO: 3730 - protein, 118 aa, synthetic construct; identical to SEQ ID NO: 913
  source 1..118: note = Description of Artificial Sequence: Synthetic polypeptide; note = VH of XENP019291

SEQ ID NO: 3731 - protein, 5 aa, synthetic construct
  source 1..5: note = Description of Artificial Sequence: Synthetic peptide; note = XENP019291 vhCDR1
SYTMH

SEQ ID NO: 3732 - protein, 17 aa, synthetic construct
  source 1..17: note = Description of Artificial Sequence: Synthetic peptide; note = XENP019291 vhCDR2
FISYDGNNKYYAKSVKG

SEQ ID NO: 3733 - protein, 9 aa, synthetic construct
  source 1..9: note = Description of Artificial Sequence: Synthetic peptide; note = XENP019291 vhCDR3
TGWLGPFDY

SEQ ID NO: 3734 - protein, 215 aa, synthetic construct; identical to SEQ ID NO: 2924
  source 1..215: note = Description of Artificial Sequence: Synthetic polypeptide; note = XENP019291 [CTLA-4]_H0.81_L0_Fab Light Chain

SEQ ID NO: 3735 - protein, 108 aa, synthetic construct; identical to SEQ ID NO: 23
  source 1..108: note = Description of Artificial Sequence: Synthetic polypeptide; note = VL of XENP019291

SEQ ID NO: 3736 - protein, 12 aa, synthetic construct
  source 1..12: note = Description of Artificial Sequence: Synthetic peptide; note = XENP019291 vlCDR1
RASQSVGSSYLA

SEQ ID NO: 3737 - protein, 7 aa, synthetic construct
  source 1..7: note = Description of Artificial Sequence: Synthetic peptide; note = XENP019291 vlCDR2
GAFSRAT

SEQ ID NO: 3738 - protein, 9 aa, synthetic construct
  source 1..9: note = Description of Artificial Sequence: Synthetic peptide; note = XENP019291 vlCDR3
QQYGSSPWT

SEQ ID NO: 3739 - protein, 221 aa, synthetic construct
  source 1..221: note = Description of Artificial Sequence: Synthetic polypeptide; note = XENP019292 [CTLA-4]_H0.82_L0_Fab Heavy Chain
QVQLVESGGGVVQPGRSLRLSCAASGFTFSSYTMHWVRQAPGKGLEWVTFISYDGNNKYYADSVKDRFTISRDNSKNTLYLQMNSLRAEDTAIYYCARTGWLGPFDYWGQGTLVTVSSASTKGPSVFPLAPSSKSTSGGTAALGCLVKDYFPEPVTVSWNSGALTSGVHTFPAVLQSSGLYSLSSVVTVPSSSLGTQTYICNVNHKPSNTKVDKKVEPKSC

SEQ ID NO: 3740 - protein, 118 aa, synthetic construct; identical to SEQ ID NO: 922
  source 1..118: note = Description of Artificial Sequence: Synthetic polypeptide; note = VH of XENP019292

SEQ ID NO: 3741 - protein, 5 aa, synthetic construct
  source 1..5: note = Description of Artificial Sequence: Synthetic peptide; note = XENP019292 vhCDR1
SYTMH

SEQ ID NO: 3742 - protein, 17 aa, synthetic construct
  source 1..17: note = Description of Artificial Sequence: Synthetic peptide; note = XENP019292 vhCDR2
FISYDGNNKYYADSVKD

SEQ ID NO: 3743 - protein, 9 aa, synthetic construct
  source 1..9: note = Description of Artificial Sequence: Synthetic peptide; note = XENP019292 vhCDR3
TGWLGPFDY

SEQ ID NO: 3744 - protein, 215 aa, synthetic construct; identical to SEQ ID NO: 2924
  source 1..215: note = Description of Artificial Sequence: Synthetic polypeptide; note = XENP019292 [CTLA-4]_H0.82_L0_Fab Light Chain

SEQ ID NO: 3745 - protein, 108 aa, synthetic construct; identical to SEQ ID NO: 23
  source 1..108: note = Description of Artificial Sequence: Synthetic polypeptide; note = VL of XENP019292

SEQ ID NO: 3746 - protein, 12 aa, synthetic construct
  source 1..12: note = Description of Artificial Sequence: Synthetic peptide; note = XENP019292 vlCDR1
RASQSVGSSYLA

SEQ ID NO: 3747 - protein, 7 aa, synthetic construct
  source 1..7: note = Description of Artificial Sequence: Synthetic peptide; note = XENP019292 vlCDR2
GAFSRAT

SEQ ID NO: 3748 - protein, 9 aa, synthetic construct
  source 1..9: note = Description of Artificial Sequence: Synthetic peptide; note = XENP019292 vlCDR3
QQYGSSPWT

SEQ ID NO: 3749 - protein, 221 aa, synthetic construct
  source 1..221: note = Description of Artificial Sequence: Synthetic polypeptide; note = XENP019293 [CTLA-4]_H0.83_L0_Fab Heavy Chain
QVQLVESGGGVVQPGRSLRLSCAASGFTFSSYTMHWVRQAPGKGLEWVTFISYDGNNKYYADSVKERFTISRDNSKNTLYLQMNSLRAEDTAIYYCARTGWLGPFDYWGQGTLVTVSSASTKGPSVFPLAPSSKSTSGGTAALGCLVKDYFPEPVTVSWNSGALTSGVHTFPAVLQSSGLYSLSSVVTVPSSSLGTQTYICNVNHKPSNTKVDKKVEPKSC

SEQ ID NO: 3750 - protein, 118 aa, synthetic construct; identical to SEQ ID NO: 931
  source 1..118: note = Description of Artificial Sequence: Synthetic polypeptide; note = VH of XENP019293

SEQ ID NO: 3751 - protein, 5 aa, synthetic construct
  source 1..5: note = Description of Artificial Sequence: Synthetic peptide; note = XENP019293 vhCDR1
SYTMH

SEQ ID NO: 3752 - protein, 17 aa, synthetic construct
  source 1..17: note = Description of Artificial Sequence: Synthetic peptide; note = XENP019293 vhCDR2
FISYDGNNKYYADSVKE

SEQ ID NO: 3753 - protein, 9 aa, synthetic construct
  source 1..9: note = Description of Artificial Sequence: Synthetic peptide; note = XENP019293 vhCDR3
TGWLGPFDY

SEQ ID NO: 3754 - protein, 215 aa, synthetic construct; identical to SEQ ID NO: 2924
  source 1..215: note = Description of Artificial Sequence: Synthetic polypeptide; note = XENP019293 [CTLA-4]_H0.83_L0_Fab Light Chain

SEQ ID NO: 3755 - protein, 108 aa, synthetic construct; identical to SEQ ID NO: 23
  source 1..108: note = Description of Artificial Sequence: Synthetic polypeptide; note = VL of XENP019293

SEQ ID NO: 3756 - protein, 12 aa, synthetic construct
  source 1..12: note = Description of Artificial Sequence: Synthetic peptide; note = XENP019293 vlCDR1
RASQSVGSSYLA

SEQ ID NO: 3757 - protein, 7 aa, synthetic construct
  source 1..7: note = Description of Artificial Sequence: Synthetic peptide; note = XENP019293 vlCDR2
GAFSRAT

SEQ ID NO: 3758 - protein, 9 aa, synthetic construct
  source 1..9: note = Description of Artificial Sequence: Synthetic peptide; note = XENP019293 vlCDR3
QQYGSSPWT

SEQ ID NO: 3759 - protein, 221 aa, synthetic construct
  source 1..221: note = Description of Artificial Sequence: Synthetic polypeptide; note = XENP019294 [CTLA-4]_H0.84_L0_Fab Heavy Chain
QVQLVESGGGVVQPGRSLRLSCAASGFTFSSYTMHWVRQAPGKGLEWVTFISYDGNNKYYADSVKGQFTISRDNSKNTLYLQMNSLRAEDTAIYYCARTGWLGPFDYWGQGTLVTVSSASTKGPSVFPLAPSSKSTSGGTAALGCLVKDYFPEPVTVSWNSGALTSGVHTFPAVLQSSGLYSLSSVVTVPSSSLGTQTYICNVNHKPSNTKVDKKVEPKSC

SEQ ID NO: 3760 - protein, 118 aa, synthetic construct; identical to SEQ ID NO: 940
  source 1..118: note = Description of Artificial Sequence: Synthetic polypeptide; note = VH of XENP019294

SEQ ID NO: 3761 - protein, 5 aa, synthetic construct
  source 1..5: note = Description of Artificial Sequence: Synthetic peptide; note = XENP019294 vhCDR1
SYTMH

SEQ ID NO: 3762 - protein, 17 aa, synthetic construct
  source 1..17: note = Description of Artificial Sequence: Synthetic peptide; note = XENP019294 vhCDR2
FISYDGNNKYYADSVKG

SEQ ID NO: 3763 - protein, 9 aa, synthetic construct
  source 1..9: note = Description of Artificial Sequence: Synthetic peptide; note = XENP019294 vhCDR3
TGWLGPFDY

SEQ ID NO: 3764 - protein, 215 aa, synthetic construct; identical to SEQ ID NO: 2924
  source 1..215: note = Description of Artificial Sequence: Synthetic polypeptide; note = XENP019294 [CTLA-4]_H0.84_L0_Fab Light Chain

SEQ ID NO: 3765 - protein, 108 aa, synthetic construct; identical to SEQ ID NO: 23
  source 1..108: note = Description of Artificial Sequence: Synthetic polypeptide; note = VL of XENP019294

SEQ ID NO: 3766 - protein, 12 aa, synthetic construct
  source 1..12: note = Description of Artificial Sequence: Synthetic peptide; note = XENP019294 vlCDR1
RASQSVGSSYLA

SEQ ID NO: 3767 - protein, 7 aa, synthetic construct
  source 1..7: note = Description of Artificial Sequence: Synthetic peptide; note = XENP019294 vlCDR2
GAFSRAT

SEQ ID NO: 3768 - protein, 9 aa, synthetic construct
  source 1..9: note = Description of Artificial Sequence: Synthetic peptide; note = XENP019294 vlCDR3
QQYGSSPWT

SEQ ID NO: 3769 - protein, 221 aa, synthetic construct
  source 1..221: note = Description of Artificial Sequence: Synthetic polypeptide; note = XENP019295 [CTLA-4]_H0.85_L0_Fab Heavy Chain
QVQLVESGGGVVQPGRSLRLSCAASGFTFSSYTMHWVRQAPGKGLEWVTFISYDGNNKYYADSVKGRFTMSRDNSKNTLYLQMNSLRAEDTAIYYCARTGWLGPFDYWGQGTLVTVSSASTKGPSVFPLAPSSKSTSGGTAALGCLVKDYFPEPVTVSWNSGALTSGVHTFPAVLQSSGLYSLSSVVTVPSSSLGTQTYICNVNHKPSNTKVDKKVEPKSC

SEQ ID NO: 3770 - protein, 118 aa, synthetic construct; identical to SEQ ID NO: 949
  source 1..118: note = Description of Artificial Sequence: Synthetic polypeptide; note = VH of XENP019295

SEQ ID NO: 3771 - protein, 5 aa, synthetic construct
  source 1..5: note = Description of Artificial Sequence: Synthetic peptide; note = XENP019295 vhCDR1
SYTMH

SEQ ID NO: 3772 - protein, 17 aa, synthetic construct
  source 1..17: note = Description of Artificial Sequence: Synthetic peptide; note = XENP019295 vhCDR2
FISYDGNNKYYADSVKG

SEQ ID NO: 3773 - protein, 9 aa, synthetic construct
  source 1..9: note = Description of Artificial Sequence: Synthetic peptide; note = XENP019295 vhCDR3
TGWLGPFDY

SEQ ID NO: 3774 - protein, 215 aa, synthetic construct; identical to SEQ ID NO: 2924
  source 1..215: note = Description of Artificial Sequence: Synthetic polypeptide; note = XENP019295 [CTLA-4]_H0.85_L0_Fab Light Chain

SEQ ID NO: 3775 - protein, 108 aa, synthetic construct; identical to SEQ ID NO: 23
  source 1..108: note = Description of Artificial Sequence: Synthetic polypeptide; note = VL of XENP019295

SEQ ID NO: 3776 - protein, 12 aa, synthetic construct
  source 1..12: note = Description of Artificial Sequence: Synthetic peptide; note = XENP019295 vlCDR1
RASQSVGSSYLA

SEQ ID NO: 3777 - protein, 7 aa, synthetic construct
  source 1..7: note = Description of Artificial Sequence: Synthetic peptide; note = XENP019295 vlCDR2
GAFSRAT

SEQ ID NO: 3778 - protein, 9 aa, synthetic construct
  source 1..9: note = Description of Artificial Sequence: Synthetic peptide; note = XENP019295 vlCDR3
QQYGSSPWT

SEQ ID NO: 3779 - protein, 221 aa, synthetic construct
  source 1..221: note = Description of Artificial Sequence: Synthetic polypeptide; note = XENP019296 [CTLA-4]_H0.86_L0_Fab Heavy Chain
QVQLVESGGGVVQPGRSLRLSCAASGFTFSSYTMHWVRQAPGKGLEWVTFISYDGNNKYYADSVKGRFTVSRDNSKNTLYLQMNSLRAEDTAIYYCARTGWLGPFDYWGQGTLVTVSSASTKGPSVFPLAPSSKSTSGGTAALGCLVKDYFPEPVTVSWNSGALTSGVHTFPAVLQSSGLYSLSSVVTVPSSSLGTQTYICNVNHKPSNTKVDKKVEPKSC

SEQ ID NO: 3780 - protein, 118 aa, synthetic construct; identical to SEQ ID NO: 958
  source 1..118: note = Description of Artificial Sequence: Synthetic polypeptide; note = VH of XENP019296

SEQ ID NO: 3781 - protein, 5 aa, synthetic construct
  source 1..5: note = Description of Artificial Sequence: Synthetic peptide; note = XENP019296 vhCDR1
SYTMH

SEQ ID NO: 3782 - protein, 17 aa, synthetic construct
  source 1..17: note = Description of Artificial Sequence: Synthetic peptide; note = XENP019296 vhCDR2
FISYDGNNKYYADSVKG

SEQ ID NO: 3783 - protein, 9 aa, synthetic construct
  source 1..9: note = Description of Artificial Sequence: Synthetic peptide; note = XENP019296 vhCDR3
TGWLGPFDY

SEQ ID NO: 3784 - protein, 215 aa, synthetic construct; identical to SEQ ID NO: 2924
  source 1..215: note = Description of Artificial Sequence: Synthetic polypeptide; note = XENP019296 [CTLA-4]_H0.86_L0_Fab Light Chain

SEQ ID NO: 3785 - protein, 108 aa, synthetic construct; identical to SEQ ID NO: 23
  source 1..108: note = Description of Artificial Sequence: Synthetic polypeptide; note = VL of XENP019296

SEQ ID NO: 3786 - protein, 12 aa, synthetic construct
  source 1..12: note = Description of Artificial Sequence: Synthetic peptide; note = XENP019296 vlCDR1
RASQSVGSSYLA

SEQ ID NO: 3787 - protein, 7 aa, synthetic construct
  source 1..7: note = Description of Artificial Sequence: Synthetic peptide; note = XENP019296 vlCDR2
GAFSRAT

SEQ ID NO: 3788 - protein, 9 aa, synthetic construct
  source 1..9: note = Description of Artificial Sequence: Synthetic peptide; note = XENP019296 vlCDR3
QQYGSSPWT

SEQ ID NO: 3789 - protein, 221 aa, synthetic construct
  source 1..221: note = Description of Artificial Sequence: Synthetic polypeptide; note = XENP019301 [CTLA-4]_H0.87_L0_Fab Heavy Chain
QVQLVESGGGVVQPGRSLRLSCAASGFTFSSYTMHWVRQAPGKGLEWVTFISYDGNNKYYADSVKGRFTISEDNSKNTLYLQMNSLRAEDTAIYYCARTGWLGPFDYWGQGTLVTVSSASTKGPSVFPLAPSSKSTSGGTAALGCLVKDYFPEPVTVSWNSGALTSGVHTFPAVLQSSGLYSLSSVVTVPSSSLGTQTYICNVNHKPSNTKVDKKVEPKSC

SEQ ID NO: 3790 - protein, 118 aa, synthetic construct; identical to SEQ ID NO: 967
  source 1..118: note = Description of Artificial Sequence: Synthetic polypeptide; note = VH of XENP019301

SEQ ID NO: 3791 - protein, 5 aa, synthetic construct
  source 1..5: note = Description of Artificial Sequence: Synthetic peptide; note = XENP019301 vhCDR1
SYTMH

SEQ ID NO: 3792 - protein, 17 aa, synthetic construct
  source 1..17: note = Description of Artificial Sequence: Synthetic peptide; note = XENP019301 vhCDR2
FISYDGNNKYYADSVKG

SEQ ID NO: 3793 - protein, 9 aa, synthetic construct
  source 1..9: note = Description of Artificial Sequence: Synthetic peptide; note = XENP019301 vhCDR3
TGWLGPFDY

SEQ ID NO: 3794 - protein, 215 aa, synthetic construct; identical to SEQ ID NO: 2924
  source 1..215: note = Description of Artificial Sequence: Synthetic polypeptide; note = XENP019301 [CTLA-4]_H0.87_L0_Fab Light Chain

SEQ ID NO: 3795 - protein, 108 aa, synthetic construct; identical to SEQ ID NO: 23
  source 1..108: note = Description of Artificial Sequence: Synthetic polypeptide; note = VL of XENP019301

SEQ ID NO: 3796 - protein, 12 aa, synthetic construct
  source 1..12: note = Description of Artificial Sequence: Synthetic peptide; note = XENP019301 vlCDR1
RASQSVGSSYLA

SEQ ID NO: 3797 - protein, 7 aa, synthetic construct
  source 1..7: note = Description of Artificial Sequence: Synthetic peptide; note = XENP019301 vlCDR2
GAFSRAT

SEQ ID NO: 3798 - protein, 9 aa, synthetic construct
  source 1..9: note = Description of Artificial Sequence: Synthetic peptide; note = XENP019301 vlCDR3
QQYGSSPWT

SEQ ID NO: 3799 - protein, 221 aa, synthetic construct
  source 1..221: note = Description of Artificial Sequence: Synthetic polypeptide; note = XENP019302 [CTLA-4]_H0.88_L0_Fab Heavy Chain
QVQLVESGGGVVQPGRSLRLSCAASGFTFSSYTMHWVRQAPGKGLEWVTFISYDGNNKYYADSVKGRFTISRENSKNTLYLQMNSLRAEDTAIYYCARTGWLGPFDYWGQGTLVTVSSASTKGPSVFPLAPSSKSTSGGTAALGCLVKDYFPEPVTVSWNSGALTSGVHTFPAVLQSSGLYSLSSVVTVPSSSLGTQTYICNVNHKPSNTKVDKKVEPKSC

SEQ ID NO: 3800 - protein, 118 aa, synthetic construct; identical to SEQ ID NO: 976
  source 1..118: note = Description of Artificial Sequence: Synthetic polypeptide; note = VH of XENP019302

SEQ ID NO: 3801 - protein, 5 aa, synthetic construct
  source 1..5: note = Description of Artificial Sequence: Synthetic peptide; note = XENP019302 vhCDR1
SYTMH

SEQ ID NO: 3802 - protein, 17 aa, synthetic construct
  source 1..17: note = Description of Artificial Sequence: Synthetic peptide; note = XENP019302 vhCDR2
FISYDGNNKYYADSVKG

SEQ ID NO: 3803 - protein, 9 aa, synthetic construct
  source 1..9: note = Description of Artificial Sequence: Synthetic peptide; note = XENP019302 vhCDR3
TGWLGPFDY

SEQ ID NO: 3804 - protein, 215 aa, synthetic construct; identical to SEQ ID NO: 2924
  source 1..215: note = Description of Artificial Sequence: Synthetic polypeptide; note = XENP019302 [CTLA-4]_H0.88_L0_Fab Light Chain

SEQ ID NO: 3805 - protein, 108 aa, synthetic construct; identical to SEQ ID NO: 23
  source 1..108: note = Description of Artificial Sequence: Synthetic polypeptide; note = VL of XENP019302

SEQ ID NO: 3806 - protein, 12 aa, synthetic construct
  source 1..12: note = Description of Artificial Sequence: Synthetic peptide; note = XENP019302 vlCDR1
RASQSVGSSYLA

SEQ ID NO: 3807 - protein, 7 aa, synthetic construct
  source 1..7: note = Description of Artificial Sequence: Synthetic peptide; note = XENP019302 vlCDR2
GAFSRAT

SEQ ID NO: 3808 - protein, 9 aa, synthetic construct
  source 1..9: note = Description of Artificial Sequence: Synthetic peptide; note = XENP019302 vlCDR3
QQYGSSPWT

SEQ ID NO: 3809 - protein, 221 aa, synthetic construct
  source 1..221: note = Description of Artificial Sequence: Synthetic polypeptide; note = XENP019303 [CTLA-4]_H0.89_L0_Fab Heavy Chain
QVQLVESGGGVVQPGRSLRLSCAASGFTFSSYTMHWVRQAPGKGLEWVTFISYDGNNKYYADSVKGRFTISRDDSKNTLYLQMNSLRAEDTAIYYCARTGWLGPFDYWGQGTLVTVSSASTKGPSVFPLAPSSKSTSGGTAALGCLVKDYFPEPVTVSWNSGALTSGVHTFPAVLQSSGLYSLSSVVTVPSSSLGTQTYICNVNHKPSNTKVDKKVEPKSC

SEQ ID NO: 3810 - protein, 118 aa, synthetic construct; identical to SEQ ID NO: 985
  source 1..118: note = Description of Artificial Sequence: Synthetic polypeptide; note = VH of XENP019303

SEQ ID NO: 3811 - protein, 5 aa, synthetic construct
  source 1..5: note = Description of Artificial Sequence: Synthetic peptide; note = XENP019303 vhCDR1
SYTMH

SEQ ID NO: 3812 - protein, 17 aa, synthetic construct
  source 1..17: note = Description of Artificial Sequence: Synthetic peptide; note = XENP019303 vhCDR2
FISYDGNNKYYADSVKG

SEQ ID NO: 3813 - protein, 9 aa, synthetic construct
  source 1..9: note = Description of Artificial Sequence: Synthetic peptide; note = XENP019303 vhCDR3
TGWLGPFDY

SEQ ID NO: 3814 - protein, 215 aa, synthetic construct; identical to SEQ ID NO: 2924
  source 1..215: note = Description of Artificial Sequence: Synthetic polypeptide; note = XENP019303 [CTLA-4]_H0.89_L0_Fab Light Chain

SEQ ID NO: 3815 - protein, 108 aa, synthetic construct; identical to SEQ ID NO: 23
  source 1..108: note = Description of Artificial Sequence: Synthetic polypeptide; note = VL of XENP019303

SEQ ID NO: 3816 - protein, 12 aa, synthetic construct
  source 1..12: note = Description of Artificial Sequence: Synthetic peptide; note = XENP019303 vlCDR1
RASQSVGSSYLA

SEQ ID NO: 3817 - protein, 7 aa, synthetic construct
  source 1..7: note = Description of Artificial Sequence: Synthetic peptide; note = XENP019303 vlCDR2
GAFSRAT

SEQ ID NO: 3818 - protein, 9 aa, synthetic construct
  source 1..9: note = Description of Artificial Sequence: Synthetic peptide; note = XENP019303 vlCDR3
QQYGSSPWT

SEQ ID NO: 3819 - protein, 221 aa, synthetic construct
  source 1..221: note = Description of Artificial Sequence: Synthetic polypeptide; note = XENP019304 [CTLA-4]_H0.90_L0_Fab Heavy Chain
QVQLVESGGGVVQPGRSLRLSCAASGFTFSSYTMHWVRQAPGKGLEWVTFISYDGNNKYYADSVKGRFTISRDNAKNTLYLQMNSLRAEDTAIYYCARTGWLGPFDYWGQGTLVTVSSASTKGPSVFPLAPSSKSTSGGTAALGCLVKDYFPEPVTVSWNSGALTSGVHTFPAVLQSSGLYSLSSVVTVPSSSLGTQTYICNVNHKPSNTKVDKKVEPKSC

SEQ ID NO: 3820 - protein, 118 aa, synthetic construct; identical to SEQ ID NO: 994
  source 1..118: note = Description of Artificial Sequence: Synthetic polypeptide; note = VH of XENP019304

SEQ ID NO: 3821 - protein, 5 aa, synthetic construct
  source 1..5: note = Description of Artificial Sequence: Synthetic peptide; note = XENP019304 vhCDR1
SYTMH

SEQ ID NO: 3822 - protein, 17 aa, synthetic construct
  source 1..17: note = Description of Artificial Sequence: Synthetic peptide; note = XENP019304 vhCDR2
FISYDGNNKYYADSVKG

SEQ ID NO: 3823 - protein, 9 aa, synthetic construct
  source 1..9: note = Description of Artificial Sequence: Synthetic peptide; note = XENP019304 vhCDR3
TGWLGPFDY

SEQ ID NO: 3824 - protein, 215 aa, synthetic construct; identical to SEQ ID NO: 2924
  source 1..215: note = Description of Artificial Sequence: Synthetic polypeptide; note = XENP019304 [CTLA-4]_H0.90_L0_Fab Light Chain

SEQ ID NO: 3825 - protein, 108 aa, synthetic construct; identical to SEQ ID NO: 23
  source 1..108: note = Description of Artificial Sequence: Synthetic polypeptide; note = VL of XENP019304

SEQ ID NO: 3826 - protein, 12 aa, synthetic construct
  source 1..12: note = Description of Artificial Sequence: Synthetic peptide; note = XENP019304 vlCDR1
RASQSVGSSYLA

SEQ ID NO: 3827 - protein, 7 aa, synthetic construct
  source 1..7: note = Description of Artificial Sequence: Synthetic peptide; note = XENP019304 vlCDR2
GAFSRAT

SEQ ID NO: 3828 - protein, 9 aa, synthetic construct
  source 1..9: note = Description of Artificial Sequence: Synthetic peptide; note = XENP019304 vlCDR3
QQYGSSPWT

SEQ ID NO: 3829 - protein, 221 aa, synthetic construct
  source 1..221: note = Description of Artificial Sequence: Synthetic polypeptide; note = XENP019305 [CTLA-4]_H0.91_L0_Fab Heavy Chain
QVQLVESGGGVVQPGRSLRLSCAASGFTFSSYTMHWVRQAPGKGLEWVTFISYDGNNKYYADSVKGRFTISRDNSRNTLYLQMNSLRAEDTAIYYCARTGWLGPFDYWGQGTLVTVSSASTKGPSVFPLAPSSKSTSGGTAALGCLVKDYFPEPVTVSWNSGALTSGVHTFPAVLQSSGLYSLSSVVTVPSSSLGTQTYICNVNHKPSNTKVDKKVEPKSC

SEQ ID NO: 3830 - protein, 118 aa, synthetic construct; identical to SEQ ID NO: 1003
  source 1..118: note = Description of Artificial Sequence: Synthetic polypeptide; note = VH of XENP019305

SEQ ID NO: 3831 - protein, 5 aa, synthetic construct
  source 1..5: note = Description of Artificial Sequence: Synthetic peptide; note = XENP019305 vhCDR1
SYTMH

SEQ ID NO: 3832 - protein, 17 aa, synthetic construct
  source 1..17: note = Description of Artificial Sequence: Synthetic peptide; note = XENP019305 vhCDR2
FISYDGNNKYYADSVKG

SEQ ID NO: 3833 - protein, 9 aa, synthetic construct
  source 1..9: note = Description of Artificial Sequence: Synthetic peptide; note = XENP019305 vhCDR3
TGWLGPFDY

SEQ ID NO: 3834 - protein, 215 aa, synthetic construct; identical to SEQ ID NO: 2924
  source 1..215: note = Description of Artificial Sequence: Synthetic polypeptide; note = XENP019305 [CTLA-4]_H0.91_L0_Fab Light Chain

SEQ ID NO: 3835 - protein, 108 aa, synthetic construct; identical to SEQ ID NO: 23
  source 1..108: note = Description of Artificial Sequence: Synthetic polypeptide; note = VL of XENP019305

SEQ ID NO: 3836 - protein, 12 aa, synthetic construct
  source 1..12: note = Description of Artificial Sequence: Synthetic peptide; note = XENP019305 vlCDR1
RASQSVGSSYLA

SEQ ID NO: 3837 - protein, 7 aa, synthetic construct
  source 1..7: note = Description of Artificial Sequence: Synthetic peptide; note = XENP019305 vlCDR2
GAFSRAT

SEQ ID NO: 3838 - protein, 9 aa, synthetic construct
  source 1..9: note = Description of Artificial Sequence: Synthetic peptide; note = XENP019305 vlCDR3
QQYGSSPWT

SEQ ID NO: 3839 - protein, 221 aa, synthetic construct
  source 1..221: note = Description of Artificial Sequence: Synthetic polypeptide; note = XENP019306 [CTLA-4]_H0.92_L0_Fab Heavy Chain
QVQLVESGGGVVQPGRSLRLSCAASGFTFSSYTMHWVRQAPGKGLEWVTFISYDGNNKYYADSVKGRFTISRDNSKNSLYLQMNSLRAEDTAIYYCARTGWLGPFDYWGQGTLVTVSSASTKGPSVFPLAPSSKSTSGGTAALGCLVKDYFPEPVTVSWNSGALTSGVHTFPAVLQSSGLYSLSSVVTVPSSSLGTQTYICNVNHKPSNTKVDKKVEPKSC

SEQ ID NO: 3840 - protein, 118 aa, synthetic construct; identical to SEQ ID NO: 1012
  source 1..118: note = Description of Artificial Sequence: Synthetic polypeptide; note = VH of XENP019306

SEQ ID NO: 3841 - protein, 5 aa, synthetic construct
  source 1..5: note = Description of Artificial Sequence: Synthetic peptide; note = XENP019306 vhCDR1
SYTMH

SEQ ID NO: 3842 - protein, 17 aa, synthetic construct
  source 1..17: note = Description of Artificial Sequence: Synthetic peptide; note = XENP019306 vhCDR2
FISYDGNNKYYADSVKG

SEQ ID NO: 3843 - protein, 9 aa, synthetic construct
  source 1..9: note = Description of Artificial Sequence: Synthetic peptide; note = XENP019306 vhCDR3
TGWLGPFDY

SEQ ID NO: 3844 - protein, 215 aa, synthetic construct; identical to SEQ ID NO: 2924
  source 1..215: note = Description of Artificial Sequence: Synthetic polypeptide; note = XENP019306 [CTLA-4]_H0.92_L0_Fab Light Chain

SEQ ID NO: 3845 - protein, 108 aa, synthetic construct; identical to SEQ ID NO: 23
  source 1..108: note = Description of Artificial Sequence: Synthetic polypeptide; note = VL of XENP019306

SEQ ID NO: 3846 - protein, 12 aa, synthetic construct
  source 1..12: note = Description of Artificial Sequence: Synthetic peptide; note = XENP019306 vlCDR1
RASQSVGSSYLA

SEQ ID NO: 3847 - protein, 7 aa, synthetic construct
  source 1..7: note = Description of Artificial Sequence: Synthetic peptide; note = XENP019306 vlCDR2
GAFSRAT

SEQ ID NO: 3848 - protein, 9 aa, synthetic construct
  source 1..9: note = Description of Artificial Sequence: Synthetic peptide; note = XENP019306 vlCDR3
QQYGSSPWT

SEQ ID NO: 3849 - protein, 221 aa, synthetic construct
  source 1..221: note = Description of Artificial Sequence: Synthetic polypeptide; note = XENP019307 [CTLA-4]_H0.93_L0_Fab Heavy Chain
QVQLVESGGGVVQPGRSLRLSCAASGFTFSSYTMHWVRQAPGKGLEWVTFISYDGNNKYYADSVKGRFTISRDNSKNQLYLQMNSLRAEDTAIYYCARTGWLGPFDYWGQGTLVTVSSASTKGPSVFPLAPSSKSTSGGTAALGCLVKDYFPEPVTVSWNSGALTSGVHTFPAVLQSSGLYSLSSVVTVPSSSLGTQTYICNVNHKPSNTKVDKKVEPKSC

SEQ ID NO: 3850 - protein, 118 aa, synthetic construct; identical to SEQ ID NO: 1021
  source 1..118: note = Description of Artificial Sequence: Synthetic polypeptide; note = VH of XENP019307

SEQ ID NO: 3851 - protein, 5 aa, synthetic construct
  source 1..5: note = Description of Artificial Sequence: Synthetic peptide; note = XENP019307 vhCDR1
SYTMH

SEQ ID NO: 3852 - protein, 17 aa, synthetic construct
  source 1..17: note = Description of Artificial Sequence: Synthetic peptide; note = XENP019307 vhCDR2
FISYDGNNKYYADSVKG

SEQ ID NO: 3853 - protein, 9 aa, synthetic construct
  source 1..9: note = Description of Artificial Sequence: Synthetic peptide; note = XENP019307 vhCDR3
TGWLGPFDY

SEQ ID NO: 3854 - protein, 215 aa, synthetic construct; identical to SEQ ID NO: 2924
  source 1..215: note = Description of Artificial Sequence: Synthetic polypeptide; note = XENP019307 [CTLA-4]_H0.93_L0_Fab Light Chain

SEQ ID NO: 3855 - protein, 108 aa, synthetic construct; identical to SEQ ID NO: 23
  source 1..108: note = Description of Artificial Sequence: Synthetic polypeptide; note = VL of XENP019307

SEQ ID NO: 3856 - protein, 12 aa, synthetic construct
  source 1..12: note = Description of Artificial Sequence: Synthetic peptide; note = XENP019307 vlCDR1
RASQSVGSSYLA

SEQ ID NO: 3857 - protein, 7 aa, synthetic construct
  source 1..7: note = Description of Artificial Sequence: Synthetic peptide; note = XENP019307 vlCDR2
GAFSRAT

SEQ ID NO: 3858 - protein, 9 aa, synthetic construct
  source 1..9: note = Description of Artificial Sequence: Synthetic peptide; note = XENP019307 vlCDR3
QQYGSSPWT

SEQ ID NO: 3859 - protein, 221 aa, synthetic construct
  source 1..221: note = Description of Artificial Sequence: Synthetic polypeptide; note = XENP019308 [CTLA-4]_H0.94_L0_Fab Heavy Chain
QVQLVESGGGVVQPGRSLRLSCAASGFTFSSYTMHWVRQAPGKGLEWVTFISYDGNNKYYADSVKGRFTISRDNSKNTLYLEMNSLRAEDTAIYYCARTGWLGPFDYWGQGTLVTVSSASTKGPSVFPLAPSSKSTSGGTAALGCLVKDYFPEPVTVSWNSGALTSGVHTFPAVLQSSGLYSLSSVVTVPSSSLGTQTYICNVNHKPSNTKVDKKVEPKSC

SEQ ID NO: 3860 - protein, 118 aa, synthetic construct; identical to SEQ ID NO: 1030
  source 1..118: note = Description of Artificial Sequence: Synthetic polypeptide; note = VH of XENP019308

SEQ ID NO: 3861 - protein, 5 aa, synthetic construct
  source 1..5: note = Description of Artificial Sequence: Synthetic peptide; note = XENP019308 vhCDR1
SYTMH

SEQ ID NO: 3862 - protein, 17 aa, synthetic construct
  source 1..17: note = Description of Artificial Sequence: Synthetic peptide; note = XENP019308 vhCDR2
FISYDGNNKYYADSVKG

SEQ ID NO: 3863 - protein, 9 aa, synthetic construct
  source 1..9: note = Description of Artificial Sequence: Synthetic peptide; note = XENP019308 vhCDR3
TGWLGPFDY

SEQ ID NO: 3864 - protein, 215 aa, synthetic construct; identical to SEQ ID NO: 2924
  source 1..215: note = Description of Artificial Sequence: Synthetic polypeptide; note = XENP019308 [CTLA-4]_H0.94_L0_Fab Light Chain

SEQ ID NO: 3865 - protein, 108 aa, synthetic construct; identical to SEQ ID NO: 23
  source 1..108: note = Description of Artificial Sequence: Synthetic polypeptide; note = VL of XENP019308

SEQ ID NO: 3866 - protein, 12 aa, synthetic construct
  source 1..12: note = Description of Artificial Sequence: Synthetic peptide; note = XENP019308 vlCDR1
RASQSVGSSYLA

SEQ ID NO: 3867 - protein, 7 aa, synthetic construct
  source 1..7: note = Description of Artificial Sequence: Synthetic peptide; note = XENP019308 vlCDR2
GAFSRAT

SEQ ID NO: 3868 - protein, 9 aa, synthetic construct
  source 1..9: note = Description of Artificial Sequence: Synthetic peptide; note = XENP019308 vlCDR3
QQYGSSPWT

SEQ ID NO: 3869 - protein, 221 aa, synthetic construct
  source 1..221: note = Description of Artificial Sequence: Synthetic polypeptide; note = XENP019309 [CTLA-4]_H0.95_L0_Fab Heavy Chain
QVQLVESGGGVVQPGRSLRLSCAASGFTFSSYTMHWVRQAPGKGLEWVTFISYDGNNKYYADSVKGRFTISRDNSKNTLYLQMDSLRAEDTAIYYCARTGWLGPFDYWGQGTLVTVSSASTKGPSVFPLAPSSKSTSGGTAALGCLVKDYFPEPVTVSWNSGALTSGVHTFPAVLQSSGLYSLSSVVTVPSSSLGTQTYICNVNHKPSNTKVDKKVEPKSC

SEQ ID NO: 3870 - protein, 118 aa, synthetic construct; identical to SEQ ID NO: 1039
  source 1..118: note = Description of Artificial Sequence: Synthetic polypeptide; note = VH of XENP019309

SEQ ID NO: 3871 - protein, 5 aa, synthetic construct
  source 1..5: note = Description of Artificial Sequence: Synthetic peptide; note = XENP019309 vhCDR1
SYTMH

SEQ ID NO: 3872 - protein, 17 aa, synthetic construct
  source 1..17: note = Description of Artificial Sequence: Synthetic peptide; note = XENP019309 vhCDR2
FISYDGNNKYYADSVKG

SEQ ID NO: 3873 - protein, 9 aa, synthetic construct
  source 1..9: note = Description of Artificial Sequence: Synthetic peptide; note = XENP019309 vhCDR3
TGWLGPFDY

SEQ ID NO: 3874 - protein, 215 aa, synthetic construct; identical to SEQ ID NO: 2924
  source 1..215: note = Description of Artificial Sequence: Synthetic polypeptide; note = XENP019309 [CTLA-4]_H0.95_L0_Fab Light Chain

SEQ ID NO: 3875 - protein, 108 aa, synthetic construct; identical to SEQ ID NO: 23
  source 1..108: note = Description of Artificial Sequence: Synthetic polypeptide; note = VL of XENP019309

SEQ ID NO: 3876 - protein, 12 aa, synthetic construct
  source 1..12: note = Description of Artificial Sequence: Synthetic peptide; note = XENP019309 vlCDR1
RASQSVGSSYLA

SEQ ID NO: 3877 - protein, 7 aa, synthetic construct
  source 1..7: note = Description of Artificial Sequence: Synthetic peptide; note = XENP019309 vlCDR2
GAFSRAT

SEQ ID NO: 3878 - protein, 9 aa, synthetic construct
  source 1..9: note = Description of Artificial Sequence: Synthetic peptide; note = XENP019309 vlCDR3
QQYGSSPWT

SEQ ID NO: 3879 - protein, 221 aa, synthetic construct
  source 1..221: note = Description of Artificial Sequence: Synthetic polypeptide; note = XENP019310 [CTLA-4]_H0.96_L0_Fab Heavy Chain
QVQLVESGGGVVQPGRSLRLSCAASGFTFSSYTMHWVRQAPGKGLEWVTFISYDGNNKYYADSVKGRFTISRDNSKNTLYLQMNDLRAEDTAIYYCARTGWLGPFDYWGQGTLVTVSSASTKGPSVFPLAPSSKSTSGGTAALGCLVKDYFPEPVTVSWNSGALTSGVHTFPAVLQSSGLYSLSSVVTVPSSSLGTQTYICNVNHKPSNTKVDKKVEPKSC

SEQ ID NO: 3880 - protein, 118 aa, synthetic construct; identical to SEQ ID NO: 1048
  source 1..118: note = Description of Artificial Sequence: Synthetic polypeptide; note = VH of XENP019310

SEQ ID NO: 3881 - protein, 5 aa, synthetic construct
  source 1..5: note = Description of Artificial Sequence: Synthetic peptide; note = XENP019310 vhCDR1
SYTMH

SEQ ID NO: 3882 - protein, 17 aa, synthetic construct
  source 1..17: note = Description of Artificial Sequence: Synthetic peptide; note = XENP019310 vhCDR2
FISYDGNNKYYADSVKG

SEQ ID NO: 3883 - protein, 9 aa, synthetic construct
  source 1..9: note = Description of Artificial Sequence: Synthetic peptide; note = XENP019310 vhCDR3
TGWLGPFDY

SEQ ID NO: 3884 - protein, 215 aa, synthetic construct; identical to SEQ ID NO: 2924
  source 1..215: note = Description of Artificial Sequence: Synthetic polypeptide; note = XENP019310 [CTLA-4]_H0.96_L0_Fab Light Chain

SEQ ID NO: 3885 - protein, 108 aa, synthetic construct; identical to SEQ ID NO: 23
  source 1..108: note = Description of Artificial Sequence: Synthetic polypeptide; note = VL of XENP019310

SEQ ID NO: 3886 - protein, 12 aa, synthetic construct
  source 1..12: note = Description of Artificial Sequence: Synthetic peptide; note = XENP019310 vlCDR1
RASQSVGSSYLA

SEQ ID NO: 3887 - protein, 7 aa, synthetic construct
  source 1..7: note = Description of Artificial Sequence: Synthetic peptide; note = XENP019310 vlCDR2
GAFSRAT

SEQ ID NO: 3888 - protein, 9 aa, synthetic construct
  source 1..9: note = Description of Artificial Sequence: Synthetic peptide; note = XENP019310 vlCDR3
QQYGSSPWT

SEQ ID NO: 3889 - protein, 221 aa, synthetic construct
  source 1..221: note = Description of Artificial Sequence: Synthetic polypeptide; note = XENP019311 [CTLA-4]_H0.97_L0_Fab Heavy Chain
QVQLVESGGGVVQPGRSLRLSCAASGFTFSSYTMHWVRQAPGKGLEWVTFISYDGNNKYYADSVKGRFTISRDNSKNTLYLQMNSLRTEDTAIYYCARTGWLGPFDYWGQGTLVTVSSASTKGPSVFPLAPSSKSTSGGTAALGCLVKDYFPEPVTVSWNSGALTSGVHTFPAVLQSSGLYSLSSVVTVPSSSLGTQTYICNVNHKPSNTKVDKKVEPKSC

SEQ ID NO: 3890 - protein, 118 aa, synthetic construct; identical to SEQ ID NO: 1057
  source 1..118: note = Description of Artificial Sequence: Synthetic polypeptide; note = VH of XENP019311

SEQ ID NO: 3891 - protein, 5 aa, synthetic construct
  source 1..5: note = Description of Artificial Sequence: Synthetic peptide; note = XENP019311 vhCDR1
SYTMH

SEQ ID NO: 3892 - protein, 17 aa, synthetic construct
  source 1..17: note = Description of Artificial Sequence: Synthetic peptide; note = XENP019311 vhCDR2
FISYDGNNKYYADSVKG

SEQ ID NO: 3893 - protein, 9 aa, synthetic construct
  source 1..9: note = Description of Artificial Sequence: Synthetic peptide; note = XENP019311 vhCDR3
TGWLGPFDY

SEQ ID NO: 3894 - protein, 215 aa, synthetic construct; identical to SEQ ID NO: 2924
  source 1..215: note = Description of Artificial Sequence: Synthetic polypeptide; note = XENP019311 [CTLA-4]_H0.97_L0_Fab Light Chain

SEQ ID NO: 3895 - protein, 108 aa, synthetic construct; identical to SEQ ID NO: 23
  source 1..108: note = Description of Artificial Sequence: Synthetic polypeptide; note = VL of XENP019311

SEQ ID NO: 3896 - protein, 12 aa, synthetic construct
  source 1..12: note = Description of Artificial Sequence: Synthetic peptide; note = XENP019311 vlCDR1
RASQSVGSSYLA

SEQ ID NO: 3897 - protein, 7 aa, synthetic construct
  source 1..7: note = Description of Artificial Sequence: Synthetic peptide; note = XENP019311 vlCDR2
GAFSRAT

SEQ ID NO: 3898 - protein, 9 aa, synthetic construct
  source 1..9: note = Description of Artificial Sequence: Synthetic peptide; note = XENP019311 vlCDR3
QQYGSSPWT

SEQ ID NO: 3899 - protein, 221 aa, synthetic construct
  source 1..221: note = Description of Artificial Sequence: Synthetic polypeptide; note = XENP019312 [CTLA-4]_H0.98_L0_Fab Heavy Chain
QVQLVESGGGVVQPGRSLRLSCAASGFTFSSYTMHWVRQAPGKGLEWVTFISYDGNNKYYADSVKGRFTISRDNSKNTLYLQMNSLRAEDTALYYCARTGWLGPFDYWGQGTLVTVSSASTKGPSVFPLAPSSKSTSGGTAALGCLVKDYFPEPVTVSWNSGALTSGVHTFPAVLQSSGLYSLSSVVTVPSSSLGTQTYICNVNHKPSNTKVDKKVEPKSC

SEQ ID NO: 3900 - protein, 118 aa, synthetic construct; identical to SEQ ID NO: 1066
  source 1..118: note = Description of Artificial Sequence: Synthetic polypeptide; note = VH of XENP019312

SEQ ID NO: 3901 - protein, 5 aa, synthetic construct
  source 1..5: note = Description of Artificial Sequence: Synthetic peptide; note = XENP019312 vhCDR1
SYTMH

SEQ ID NO: 3902 - protein, 17 aa, synthetic construct
  source 1..17: note = Description of Artificial Sequence: Synthetic peptide; note = XENP019312 vhCDR2
FISYDGNNKYYADSVKG

SEQ ID NO: 3903 - protein, 9 aa, synthetic construct
  source 1..9: note = Description of Artificial Sequence: Synthetic peptide; note = XENP019312 vhCDR3
TGWLGPFDY

SEQ ID NO: 3904 - protein, 215 aa, synthetic construct; identical to SEQ ID NO: 2924
  source 1..215: note = Description of Artificial Sequence: Synthetic polypeptide; note = XENP019312 [CTLA-4]_H0.98_L0_Fab Light Chain

SEQ ID NO: 3905 - protein, 108 aa, synthetic construct; identical to SEQ ID NO: 23
  source 1..108: note = Description of Artificial Sequence: Synthetic polypeptide; note = VL of XENP019312

SEQ ID NO: 3906 - protein, 12 aa, synthetic construct
  source 1..12: note = Description of Artificial Sequence: Synthetic peptide; note = XENP019312 vlCDR1
RASQSVGSSYLA

SEQ ID NO: 3907 - protein, 7 aa, synthetic construct
  source 1..7: note = Description of Artificial Sequence: Synthetic peptide; note = XENP019312 vlCDR2
GAFSRAT

SEQ ID NO: 3908 - protein, 9 aa, synthetic construct
  source 1..9: note = Description of Artificial Sequence: Synthetic peptide; note = XENP019312 vlCDR3
QQYGSSPWT

SEQ ID NO: 3909 - protein, 221 aa, synthetic construct
  source 1..221: note = Description of Artificial Sequence: Synthetic polypeptide; note = XENP019313 [CTLA-4]_H0.99_L0_Fab Heavy Chain
QVQLVESGGGVVQPGRSLRLSCAASGFTFSSYTMHWVRQAPGKGLEWVTFISYDGNNKYYADSVKGRFTISRDNSKNTLYLQMNSLRAEDTAVYYCARTGWLGPFDYWGQGTLVTVSSASTKGPSVFPLAPSSKSTSGGTAALGCLVKDYFPEPVTVSWNSGALTSGVHTFPAVLQSSGLYSLSSVVTVPSSSLGTQTYICNVNHKPSNTKVDKKVEPKSC

SEQ ID NO: 3910 - protein, 118 aa, synthetic construct; identical to SEQ ID NO: 1075
  source 1..118: note = Description of Artificial Sequence: Synthetic polypeptide; note = VH of XENP019313

SEQ ID NO: 3911 - protein, 5 aa, synthetic construct
  source 1..5: note = Description of Artificial Sequence: Synthetic peptide; note = XENP019313 vhCDR1
SYTMH

SEQ ID NO: 3912 - protein, 17 aa, synthetic construct
  source 1..17: note = Description of Artificial Sequence: Synthetic peptide; note = XENP019313 vhCDR2
FISYDGNNKYYADSVKG

SEQ ID NO: 3913 - protein, 9 aa, synthetic construct
  source 1..9: note = Description of Artificial Sequence: Synthetic peptide; note = XENP019313 vhCDR3
TGWLGPFDY

SEQ ID NO: 3914 - protein, 215 aa, synthetic construct; identical to SEQ ID NO: 2924
  source 1..215: note = Description of Artificial Sequence: Synthetic polypeptide; note = XENP019313 [CTLA-4]_H0.99_L0_Fab Light Chain

SEQ ID NO: 3915 - protein, 108 aa, synthetic construct; identical to SEQ ID NO: 23
  source 1..108: note = Description of Artificial Sequence: Synthetic polypeptide; note = VL of XENP019313

SEQ ID NO: 3916 - protein, 12 aa, synthetic construct
  source 1..12: note = Description of Artificial Sequence: Synthetic peptide; note = XENP019313 vlCDR1
RASQSVGSSYLA

SEQ ID NO: 3917 - protein, 7 aa, synthetic construct
  source 1..7: note = Description of Artificial Sequence: Synthetic peptide; note = XENP019313 vlCDR2
GAFSRAT

SEQ ID NO: 3918 - protein, 9 aa, synthetic construct
  source 1..9: note = Description of Artificial Sequence: Synthetic peptide; note = XENP019313 vlCDR3
QQYGSSPWT

SEQ ID NO: 3919 - protein, 221 aa, synthetic construct
  source 1..221: note = Description of Artificial Sequence: Synthetic polypeptide; note = XENP019314 [CTLA-4]_H0.100_L0_Fab Heavy Chain
QVQLVESGGGVVQPGRSLRLSCAASGFTFSSYTMHWVRQAPGKGLEWVTFISYDGNNKYYADSVKGRFTISRDNSKNTLYLQMNSLRAEDTAIYYCTRTGWLGPFDYWGQGTLVTVSSASTKGPSVFPLAPSSKSTSGGTAALGCLVKDYFPEPVTVSWNSGALTSGVHTFPAVLQSSGLYSLSSVVTVPSSSLGTQTYICNVNHKPSNTKVDKKVEPKSC

SEQ ID NO: 3920 - protein, 118 aa, synthetic construct; identical to SEQ ID NO: 1084
  source 1..118: note = Description of Artificial Sequence: Synthetic polypeptide; note = VH of XENP019314

SEQ ID NO: 3921 - protein, 5 aa, synthetic construct
  source 1..5: note = Description of Artificial Sequence: Synthetic peptide; note = XENP019314 vhCDR1
SYTMH

SEQ ID NO: 3922 - protein, 17 aa, synthetic construct
  source 1..17: note = Description of Artificial Sequence: Synthetic peptide; note = XENP019314 vhCDR2
FISYDGNNKYYADSVKG

SEQ ID NO: 3923 - protein, 9 aa, synthetic construct
  source 1..9: note = Description of Artificial Sequence: Synthetic peptide; note = XENP019314 vhCDR3
TGWLGPFDY

SEQ ID NO: 3924 - protein, 215 aa, synthetic construct; identical to SEQ ID NO: 2924
  source 1..215: note = Description of Artificial Sequence: Synthetic polypeptide; note = XENP019314 [CTLA-4]_H0.100_L0_Fab Light Chain

SEQ ID NO: 3925 - protein, 108 aa, synthetic construct; identical to SEQ ID NO: 23
  source 1..108: note = Description of Artificial Sequence: Synthetic polypeptide; note = VL of XENP019314

SEQ ID NO: 3926 - protein, 12 aa, synthetic construct
  source 1..12: note = Description of Artificial Sequence: Synthetic peptide; note = XENP019314 vlCDR1
RASQSVGSSYLA

SEQ ID NO: 3927 - protein, 7 aa, synthetic construct
  source 1..7: note = Description of Artificial Sequence: Synthetic peptide; note = XENP019314 vlCDR2
GAFSRAT

SEQ ID NO: 3928 - protein, 9 aa, synthetic construct
  source 1..9: note = Description of Artificial Sequence: Synthetic peptide; note = XENP019314 vlCDR3
QQYGSSPWT

SEQ ID NO: 3929 - protein, 221 aa, synthetic construct
  source 1..221: note = Description of Artificial Sequence: Synthetic polypeptide; note = XENP019315 [CTLA-4]_H0.101_L0_Fab Heavy Chain
QVQLVESGGGVVQPGRSLRLSCAASGFTFSSYTMHWVRQAPGKGLEWVTFISYDGNNKYYADSVKGRFTISRDNSKNTLYLQMNSLRAEDTAIYYCAKTGWLGPFDYWGQGTLVTVSSASTKGPSVFPLAPSSKSTSGGTAALGCLVKDYFPEPVTVSWNSGALTSGVHTFPAVLQSSGLYSLSSVVTVPSSSLGTQTYICNVNHKPSNTKVDKKVEPKSC

SEQ ID NO: 3930 - protein, 118 aa, synthetic construct; identical to SEQ ID NO: 1093
  source 1..118: note = Description of Artificial Sequence: Synthetic polypeptide; note = VH of XENP019315

SEQ ID NO: 3931 - protein, 5 aa, synthetic construct
  source 1..5: note = Description of Artificial Sequence: Synthetic peptide; note = XENP019315 vhCDR1
SYTMH

SEQ ID NO: 3932 - protein, 17 aa, synthetic construct
  source 1..17: note = Description of Artificial Sequence: Synthetic peptide; note = XENP019315 vhCDR2
FISYDGNNKYYADSVKG

SEQ ID NO: 3933 - protein, 9 aa, synthetic construct
  source 1..9: note = Description of Artificial Sequence: Synthetic peptide; note = XENP019315 vhCDR3
TGWLGPFDY

SEQ ID NO: 3934 - protein, 215 aa, synthetic construct; identical to SEQ ID NO: 2924
  source 1..215: note = Description of Artificial Sequence: Synthetic polypeptide; note = XENP019315 [CTLA-4]_H0.101_L0_Fab Light Chain

SEQ ID NO: 3935 - protein, 108 aa, synthetic construct; identical to SEQ ID NO: 23
  source 1..108: note = Description of Artificial Sequence: Synthetic polypeptide; note = VL of XENP019315

SEQ ID NO: 3936 - protein, 12 aa, synthetic construct
  source 1..12: note = Description of Artificial Sequence: Synthetic peptide; note = XENP019315 vlCDR1
RASQSVGSSYLA

SEQ ID NO: 3937 - protein, 7 aa, synthetic construct
  source 1..7: note = Description of Artificial Sequence: Synthetic peptide; note = XENP019315 vlCDR2
GAFSRAT

SEQ ID NO: 3938 - protein, 9 aa, synthetic construct
  source 1..9: note = Description of Artificial Sequence: Synthetic peptide; note = XENP019315 vlCDR3
QQYGSSPWT

SEQ ID NO: 3939 - protein, 221 aa, synthetic construct
  source 1..221: note = Description of Artificial Sequence: Synthetic polypeptide; note = XENP019316 [CTLA-4]_H0.102_L0_Fab Heavy Chain
QVQLVESGGGVVQPGRSLRLSCAASGFTFSSYTMHWVRQAPGKGLEWVTFISYDGNNKYYADSVKGRFTISRDNSKNTLYLQMNSLRAEDTAIYYCARAGWLGPFDYWGQGTLVTVSSASTKGPSVFPLAPSSKSTSGGTAALGCLVKDYFPEPVTVSWNSGALTSGVHTFPAVLQSSGLYSLSSVVTVPSSSLGTQTYICNVNHKPSNTKVDKKVEPKSC

SEQ ID NO: 3940 - protein, 118 aa, synthetic construct; identical to SEQ ID NO: 1102
  source 1..118: note = Description of Artificial Sequence: Synthetic polypeptide; note = VH of XENP019316

SEQ ID NO: 3941 - protein, 5 aa, synthetic construct
  source 1..5: note = Description of Artificial Sequence: Synthetic peptide; note = XENP019316 vhCDR1
SYTMH

SEQ ID NO: 3942 - protein, 17 aa, synthetic construct
  source 1..17: note = Description of Artificial Sequence: Synthetic peptide; note = XENP019316 vhCDR2
FISYDGNNKYYADSVKG

SEQ ID NO: 3943 - protein, 9 aa, synthetic construct
  source 1..9: note = Description of Artificial Sequence: Synthetic peptide; note = XENP019316 vhCDR3
AGWLGPFDY

SEQ ID NO: 3944 - protein, 215 aa, synthetic construct; identical to SEQ ID NO: 2924
  source 1..215: note = Description of Artificial Sequence: Synthetic polypeptide; note = XENP019316 [CTLA-4]_H0.102_L0_Fab Light Chain

SEQ ID NO: 3945 - protein, 108 aa, synthetic construct; identical to SEQ ID NO: 23
  source 1..108: note = Description of Artificial Sequence: Synthetic polypeptide; note = VL of XENP019316

SEQ ID NO: 3946 - protein, 12 aa, synthetic construct
  source 1..12: note = Description of Artificial Sequence: Synthetic peptide; note = XENP019316 vlCDR1
RASQSVGSSYLA

SEQ ID NO: 3947 - protein, 7 aa, synthetic construct
  source 1..7: note = Description of Artificial Sequence: Synthetic peptide; note = XENP019316 vlCDR2
GAFSRAT

SEQ ID NO: 3948 - protein, 9 aa, synthetic construct
  source 1..9: note = Description of Artificial Sequence: Synthetic peptide; note = XENP019316 vlCDR3
QQYGSSPWT

SEQ ID NO: 3949 - protein, 221 aa, synthetic construct
  source 1..221: note = Description of Artificial Sequence: Synthetic polypeptide; note = XENP019317 [CTLA-4]_H0.103_L0_Fab Heavy Chain
QVQLVESGGGVVQPGRSLRLSCAASGFTFSSYTMHWVRQAPGKGLEWVTFISYDGNNKYYADSVKGRFTISRDNSKNTLYLQMNSLRAEDTAIYYCARGGWLGPFDYWGQGTLVTVSSASTKGPSVFPLAPSSKSTSGGTAALGCLVKDYFPEPVTVSWNSGALTSGVHTFPAVLQSSGLYSLSSVVTVPSSSLGTQTYICNVNHKPSNTKVDKKVEPKSC

SEQ ID NO: 3950 - protein, 118 aa, synthetic construct; identical to SEQ ID NO: 1111
  source 1..118: note = Description of Artificial Sequence: Synthetic polypeptide; note = VH of XENP019317

SEQ ID NO: 3951 - protein, 5 aa, synthetic construct
  source 1..5: note = Description of Artificial Sequence: Synthetic peptide; note = XENP019317 vhCDR1
SYTMH

SEQ ID NO: 3952 - protein, 17 aa, synthetic construct
  source 1..17: note = Description of Artificial Sequence: Synthetic peptide; note = XENP019317 vhCDR2
FISYDGNNKYYADSVKG

SEQ ID NO: 3953 - protein, 9 aa, synthetic construct
  source 1..9: note = Description of Artificial Sequence: Synthetic peptide; note = XENP019317 vhCDR3
GGWLGPFDY

SEQ ID NO: 3954 - protein, 215 aa, synthetic construct; identical to SEQ ID NO: 2924
  source 1..215: note = Description of Artificial Sequence: Synthetic polypeptide; note = XENP019317 [CTLA-4]_H0.103_L0_Fab Light Chain

SEQ ID NO: 3955 - protein, 108 aa, synthetic construct; identical to SEQ ID NO: 23
  source 1..108: note = Description of Artificial Sequence: Synthetic polypeptide; note = VL of XENP019317

SEQ ID NO: 3956 - protein, 12 aa, synthetic construct
  source 1..12: note = Description of Artificial Sequence: Synthetic peptide; note = XENP019317 vlCDR1
RASQSVGSSYLA

SEQ ID NO: 3957 - protein, 7 aa, synthetic construct
  source 1..7: note = Description of Artificial Sequence: Synthetic peptide; note = XENP019317 vlCDR2
GAFSRAT

SEQ ID NO: 3958 - protein, 9 aa, synthetic construct
  source 1..9: note = Description of Artificial Sequence: Synthetic peptide; note = XENP019317 vlCDR3
QQYGSSPWT

SEQ ID NO: 3959 - protein, 221 aa, synthetic construct
  source 1..221: note = Description of Artificial Sequence: Synthetic polypeptide; note = XENP019318 [CTLA-4]_H0.104_L0_Fab Heavy Chain
QVQLVESGGGVVQPGRSLRLSCAASGFTFSSYTMHWVRQAPGKGLEWVTFISYDGNNKYYADSVKGRFTISRDNSKNTLYLQMNSLRAEDTAIYYCARDGWLGPFDYWGQGTLVTVSSASTKGPSVFPLAPSSKSTSGGTAALGCLVKDYFPEPVTVSWNSGALTSGVHTFPAVLQSSGLYSLSSVVTVPSSSLGTQTYICNVNHKPSNTKVDKKVEPKSC

SEQ ID NO: 3960 - protein, 118 aa, synthetic construct; identical to SEQ ID NO: 1120
  source 1..118: note = Description of Artificial Sequence: Synthetic polypeptide; note = VH of XENP019318

SEQ ID NO: 3961 - protein, 5 aa, synthetic construct
  source 1..5: note = Description of Artificial Sequence: Synthetic peptide; note = XENP019318 vhCDR1
SYTMH

SEQ ID NO: 3962 - protein, 17 aa, synthetic construct
  source 1..17: note = Description of Artificial Sequence: Synthetic peptide; note = XENP019318 vhCDR2
FISYDGNNKYYADSVKG

SEQ ID NO: 3963 - protein, 9 aa, synthetic construct
  source 1..9: note = Description of Artificial Sequence: Synthetic peptide; note = XENP019318 vhCDR3
DGWLGPFDY

SEQ ID NO: 3964 - protein, 215 aa, synthetic construct; identical to SEQ ID NO: 2924
  source 1..215: note = Description of Artificial Sequence: Synthetic polypeptide; note = XENP019318 [CTLA-4]_H0.104_L0_Fab Light Chain

SEQ ID NO: 3965 - protein, 108 aa, synthetic construct; identical to SEQ ID NO: 23
  source 1..108: note = Description of Artificial Sequence: Synthetic polypeptide; note = VL of XENP019318

SEQ ID NO: 3966 - protein, 12 aa, synthetic construct
  source 1..12: note = Description of Artificial Sequence: Synthetic peptide; note = XENP019318 vlCDR1
RASQSVGSSYLA

SEQ ID NO: 3967 - protein, 7 aa, synthetic construct
  source 1..7: note = Description of Artificial Sequence: Synthetic peptide; note = XENP019318 vlCDR2
GAFSRAT

SEQ ID NO: 3968 - protein, 9 aa, synthetic construct
  source 1..9: note = Description of Artificial Sequence: Synthetic peptide; note = XENP019318 vlCDR3
QQYGSSPWT

SEQ ID NO: 3969 - protein, 221 aa, synthetic construct
  source 1..221: note = Description of Artificial Sequence: Synthetic polypeptide; note = XENP019319 [CTLA-4]_H0.105_L0_Fab Heavy Chain
QVQLVESGGGVVQPGRSLRLSCAASGFTFSSYTMHWVRQAPGKGLEWVTFISYDGNNKYYADSVKGRFTISRDNSKNTLYLQMNSLRAEDTAIYYCARSGWLGPFDYWGQGTLVTVSSASTKGPSVFPLAPSSKSTSGGTAALGCLVKDYFPEPVTVSWNSGALTSGVHTFPAVLQSSGLYSLSSVVTVPSSSLGTQTYICNVNHKPSNTKVDKKVEPKSC

SEQ ID NO: 3970 - protein, 118 aa, synthetic construct; identical to SEQ ID NO: 1129
  source 1..118: note = Description of Artificial Sequence: Synthetic polypeptide; note = VH of XENP019319

SEQ ID NO: 3971 - protein, 5 aa, synthetic construct
  source 1..5: note = Description of Artificial Sequence: Synthetic peptide; note = XENP019319 vhCDR1
SYTMH

SEQ ID NO: 3972 - protein, 17 aa, synthetic construct
  source 1..17: note = Description of Artificial Sequence: Synthetic peptide; note = XENP019319 vhCDR2
FISYDGNNKYYADSVKG

SEQ ID NO: 3973 - protein, 9 aa, synthetic construct
  source 1..9: note = Description of Artificial Sequence: Synthetic peptide; note = XENP019319 vhCDR3
SGWLGPFDY

SEQ ID NO: 3974 - protein, 215 aa, synthetic construct; identical to SEQ ID NO: 2924
  source 1..215: note = Description of Artificial Sequence: Synthetic polypeptide; note = XENP019319 [CTLA-4]_H0.105_L0_Fab Light Chain

SEQ ID NO: 3975 - protein, 108 aa, synthetic construct; identical to SEQ ID NO: 23
  source 1..108: note = Description of Artificial Sequence: Synthetic polypeptide; note = VL of XENP019319

SEQ ID NO: 3976 - protein, 12 aa, synthetic construct
  source 1..12: note = Description of Artificial Sequence: Synthetic peptide; note = XENP019319 vlCDR1
RASQSVGSSYLA

SEQ ID NO: 3977 - protein, 7 aa, synthetic construct
  source 1..7: note = Description of Artificial Sequence: Synthetic peptide; note = XENP019319 vlCDR2
GAFSRAT

SEQ ID NO: 3978 - protein, 9 aa, synthetic construct
  source 1..9: note = Description of Artificial Sequence: Synthetic peptide; note = XENP019319 vlCDR3
QQYGSSPWT

SEQ ID NO: 3979 - protein, 221 aa, synthetic construct
  source 1..221: note = Description of Artificial Sequence: Synthetic polypeptide; note = XENP019320 [CTLA-4]_H0.106_L0_Fab Heavy Chain
QVQLVESGGGVVQPGRSLRLSCAASGFTFSSYTMHWVRQAPGKGLEWVTFISYDGNNKYYADSVKGRFTISRDNSKNTLYLQMNSLRAEDTAIYYCARVGWLGPFDYWGQGTLVTVSSASTKGPSVFPLAPSSKSTSGGTAALGCLVKDYFPEPVTVSWNSGALTSGVHTFPAVLQSSGLYSLSSVVTVPSSSLGTQTYICNVNHKPSNTKVDKKVEPKSC

SEQ ID NO: 3980 - protein, 118 aa, synthetic construct; identical to SEQ ID NO: 1138
  source 1..118: note = Description of Artificial Sequence: Synthetic polypeptide; note = VH of XENP019320

SEQ ID NO: 3981 - protein, 5 aa, synthetic construct
  source 1..5: note = Description of Artificial Sequence: Synthetic peptide; note = XENP019320 vhCDR1
SYTMH

SEQ ID NO: 3982 - protein, 17 aa, synthetic construct
  source 1..17: note = Description of Artificial Sequence: Synthetic peptide; note = XENP019320 vhCDR2
FISYDGNNKYYADSVKG

SEQ ID NO: 3983 - protein, 9 aa, synthetic construct
  source 1..9: note = Description of Artificial Sequence: Synthetic peptide; note = XENP019320 vhCDR3
VGWLGPFDY

SEQ ID NO: 3984 - protein, 215 aa, synthetic construct; identical to SEQ ID NO: 2924
  source 1..215: note = Description of Artificial Sequence: Synthetic polypeptide; note = XENP019320 [CTLA-4]_H0.106_L0_Fab Light Chain

SEQ ID NO: 3985 - protein, 108 aa, synthetic construct; identical to SEQ ID NO: 23
  source 1..108: note = Description of Artificial Sequence: Synthetic polypeptide; note = VL of XENP019320

SEQ ID NO: 3986 - protein, 12 aa, synthetic construct
  source 1..12: note = Description of Artificial Sequence: Synthetic peptide; note = XENP019320 vlCDR1
RASQSVGSSYLA

SEQ ID NO: 3987 - protein, 7 aa, synthetic construct
  source 1..7: note = Description of Artificial Sequence: Synthetic peptide; note = XENP019320 vlCDR2
GAFSRAT

SEQ ID NO: 3988 - protein, 9 aa, synthetic construct
  source 1..9: note = Description of Artificial Sequence: Synthetic peptide; note = XENP019320 vlCDR3
QQYGSSPWT

SEQ ID NO: 3989 - protein, 221 aa, synthetic construct
  source 1..221: note = Description of Artificial Sequence: Synthetic polypeptide; note = XENP019321 [CTLA-4]_H0.107_L0_Fab Heavy Chain
QVQLVESGGGVVQPGRSLRLSCAASGFTFSSYTMHWVRQAPGKGLEWVTFISYDGNNKYYADSVKGRFTISRDNSKNTLYLQMNSLRAEDTAIYYCARYGWLGPFDYWGQGTLVTVSSASTKGPSVFPLAPSSKSTSGGTAALGCLVKDYFPEPVTVSWNSGALTSGVHTFPAVLQSSGLYSLSSVVTVPSSSLGTQTYICNVNHKPSNTKVDKKVEPKSC

SEQ ID NO: 3990 - protein, 118 aa, synthetic construct; identical to SEQ ID NO: 1147
  source 1..118: note = Description of Artificial Sequence: Synthetic polypeptide; note = VH of XENP019321

SEQ ID NO: 3991 - protein, 5 aa, synthetic construct
  source 1..5: note = Description of Artificial Sequence: Synthetic peptide; note = XENP019321 vhCDR1
SYTMH

SEQ ID NO: 3992 - protein, 17 aa, synthetic construct
  source 1..17: note = Description of Artificial Sequence: Synthetic peptide; note = XENP019321 vhCDR2
FISYDGNNKYYADSVKG

SEQ ID NO: 3993 - protein, 9 aa, synthetic construct
  source 1..9: note = Description of Artificial Sequence: Synthetic peptide; note = XENP019321 vhCDR3
YGWLGPFDY

SEQ ID NO: 3994 - protein, 215 aa, synthetic construct; identical to SEQ ID NO: 2924
  source 1..215: note = Description of Artificial Sequence: Synthetic polypeptide; note = XENP019321 [CTLA-4]_H0.107_L0_Fab Light Chain

SEQ ID NO: 3995 - protein, 108 aa, synthetic construct; identical to SEQ ID NO: 23
  source 1..108: note = Description of Artificial Sequence: Synthetic polypeptide; note = VL of XENP019321

SEQ ID NO: 3996 - protein, 12 aa, synthetic construct
  source 1..12: note = Description of Artificial Sequence: Synthetic peptide; note = XENP019321 vlCDR1
RASQSVGSSYLA

SEQ ID NO: 3997 - protein, 7 aa, synthetic construct
  source 1..7: note = Description of Artificial Sequence: Synthetic peptide; note = XENP019321 vlCDR2
GAFSRAT

SEQ ID NO: 3998 - protein, 9 aa, synthetic construct
  source 1..9: note = Description of Artificial Sequence: Synthetic peptide; note = XENP019321 vlCDR3
QQYGSSPWT

SEQ ID NO: 3999 - protein, 221 aa, synthetic construct
  source 1..221: note = Description of Artificial Sequence: Synthetic polypeptide; note = XENP019322 [CTLA-4]_H0.108_L0_Fab Heavy Chain
QVQLVESGGGVVQPGRSLRLSCAASGFTFSSYTMHWVRQAPGKGLEWVTFISYDGNNKYYADSVKGRFTISRDNSKNTLYLQMNSLRAEDTAIYYCARTAWLGPFDYWGQGTLVTVSSASTKGPSVFPLAPSSKSTSGGTAALGCLVKDYFPEPVTVSWNSGALTSGVHTFPAVLQSSGLYSLSSVVTVPSSSLGTQTYICNVNHKPSNTKVDKKVEPKSC

SEQ ID NO: 4000 - protein, 118 aa, synthetic construct; identical to SEQ ID NO: 1156
  source 1..118: note = Description of Artificial Sequence: Synthetic polypeptide; note = VH of XENP019322

SEQ ID NO: 4001 - protein, 5 aa, synthetic construct
  source 1..5: note = Description of Artificial Sequence: Synthetic peptide; note = XENP019322 vhCDR1
SYTMH

SEQ ID NO: 4002 - protein, 17 aa, synthetic construct
  source 1..17: note = Description of Artificial Sequence: Synthetic peptide; note = XENP019322 vhCDR2
FISYDGNNKYYADSVKG

SEQ ID NO: 4003 - protein, 9 aa, synthetic construct
  source 1..9: note = Description of Artificial Sequence: Synthetic peptide; note = XENP019322 vhCDR3
TAWLGPFDY

SEQ ID NO: 4004 - protein, 215 aa, synthetic construct; identical to SEQ ID NO: 2924
  source 1..215: note = Description of Artificial Sequence: Synthetic polypeptide; note = XENP019322 [CTLA-4]_H0.108_L0_Fab Light Chain

SEQ ID NO: 4005 - protein, 108 aa, synthetic construct; identical to SEQ ID NO: 23
  source 1..108: note = Description of Artificial Sequence: Synthetic polypeptide; note = VL of XENP019322

SEQ ID NO: 4006 - protein, 12 aa, synthetic construct
  source 1..12: note = Description of Artificial Sequence: Synthetic peptide; note = XENP019322 vlCDR1
RASQSVGSSYLA

SEQ ID NO: 4007 - protein, 7 aa, synthetic construct
  source 1..7: note = Description of Artificial Sequence: Synthetic peptide; note = XENP019322 vlCDR2
GAFSRAT

SEQ ID NO: 4008 - protein, 9 aa, synthetic construct
  source 1..9: note = Description of Artificial Sequence: Synthetic peptide; note = XENP019322 vlCDR3
QQYGSSPWT

SEQ ID NO: 4009 - protein, 221 aa, synthetic construct
  source 1..221: note = Description of Artificial Sequence: Synthetic polypeptide; note = XENP019323 [CTLA-4]_H0.109_L0_Fab Heavy Chain
QVQLVESGGGVVQPGRSLRLSCAASGFTFSSYTMHWVRQAPGKGLEWVTFISYDGNNKYYADSVKGRFTISRDNSKNTLYLQMNSLRAEDTAIYYCARTSWLGPFDYWGQGTLVTVSSASTKGPSVFPLAPSSKSTSGGTAALGCLVKDYFPEPVTVSWNSGALTSGVHTFPAVLQSSGLYSLSSVVTVPSSSLGTQTYICNVNHKPSNTKVDKKVEPKSC

SEQ ID NO: 4010 - protein, 118 aa, synthetic construct; identical to SEQ ID NO: 1165
  source 1..118: note = Description of Artificial Sequence: Synthetic polypeptide; note = VH of XENP019323

SEQ ID NO: 4011 - protein, 5 aa, synthetic construct
  source 1..5: note = Description of Artificial Sequence: Synthetic peptide; note = XENP019323 vhCDR1
SYTMH

SEQ ID NO: 4012 - protein, 17 aa, synthetic construct
  source 1..17: note = Description of Artificial Sequence: Synthetic peptide; note = XENP019323 vhCDR2
FISYDGNNKYYADSVKG

SEQ ID NO: 4013 - protein, 9 aa, synthetic construct
  source 1..9: note = Description of Artificial Sequence: Synthetic peptide; note = XENP019323 vhCDR3
TSWLGPFDY

SEQ ID NO: 4014 - protein, 215 aa, synthetic construct; identical to SEQ ID NO: 2924
  source 1..215: note = Description of Artificial Sequence: Synthetic polypeptide; note = XENP019323 [CTLA-4]_H0.109_L0_Fab Light Chain

SEQ ID NO: 4015 - protein, 108 aa, synthetic construct; identical to SEQ ID NO: 23
  source 1..108: note = Description of Artificial Sequence: Synthetic polypeptide; note = VL of XENP019323

SEQ ID NO: 4016 - protein, 12 aa, synthetic construct
  source 1..12: note = Description of Artificial Sequence: Synthetic peptide; note = XENP019323 vlCDR1
RASQSVGSSYLA

SEQ ID NO: 4017 - protein, 7 aa, synthetic construct
  source 1..7: note = Description of Artificial Sequence: Synthetic peptide; note = XENP019323 vlCDR2
GAFSRAT

SEQ ID NO: 4018 - protein, 9 aa, synthetic construct
  source 1..9: note = Description of Artificial Sequence: Synthetic peptide; note = XENP019323 vlCDR3
QQYGSSPWT

SEQ ID NO: 4019 - protein, 221 aa, synthetic construct
  source 1..221: note = Description of Artificial Sequence: Synthetic polypeptide; note = XENP019324 [CTLA-4]_H0.110_L0_Fab Heavy Chain
QVQLVESGGGVVQPGRSLRLSCAASGFTFSSYTMHWVRQAPGKGLEWVTFISYDGNNKYYADSVKGRFTISRDNSKNTLYLQMNSLRAEDTAIYYCARTTWLGPFDYWGQGTLVTVSSASTKGPSVFPLAPSSKSTSGGTAALGCLVKDYFPEPVTVSWNSGALTSGVHTFPAVLQSSGLYSLSSVVTVPSSSLGTQTYICNVNHKPSNTKVDKKVEPKSC

SEQ ID NO: 4020 - protein, 118 aa, synthetic construct; identical to SEQ ID NO: 1174
  source 1..118: note = Description of Artificial Sequence: Synthetic polypeptide; note = VH of XENP019324

SEQ ID NO: 4021 - protein, 5 aa, synthetic construct
  source 1..5: note = Description of Artificial Sequence: Synthetic peptide; note = XENP019324 vhCDR1
SYTMH

SEQ ID NO: 4022 - protein, 17 aa, synthetic construct
  source 1..17: note = Description of Artificial Sequence: Synthetic peptide; note = XENP019324 vhCDR2
FISYDGNNKYYADSVKG

SEQ ID NO: 4023 - protein, 9 aa, synthetic construct
  source 1..9: note = Description of Artificial Sequence: Synthetic peptide; note = XENP019324 vhCDR3
TTWLGPFDY

SEQ ID NO: 4024 - protein, 215 aa, synthetic construct; identical to SEQ ID NO: 2924
  source 1..215: note = Description of Artificial Sequence: Synthetic polypeptide; note = XENP019324 [CTLA-4]_H0.110_L0_Fab Light Chain

SEQ ID NO: 4025 - protein, 108 aa, synthetic construct; identical to SEQ ID NO: 23
  source 1..108: note = Description of Artificial Sequence: Synthetic polypeptide; note = VL of XENP019324

SEQ ID NO: 4026 - protein, 12 aa, synthetic construct
  source 1..12: note = Description of Artificial Sequence: Synthetic peptide; note = XENP019324 vlCDR1
RASQSVGSSYLA

SEQ ID NO: 4027 - protein, 7 aa, synthetic construct
  source 1..7: note = Description of Artificial Sequence: Synthetic peptide; note = XENP019324 vlCDR2
GAFSRAT

SEQ ID NO: 4028 - protein, 9 aa, synthetic construct
  source 1..9: note = Description of Artificial Sequence: Synthetic peptide; note = XENP019324 vlCDR3
QQYGSSPWT

SEQ ID NO: 4029 - protein, 221 aa, synthetic construct
  source 1..221: note = Description of Artificial Sequence: Synthetic polypeptide; note = XENP019325 [CTLA-4]_H0.111_L0_Fab Heavy Chain
QVQLVESGGGVVQPGRSLRLSCAASGFTFSSYTMHWVRQAPGKGLEWVTFISYDGNNKYYADSVKGRFTISRDNSKNTLYLQMNSLRAEDTAIYYCARTGFLGPFDYWGQGTLVTVSSASTKGPSVFPLAPSSKSTSGGTAALGCLVKDYFPEPVTVSWNSGALTSGVHTFPAVLQSSGLYSLSSVVTVPSSSLGTQTYICNVNHKPSNTKVDKKVEPKSC

SEQ ID NO: 4030 - protein, 118 aa, synthetic construct; identical to SEQ ID NO: 1183
  source 1..118: note = Description of Artificial Sequence: Synthetic polypeptide; note = VH of XENP019325

SEQ ID NO: 4031 - protein, 5 aa, synthetic construct
  source 1..5: note = Description of Artificial Sequence: Synthetic peptide; note = XENP019325 vhCDR1
SYTMH

SEQ ID NO: 4032 - protein, 17 aa, synthetic construct
  source 1..17: note = Description of Artificial Sequence: Synthetic peptide; note = XENP019325 vhCDR2
FISYDGNNKYYADSVKG

SEQ ID NO: 4033 - protein, 9 aa, synthetic construct
  source 1..9: note = Description of Artificial Sequence: Synthetic peptide; note = XENP019325 vhCDR3
TGFLGPFDY

SEQ ID NO: 4034 - protein, 215 aa, synthetic construct; identical to SEQ ID NO: 2924
  source 1..215: note = Description of Artificial Sequence: Synthetic polypeptide; note = XENP019325 [CTLA-4]_H0.111_L0_Fab Light Chain

SEQ ID NO: 4035 - protein, 108 aa, synthetic construct; identical to SEQ ID NO: 23
  source 1..108: note = Description of Artificial Sequence: Synthetic polypeptide; note = VL of XENP019325

SEQ ID NO: 4036 - protein, 12 aa, synthetic construct
  source 1..12: note = Description of Artificial Sequence: Synthetic peptide; note = XENP019325 vlCDR1
RASQSVGSSYLA

SEQ ID NO: 4037 - protein, 7 aa, synthetic construct
  source 1..7: note = Description of Artificial Sequence: Synthetic peptide; note = XENP019325 vlCDR2
GAFSRAT

SEQ ID NO: 4038 - protein, 9 aa, synthetic construct
  source 1..9: note = Description of Artificial Sequence: Synthetic peptide; note = XENP019325 vlCDR3
QQYGSSPWT

SEQ ID NO: 4039 - protein, 221 aa, synthetic construct
  source 1..221: note = Description of Artificial Sequence: Synthetic polypeptide; note = XENP019326 [CTLA-4]_H0.112_L0_Fab Heavy Chain
QVQLVESGGGVVQPGRSLRLSCAASGFTFSSYTMHWVRQAPGKGLEWVTFISYDGNNKYYADSVKGRFTISRDNSKNTLYLQMNSLRAEDTAIYYCARTGGLGPFDYWGQGTLVTVSSASTKGPSVFPLAPSSKSTSGGTAALGCLVKDYFPEPVTVSWNSGALTSGVHTFPAVLQSSGLYSLSSVVTVPSSSLGTQTYICNVNHKPSNTKVDKKVEPKSC

SEQ ID NO: 4040 - protein, 118 aa, synthetic construct; identical to SEQ ID NO: 1192
  source 1..118: note = Description of Artificial Sequence: Synthetic polypeptide; note = VH of XENP019326

SEQ ID NO: 4041 - protein, 5 aa, synthetic construct
  source 1..5: note = Description of Artificial Sequence: Synthetic peptide; note = XENP019326 vhCDR1
SYTMH

SEQ ID NO: 4042 - protein, 17 aa, synthetic construct
  source 1..17: note = Description of Artificial Sequence: Synthetic peptide; note = XENP019326 vhCDR2
FISYDGNNKYYADSVKG

SEQ ID NO: 4043 - protein, 9 aa, synthetic construct
  source 1..9: note = Description of Artificial Sequence: Synthetic peptide; note = XENP019326 vhCDR3
TGGLGPFDY

SEQ ID NO: 4044 - protein, 215 aa, synthetic construct; identical to SEQ ID NO: 2924
  source 1..215: note = Description of Artificial Sequence: Synthetic polypeptide; note = XENP019326 [CTLA-4]_H0.112_L0_Fab Light Chain

SEQ ID NO: 4045 - protein, 108 aa, synthetic construct; identical to SEQ ID NO: 23
  source 1..108: note = Description of Artificial Sequence: Synthetic polypeptide; note = VL of XENP019326

SEQ ID NO: 4046 - protein, 12 aa, synthetic construct
  source 1..12: note = Description of Artificial Sequence: Synthetic peptide; note = XENP019326 vlCDR1
RASQSVGSSYLA

SEQ ID NO: 4047 - protein, 7 aa, synthetic construct
  source 1..7: note = Description of Artificial Sequence: Synthetic peptide; note = XENP019326 vlCDR2
GAFSRAT

SEQ ID NO: 4048 - protein, 9 aa, synthetic construct
  source 1..9: note = Description of Artificial Sequence: Synthetic peptide; note = XENP019326 vlCDR3
QQYGSSPWT

SEQ ID NO: 4049 - protein, 221 aa, synthetic construct
  source 1..221: note = Description of Artificial Sequence: Synthetic polypeptide; note = XENP019327 [CTLA-4]_H0.113_L0_Fab Heavy Chain
QVQLVESGGGVVQPGRSLRLSCAASGFTFSSYTMHWVRQAPGKGLEWVTFISYDGNNKYYADSVKGRFTISRDNSKNTLYLQMNSLRAEDTAIYYCARTGHLGPFDYWGQGTLVTVSSASTKGPSVFPLAPSSKSTSGGTAALGCLVKDYFPEPVTVSWNSGALTSGVHTFPAVLQSSGLYSLSSVVTVPSSSLGTQTYICNVNHKPSNTKVDKKVEPKSC

SEQ ID NO: 4050 - protein, 118 aa, synthetic construct; identical to SEQ ID NO: 1201
  source 1..118: note = Description of Artificial Sequence: Synthetic polypeptide; note = VH of XENP019327

SEQ ID NO: 4051 - protein, 5 aa, synthetic construct
  source 1..5: note = Description of Artificial Sequence: Synthetic peptide; note = XENP019327 vhCDR1
SYTMH

SEQ ID NO: 4052 - protein, 17 aa, synthetic construct
  source 1..17: note = Description of Artificial Sequence: Synthetic peptide; note = XENP019327 vhCDR2
FISYDGNNKYYADSVKG

SEQ ID NO: 4053 - protein, 9 aa, synthetic construct
  source 1..9: note = Description of Artificial Sequence: Synthetic peptide; note = XENP019327 vhCDR3
TGHLGPFDY

SEQ ID NO: 4054 - protein, 215 aa, synthetic construct; identical to SEQ ID NO: 2924
  source 1..215: note = Description of Artificial Sequence: Synthetic polypeptide; note = XENP019327 [CTLA-4]_H0.113_L0_Fab Light Chain

SEQ ID NO: 4055 - protein, 108 aa, synthetic construct; identical to SEQ ID NO: 23
  source 1..108: note = Description of Artificial Sequence: Synthetic polypeptide; note = VL of XENP019327

SEQ ID NO: 4056 - protein, 12 aa, synthetic construct
  source 1..12: note = Description of Artificial Sequence: Synthetic peptide; note = XENP019327 vlCDR1
RASQSVGSSYLA

SEQ ID NO: 4057 - protein, 7 aa, synthetic construct
  source 1..7: note = Description of Artificial Sequence: Synthetic peptide; note = XENP019327 vlCDR2
GAFSRAT

SEQ ID NO: 4058 - protein, 9 aa, synthetic construct
  source 1..9: note = Description of Artificial Sequence: Synthetic peptide; note = XENP019327 vlCDR3
QQYGSSPWT

SEQ ID NO: 4059 - protein, 221 aa, synthetic construct
  source 1..221: note = Description of Artificial Sequence: Synthetic polypeptide; note = XENP019328 [CTLA-4]_H0.114_L0_Fab Heavy Chain
QVQLVESGGGVVQPGRSLRLSCAASGFTFSSYTMHWVRQAPGKGLEWVTFISYDGNNKYYADSVKGRFTISRDNSKNTLYLQMNSLRAEDTAIYYCARTGLLGPFDYWGQGTLVTVSSASTKGPSVFPLAPSSKSTSGGTAALGCLVKDYFPEPVTVSWNSGALTSGVHTFPAVLQSSGLYSLSSVVTVPSSSLGTQTYICNVNHKPSNTKVDKKVEPKSC

SEQ ID NO: 4060 - protein, 118 aa, synthetic construct; identical to SEQ ID NO: 1210
  source 1..118: note = Description of Artificial Sequence: Synthetic polypeptide; note = VH of XENP019328

SEQ ID NO: 4061 - protein, 5 aa, synthetic construct
  source 1..5: note = Description of Artificial Sequence: Synthetic peptide; note = XENP019328 vhCDR1
SYTMH

SEQ ID NO: 4062 - protein, 17 aa, synthetic construct
  source 1..17: note = Description of Artificial Sequence: Synthetic peptide; note = XENP019328 vhCDR2
FISYDGNNKYYADSVKG

SEQ ID NO: 4063 - protein, 9 aa, synthetic construct
  source 1..9: note = Description of Artificial Sequence: Synthetic peptide; note = XENP019328 vhCDR3
TGLLGPFDY

SEQ ID NO: 4064 - protein, 215 aa, synthetic construct; identical to SEQ ID NO: 2924
  source 1..215: note = Description of Artificial Sequence: Synthetic polypeptide; note = XENP019328 [CTLA-4]_H0.114_L0_Fab Light Chain

SEQ ID NO: 4065 - protein, 108 aa, synthetic construct; identical to SEQ ID NO: 23
  source 1..108: note = Description of Artificial Sequence: Synthetic polypeptide; note = VL of XENP019328

SEQ ID NO: 4066 - protein, 12 aa, synthetic construct
  source 1..12: note = Description of Artificial Sequence: Synthetic peptide; note = XENP019328 vlCDR1
RASQSVGSSYLA

SEQ ID NO: 4067 - protein, 7 aa, synthetic construct
  source 1..7: note = Description of Artificial Sequence: Synthetic peptide; note = XENP019328 vlCDR2
GAFSRAT

SEQ ID NO: 4068 - protein, 9 aa, synthetic construct
  source 1..9: note = Description of Artificial Sequence: Synthetic peptide; note = XENP019328 vlCDR3
QQYGSSPWT

SEQ ID NO: 4069 - protein, 221 aa, synthetic construct
  source 1..221: note = Description of Artificial Sequence: Synthetic polypeptide; note = XENP019329 [CTLA-4]_H0.115_L0_Fab Heavy Chain
QVQLVESGGGVVQPGRSLRLSCAASGFTFSSYTMHWVRQAPGKGLEWVTFISYDGNNKYYADSVKGRFTISRDNSKNTLYLQMNSLRAEDTAIYYCARTGYLGPFDYWGQGTLVTVSSASTKGPSVFPLAPSSKSTSGGTAALGCLVKDYFPEPVTVSWNSGALTSGVHTFPAVLQSSGLYSLSSVVTVPSSSLGTQTYICNVNHKPSNTKVDKKVEPKSC

SEQ ID NO: 4070 - protein, 118 aa, synthetic construct; identical to SEQ ID NO: 1219
  source 1..118: note = Description of Artificial Sequence: Synthetic polypeptide; note = VH of XENP019329

SEQ ID NO: 4071 - protein, 5 aa, synthetic construct
  source 1..5: note = Description of Artificial Sequence: Synthetic peptide; note = XENP019329 vhCDR1
SYTMH

SEQ ID NO: 4072 - protein, 17 aa, synthetic construct
  source 1..17: note = Description of Artificial Sequence: Synthetic peptide; note = XENP019329 vhCDR2
FISYDGNNKYYADSVKG

SEQ ID NO: 4073 - protein, 9 aa, synthetic construct
  source 1..9: note = Description of Artificial Sequence: Synthetic peptide; note = XENP019329 vhCDR3
TGYLGPFDY

SEQ ID NO: 4074 - protein, 215 aa, synthetic construct; identical to SEQ ID NO: 2924
  source 1..215: note = Description of Artificial Sequence: Synthetic polypeptide; note = XENP019329 [CTLA-4]_H0.115_L0_Fab Light Chain

SEQ ID NO: 4075 - protein, 108 aa, synthetic construct; identical to SEQ ID NO: 23
  source 1..108: note = Description of Artificial Sequence: Synthetic polypeptide; note = VL of XENP019329

SEQ ID NO: 4076 - protein, 12 aa, synthetic construct
  source 1..12: note = Description of Artificial Sequence: Synthetic peptide; note = XENP019329 vlCDR1
RASQSVGSSYLA

SEQ ID NO: 4077 - protein, 7 aa, synthetic construct
  source 1..7: note = Description of Artificial Sequence: Synthetic peptide; note = XENP019329 vlCDR2
GAFSRAT

SEQ ID NO: 4078 - protein, 9 aa, synthetic construct
  source 1..9: note = Description of Artificial Sequence: Synthetic peptide; note = XENP019329 vlCDR3
QQYGSSPWT

SEQ ID NO: 4079 - protein, 221 aa, synthetic construct
  source 1..221: note = Description of Artificial Sequence: Synthetic polypeptide; note = XENP019330 [CTLA-4]_H0.116_L0_Fab Heavy Chain
QVQLVESGGGVVQPGRSLRLSCAASGFTFSSYTMHWVRQAPGKGLEWVTFISYDGNNKYYADSVKGRFTISRDNSKNTLYLQMNSLRAEDTAIYYCARTGWDGPFDYWGQGTLVTVSSASTKGPSVFPLAPSSKSTSGGTAALGCLVKDYFPEPVTVSWNSGALTSGVHTFPAVLQSSGLYSLSSVVTVPSSSLGTQTYICNVNHKPSNTKVDKKVEPKSC

SEQ ID NO: 4080 - protein, 118 aa, synthetic construct; identical to SEQ ID NO: 1228
  source 1..118: note = Description of Artificial Sequence: Synthetic polypeptide; note = VH of XENP019330

SEQ ID NO: 4081 - protein, 5 aa, synthetic construct
  source 1..5: note = Description of Artificial Sequence: Synthetic peptide; note = XENP019330 vhCDR1
SYTMH

SEQ ID NO: 4082 - protein, 17 aa, synthetic construct
  source 1..17: note = Description of Artificial Sequence: Synthetic peptide; note = XENP019330 vhCDR2
FISYDGNNKYYADSVKG

SEQ ID NO: 4083 - protein, 9 aa, synthetic construct
  source 1..9: note = Description of Artificial Sequence: Synthetic peptide; note = XENP019330 vhCDR3
TGWDGPFDY

SEQ ID NO: 4084 - protein, 215 aa, synthetic construct; identical to SEQ ID NO: 2924
  source 1..215: note = Description of Artificial Sequence: Synthetic polypeptide; note = XENP019330 [CTLA-4]_H0.116_L0_Fab Light Chain

SEQ ID NO: 4085 - protein, 108 aa, synthetic construct; identical to SEQ ID NO: 23
  source 1..108: note = Description of Artificial Sequence: Synthetic polypeptide; note = VL of XENP019330

SEQ ID NO: 4086 - protein, 12 aa, synthetic construct
  source 1..12: note = Description of Artificial Sequence: Synthetic peptide; note = XENP019330 vlCDR1
RASQSVGSSYLA

SEQ ID NO: 4087 - protein, 7 aa, synthetic construct
  source 1..7: note = Description of Artificial Sequence: Synthetic peptide; note = XENP019330 vlCDR2
GAFSRAT

SEQ ID NO: 4088 - protein, 9 aa, synthetic construct
  source 1..9: note = Description of Artificial Sequence: Synthetic peptide; note = XENP019330 vlCDR3
QQYGSSPWT

SEQ ID NO: 4089 - protein, 221 aa, synthetic construct
  source 1..221: note = Description of Artificial Sequence: Synthetic polypeptide; note = XENP019331 [CTLA-4]_H0.117_L0_Fab Heavy Chain
QVQLVESGGGVVQPGRSLRLSCAASGFTFSSYTMHWVRQAPGKGLEWVTFISYDGNNKYYADSVKGRFTISRDNSKNTLYLQMNSLRAEDTAIYYCARTGWIGPFDYWGQGTLVTVSSASTKGPSVFPLAPSSKSTSGGTAALGCLVKDYFPEPVTVSWNSGALTSGVHTFPAVLQSSGLYSLSSVVTVPSSSLGTQTYICNVNHKPSNTKVDKKVEPKSC

SEQ ID NO: 4090 - protein, 118 aa, synthetic construct; identical to SEQ ID NO: 1237
  source 1..118: note = Description of Artificial Sequence: Synthetic polypeptide; note = VH of XENP019331

SEQ ID NO: 4091 - protein, 5 aa, synthetic construct
  source 1..5: note = Description of Artificial Sequence: Synthetic peptide; note = XENP019331 vhCDR1
SYTMH

SEQ ID NO: 4092 - protein, 17 aa, synthetic construct
  source 1..17: note = Description of Artificial Sequence: Synthetic peptide; note = XENP019331 vhCDR2
FISYDGNNKYYADSVKG

SEQ ID NO: 4093 - protein, 9 aa, synthetic construct
  source 1..9: note = Description of Artificial Sequence: Synthetic peptide; note = XENP019331 vhCDR3
TGWIGPFDY

SEQ ID NO: 4094 - protein, 215 aa, synthetic construct; identical to SEQ ID NO: 2924
  source 1..215: note = Description of Artificial Sequence: Synthetic polypeptide; note = XENP019331 [CTLA-4]_H0.117_L0_Fab Light Chain

SEQ ID NO: 4095 - protein, 108 aa, synthetic construct; identical to SEQ ID NO: 23
  source 1..108: note = Description of Artificial Sequence: Synthetic polypeptide; note = VL of XENP019331

SEQ ID NO: 4096 - protein, 12 aa, synthetic construct
  source 1..12: note = Description of Artificial Sequence: Synthetic peptide; note = XENP019331 vlCDR1
RASQSVGSSYLA

SEQ ID NO: 4097 - protein, 7 aa, synthetic construct
  source 1..7: note = Description of Artificial Sequence: Synthetic peptide; note = XENP019331 vlCDR2
GAFSRAT

SEQ ID NO: 4098 - protein, 9 aa, synthetic construct
  source 1..9: note = Description of Artificial Sequence: Synthetic peptide; note = XENP019331 vlCDR3
QQYGSSPWT

SEQ ID NO: 4099 - protein, 221 aa, synthetic construct
  source 1..221: note = Description of Artificial Sequence: Synthetic polypeptide; note = XENP019332 [CTLA-4]_H0.118_L0_Fab Heavy Chain
QVQLVESGGGVVQPGRSLRLSCAASGFTFSSYTMHWVRQAPGKGLEWVTFISYDGNNKYYADSVKGRFTISRDNSKNTLYLQMNSLRAEDTAIYYCARTGWVGPFDYWGQGTLVTVSSASTKGPSVFPLAPSSKSTSGGTAALGCLVKDYFPEPVTVSWNSGALTSGVHTFPAVLQSSGLYSLSSVVTVPSSSLGTQTYICNVNHKPSNTKVDKKVEPKSC

SEQ ID NO: 4100 - protein, 118 aa, synthetic construct; identical to SEQ ID NO: 1246
  source 1..118: note = Description of Artificial Sequence: Synthetic polypeptide; note = VH of XENP019332

SEQ ID NO: 4101 - protein, 5 aa, synthetic construct
  source 1..5: note = Description of Artificial Sequence: Synthetic peptide; note = XENP019332 vhCDR1
SYTMH

SEQ ID NO: 4102 - protein, 17 aa, synthetic construct
  source 1..17: note = Description of Artificial Sequence: Synthetic peptide; note = XENP019332 vhCDR2
FISYDGNNKYYADSVKG

SEQ ID NO: 4103 - protein, 9 aa, synthetic construct
  source 1..9: note = Description of Artificial Sequence: Synthetic peptide; note = XENP019332 vhCDR3
TGWVGPFDY

SEQ ID NO: 4104 - protein, 215 aa, synthetic construct; identical to SEQ ID NO: 2924
  source 1..215: note = Description of Artificial Sequence: Synthetic polypeptide; note = XENP019332 [CTLA-4]_H0.118_L0_Fab Light Chain

SEQ ID NO: 4105 - protein, 108 aa, synthetic construct; identical to SEQ ID NO: 23
  source 1..108: note = Description of Artificial Sequence: Synthetic polypeptide; note = VL of XENP019332

SEQ ID NO: 4106 - protein, 12 aa, synthetic construct
  source 1..12: note = Description of Artificial Sequence: Synthetic peptide; note = XENP019332 vlCDR1
RASQSVGSSYLA

SEQ ID NO: 4107 - protein, 7 aa, synthetic construct
  source 1..7: note = Description of Artificial Sequence: Synthetic peptide; note = XENP019332 vlCDR2
GAFSRAT

SEQ ID NO: 4108 - protein, 9 aa, synthetic construct
  source 1..9: note = Description of Artificial Sequence: Synthetic peptide; note = XENP019332 vlCDR3
QQYGSSPWT

SEQ ID NO: 4109 - protein, 221 aa, synthetic construct
  source 1..221: note = Description of Artificial Sequence: Synthetic polypeptide; note = XENP019333 [CTLA-4]_H0.119_L0_Fab Heavy Chain
QVQLVESGGGVVQPGRSLRLSCAASGFTFSSYTMHWVRQAPGKGLEWVTFISYDGNNKYYADSVKGRFTISRDNSKNTLYLQMNSLRAEDTAIYYCARTGWLAPFDYWGQGTLVTVSSASTKGPSVFPLAPSSKSTSGGTAALGCLVKDYFPEPVTVSWNSGALTSGVHTFPAVLQSSGLYSLSSVVTVPSSSLGTQTYICNVNHKPSNTKVDKKVEPKSC

SEQ ID NO: 4110 - protein, 118 aa, synthetic construct; identical to SEQ ID NO: 1255
  source 1..118: note = Description of Artificial Sequence: Synthetic polypeptide; note = VH of XENP019333

SEQ ID NO: 4111 - protein, 5 aa, synthetic construct
  source 1..5: note = Description of Artificial Sequence: Synthetic peptide; note = XENP019333 vhCDR1
SYTMH

SEQ ID NO: 4112 - protein, 17 aa, synthetic construct
  source 1..17: note = Description of Artificial Sequence: Synthetic peptide; note = XENP019333 vhCDR2
FISYDGNNKYYADSVKG

SEQ ID NO: 4113 - protein, 9 aa, synthetic construct
  source 1..9: note = Description of Artificial Sequence: Synthetic peptide; note = XENP019333 vhCDR3
TGWLAPFDY

SEQ ID NO: 4114 - protein, 215 aa, synthetic construct; identical to SEQ ID NO: 2924
  source 1..215: note = Description of Artificial Sequence: Synthetic polypeptide; note = XENP019333 [CTLA-4]_H0.119_L0_Fab Light Chain

SEQ ID NO: 4115 - protein, 108 aa, synthetic construct; identical to SEQ ID NO: 23
  source 1..108: note = Description of Artificial Sequence: Synthetic polypeptide; note = VL of XENP019333

SEQ ID NO: 4116 - protein, 12 aa, synthetic construct
  source 1..12: note = Description of Artificial Sequence: Synthetic peptide; note = XENP019333 vlCDR1
RASQSVGSSYLA

SEQ ID NO: 4117 - protein, 7 aa, synthetic construct
  source 1..7: note = Description of Artificial Sequence: Synthetic peptide; note = XENP019333 vlCDR2
GAFSRAT

SEQ ID NO: 4118 - protein, 9 aa, synthetic construct
  source 1..9: note = Description of Artificial Sequence: Synthetic peptide; note = XENP019333 vlCDR3
QQYGSSPWT

SEQ ID NO: 4119 - protein, 221 aa, synthetic construct
  source 1..221: note = Description of Artificial Sequence: Synthetic polypeptide; note = XENP019334 [CTLA-4]_H0.120_L0_Fab Heavy Chain
QVQLVESGGGVVQPGRSLRLSCAASGFTFSSYTMHWVRQAPGKGLEWVTFISYDGNNKYYADSVKGRFTISRDNSKNTLYLQMNSLRAEDTAIYYCARTGWLSPFDYWGQGTLVTVSSASTKGPSVFPLAPSSKSTSGGTAALGCLVKDYFPEPVTVSWNSGALTSGVHTFPAVLQSSGLYSLSSVVTVPSSSLGTQTYICNVNHKPSNTKVDKKVEPKSC

SEQ ID NO: 4120 - protein, 118 aa, synthetic construct; identical to SEQ ID NO: 1264
  source 1..118: note = Description of Artificial Sequence: Synthetic polypeptide; note = VH of XENP019334

SEQ ID NO: 4121 - protein, 5 aa, synthetic construct
  source 1..5: note = Description of Artificial Sequence: Synthetic peptide; note = XENP019334 vhCDR1
SYTMH

SEQ ID NO: 4122 - protein, 17 aa, synthetic construct
  source 1..17: note = Description of Artificial Sequence: Synthetic peptide; note = XENP019334 vhCDR2
FISYDGNNKYYADSVKG

SEQ ID NO: 4123 - protein, 9 aa, synthetic construct
  source 1..9: note = Description of Artificial Sequence: Synthetic peptide; note = XENP019334 vhCDR3
TGWLSPFDY

SEQ ID NO: 4124 - protein, 215 aa, synthetic construct; identical to SEQ ID NO: 2924
  source 1..215: note = Description of Artificial Sequence: Synthetic polypeptide; note = XENP019334 [CTLA-4]_H0.120_L0_Fab Light Chain

SEQ ID NO: 4125 - protein, 108 aa, synthetic construct; identical to SEQ ID NO: 23
  source 1..108: note = Description of Artificial Sequence: Synthetic polypeptide; note = VL of XENP019334

SEQ ID NO: 4126 - protein, 12 aa, synthetic construct
  source 1..12: note = Description of Artificial Sequence: Synthetic peptide; note = XENP019334 vlCDR1
RASQSVGSSYLA

SEQ ID NO: 4127 - protein, 7 aa, synthetic construct
  source 1..7: note = Description of Artificial Sequence: Synthetic peptide; note = XENP019334 vlCDR2
GAFSRAT

SEQ ID NO: 4128 - protein, 9 aa, synthetic construct
  source 1..9: note = Description of Artificial Sequence: Synthetic peptide; note = XENP019334 vlCDR3
QQYGSSPWT

SEQ ID NO: 4129 - protein, 221 aa, synthetic construct
  source 1..221: note = Description of Artificial Sequence: Synthetic polypeptide; note = XENP019335 [CTLA-4]_H0.121_L0_Fab Heavy Chain
QVQLVESGGGVVQPGRSLRLSCAASGFTFSSYTMHWVRQAPGKGLEWVTFISYDGNNKYYADSVKGRFTISRDNSKNTLYLQMNSLRAEDTAIYYCARTGWLTPFDYWGQGTLVTVSSASTKGPSVFPLAPSSKSTSGGTAALGCLVKDYFPEPVTVSWNSGALTSGVHTFPAVLQSSGLYSLSSVVTVPSSSLGTQTYICNVNHKPSNTKVDKKVEPKSC

SEQ ID NO: 4130 - protein, 118 aa, synthetic construct; identical to SEQ ID NO: 1273
  source 1..118: note = Description of Artificial Sequence: Synthetic polypeptide; note = VH of XENP019335

SEQ ID NO: 4131 - protein, 5 aa, synthetic construct
  source 1..5: note = Description of Artificial Sequence: Synthetic peptide; note = XENP019335 vhCDR1
SYTMH

SEQ ID NO: 4132 - protein, 17 aa, synthetic construct
  source 1..17: note = Description of Artificial Sequence: Synthetic peptide; note = XENP019335 vhCDR2
FISYDGNNKYYADSVKG

SEQ ID NO: 4133 - protein, 9 aa, synthetic construct
  source 1..9: note = Description of Artificial Sequence: Synthetic peptide; note = XENP019335 vhCDR3
TGWLTPFDY

SEQ ID NO: 4134 - protein, 215 aa, synthetic construct; identical to SEQ ID NO: 2924
  source 1..215: note = Description of Artificial Sequence: Synthetic polypeptide; note = XENP019335 [CTLA-4]_H0.121_L0_Fab Light Chain

SEQ ID NO: 4135 - protein, 108 aa, synthetic construct; identical to SEQ ID NO: 23
  source 1..108: note = Description of Artificial Sequence: Synthetic polypeptide; note = VL of XENP019335

SEQ ID NO: 4136 - protein, 12 aa, synthetic construct
  source 1..12: note = Description of Artificial Sequence: Synthetic peptide; note = XENP019335 vlCDR1
RASQSVGSSYLA

SEQ ID NO: 4137 - protein, 7 aa, synthetic construct
  source 1..7: note = Description of Artificial Sequence: Synthetic peptide; note = XENP019335 vlCDR2
GAFSRAT

SEQ ID NO: 4138 - protein, 9 aa, synthetic construct
  source 1..9: note = Description of Artificial Sequence: Synthetic peptide; note = XENP019335 vlCDR3
QQYGSSPWT

SEQ ID NO: 4139 - protein, 221 aa, synthetic construct
  source 1..221: note = Description of Artificial Sequence: Synthetic polypeptide; note = XENP019336 [CTLA-4]_H0.122_L0_Fab Heavy Chain
QVQLVESGGGVVQPGRSLRLSCAASGFTFSSYTMHWVRQAPGKGLEWVTFISYDGNNKYYADSVKGRFTISRDNSKNTLYLQMNSLRAEDTAIYYCARTGWLGPLDYWGQGTLVTVSSASTKGPSVFPLAPSSKSTSGGTAALGCLVKDYFPEPVTVSWNSGALTSGVHTFPAVLQSSGLYSLSSVVTVPSSSLGTQTYICNVNHKPSNTKVDKKVEPKSC

SEQ ID NO: 4140 - protein, 118 aa, synthetic construct; identical to SEQ ID NO: 1282
  source 1..118: note = Description of Artificial Sequence: Synthetic polypeptide; note = VH of XENP019336

SEQ ID NO: 4141 - protein, 5 aa, synthetic construct
  source 1..5: note = Description of Artificial Sequence: Synthetic peptide; note = XENP019336 vhCDR1
SYTMH

SEQ ID NO: 4142 - protein, 17 aa, synthetic construct
  source 1..17: note = Description of Artificial Sequence: Synthetic peptide; note = XENP019336 vhCDR2
FISYDGNNKYYADSVKG

SEQ ID NO: 4143 - protein, 9 aa, synthetic construct
  source 1..9: note = Description of Artificial Sequence: Synthetic peptide; note = XENP019336 vhCDR3
TGWLGPLDY

SEQ ID NO: 4144 - protein, 215 aa, synthetic construct; identical to SEQ ID NO: 2924
  source 1..215: note = Description of Artificial Sequence: Synthetic polypeptide; note = XENP019336 [CTLA-4]_H0.122_L0_Fab Light Chain

SEQ ID NO: 4145 - protein, 108 aa, synthetic construct; identical to SEQ ID NO: 23
  source 1..108: note = Description of Artificial Sequence: Synthetic polypeptide; note = VL of XENP019336

SEQ ID NO: 4146 - protein, 12 aa, synthetic construct
  source 1..12: note = Description of Artificial Sequence: Synthetic peptide; note = XENP019336 vlCDR1
RASQSVGSSYLA

SEQ ID NO: 4147 - protein, 7 aa, synthetic construct
  source 1..7: note = Description of Artificial Sequence: Synthetic peptide; note = XENP019336 vlCDR2
GAFSRAT

SEQ ID NO: 4148 - protein, 9 aa, synthetic construct
  source 1..9: note = Description of Artificial Sequence: Synthetic peptide; note = XENP019336 vlCDR3
QQYGSSPWT

SEQ ID NO: 4149 - protein, 221 aa, synthetic construct
  source 1..221: note = Description of Artificial Sequence: Synthetic polypeptide; note = XENP019337 [CTLA-4]_H0.123_L0_Fab Heavy Chain
QVQLVESGGGVVQPGRSLRLSCAASGFTFSSYTMHWVRQAPGKGLEWVTFISYDGNNKYYADSVKGRFTISRDNSKNTLYLQMNSLRAEDTAIYYCARTGWLGPMDYWGQGTLVTVSSASTKGPSVFPLAPSSKSTSGGTAALGCLVKDYFPEPVTVSWNSGALTSGVHTFPAVLQSSGLYSLSSVVTVPSSSLGTQTYICNVNHKPSNTKVDKKVEPKSC

SEQ ID NO: 4150 - protein, 118 aa, synthetic construct; identical to SEQ ID NO: 1291
  source 1..118: note = Description of Artificial Sequence: Synthetic polypeptide; note = VH of XENP019337

SEQ ID NO: 4151 - protein, 5 aa, synthetic construct
  source 1..5: note = Description of Artificial Sequence: Synthetic peptide; note = XENP019337 vhCDR1
SYTMH

SEQ ID NO: 4152 - protein, 17 aa, synthetic construct
  source 1..17: note = Description of Artificial Sequence: Synthetic peptide; note = XENP019337 vhCDR2
FISYDGNNKYYADSVKG

SEQ ID NO: 4153 - protein, 9 aa, synthetic construct
  source 1..9: note = Description of Artificial Sequence: Synthetic peptide; note = XENP019337 vhCDR3
TGWLGPMDY

SEQ ID NO: 4154 - protein, 215 aa, synthetic construct; identical to SEQ ID NO: 2924
  source 1..215: note = Description of Artificial Sequence: Synthetic polypeptide; note = XENP019337 [CTLA-4]_H0.123_L0_Fab Light Chain

SEQ ID NO: 4155 - protein, 108 aa, synthetic construct; identical to SEQ ID NO: 23
  source 1..108: note = Description of Artificial Sequence: Synthetic polypeptide; note = VL of XENP019337

SEQ ID NO: 4156 - protein, 12 aa, synthetic construct
  source 1..12: note = Description of Artificial Sequence: Synthetic peptide; note = XENP019337 vlCDR1
RASQSVGSSYLA

SEQ ID NO: 4157 - protein, 7 aa, synthetic construct
  source 1..7: note = Description of Artificial Sequence: Synthetic peptide; note = XENP019337 vlCDR2
GAFSRAT

SEQ ID NO: 4158 - protein, 9 aa, synthetic construct
  source 1..9: note = Description of Artificial Sequence: Synthetic peptide; note = XENP019337 vlCDR3
QQYGSSPWT

SEQ ID NO: 4159 - protein, 221 aa, synthetic construct
  source 1..221: note = Description of Artificial Sequence: Synthetic polypeptide; note = XENP019338 [CTLA-4]_H0.124_L0_Fab Heavy Chain
QVQLVESGGGVVQPGRSLRLSCAASGFTFSSYTMHWVRQAPGKGLEWVTFISYDGNNKYYADSVKGRFTISRDNSKNTLYLQMNSLRAEDTAIYYCARTGWLGPFAYWGQGTLVTVSSASTKGPSVFPLAPSSKSTSGGTAALGCLVKDYFPEPVTVSWNSGALTSGVHTFPAVLQSSGLYSLSSVVTVPSSSLGTQTYICNVNHKPSNTKVDKKVEPKSC

SEQ ID NO: 4160 - protein, 118 aa, synthetic construct; identical to SEQ ID NO: 1300
  source 1..118: note = Description of Artificial Sequence: Synthetic polypeptide; note = VH of XENP019338

SEQ ID NO: 4161 - protein, 5 aa, synthetic construct
  source 1..5: note = Description of Artificial Sequence: Synthetic peptide; note = XENP019338 vhCDR1
SYTMH

SEQ ID NO: 4162 - protein, 17 aa, synthetic construct
  source 1..17: note = Description of Artificial Sequence: Synthetic peptide; note = XENP019338 vhCDR2
FISYDGNNKYYADSVKG

SEQ ID NO: 4163 - protein, 9 aa, synthetic construct
  source 1..9: note = Description of Artificial Sequence: Synthetic peptide; note = XENP019338 vhCDR3
TGWLGPFAY

SEQ ID NO: 4164 - protein, 215 aa, synthetic construct; identical to SEQ ID NO: 2924
  source 1..215: note = Description of Artificial Sequence: Synthetic polypeptide; note = XENP019338 [CTLA-4]_H0.124_L0_Fab Light Chain

SEQ ID NO: 4165 - protein, 108 aa, synthetic construct; identical to SEQ ID NO: 23
  source 1..108: note = Description of Artificial Sequence: Synthetic polypeptide; note = VL of XENP019338

SEQ ID NO: 4166 - protein, 12 aa, synthetic construct
  source 1..12: note = Description of Artificial Sequence: Synthetic peptide; note = XENP019338 vlCDR1
RASQSVGSSYLA

SEQ ID NO: 4167 - protein, 7 aa, synthetic construct
  source 1..7: note = Description of Artificial Sequence: Synthetic peptide; note = XENP019338 vlCDR2
GAFSRAT

SEQ ID NO: 4168 - protein, 9 aa, synthetic construct
  source 1..9: note = Description of Artificial Sequence: Synthetic peptide; note = XENP019338 vlCDR3
QQYGSSPWT

SEQ ID NO: 4169 - protein, 221 aa, synthetic construct
  source 1..221: note = Description of Artificial Sequence: Synthetic polypeptide; note = XENP019339 [CTLA-4]_H0.125_L0_Fab Heavy Chain
QVQLVESGGGVVQPGRSLRLSCAASGFTFSSYTMHWVRQAPGKGLEWVTFISYDGNNKYYADSVKGRFTISRDNSKNTLYLQMNSLRAEDTAIYYCARTGWLGPFEYWGQGTLVTVSSASTKGPSVFPLAPSSKSTSGGTAALGCLVKDYFPEPVTVSWNSGALTSGVHTFPAVLQSSGLYSLSSVVTVPSSSLGTQTYICNVNHKPSNTKVDKKVEPKSC

SEQ ID NO: 4170 - protein, 118 aa, synthetic construct; identical to SEQ ID NO: 1309
  source 1..118: note = Description of Artificial Sequence: Synthetic polypeptide; note = VH of XENP019339

SEQ ID NO: 4171 - protein, 5 aa, synthetic construct
  source 1..5: note = Description of Artificial Sequence: Synthetic peptide; note = XENP019339 vhCDR1
SYTMH

SEQ ID NO: 4172 - protein, 17 aa, synthetic construct
  source 1..17: note = Description of Artificial Sequence: Synthetic peptide; note = XENP019339 vhCDR2
FISYDGNNKYYADSVKG

SEQ ID NO: 4173 - protein, 9 aa, synthetic construct
  source 1..9: note = Description of Artificial Sequence: Synthetic peptide; note = XENP019339 vhCDR3
TGWLGPFEY

SEQ ID NO: 4174 - protein, 215 aa, synthetic construct; identical to SEQ ID NO: 2924
  source 1..215: note = Description of Artificial Sequence: Synthetic polypeptide; note = XENP019339 [CTLA-4]_H0.125_L0_Fab Light Chain

SEQ ID NO: 4175 - protein, 108 aa, synthetic construct; identical to SEQ ID NO: 23
  source 1..108: note = Description of Artificial Sequence: Synthetic polypeptide; note = VL of XENP019339

SEQ ID NO: 4176 - protein, 12 aa, synthetic construct
  source 1..12: note = Description of Artificial Sequence: Synthetic peptide; note = XENP019339 vlCDR1
RASQSVGSSYLA

SEQ ID NO: 4177 - protein, 7 aa, synthetic construct
  source 1..7: note = Description of Artificial Sequence: Synthetic peptide; note = XENP019339 vlCDR2
GAFSRAT

SEQ ID NO: 4178 - protein, 9 aa, synthetic construct
  source 1..9: note = Description of Artificial Sequence: Synthetic peptide; note = XENP019339 vlCDR3
QQYGSSPWT

SEQ ID NO: 4179 - protein, 221 aa, synthetic construct
  source 1..221: note = Description of Artificial Sequence: Synthetic polypeptide; note = XENP019340 [CTLA-4]_H0.126_L0_Fab Heavy Chain
QVQLVESGGGVVQPGRSLRLSCAASGFTFSSYTMHWVRQAPGKGLEWVTFISYDGNNKYYADSVKGRFTISRDNSKNTLYLQMNSLRAEDTAIYYCARTGWLGPFHYWGQGTLVTVSSASTKGPSVFPLAPSSKSTSGGTAALGCLVKDYFPEPVTVSWNSGALTSGVHTFPAVLQSSGLYSLSSVVTVPSSSLGTQTYICNVNHKPSNTKVDKKVEPKSC

SEQ ID NO: 4180 - protein, 118 aa, synthetic construct; identical to SEQ ID NO: 1318
  source 1..118: note = Description of Artificial Sequence: Synthetic polypeptide; note = VH of XENP019340

SEQ ID NO: 4181 - protein, 5 aa, synthetic construct
  source 1..5: note = Description of Artificial Sequence: Synthetic peptide; note = XENP019340 vhCDR1
SYTMH

SEQ ID NO: 4182 - protein, 17 aa, synthetic construct
  source 1..17: note = Description of Artificial Sequence: Synthetic peptide; note = XENP019340 vhCDR2
FISYDGNNKYYADSVKG

SEQ ID NO: 4183 - protein, 9 aa, synthetic construct
  source 1..9: note = Description of Artificial Sequence: Synthetic peptide; note = XENP019340 vhCDR3
TGWLGPFHY

SEQ ID NO: 4184 - protein, 215 aa, synthetic construct; identical to SEQ ID NO: 2924
  source 1..215: note = Description of Artificial Sequence: Synthetic polypeptide; note = XENP019340 [CTLA-4]_H0.126_L0_Fab Light Chain

SEQ ID NO: 4185 - protein, 108 aa, synthetic construct; identical to SEQ ID NO: 23
  source 1..108: note = Description of Artificial Sequence: Synthetic polypeptide; note = VL of XENP019340

SEQ ID NO: 4186 - protein, 12 aa, synthetic construct
  source 1..12: note = Description of Artificial Sequence: Synthetic peptide; note = XENP019340 vlCDR1
RASQSVGSSYLA

SEQ ID NO: 4187 - protein, 7 aa, synthetic construct
  source 1..7: note = Description of Artificial Sequence: Synthetic peptide; note = XENP019340 vlCDR2
GAFSRAT

SEQ ID NO: 4188 - protein, 9 aa, synthetic construct
  source 1..9: note = Description of Artificial Sequence: Synthetic peptide; note = XENP019340 vlCDR3
QQYGSSPWT

SEQ ID NO: 4189 - protein, 221 aa, synthetic construct
  source 1..221: note = Description of Artificial Sequence: Synthetic polypeptide; note = XENP019341 [CTLA-4]_H0.127_L0_Fab Heavy Chain
QVQLVESGGGVVQPGRSLRLSCAASGFTFSSYTMHWVRQAPGKGLEWVTFISYDGNNKYYADSVKGRFTISRDNSKNTLYLQMNSLRAEDTAIYYCARTGWLGPFNYWGQGTLVTVSSASTKGPSVFPLAPSSKSTSGGTAALGCLVKDYFPEPVTVSWNSGALTSGVHTFPAVLQSSGLYSLSSVVTVPSSSLGTQTYICNVNHKPSNTKVDKKVEPKSC

SEQ ID NO: 4190 - protein, 118 aa, synthetic construct; identical to SEQ ID NO: 1327
  source 1..118: note = Description of Artificial Sequence: Synthetic polypeptide; note = VH of XENP019341

SEQ ID NO: 4191 - protein, 5 aa, synthetic construct
  source 1..5: note = Description of Artificial Sequence: Synthetic peptide; note = XENP019341 vhCDR1
SYTMH

SEQ ID NO: 4192 - protein, 17 aa, synthetic construct
  source 1..17: note = Description of Artificial Sequence: Synthetic peptide; note = XENP019341 vhCDR2
FISYDGNNKYYADSVKG

SEQ ID NO: 4193 - protein, 9 aa, synthetic construct
  source 1..9: note = Description of Artificial Sequence: Synthetic peptide; note = XENP019341 vhCDR3
TGWLGPFNY

SEQ ID NO: 4194 - protein, 215 aa, synthetic construct; identical to SEQ ID NO: 2924
  source 1..215: note = Description of Artificial Sequence: Synthetic polypeptide; note = XENP019341 [CTLA-4]_H0.127_L0_Fab Light Chain

SEQ ID NO: 4195 - protein, 108 aa, synthetic construct; identical to SEQ ID NO: 23
  source 1..108: note = Description of Artificial Sequence: Synthetic polypeptide; note = VL of XENP019341

SEQ ID NO: 4196 - protein, 12 aa, synthetic construct
  source 1..12: note = Description of Artificial Sequence: Synthetic peptide; note = XENP019341 vlCDR1
RASQSVGSSYLA

SEQ ID NO: 4197 - protein, 7 aa, synthetic construct
  source 1..7: note = Description of Artificial Sequence: Synthetic peptide; note = XENP019341 vlCDR2
GAFSRAT

SEQ ID NO: 4198 - protein, 9 aa, synthetic construct
  source 1..9: note = Description of Artificial Sequence: Synthetic peptide; note = XENP019341 vlCDR3
QQYGSSPWT

SEQ ID NO: 4199 - protein, 221 aa, synthetic construct
  source 1..221: note = Description of Artificial Sequence: Synthetic polypeptide; note = XENP019342 [CTLA-4]_H0.128_L0_Fab Heavy Chain
QVQLVESGGGVVQPGRSLRLSCAASGFTFSSYTMHWVRQAPGKGLEWVTFISYDGNNKYYADSVKGRFTISRDNSKNTLYLQMNSLRAEDTAIYYCARTGWLGPFSYWGQGTLVTVSSASTKGPSVFPLAPSSKSTSGGTAALGCLVKDYFPEPVTVSWNSGALTSGVHTFPAVLQSSGLYSLSSVVTVPSSSLGTQTYICNVNHKPSNTKVDKKVEPKSC

SEQ ID NO: 4200 - protein, 118 aa, synthetic construct; identical to SEQ ID NO: 1336
  source 1..118: note = Description of Artificial Sequence: Synthetic polypeptide; note = VH of XENP019342

SEQ ID NO: 4201 - protein, 5 aa, synthetic construct
  source 1..5: note = Description of Artificial Sequence: Synthetic peptide; note = XENP019342 vhCDR1
SYTMH

SEQ ID NO: 4202 - protein, 17 aa, synthetic construct
  source 1..17: note = Description of Artificial Sequence: Synthetic peptide; note = XENP019342 vhCDR2
FISYDGNNKYYADSVKG

SEQ ID NO: 4203 - protein, 9 aa, synthetic construct
  source 1..9: note = Description of Artificial Sequence: Synthetic peptide; note = XENP019342 vhCDR3
TGWLGPFSY

SEQ ID NO: 4204 - protein, 215 aa, synthetic construct; identical to SEQ ID NO: 2924
  source 1..215: note = Description of Artificial Sequence: Synthetic polypeptide; note = XENP019342 [CTLA-4]_H0.128_L0_Fab Light Chain

SEQ ID NO: 4205 - protein, 108 aa, synthetic construct; identical to SEQ ID NO: 23
  source 1..108: note = Description of Artificial Sequence: Synthetic polypeptide; note = VL of XENP019342

SEQ ID NO: 4206 - protein, 12 aa, synthetic construct
  source 1..12: note = Description of Artificial Sequence: Synthetic peptide; note = XENP019342 vlCDR1
RASQSVGSSYLA

SEQ ID NO: 4207 - protein, 7 aa, synthetic construct
  source 1..7: note = Description of Artificial Sequence: Synthetic peptide; note = XENP019342 vlCDR2
GAFSRAT

SEQ ID NO: 4208 - protein, 9 aa, synthetic construct
  source 1..9: note = Description of Artificial Sequence: Synthetic peptide; note = XENP019342 vlCDR3
QQYGSSPWT

SEQ ID NO: 4209 - protein, 221 aa, synthetic construct
  source 1..221: note = Description of Artificial Sequence: Synthetic polypeptide; note = XENP019343 [CTLA-4]_H0.129_L0_Fab Heavy Chain
QVQLVESGGGVVQPGRSLRLSCAASGFTFSSYTMHWVRQAPGKGLEWVTFISYDGNNKYYADSVKGRFTISRDNSKNTLYLQMNSLRAEDTAIYYCARTGWLGPFQYWGQGTLVTVSSASTKGPSVFPLAPSSKSTSGGTAALGCLVKDYFPEPVTVSWNSGALTSGVHTFPAVLQSSGLYSLSSVVTVPSSSLGTQTYICNVNHKPSNTKVDKKVEPKSC

SEQ ID NO: 4210 - protein, 118 aa, synthetic construct; identical to SEQ ID NO: 1345
  source 1..118: note = Description of Artificial Sequence: Synthetic polypeptide; note = VH of XENP019343

SEQ ID NO: 4211 - protein, 5 aa, synthetic construct
  source 1..5: note = Description of Artificial Sequence: Synthetic peptide; note = XENP019343 vhCDR1
SYTMH

SEQ ID NO: 4212 - protein, 17 aa, synthetic construct
  source 1..17: note = Description of Artificial Sequence: Synthetic peptide; note = XENP019343 vhCDR2
FISYDGNNKYYADSVKG

SEQ ID NO: 4213 - protein, 9 aa, synthetic construct
  source 1..9: note = Description of Artificial Sequence: Synthetic peptide; note = XENP019343 vhCDR3
TGWLGPFQY

SEQ ID NO: 4214 - protein, 215 aa, synthetic construct; identical to SEQ ID NO: 2924
  source 1..215: note = Description of Artificial Sequence: Synthetic polypeptide; note = XENP019343 [CTLA-4]_H0.129_L0_Fab Light Chain

SEQ ID NO: 4215 - protein, 108 aa, synthetic construct; identical to SEQ ID NO: 23
  source 1..108: note = Description of Artificial Sequence: Synthetic polypeptide; note = VL of XENP019343

SEQ ID NO: 4216 - protein, 12 aa, synthetic construct
  source 1..12: note = Description of Artificial Sequence: Synthetic peptide; note = XENP019343 vlCDR1
RASQSVGSSYLA

SEQ ID NO: 4217 - protein, 7 aa, synthetic construct
  source 1..7: note = Description of Artificial Sequence: Synthetic peptide; note = XENP019343 vlCDR2
GAFSRAT

SEQ ID NO: 4218 - protein, 9 aa, synthetic construct
  source 1..9: note = Description of Artificial Sequence: Synthetic peptide; note = XENP019343 vlCDR3
QQYGSSPWT

SEQ ID NO: 4219 - protein, 221 aa, synthetic construct
  source 1..221: note = Description of Artificial Sequence: Synthetic polypeptide; note = XENP019344 [CTLA-4]_H0.130_L0_Fab Heavy Chain
QVQLVESGGGVVQPGRSLRLSCAASGFTFSSYTMHWVRQAPGKGLEWVTFISYDGNNKYYADSVKGRFTISRDNSKNTLYLQMNSLRAEDTAIYYCARTGWLGPFDHWGQGTLVTVSSASTKGPSVFPLAPSSKSTSGGTAALGCLVKDYFPEPVTVSWNSGALTSGVHTFPAVLQSSGLYSLSSVVTVPSSSLGTQTYICNVNHKPSNTKVDKKVEPKSC

SEQ ID NO: 4220 - protein, 118 aa, synthetic construct; identical to SEQ ID NO: 1354
  source 1..118: note = Description of Artificial Sequence: Synthetic polypeptide; note = VH of XENP019344

SEQ ID NO: 4221 - protein, 5 aa, synthetic construct
  source 1..5: note = Description of Artificial Sequence: Synthetic peptide; note = XENP019344 vhCDR1
SYTMH

SEQ ID NO: 4222 - protein, 17 aa, synthetic construct
  source 1..17: note = Description of Artificial Sequence: Synthetic peptide; note = XENP019344 vhCDR2
FISYDGNNKYYADSVKG

SEQ ID NO: 4223 - protein, 9 aa, synthetic construct
  source 1..9: note = Description of Artificial Sequence: Synthetic peptide; note = XENP019344 vhCDR3
TGWLGPFDH

SEQ ID NO: 4224 - protein, 215 aa, synthetic construct; identical to SEQ ID NO: 2924
  source 1..215: note = Description of Artificial Sequence: Synthetic polypeptide; note = XENP019344 [CTLA-4]_H0.130_L0_Fab Light Chain

SEQ ID NO: 4225 - protein, 108 aa, synthetic construct; identical to SEQ ID NO: 23
  source 1..108: note = Description of Artificial Sequence: Synthetic polypeptide; note = VL of XENP019344

SEQ ID NO: 4226 - protein, 12 aa, synthetic construct
  source 1..12: note = Description of Artificial Sequence: Synthetic peptide; note = XENP019344 vlCDR1
RASQSVGSSYLA

SEQ ID NO: 4227 - protein, 7 aa, synthetic construct
  source 1..7: note = Description of Artificial Sequence: Synthetic peptide; note = XENP019344 vlCDR2
GAFSRAT

SEQ ID NO: 4228 - protein, 9 aa, synthetic construct
  source 1..9: note = Description of Artificial Sequence: Synthetic peptide; note = XENP019344 vlCDR3
QQYGSSPWT

SEQ ID NO: 4229 - protein, 221 aa, synthetic construct
  source 1..221: note = Description of Artificial Sequence: Synthetic polypeptide; note = XENP019345 [CTLA-4]_H0.131_L0_Fab Heavy Chain
QVQLVESGGGVVQPGRSLRLSCAASGFTFSSYTMHWVRQAPGKGLEWVTFISYDGNNKYYADSVKGRFTISRDNSKNTLYLQMNSLRAEDTAIYYCARTGWLGPFDLWGQGTLVTVSSASTKGPSVFPLAPSSKSTSGGTAALGCLVKDYFPEPVTVSWNSGALTSGVHTFPAVLQSSGLYSLSSVVTVPSSSLGTQTYICNVNHKPSNTKVDKKVEPKSC

SEQ ID NO: 4230 - protein, 118 aa, synthetic construct; identical to SEQ ID NO: 1363
  source 1..118: note = Description of Artificial Sequence: Synthetic polypeptide; note = VH of XENP019345

SEQ ID NO: 4231 - protein, 5 aa, synthetic construct
  source 1..5: note = Description of Artificial Sequence: Synthetic peptide; note = XENP019345 vhCDR1
SYTMH

SEQ ID NO: 4232 - protein, 17 aa, synthetic construct
  source 1..17: note = Description of Artificial Sequence: Synthetic peptide; note = XENP019345 vhCDR2
FISYDGNNKYYADSVKG

SEQ ID NO: 4233 - protein, 9 aa, synthetic construct
  source 1..9: note = Description of Artificial Sequence: Synthetic peptide; note = XENP019345 vhCDR3
TGWLGPFDL

SEQ ID NO: 4234 - protein, 215 aa, synthetic construct; identical to SEQ ID NO: 2924
  source 1..215: note = Description of Artificial Sequence: Synthetic polypeptide; note = XENP019345 [CTLA-4]_H0.131_L0_Fab Light Chain

SEQ ID NO: 4235 - protein, 108 aa, synthetic construct; identical to SEQ ID NO: 23
  source 1..108: note = Description of Artificial Sequence: Synthetic polypeptide; note = VL of XENP019345

SEQ ID NO: 4236 - protein, 12 aa, synthetic construct
  source 1..12: note = Description of Artificial Sequence: Synthetic peptide; note = XENP019345 vlCDR1
RASQSVGSSYLA

SEQ ID NO: 4237 - protein, 7 aa, synthetic construct
  source 1..7: note = Description of Artificial Sequence: Synthetic peptide; note = XENP019345 vlCDR2
GAFSRAT

SEQ ID NO: 4238 - protein, 9 aa, synthetic construct
  source 1..9: note = Description of Artificial Sequence: Synthetic peptide; note = XENP019345 vlCDR3
QQYGSSPWT

SEQ ID NO: 4239 - protein, 221 aa, synthetic construct
  source 1..221: note = Description of Artificial Sequence: Synthetic polypeptide; note = XENP019346 [CTLA-4]_H0.132_L0_Fab Heavy Chain
QVQLVESGGGVVQPGRSLRLSCAASGFTFSSYTMHWVRQAPGKGLEWVTFISYDGNNKYYADSVKGRFTISRDNSKNTLYLQMNSLRAEDTAIYYCARTGWLGPFDSWGQGTLVTVSSASTKGPSVFPLAPSSKSTSGGTAALGCLVKDYFPEPVTVSWNSGALTSGVHTFPAVLQSSGLYSLSSVVTVPSSSLGTQTYICNVNHKPSNTKVDKKVEPKSC

SEQ ID NO: 4240 - protein, 118 aa, synthetic construct; identical to SEQ ID NO: 1372
  source 1..118: note = Description of Artificial Sequence: Synthetic polypeptide; note = VH of XENP019346

SEQ ID NO: 4241 - protein, 5 aa, synthetic construct
  source 1..5: note = Description of Artificial Sequence: Synthetic peptide; note = XENP019346 vhCDR1
SYTMH

SEQ ID NO: 4242 - protein, 17 aa, synthetic construct
  source 1..17: note = Description of Artificial Sequence: Synthetic peptide; note = XENP019346 vhCDR2
FISYDGNNKYYADSVKG

SEQ ID NO: 4243 - protein, 9 aa, synthetic construct
  source 1..9: note = Description of Artificial Sequence: Synthetic peptide; note = XENP019346 vhCDR3
TGWLGPFDS

SEQ ID NO: 4244 - protein, 215 aa, synthetic construct; identical to SEQ ID NO: 2924
  source 1..215: note = Description of Artificial Sequence: Synthetic polypeptide; note = XENP019346 [CTLA-4]_H0.132_L0_Fab Light Chain

SEQ ID NO: 4245 - protein, 108 aa, synthetic construct; identical to SEQ ID NO: 23
  source 1..108: note = Description of Artificial Sequence: Synthetic polypeptide; note = VL of XENP019346

SEQ ID NO: 4246 - protein, 12 aa, synthetic construct
  source 1..12: note = Description of Artificial Sequence: Synthetic peptide; note = XENP019346 vlCDR1
RASQSVGSSYLA

SEQ ID NO: 4247 - protein, 7 aa, synthetic construct
  source 1..7: note = Description of Artificial Sequence: Synthetic peptide; note = XENP019346 vlCDR2
GAFSRAT

SEQ ID NO: 4248 - protein, 9 aa, synthetic construct
  source 1..9: note = Description of Artificial Sequence: Synthetic peptide; note = XENP019346 vlCDR3
QQYGSSPWT

SEQ ID NO: 4249 - protein, 221 aa, synthetic construct
  source 1..221: note = Description of Artificial Sequence: Synthetic polypeptide; note = XENP019347 [CTLA-4]_H0.133_L0_Fab Heavy Chain
QVQLVESGGGVVQPGRSLRLSCAASGFTFSSYTMHWVRQAPGKGLEWVTFISYDGNNKYYADSVKGRFTISRDNSKNTLYLQMNSLRAEDTAIYYCARTGWLGPFDVWGQGTLVTVSSASTKGPSVFPLAPSSKSTSGGTAALGCLVKDYFPEPVTVSWNSGALTSGVHTFPAVLQSSGLYSLSSVVTVPSSSLGTQTYICNVNHKPSNTKVDKKVEPKSC

SEQ ID NO: 4250 - protein, 118 aa, synthetic construct; identical to SEQ ID NO: 1381
  source 1..118: note = Description of Artificial Sequence: Synthetic polypeptide; note = VH of XENP019347

SEQ ID NO: 4251 - protein, 5 aa, synthetic construct
  source 1..5: note = Description of Artificial Sequence: Synthetic peptide; note = XENP019347 vhCDR1
SYTMH

SEQ ID NO: 4252 - protein, 17 aa, synthetic construct
  source 1..17: note = Description of Artificial Sequence: Synthetic peptide; note = XENP019347 vhCDR2
FISYDGNNKYYADSVKG

SEQ ID NO: 4253 - protein, 9 aa, synthetic construct
  source 1..9: note = Description of Artificial Sequence: Synthetic peptide; note = XENP019347 vhCDR3
TGWLGPFDV

SEQ ID NO: 4254 - protein, 215 aa, synthetic construct; identical to SEQ ID NO: 2924
  source 1..215: note = Description of Artificial Sequence: Synthetic polypeptide; note = XENP019347 [CTLA-4]_H0.133_L0_Fab Light Chain

SEQ ID NO: 4255 - protein, 108 aa, synthetic construct; identical to SEQ ID NO: 23
  source 1..108: note = Description of Artificial Sequence: Synthetic polypeptide; note = VL of XENP019347

SEQ ID NO: 4256 - protein, 12 aa, synthetic construct
  source 1..12: note = Description of Artificial Sequence: Synthetic peptide; note = XENP019347 vlCDR1
RASQSVGSSYLA

SEQ ID NO: 4257 - protein, 7 aa, synthetic construct
  source 1..7: note = Description of Artificial Sequence: Synthetic peptide; note = XENP019347 vlCDR2
GAFSRAT

SEQ ID NO: 4258 - protein, 9 aa, synthetic construct
  source 1..9: note = Description of Artificial Sequence: Synthetic peptide; note = XENP019347 vlCDR3
QQYGSSPWT

SEQ ID NO: 4259 - protein, 221 aa, synthetic construct
  source 1..221: note = Description of Artificial Sequence: Synthetic polypeptide; note = XENP019348 [CTLA-4]_H0.134_L0_Fab Heavy Chain
QVQLVESGGGVVQPGRSLRLSCAASGFTFSSYTMHWVRQAPGKGLEWVTFISYDGNNKYYADSVKGRFTISRDNSKNTLYLQMNSLRAEDTAIYYCARTGWLGPFDYWGRGTLVTVSSASTKGPSVFPLAPSSKSTSGGTAALGCLVKDYFPEPVTVSWNSGALTSGVHTFPAVLQSSGLYSLSSVVTVPSSSLGTQTYICNVNHKPSNTKVDKKVEPKSC

SEQ ID NO: 4260 - protein, 118 aa, synthetic construct; identical to SEQ ID NO: 67
  source 1..118: note = Description of Artificial Sequence: Synthetic polypeptide; note = VH of XENP019348

SEQ ID NO: 4261 - protein, 5 aa, synthetic construct
  source 1..5: note = Description of Artificial Sequence: Synthetic peptide; note = XENP019348 vhCDR1
SYTMH

SEQ ID NO: 4262 - protein, 17 aa, synthetic construct
  source 1..17: note = Description of Artificial Sequence: Synthetic peptide; note = XENP019348 vhCDR2
FISYDGNNKYYADSVKG

SEQ ID NO: 4263 - protein, 9 aa, synthetic construct
  source 1..9: note = Description of Artificial Sequence: Synthetic peptide; note = XENP019348 vhCDR3
TGWLGPFDY

SEQ ID NO: 4264 - protein, 215 aa, synthetic construct; identical to SEQ ID NO: 2924
  source 1..215: note = Description of Artificial Sequence: Synthetic polypeptide; note = XENP019348 [CTLA-4]_H0.134_L0_Fab Light Chain

SEQ ID NO: 4265 - protein, 108 aa, synthetic construct; identical to SEQ ID NO: 23
  source 1..108: note = Description of Artificial Sequence: Synthetic polypeptide; note = VL of XENP019348

SEQ ID NO: 4266 - protein, 12 aa, synthetic construct
  source 1..12: note = Description of Artificial Sequence: Synthetic peptide; note = XENP019348 vlCDR1
RASQSVGSSYLA

SEQ ID NO: 4267 - protein, 7 aa, synthetic construct
  source 1..7: note = Description of Artificial Sequence: Synthetic peptide; note = XENP019348 vlCDR2
GAFSRAT

SEQ ID NO: 4268 - protein, 9 aa, synthetic construct
  source 1..9: note = Description of Artificial Sequence: Synthetic peptide; note = XENP019348 vlCDR3
QQYGSSPWT

SEQ ID NO: 4269 - protein, 221 aa, synthetic construct
  source 1..221: note = Description of Artificial Sequence: Synthetic polypeptide; note = XENP019349 [CTLA-4]_H0.135_L0_Fab Heavy Chain
QVQLVESGGGVVQPGRSLRLSCAASGFTFSSYTMHWVRQAPGKGLEWVTFISYDGNNKYYADSVKGRFTISRDNSKNTLYLQMNSLRAEDTAIYYCARTGWLGPFDYWGQGTMVTVSSASTKGPSVFPLAPSSKSTSGGTAALGCLVKDYFPEPVTVSWNSGALTSGVHTFPAVLQSSGLYSLSSVVTVPSSSLGTQTYICNVNHKPSNTKVDKKVEPKSC

SEQ ID NO: 4270 - protein, 118 aa, synthetic construct; identical to SEQ ID NO: 1399
  source 1..118: note = Description of Artificial Sequence: Synthetic polypeptide; note = VH of XENP019349

SEQ ID NO: 4271 - protein, 5 aa, synthetic construct
  source 1..5: note = Description of Artificial Sequence: Synthetic peptide; note = XENP019349 vhCDR1
SYTMH

SEQ ID NO: 4272 - protein, 17 aa, synthetic construct
  source 1..17: note = Description of Artificial Sequence: Synthetic peptide; note = XENP019349 vhCDR2
FISYDGNNKYYADSVKG

SEQ ID NO: 4273 - protein, 9 aa, synthetic construct
  source 1..9: note = Description of Artificial Sequence: Synthetic peptide; note = XENP019349 vhCDR3
TGWLGPFDY

SEQ ID NO: 4274 - protein, 215 aa, synthetic construct; identical to SEQ ID NO: 2924
  source 1..215: note = Description of Artificial Sequence: Synthetic polypeptide; note = XENP019349 [CTLA-4]_H0.135_L0_Fab Light Chain

SEQ ID NO: 4275 - protein, 108 aa, synthetic construct; identical to SEQ ID NO: 23
  source 1..108: note = Description of Artificial Sequence: Synthetic polypeptide; note = VL of XENP019349

SEQ ID NO: 4276 - protein, 12 aa, synthetic construct
  source 1..12: note = Description of Artificial Sequence: Synthetic peptide; note = XENP019349 vlCDR1
RASQSVGSSYLA

SEQ ID NO: 4277 - protein, 7 aa, synthetic construct
  source 1..7: note = Description of Artificial Sequence: Synthetic peptide; note = XENP019349 vlCDR2
GAFSRAT

SEQ ID NO: 4278 - protein, 9 aa, synthetic construct
  source 1..9: note = Description of Artificial Sequence: Synthetic peptide; note = XENP019349 vlCDR3
QQYGSSPWT

SEQ ID NO: 4279 - protein, 221 aa, synthetic construct
  source 1..221: note = Description of Artificial Sequence: Synthetic polypeptide; note = XENP019350 [CTLA-4]_H0.136_L0_Fab Heavy Chain
QVQLVESGGGVVQPGRSLRLSCAASGFTFSSYTMHWVRQAPGKGLEWVTFISYDGNNKYYADSVKGRFTISRDNSKNTLYLQMNSLRAEDTAIYYCARTGWLGPFDYWGQGTTVTVSSASTKGPSVFPLAPSSKSTSGGTAALGCLVKDYFPEPVTVSWNSGALTSGVHTFPAVLQSSGLYSLSSVVTVPSSSLGTQTYICNVNHKPSNTKVDKKVEPKSC

SEQ ID NO: 4280 - protein, 118 aa, synthetic construct; identical to SEQ ID NO: 1408
  source 1..118: note = Description of Artificial Sequence: Synthetic polypeptide; note = VH of XENP019350

SEQ ID NO: 4281 - protein, 5 aa, synthetic construct
  source 1..5: note = Description of Artificial Sequence: Synthetic peptide; note = XENP019350 vhCDR1
SYTMH

SEQ ID NO: 4282 - protein, 17 aa, synthetic construct
  source 1..17: note = Description of Artificial Sequence: Synthetic peptide; note = XENP019350 vhCDR2
FISYDGNNKYYADSVKG

SEQ ID NO: 4283 - protein, 9 aa, synthetic construct
  source 1..9: note = Description of Artificial Sequence: Synthetic peptide; note = XENP019350 vhCDR3
TGWLGPFDY

SEQ ID NO: 4284 - protein, 215 aa, synthetic construct; identical to SEQ ID NO: 2924
  source 1..215: note = Description of Artificial Sequence: Synthetic polypeptide; note = XENP019350 [CTLA-4]_H0.136_L0_Fab Light Chain

SEQ ID NO: 4285 - protein, 108 aa, synthetic construct; identical to SEQ ID NO: 23
  source 1..108: note = Description of Artificial Sequence: Synthetic polypeptide; note = VL of XENP019350

SEQ ID NO: 4286 - protein, 12 aa, synthetic construct
  source 1..12: note = Description of Artificial Sequence: Synthetic peptide; note = XENP019350 vlCDR1
RASQSVGSSYLA

SEQ ID NO: 4287 - protein, 7 aa, synthetic construct
  source 1..7: note = Description of Artificial Sequence: Synthetic peptide; note = XENP019350 vlCDR2
GAFSRAT

SEQ ID NO: 4288 - protein, 9 aa, synthetic construct
  source 1..9: note = Description of Artificial Sequence: Synthetic peptide; note = XENP019350 vlCDR3
QQYGSSPWT

SEQ ID NO: 4289 - protein, 221 aa, synthetic construct; identical to SEQ ID NO: 2919
  source 1..221: note = Description of Artificial Sequence: Synthetic polypeptide; note = XENP019416 [CTLA-4]_H0_L0.1_Fab Heavy Chain

SEQ ID NO: 4290 - protein, 118 aa, synthetic construct; identical to SEQ ID NO: 22
  source 1..118: note = Description of Artificial Sequence: Synthetic polypeptide; note = VH of XENP019416

SEQ ID NO: 4291 - protein, 5 aa, synthetic construct
  source 1..5: note = Description of Artificial Sequence: Synthetic peptide; note = XENP019416 vhCDR1
SYTMH

SEQ ID NO: 4292 - protein, 17 aa, synthetic construct
  source 1..17: note = Description of Artificial Sequence: Synthetic peptide; note = XENP019416 vhCDR2
FISYDGNNKYYADSVKG

SEQ ID NO: 4293 - protein, 9 aa, synthetic construct
  source 1..9: note = Description of Artificial Sequence: Synthetic peptide; note = XENP019416 vhCDR3
TGWLGPFDY

SEQ ID NO: 4294 - protein, 215 aa, synthetic construct
  source 1..215: note = Description of Artificial Sequence: Synthetic polypeptide; note = XENP019416 [CTLA-4]_H0_L0.1_Fab Light Chain
AIVLTQSPGTLSLSPGERATLSCRASQSVGSSYLAWYQQKPGQAPRLLIYGAFSRATGIPDRFSGSGSGTDFTLTISRLEPEDFAVYYCQQYGSSPWTFGQGTKVEIKRTVAAPSVFIFPPSDEQLKSGTASVVCLLNNFYPREAKVQWKVDNALQSGNSQESVTEQDSKDSTYSLSSTLTLSKADYEKHKVYACEVTHQGLSSPVTKSFNRGEC

SEQ ID NO: 4295 - protein, 108 aa, synthetic construct; identical to SEQ ID NO: 1418
  source 1..108: note = Description of Artificial Sequence: Synthetic polypeptide; note = VL of XENP019416

SEQ ID NO: 4296 - protein, 12 aa, synthetic construct
  source 1..12: note = Description of Artificial Sequence: Synthetic peptide; note = XENP019416 vlCDR1
RASQSVGSSYLA

SEQ ID NO: 4297 - protein, 7 aa, synthetic construct
  source 1..7: note = Description of Artificial Sequence: Synthetic peptide; note = XENP019416 vlCDR2
GAFSRAT

SEQ ID NO: 4298 - protein, 9 aa, synthetic construct
  source 1..9: note = Description of Artificial Sequence: Synthetic peptide; note = XENP019416 vlCDR3
QQYGSSPWT

SEQ ID NO: 4299 - protein, 221 aa, synthetic construct; identical to SEQ ID NO: 2919
  source 1..221: note = Description of Artificial Sequence: Synthetic polypeptide; note = XENP019417 [CTLA-4]_H0_L0.2_Fab Heavy Chain

SEQ ID NO: 4300 - protein, 118 aa, synthetic construct; identical to SEQ ID NO: 22
  source 1..118: note = Description of Artificial Sequence: Synthetic polypeptide; note = VH of XENP019417

SEQ ID NO: 4301 - protein, 5 aa, synthetic construct
  source 1..5: note = Description of Artificial Sequence: Synthetic peptide; note = XENP019417 vhCDR1
SYTMH

SEQ ID NO: 4302 - protein, 17 aa, synthetic construct
  source 1..17: note = Description of Artificial Sequence: Synthetic peptide; note = XENP019417 vhCDR2
FISYDGNNKYYADSVKG

SEQ ID NO: 4303 - protein, 9 aa, synthetic construct
  source 1..9: note = Description of Artificial Sequence: Synthetic peptide; note = XENP019417 vhCDR3
TGWLGPFDY

SEQ ID NO: 4304 - protein, 215 aa, synthetic construct
  source 1..215: note = Description of Artificial Sequence: Synthetic polypeptide; note = XENP019417 [CTLA-4]_H0_L0.2_Fab Light Chain
DIVLTQSPGTLSLSPGERATLSCRASQSVGSSYLAWYQQKPGQAPRLLIYGAFSRATGIPDRFSGSGSGTDFTLTISRLEPEDFAVYYCQQYGSSPWTFGQGTKVEIKRTVAAPSVFIFPPSDEQLKSGTASVVCLLNNFYPREAKVQWKVDNALQSGNSQESVTEQDSKDSTYSLSSTLTLSKADYEKHKVYACEVTHQGLSSPVTKSFNRGEC

SEQ ID NO: 4305 - protein, 108 aa, synthetic construct; identical to SEQ ID NO: 1427
  source 1..108: note = Description of Artificial Sequence: Synthetic polypeptide; note = VL of XENP019417

SEQ ID NO: 4306 - protein, 12 aa, synthetic construct
  source 1..12: note = Description of Artificial Sequence: Synthetic peptide; note = XENP019417 vlCDR1
RASQSVGSSYLA

SEQ ID NO: 4307 - protein, 7 aa, synthetic construct
  source 1..7: note = Description of Artificial Sequence: Synthetic peptide; note = XENP019417 vlCDR2
GAFSRAT

SEQ ID NO: 4308 - protein, 9 aa, synthetic construct
  source 1..9: note = Description of Artificial Sequence: Synthetic peptide; note = XENP019417 vlCDR3
QQYGSSPWT

SEQ ID NO: 4309 - protein, 221 aa, synthetic construct; identical to SEQ ID NO: 2919
  source 1..221: note = Description of Artificial Sequence: Synthetic polypeptide; note = XENP019418 [CTLA-4]_H0_L0.3_Fab Heavy Chain

SEQ ID NO: 4310 - protein, 118 aa, synthetic construct; identical to SEQ ID NO: 22
  source 1..118: note = Description of Artificial Sequence: Synthetic polypeptide; note = VH of XENP019418

SEQ ID NO: 4311 - protein, 5 aa, synthetic construct
  source 1..5: note = Description of Artificial Sequence: Synthetic peptide; note = XENP019418 vhCDR1
SYTMH

SEQ ID NO: 4312 - protein, 17 aa, synthetic construct
  source 1..17: note = Description of Artificial Sequence: Synthetic peptide; note = XENP019418 vhCDR2
FISYDGNNKYYADSVKG

SEQ ID NO: 4313 - protein, 9 aa, synthetic construct
  source 1..9: note = Description of Artificial Sequence: Synthetic peptide; note = XENP019418 vhCDR3
TGWLGPFDY

SEQ ID NO: 4314 - protein, 215 aa, synthetic construct
  source 1..215: note = Description of Artificial Sequence: Synthetic polypeptide; note = XENP019418 [CTLA-4]_H0_L0.3_Fab Light Chain
QIVLTQSPGTLSLSPGERATLSCRASQSVGSSYLAWYQQKPGQAPRLLIYGAFSRATGIPDRFSGSGSGTDFTLTISRLEPEDFAVYYCQQYGSSPWTFGQGTKVEIKRTVAAPSVFIFPPSDEQLKSGTASVVCLLNNFYPREAKVQWKVDNALQSGNSQESVTEQDSKDSTYSLSSTLTLSKADYEKHKVYACEVTHQGLSSPVTKSFNRGEC

SEQ ID NO: 4315 - protein, 108 aa, synthetic construct; identical to SEQ ID NO: 1436
  source 1..108: note = Description of Artificial Sequence: Synthetic polypeptide; note = VL of XENP019418

SEQ ID NO: 4316 - protein, 12 aa, synthetic construct
  source 1..12: note = Description of Artificial Sequence: Synthetic peptide; note = XENP019418 vlCDR1
RASQSVGSSYLA

SEQ ID NO: 4317 - protein, 7 aa, synthetic construct
  source 1..7: note = Description of Artificial Sequence: Synthetic peptide; note = XENP019418 vlCDR2
GAFSRAT

SEQ ID NO: 4318 - protein, 9 aa, synthetic construct
  source 1..9: note = Description of Artificial Sequence: Synthetic peptide; note = XENP019418 vlCDR3
QQYGSSPWT

SEQ ID NO: 4319 - protein, 221 aa, synthetic construct; identical to SEQ ID NO: 2919
  source 1..221: note = Description of Artificial Sequence: Synthetic polypeptide; note = XENP019419 [CTLA-4]_H0_L0.4_Fab Heavy Chain

SEQ ID NO: 4320 - protein, 118 aa, synthetic construct; identical to SEQ ID NO: 22
  source 1..118: note = Description of Artificial Sequence: Synthetic polypeptide; note = VH of XENP019419

SEQ ID NO: 4321 - protein, 5 aa, synthetic construct
  source 1..5: note = Description of Artificial Sequence: Synthetic peptide; note = XENP019419 vhCDR1
SYTMH

SEQ ID NO: 4322 - protein, 17 aa, synthetic construct
  source 1..17: note = Description of Artificial Sequence: Synthetic peptide; note = XENP019419 vhCDR2
FISYDGNNKYYADSVKG

SEQ ID NO: 4323 - protein, 9 aa, synthetic construct
  source 1..9: note = Description of Artificial Sequence: Synthetic peptide; note = XENP019419 vhCDR3
TGWLGPFDY

SEQ ID NO: 4324 - protein, 215 aa, synthetic construct
  source 1..215: note = Description of Artificial Sequence: Synthetic polypeptide; note = XENP019419 [CTLA-4]_H0_L0.4_Fab Light Chain
RIVLTQSPGTLSLSPGERATLSCRASQSVGSSYLAWYQQKPGQAPRLLIYGAFSRATGIPDRFSGSGSGTDFTLTISRLEPEDFAVYYCQQYGSSPWTFGQGTKVEIKRTVAAPSVFIFPPSDEQLKSGTASVVCLLNNFYPREAKVQWKVDNALQSGNSQESVTEQDSKDSTYSLSSTLTLSKADYEKHKVYACEVTHQGLSSPVTKSFNRGEC

SEQ ID NO: 4325 - protein, 108 aa, synthetic construct; identical to SEQ ID NO: 1445
  source 1..108: note = Description of Artificial Sequence: Synthetic polypeptide; note = VL of XENP019419

SEQ ID NO: 4326 - protein, 12 aa, synthetic construct
  source 1..12: note = Description of Artificial Sequence: Synthetic peptide; note = XENP019419 vlCDR1
RASQSVGSSYLA

SEQ ID NO: 4327 - protein, 7 aa, synthetic construct
  source 1..7: note = Description of Artificial Sequence: Synthetic peptide; note = XENP019419 vlCDR2
GAFSRAT

SEQ ID NO: 4328 - protein, 9 aa, synthetic construct
  source 1..9: note = Description of Artificial Sequence: Synthetic peptide; note = XENP019419 vlCDR3
QQYGSSPWT

SEQ ID NO: 4329 - protein, 221 aa, synthetic construct; identical to SEQ ID NO: 2919
  source 1..221: note = Description of Artificial Sequence: Synthetic polypeptide; note = XENP019420 [CTLA-4]_H0_L0.5_Fab Heavy Chain

SEQ ID NO: 4330 - protein, 118 aa, synthetic construct; identical to SEQ ID NO: 22
  source 1..118: note = Description of Artificial Sequence: Synthetic polypeptide; note = VH of XENP019420

SEQ ID NO: 4331 - protein, 5 aa, synthetic construct
  source 1..5: note = Description of Artificial Sequence: Synthetic peptide; note = XENP019420 vhCDR1
SYTMH

SEQ ID NO: 4332 - protein, 17 aa, synthetic construct
  source 1..17: note = Description of Artificial Sequence: Synthetic peptide; note = XENP019420 vhCDR2
FISYDGNNKYYADSVKG

SEQ ID NO: 4333 - protein, 9 aa, synthetic construct
  source 1..9: note = Description of Artificial Sequence: Synthetic peptide; note = XENP019420 vhCDR3
TGWLGPFDY

SEQ ID NO: 4334 - protein, 215 aa, synthetic construct
  source 1..215: note = Description of Artificial Sequence: Synthetic polypeptide; note = XENP019420 [CTLA-4]_H0_L0.5_Fab Light Chain
EIRLTQSPGTLSLSPGERATLSCRASQSVGSSYLAWYQQKPGQAPRLLIYGAFSRATGIPDRFSGSGSGTDFTLTISRLEPEDFAVYYCQQYGSSPWTFGQGTKVEIKRTVAAPSVFIFPPSDEQLKSGTASVVCLLNNFYPREAKVQWKVDNALQSGNSQESVTEQDSKDSTYSLSSTLTLSKADYEKHKVYACEVTHQGLSSPVTKSFNRGEC

SEQ ID NO: 4335 - protein, 108 aa, synthetic construct; identical to SEQ ID NO: 1454
  source 1..108: note = Description of Artificial Sequence: Synthetic polypeptide; note = VL of XENP019420

SEQ ID NO: 4336 - protein, 12 aa, synthetic construct
  source 1..12: note = Description of Artificial Sequence: Synthetic peptide; note = XENP019420 vlCDR1
RASQSVGSSYLA

SEQ ID NO: 4337 - protein, 7 aa, synthetic construct
  source 1..7: note = Description of Artificial Sequence: Synthetic peptide; note = XENP019420 vlCDR2
GAFSRAT

SEQ ID NO: 4338 - protein, 9 aa, synthetic construct
  source 1..9: note = Description of Artificial Sequence: Synthetic peptide; note = XENP019420 vlCDR3
QQYGSSPWT

SEQ ID NO: 4339 - protein, 221 aa, synthetic construct; identical to SEQ ID NO: 2919
  source 1..221: note = Description of Artificial Sequence: Synthetic polypeptide; note = XENP019421 [CTLA-4]_H0_L0.6_Fab Heavy Chain

SEQ ID NO: 4340 - protein, 118 aa, synthetic construct; identical to SEQ ID NO: 22
  source 1..118: note = Description of Artificial Sequence: Synthetic polypeptide; note = VH of XENP019421

SEQ ID NO: 4341 - protein, 5 aa, synthetic construct
  source 1..5: note = Description of Artificial Sequence: Synthetic peptide; note = XENP019421 vhCDR1
SYTMH

SEQ ID NO: 4342 - protein, 17 aa, synthetic construct
  source 1..17: note = Description of Artificial Sequence: Synthetic peptide; note = XENP019421 vhCDR2
FISYDGNNKYYADSVKG

SEQ ID NO: 4343 - protein, 9 aa, synthetic construct
  source 1..9: note = Description of Artificial Sequence: Synthetic peptide; note = XENP019421 vhCDR3
TGWLGPFDY

SEQ ID NO: 4344 - protein, 215 aa, synthetic construct
  source 1..215: note = Description of Artificial Sequence: Synthetic polypeptide; note = XENP019421 [CTLA-4]_H0_L0.6_Fab Light Chain
EIRLTQSPGTLSLSPGERATLSCRASQSVGSSYLAWYQQKPGQAPRLLIYGAFSRATGIPDRFSGSGSGTDFTLTISRLEPEDFAVYYCQQYGSSPWTFGEGTKVEIKRTVAAPSVFIFPPSDEQLKSGTASVVCLLNNFYPREAKVQWKVDNALQSGNSQESVTEQDSKDSTYSLSSTLTLSKADYEKHKVYACEVTHQGLSSPVTKSFNRGEC

SEQ ID NO: 4345 - protein, 108 aa, synthetic construct; identical to SEQ ID NO: 1463
  source 1..108: note = Description of Artificial Sequence: Synthetic polypeptide; note = VL of XENP019421

SEQ ID NO: 4346 - protein, 12 aa, synthetic construct
  source 1..12: note = Description of Artificial Sequence: Synthetic peptide; note = XENP019421 vlCDR1
RASQSVGSSYLA

SEQ ID NO: 4347 - protein, 7 aa, synthetic construct
  source 1..7: note = Description of Artificial Sequence: Synthetic peptide; note = XENP019421 vlCDR2
GAFSRAT

SEQ ID NO: 4348 - protein, 9 aa, synthetic construct
  source 1..9: note = Description of Artificial Sequence: Synthetic peptide; note = XENP019421 vlCDR3
QQYGSSPWT

SEQ ID NO: 4349 - protein, 221 aa, synthetic construct; identical to SEQ ID NO: 2919
  source 1..221: note = Description of Artificial Sequence: Synthetic polypeptide; note = XENP019422 [CTLA-4]_H0_L0.7_Fab Heavy Chain

SEQ ID NO: 4350 - protein, 118 aa, synthetic construct; identical to SEQ ID NO: 22
  source 1..118: note = Description of Artificial Sequence: Synthetic polypeptide; note = VH of XENP019422

SEQ ID NO: 4351 - protein, 5 aa, synthetic construct
  source 1..5: note = Description of Artificial Sequence: Synthetic peptide; note = XENP019422 vhCDR1
SYTMH

SEQ ID NO: 4352 - protein, 17 aa, synthetic construct
  source 1..17: note = Description of Artificial Sequence: Synthetic peptide; note = XENP019422 vhCDR2
FISYDGNNKYYADSVKG

SEQ ID NO: 4353 - protein, 9 aa, synthetic construct
  source 1..9: note = Description of Artificial Sequence: Synthetic peptide; note = XENP019422 vhCDR3
TGWLGPFDY

SEQ ID NO: 4354 - protein, 215 aa, synthetic construct
  source 1..215: note = Description of Artificial Sequence: Synthetic polypeptide; note = XENP019422 [CTLA-4]_H0_L0.7_Fab Light Chain
EIVMTQSPGTLSLSPGERATLSCRASQSVGSSYLAWYQQKPGQAPRLLIYGAFSRATGIPDRFSGSGSGTDFTLTISRLEPEDFAVYYCQQYGSSPWTFGQGTKVEIKRTVAAPSVFIFPPSDEQLKSGTASVVCLLNNFYPREAKVQWKVDNALQSGNSQESVTEQDSKDSTYSLSSTLTLSKADYEKHKVYACEVTHQGLSSPVTKSFNRGEC

SEQ ID NO: 4355 - protein, 108 aa, synthetic construct; identical to SEQ ID NO: 1472
  source 1..108: note = Description of Artificial Sequence: Synthetic polypeptide; note = VL of XENP019422

SEQ ID NO: 4356 - protein, 12 aa, synthetic construct
  source 1..12: note = Description of Artificial Sequence: Synthetic peptide; note = XENP019422 vlCDR1
RASQSVGSSYLA

SEQ ID NO: 4357 - protein, 7 aa, synthetic construct
  source 1..7: note = Description of Artificial Sequence: Synthetic peptide; note = XENP019422 vlCDR2
GAFSRAT

SEQ ID NO: 4358 - protein, 9 aa, synthetic construct
  source 1..9: note = Description of Artificial Sequence: Synthetic peptide; note = XENP019422 vlCDR3
QQYGSSPWT

SEQ ID NO: 4359 - protein, 221 aa, synthetic construct; identical to SEQ ID NO: 2919
  source 1..221: note = Description of Artificial Sequence: Synthetic polypeptide; note = XENP019423 [CTLA-4]_H0_L0.8_Fab Heavy Chain

SEQ ID NO: 4360 - protein, 118 aa, synthetic construct; identical to SEQ ID NO: 22
  source 1..118: note = Description of Artificial Sequence: Synthetic polypeptide; note = VH of XENP019423

SEQ ID NO: 4361 - protein, 5 aa, synthetic construct
  source 1..5: note = Description of Artificial Sequence: Synthetic peptide; note = XENP019423 vhCDR1
SYTMH

SEQ ID NO: 4362 - protein, 17 aa, synthetic construct
  source 1..17: note = Description of Artificial Sequence: Synthetic peptide; note = XENP019423 vhCDR2
FISYDGNNKYYADSVKG

SEQ ID NO: 4363 - protein, 9 aa, synthetic construct
  source 1..9: note = Description of Artificial Sequence: Synthetic peptide; note = XENP019423 vhCDR3
TGWLGPFDY

SEQ ID NO: 4364 - protein, 215 aa, synthetic construct
  source 1..215: note = Description of Artificial Sequence: Synthetic polypeptide; note = XENP019423 [CTLA-4]_H0_L0.8_Fab Light Chain
EIVLTQSPATLSLSPGERATLSCRASQSVGSSYLAWYQQKPGQAPRLLIYGAFSRATGIPDRFSGSGSGTDFTLTISRLEPEDFAVYYCQQYGSSPWTFGQGTKVEIKRTVAAPSVFIFPPSDEQLKSGTASVVCLLNNFYPREAKVQWKVDNALQSGNSQESVTEQDSKDSTYSLSSTLTLSKADYEKHKVYACEVTHQGLSSPVTKSFNRGEC

SEQ ID NO: 4365 - protein, 108 aa, synthetic construct; identical to SEQ ID NO: 1481
  source 1..108: note = Description of Artificial Sequence: Synthetic polypeptide; note = VL of XENP019423

SEQ ID NO: 4366 - protein, 12 aa, synthetic construct
  source 1..12: note = Description of Artificial Sequence: Synthetic peptide; note = XENP019423 vlCDR1
RASQSVGSSYLA

SEQ ID NO: 4367 - protein, 7 aa, synthetic construct
  source 1..7: note = Description of Artificial Sequence: Synthetic peptide; note = XENP019423 vlCDR2
GAFSRAT

SEQ ID NO: 4368 - protein, 9 aa, synthetic construct
  source 1..9: note = Description of Artificial Sequence: Synthetic peptide; note = XENP019423 vlCDR3
QQYGSSPWT

SEQ ID NO: 4369 - protein, 221 aa, synthetic construct; identical to SEQ ID NO: 2919
  source 1..221: note = Description of Artificial Sequence: Synthetic polypeptide; note = XENP019424 [CTLA-4]_H0_L0.9_Fab Heavy Chain

SEQ ID NO: 4370 - protein, 118 aa, synthetic construct; identical to SEQ ID NO: 22
  source 1..118: note = Description of Artificial Sequence: Synthetic polypeptide; note = VH of XENP019424

SEQ ID NO: 4371 - protein, 5 aa, synthetic construct
  source 1..5: note = Description of Artificial Sequence: Synthetic peptide; note = XENP019424 vhCDR1
SYTMH

SEQ ID NO: 4372 - protein, 17 aa, synthetic construct
  source 1..17: note = Description of Artificial Sequence: Synthetic peptide; note = XENP019424 vhCDR2
FISYDGNNKYYADSVKG

SEQ ID NO: 4373 - protein, 9 aa, synthetic construct
  source 1..9: note = Description of Artificial Sequence: Synthetic peptide; note = XENP019424 vhCDR3
TGWLGPFDY

SEQ ID NO: 4374 - protein, 215 aa, synthetic construct
  source 1..215: note = Description of Artificial Sequence: Synthetic polypeptide; note = XENP019424 [CTLA-4]_H0_L0.9_Fab Light Chain
EIVLTQSPPTLSLSPGERATLSCRASQSVGSSYLAWYQQKPGQAPRLLIYGAFSRATGIPDRFSGSGSGTDFTLTISRLEPEDFAVYYCQQYGSSPWTFGQGTKVEIKRTVAAPSVFIFPPSDEQLKSGTASVVCLLNNFYPREAKVQWKVDNALQSGNSQESVTEQDSKDSTYSLSSTLTLSKADYEKHKVYACEVTHQGLSSPVTKSFNRGEC

SEQ ID NO: 4375 - protein, 108 aa, synthetic construct; identical to SEQ ID NO: 1490
  source 1..108: note = Description of Artificial Sequence: Synthetic polypeptide; note = VL of XENP019424

SEQ ID NO: 4376 - protein, 12 aa, synthetic construct
  source 1..12: note = Description of Artificial Sequence: Synthetic peptide; note = XENP019424 vlCDR1
RASQSVGSSYLA

SEQ ID NO: 4377 - protein, 7 aa, synthetic construct
  source 1..7: note = Description of Artificial Sequence: Synthetic peptide; note = XENP019424 vlCDR2
GAFSRAT

SEQ ID NO: 4378 - protein, 9 aa, synthetic construct
  source 1..9: note = Description of Artificial Sequence: Synthetic peptide; note = XENP019424 vlCDR3
QQYGSSPWT

SEQ ID NO: 4379 - protein, 221 aa, synthetic construct; identical to SEQ ID NO: 2919
  source 1..221: note = Description of Artificial Sequence: Synthetic polypeptide; note = XENP019425 [CTLA-4]_H0_L0.10_Fab Heavy Chain

SEQ ID NO: 4380 - protein, 118 aa, synthetic construct; identical to SEQ ID NO: 22
  source 1..118: note = Description of Artificial Sequence: Synthetic polypeptide; note = VH of XENP019425

SEQ ID NO: 4381 - protein, 5 aa, synthetic construct
  source 1..5: note = Description of Artificial Sequence: Synthetic peptide; note = XENP019425 vhCDR1
SYTMH

SEQ ID NO: 4382 - protein, 17 aa, synthetic construct
  source 1..17: note = Description of Artificial Sequence: Synthetic peptide; note = XENP019425 vhCDR2
FISYDGNNKYYADSVKG

SEQ ID NO: 4383 - protein, 9 aa, synthetic construct
  source 1..9: note = Description of Artificial Sequence: Synthetic peptide; note = XENP019425 vhCDR3
TGWLGPFDY

SEQ ID NO: 4384 - protein, 215 aa, synthetic construct
  source 1..215: note = Description of Artificial Sequence: Synthetic polypeptide; note = XENP019425 [CTLA-4]_H0_L0.10_Fab Light Chain
EIVLTQSPSTLSLSPGERATLSCRASQSVGSSYLAWYQQKPGQAPRLLIYGAFSRATGIPDRFSGSGSGTDFTLTISRLEPEDFAVYYCQQYGSSPWTFGQGTKVEIKRTVAAPSVFIFPPSDEQLKSGTASVVCLLNNFYPREAKVQWKVDNALQSGNSQESVTEQDSKDSTYSLSSTLTLSKADYEKHKVYACEVTHQGLSSPVTKSFNRGEC

SEQ ID NO: 4385 - protein, 108 aa, synthetic construct; identical to SEQ ID NO: 1499
  source 1..108: note = Description of Artificial Sequence: Synthetic polypeptide; note = VL of XENP019425

SEQ ID NO: 4386 - protein, 12 aa, synthetic construct
  source 1..12: note = Description of Artificial Sequence: Synthetic peptide; note = XENP019425 vlCDR1
RASQSVGSSYLA

SEQ ID NO: 4387 - protein, 7 aa, synthetic construct
  source 1..7: note = Description of Artificial Sequence: Synthetic peptide; note = XENP019425 vlCDR2
GAFSRAT

SEQ ID NO: 4388 - protein, 9 aa, synthetic construct
  source 1..9: note = Description of Artificial Sequence: Synthetic peptide; note = XENP019425 vlCDR3
QQYGSSPWT

SEQ ID NO: 4389 - protein, 221 aa, synthetic construct; identical to SEQ ID NO: 2919
  source 1..221: note = Description of Artificial Sequence: Synthetic polypeptide; note = XENP019426 [CTLA-4]_H0_L0.11_Fab Heavy Chain

SEQ ID NO: 4390 - protein, 118 aa, synthetic construct; identical to SEQ ID NO: 22
  source 1..118: note = Description of Artificial Sequence: Synthetic polypeptide; note = VH of XENP019426

SEQ ID NO: 4391 - protein, 5 aa, synthetic construct
  source 1..5: note = Description of Artificial Sequence: Synthetic peptide; note = XENP019426 vhCDR1
SYTMH

SEQ ID NO: 4392 - protein, 17 aa, synthetic construct
  source 1..17: note = Description of Artificial Sequence: Synthetic peptide; note = XENP019426 vhCDR2
FISYDGNNKYYADSVKG

SEQ ID NO: 4393 - protein, 9 aa, synthetic construct
  source 1..9: note = Description of Artificial Sequence: Synthetic peptide; note = XENP019426 vhCDR3
TGWLGPFDY

SEQ ID NO: 4394 - protein, 215 aa, synthetic construct
  source 1..215: note = Description of Artificial Sequence: Synthetic polypeptide; note = XENP019426 [CTLA-4]_H0_L0.11_Fab Light Chain
EIVLTQSPGSLSLSPGERATLSCRASQSVGSSYLAWYQQKPGQAPRLLIYGAFSRATGIPDRFSGSGSGTDFTLTISRLEPEDFAVYYCQQYGSSPWTFGQGTKVEIKRTVAAPSVFIFPPSDEQLKSGTASVVCLLNNFYPREAKVQWKVDNALQSGNSQESVTEQDSKDSTYSLSSTLTLSKADYEKHKVYACEVTHQGLSSPVTKSFNRGEC

SEQ ID NO: 4395 - protein, 108 aa, synthetic construct; identical to SEQ ID NO: 1508
  source 1..108: note = Description of Artificial Sequence: Synthetic polypeptide; note = VL of XENP019426

SEQ ID NO: 4396 - protein, 12 aa, synthetic construct
  source 1..12: note = Description of Artificial Sequence: Synthetic peptide; note = XENP019426 vlCDR1
RASQSVGSSYLA

SEQ ID NO: 4397 - protein, 7 aa, synthetic construct
  source 1..7: note = Description of Artificial Sequence: Synthetic peptide; note = XENP019426 vlCDR2
GAFSRAT

SEQ ID NO: 4398 - protein, 9 aa, synthetic construct
  source 1..9: note = Description of Artificial Sequence: Synthetic peptide; note = XENP019426 vlCDR3
QQYGSSPWT

SEQ ID NO: 4399 - protein, 221 aa, synthetic construct; identical to SEQ ID NO: 2919
  source 1..221: note = Description of Artificial Sequence: Synthetic polypeptide; note = XENP019427 [CTLA-4]_H0_L0.12_Fab Heavy Chain

SEQ ID NO: 4400 - protein, 118 aa, synthetic construct; identical to SEQ ID NO: 22
  source 1..118: note = Description of Artificial Sequence: Synthetic polypeptide; note = VH of XENP019427

SEQ ID NO: 4401 - protein, 5 aa, synthetic construct
  source 1..5: note = Description of Artificial Sequence: Synthetic peptide; note = XENP019427 vhCDR1
SYTMH

SEQ ID NO: 4402 - protein, 17 aa, synthetic construct
  source 1..17: note = Description of Artificial Sequence: Synthetic peptide; note = XENP019427 vhCDR2
FISYDGNNKYYADSVKG

SEQ ID NO: 4403 - protein, 9 aa, synthetic construct
  source 1..9: note = Description of Artificial Sequence: Synthetic peptide; note = XENP019427 vhCDR3
TGWLGPFDY

SEQ ID NO: 4404 - protein, 215 aa, synthetic construct
  source 1..215: note = Description of Artificial Sequence: Synthetic polypeptide; note = XENP019427 [CTLA-4]_H0_L0.12_Fab Light Chain
EIVLTQSPGTLSVSPGERATLSCRASQSVGSSYLAWYQQKPGQAPRLLIYGAFSRATGIPDRFSGSGSGTDFTLTISRLEPEDFAVYYCQQYGSSPWTFGQGTKVEIKRTVAAPSVFIFPPSDEQLKSGTASVVCLLNNFYPREAKVQWKVDNALQSGNSQESVTEQDSKDSTYSLSSTLTLSKADYEKHKVYACEVTHQGLSSPVTKSFNRGEC

SEQ ID NO: 4405 - protein, 108 aa, synthetic construct; identical to SEQ ID NO: 1517
  source 1..108: note = Description of Artificial Sequence: Synthetic polypeptide; note = VL of XENP019427

SEQ ID NO: 4406 - protein, 12 aa, synthetic construct
  source 1..12: note = Description of Artificial Sequence: Synthetic peptide; note = XENP019427 vlCDR1
RASQSVGSSYLA

SEQ ID NO: 4407 - protein, 7 aa, synthetic construct
  source 1..7: note = Description of Artificial Sequence: Synthetic peptide; note = XENP019427 vlCDR2
GAFSRAT

SEQ ID NO: 4408 - protein, 9 aa, synthetic construct
  source 1..9: note = Description of Artificial Sequence: Synthetic peptide; note = XENP019427 vlCDR3
QQYGSSPWT

SEQ ID NO: 4409 - protein, 221 aa, synthetic construct; identical to SEQ ID NO: 2919
  source 1..221: note = Description of Artificial Sequence: Synthetic polypeptide; note = XENP019428 [CTLA-4]_H0_L0.13_Fab Heavy Chain

SEQ ID NO: 4410 - protein, 118 aa, synthetic construct; identical to SEQ ID NO: 22
  source 1..118: note = Description of Artificial Sequence: Synthetic polypeptide; note = VH of XENP019428

SEQ ID NO: 4411 - protein, 5 aa, synthetic construct
  source 1..5: note = Description of Artificial Sequence: Synthetic peptide; note = XENP019428 vhCDR1
SYTMH

SEQ ID NO: 4412 - protein, 17 aa, synthetic construct
  source 1..17: note = Description of Artificial Sequence: Synthetic peptide; note = XENP019428 vhCDR2
FISYDGNNKYYADSVKG

SEQ ID NO: 4413 - protein, 9 aa, synthetic construct
  source 1..9: note = Description of Artificial Sequence: Synthetic peptide; note = XENP019428 vhCDR3
TGWLGPFDY

SEQ ID NO: 4414 - protein, 215 aa, synthetic construct
  source 1..215: note = Description of Artificial Sequence: Synthetic polypeptide; note = XENP019428 [CTLA-4]_H0_L0.13_Fab Light Chain
EIVLTQSPGTLSLSPGEPATLSCRASQSVGSSYLAWYQQKPGQAPRLLIYGAFSRATGIPDRFSGSGSGTDFTLTISRLEPEDFAVYYCQQYGSSPWTFGQGTKVEIKRTVAAPSVFIFPPSDEQLKSGTASVVCLLNNFYPREAKVQWKVDNALQSGNSQESVTEQDSKDSTYSLSSTLTLSKADYEKHKVYACEVTHQGLSSPVTKSFNRGEC

SEQ ID NO: 4415 - protein, 108 aa, synthetic construct; identical to SEQ ID NO: 1526
  source 1..108: note = Description of Artificial Sequence: Synthetic polypeptide; note = VL of XENP019428

SEQ ID NO: 4416 - protein, 12 aa, synthetic construct
  source 1..12: note = Description of Artificial Sequence: Synthetic peptide; note = XENP019428 vlCDR1
RASQSVGSSYLA

SEQ ID NO: 4417 - protein, 7 aa, synthetic construct
  source 1..7: note = Description of Artificial Sequence: Synthetic peptide; note = XENP019428 vlCDR2
GAFSRAT

SEQ ID NO: 4418 - protein, 9 aa, synthetic construct
  source 1..9: note = Description of Artificial Sequence: Synthetic peptide; note = XENP019428 vlCDR3
QQYGSSPWT

SEQ ID NO: 4419 - protein, 221 aa, synthetic construct; identical to SEQ ID NO: 2919
  source 1..221: note = Description of Artificial Sequence: Synthetic polypeptide; note = XENP019429 [CTLA-4]_H0_L0.14_Fab Heavy Chain

SEQ ID NO: 4420 - protein, 118 aa, synthetic construct; identical to SEQ ID NO: 22
  source 1..118: note = Description of Artificial Sequence: Synthetic polypeptide; note = VH of XENP019429

SEQ ID NO: 4421 - protein, 5 aa, synthetic construct
  source 1..5: note = Description of Artificial Sequence: Synthetic peptide; note = XENP019429 vhCDR1
SYTMH

SEQ ID NO: 4422 - protein, 17 aa, synthetic construct
  source 1..17: note = Description of Artificial Sequence: Synthetic peptide; note = XENP019429 vhCDR2
FISYDGNNKYYADSVKG

SEQ ID NO: 4423 - protein, 9 aa, synthetic construct
  source 1..9: note = Description of Artificial Sequence: Synthetic peptide; note = XENP019429 vhCDR3
TGWLGPFDY

SEQ ID NO: 4424 - protein, 215 aa, synthetic construct
  source 1..215: note = Description of Artificial Sequence: Synthetic polypeptide; note = XENP019429 [CTLA-4]_H0_L0.14_Fab Light Chain
EIVLTQSPGTLSLSPGEQATLSCRASQSVGSSYLAWYQQKPGQAPRLLIYGAFSRATGIPDRFSGSGSGTDFTLTISRLEPEDFAVYYCQQYGSSPWTFGQGTKVEIKRTVAAPSVFIFPPSDEQLKSGTASVVCLLNNFYPREAKVQWKVDNALQSGNSQESVTEQDSKDSTYSLSSTLTLSKADYEKHKVYACEVTHQGLSSPVTKSFNRGEC

SEQ ID NO: 4425 - protein, 108 aa, synthetic construct; identical to SEQ ID NO: 1535
  source 1..108: note = Description of Artificial Sequence: Synthetic polypeptide; note = VL of XENP019429

SEQ ID NO: 4426 - protein, 12 aa, synthetic construct
  source 1..12: note = Description of Artificial Sequence: Synthetic peptide; note = XENP019429 vlCDR1
RASQSVGSSYLA

SEQ ID NO: 4427 - protein, 7 aa, synthetic construct
  source 1..7: note = Description of Artificial Sequence: Synthetic peptide; note = XENP019429 vlCDR2
GAFSRAT

SEQ ID NO: 4428 - protein, 9 aa, synthetic construct
  source 1..9: note = Description of Artificial Sequence: Synthetic peptide; note = XENP019429 vlCDR3
QQYGSSPWT

SEQ ID NO: 4429 - protein, 221 aa, synthetic construct; identical to SEQ ID NO: 2919
  source 1..221: note = Description of Artificial Sequence: Synthetic polypeptide; note = XENP019430 [CTLA-4]_H0_L0.15_Fab Heavy Chain

SEQ ID NO: 4430 - protein, 118 aa, synthetic construct; identical to SEQ ID NO: 22
  source 1..118: note = Description of Artificial Sequence: Synthetic polypeptide; note = VH of XENP019430

SEQ ID NO: 4431 - protein, 5 aa, synthetic construct
  source 1..5: note = Description of Artificial Sequence: Synthetic peptide; note = XENP019430 vhCDR1
SYTMH

SEQ ID NO: 4432 - protein, 17 aa, synthetic construct
  source 1..17: note = Description of Artificial Sequence: Synthetic peptide; note = XENP019430 vhCDR2
FISYDGNNKYYADSVKG

SEQ ID NO: 4433 - protein, 9 aa, synthetic construct
  source 1..9: note = Description of Artificial Sequence: Synthetic peptide; note = XENP019430 vhCDR3
TGWLGPFDY

SEQ ID NO: 4434 - protein, 215 aa, synthetic construct
  source 1..215: note = Description of Artificial Sequence: Synthetic polypeptide; note = XENP019430 [CTLA-4]_H0_L0.15_Fab Light Chain
EIVLTQSPGTLSLSPGERVTLSCRASQSVGSSYLAWYQQKPGQAPRLLIYGAFSRATGIPDRFSGSGSGTDFTLTISRLEPEDFAVYYCQQYGSSPWTFGQGTKVEIKRTVAAPSVFIFPPSDEQLKSGTASVVCLLNNFYPREAKVQWKVDNALQSGNSQESVTEQDSKDSTYSLSSTLTLSKADYEKHKVYACEVTHQGLSSPVTKSFNRGEC

SEQ ID NO: 4435 - protein, 108 aa, synthetic construct; identical to SEQ ID NO: 1544
  source 1..108: note = Description of Artificial Sequence: Synthetic polypeptide; note = VL of XENP019430

SEQ ID NO: 4436 - protein, 12 aa, synthetic construct
  source 1..12: note = Description of Artificial Sequence: Synthetic peptide; note = XENP019430 vlCDR1
RASQSVGSSYLA

SEQ ID NO: 4437 - protein, 7 aa, synthetic construct
  source 1..7: note = Description of Artificial Sequence: Synthetic peptide; note = XENP019430 vlCDR2
GAFSRAT

SEQ ID NO: 4438 - protein, 9 aa, synthetic construct
  source 1..9: note = Description of Artificial Sequence: Synthetic peptide; note = XENP019430 vlCDR3
QQYGSSPWT

SEQ ID NO: 4439 - protein, 221 aa, synthetic construct; identical to SEQ ID NO: 2919
  source 1..221: note = Description of Artificial Sequence: Synthetic polypeptide; note = XENP019431 [CTLA-4]_H0_L0.16_Fab Heavy Chain

SEQ ID NO: 4440 - protein, 118 aa, synthetic construct; identical to SEQ ID NO: 22
  source 1..118: note = Description of Artificial Sequence: Synthetic polypeptide; note = VH of XENP019431

SEQ ID NO: 4441 - protein, 5 aa, synthetic construct
  source 1..5: note = Description of Artificial Sequence: Synthetic peptide; note = XENP019431 vhCDR1
SYTMH

SEQ ID NO: 4442 - protein, 17 aa, synthetic construct
  source 1..17: note = Description of Artificial Sequence: Synthetic peptide; note = XENP019431 vhCDR2
FISYDGNNKYYADSVKG

SEQ ID NO: 4443 - protein, 9 aa, synthetic construct
  source 1..9: note = Description of Artificial Sequence: Synthetic peptide; note = XENP019431 vhCDR3
TGWLGPFDY

SEQ ID NO: 4444 - protein, 215 aa, synthetic construct
  source 1..215: note = Description of Artificial Sequence: Synthetic polypeptide; note = XENP019431 [CTLA-4]_H0_L0.16_Fab Light Chain
EIVLTQSPGTLSLSPGERASLSCRASQSVGSSYLAWYQQKPGQAPRLLIYGAFSRATGIPDRFSGSGSGTDFTLTISRLEPEDFAVYYCQQYGSSPWTFGQGTKVEIKRTVAAPSVFIFPPSDEQLKSGTASVVCLLNNFYPREAKVQWKVDNALQSGNSQESVTEQDSKDSTYSLSSTLTLSKADYEKHKVYACEVTHQGLSSPVTKSFNRGEC

SEQ ID NO: 4445 - protein, 108 aa, synthetic construct; identical to SEQ ID NO: 1553
  source 1..108: note = Description of Artificial Sequence: Synthetic polypeptide; note = VL of XENP019431

SEQ ID NO: 4446 - protein, 12 aa, synthetic construct
  source 1..12: note = Description of Artificial Sequence: Synthetic peptide; note = XENP019431 vlCDR1
RASQSVGSSYLA

SEQ ID NO: 4447 - protein, 7 aa, synthetic construct
  source 1..7: note = Description of Artificial Sequence: Synthetic peptide; note = XENP019431 vlCDR2
GAFSRAT

SEQ ID NO: 4448 - protein, 9 aa, synthetic construct
  source 1..9: note = Description of Artificial Sequence: Synthetic peptide; note = XENP019431 vlCDR3
QQYGSSPWT

SEQ ID NO: 4449 - protein, 221 aa, synthetic construct; identical to SEQ ID NO: 2919
  source 1..221: note = Description of Artificial Sequence: Synthetic polypeptide; note = XENP019432 [CTLA-4]_H0_L0.17_Fab Heavy Chain

SEQ ID NO: 4450 - protein, 118 aa, synthetic construct; identical to SEQ ID NO: 22
  source 1..118: note = Description of Artificial Sequence: Synthetic polypeptide; note = VH of XENP019432

SEQ ID NO: 4451 - protein, 5 aa, synthetic construct
  source 1..5: note = Description of Artificial Sequence: Synthetic peptide; note = XENP019432 vhCDR1
SYTMH

SEQ ID NO: 4452 - protein, 17 aa, synthetic construct
  source 1..17: note = Description of Artificial Sequence: Synthetic peptide; note = XENP019432 vhCDR2
FISYDGNNKYYADSVKG

SEQ ID NO: 4453 - protein, 9 aa, synthetic construct
  source 1..9: note = Description of Artificial Sequence: Synthetic peptide; note = XENP019432 vhCDR3
TGWLGPFDY

SEQ ID NO: 4454 - protein, 215 aa, synthetic construct
  source 1..215: note = Description of Artificial Sequence: Synthetic polypeptide; note = XENP019432 [CTLA-4]_H0_L0.17_Fab Light Chain
EIVLTQSPGTLSLSPGERATISCRASQSVGSSYLAWYQQKPGQAPRLLIYGAFSRATGIPDRFSGSGSGTDFTLTISRLEPEDFAVYYCQQYGSSPWTFGQGTKVEIKRTVAAPSVFIFPPSDEQLKSGTASVVCLLNNFYPREAKVQWKVDNALQSGNSQESVTEQDSKDSTYSLSSTLTLSKADYEKHKVYACEVTHQGLSSPVTKSFNRGEC

SEQ ID NO: 4455 - protein, 108 aa, synthetic construct; identical to SEQ ID NO: 1562
  source 1..108: note = Description of Artificial Sequence: Synthetic polypeptide; note = VL of XENP019432

SEQ ID NO: 4456 - protein, 12 aa, synthetic construct
  source 1..12: note = Description of Artificial Sequence: Synthetic peptide; note = XENP019432 vlCDR1
RASQSVGSSYLA

SEQ ID NO: 4457 - protein, 7 aa, synthetic construct
  source 1..7: note = Description of Artificial Sequence: Synthetic peptide; note = XENP019432 vlCDR2
GAFSRAT

SEQ ID NO: 4458 - protein, 9 aa, synthetic construct
  source 1..9: note = Description of Artificial Sequence: Synthetic peptide; note = XENP019432 vlCDR3
QQYGSSPWT

SEQ ID NO: 4459 - protein, 221 aa, synthetic construct; identical to SEQ ID NO: 2919
  source 1..221: note = Description of Artificial Sequence: Synthetic polypeptide; note = XENP019433 [CTLA-4]_H0_L0.18_Fab Heavy Chain

SEQ ID NO: 4460 - protein, 118 aa, synthetic construct; identical to SEQ ID NO: 22
  source 1..118: note = Description of Artificial Sequence: Synthetic polypeptide; note = VH of XENP019433

SEQ ID NO: 4461 - protein, 5 aa, synthetic construct
  source 1..5: note = Description of Artificial Sequence: Synthetic peptide; note = XENP019433 vhCDR1
SYTMH

SEQ ID NO: 4462 - protein, 17 aa, synthetic construct
  source 1..17: note = Description of Artificial Sequence: Synthetic peptide; note = XENP019433 vhCDR2
FISYDGNNKYYADSVKG

SEQ ID NO: 4463 - protein, 9 aa, synthetic construct
  source 1..9: note = Description of Artificial Sequence: Synthetic peptide; note = XENP019433 vhCDR3
TGWLGPFDY

SEQ ID NO: 4464 - protein, 215 aa, synthetic construct
  source 1..215: note = Description of Artificial Sequence: Synthetic polypeptide; note = XENP019433 [CTLA-4]_H0_L0.18_Fab Light Chain
EIVLTQSPGTLSLSPGERATLSCRSSQSVGSSYLAWYQQKPGQAPRLLIYGAFSRATGIPDRFSGSGSGTDFTLTISRLEPEDFAVYYCQQYGSSPWTFGQGTKVEIKRTVAAPSVFIFPPSDEQLKSGTASVVCLLNNFYPREAKVQWKVDNALQSGNSQESVTEQDSKDSTYSLSSTLTLSKADYEKHKVYACEVTHQGLSSPVTKSFNRGEC

SEQ ID NO: 4465 - protein, 108 aa, synthetic construct; identical to SEQ ID NO: 1571
  source 1..108: note = Description of Artificial Sequence: Synthetic polypeptide; note = VL of XENP019433

SEQ ID NO: 4466 - protein, 12 aa, synthetic construct
  source 1..12: note = Description of Artificial Sequence: Synthetic peptide; note = XENP019433 vlCDR1
RSSQSVGSSYLA

SEQ ID NO: 4467 - protein, 7 aa, synthetic construct
  source 1..7: note = Description of Artificial Sequence: Synthetic peptide; note = XENP019433 vlCDR2
GAFSRAT

SEQ ID NO: 4468 - protein, 9 aa, synthetic construct
  source 1..9: note = Description of Artificial Sequence: Synthetic peptide; note = XENP019433 vlCDR3
QQYGSSPWT

SEQ ID NO: 4469 - protein, 221 aa, synthetic construct; identical to SEQ ID NO: 2919
  source 1..221: note = Description of Artificial Sequence: Synthetic polypeptide; note = XENP019434 [CTLA-4]_H0_L0.19_Fab Heavy Chain

SEQ ID NO: 4470 - protein, 118 aa, synthetic construct; identical to SEQ ID NO: 22
  source 1..118: note = Description of Artificial Sequence: Synthetic polypeptide; note = VH of XENP019434

SEQ ID NO: 4471 - protein, 5 aa, synthetic construct
  source 1..5: note = Description of Artificial Sequence: Synthetic peptide; note = XENP019434 vhCDR1
SYTMH

SEQ ID NO: 4472 - protein, 17 aa, synthetic construct
  source 1..17: note = Description of Artificial Sequence: Synthetic peptide; note = XENP019434 vhCDR2
FISYDGNNKYYADSVKG

SEQ ID NO: 4473 - protein, 9 aa, synthetic construct
  source 1..9: note = Description of Artificial Sequence: Synthetic peptide; note = XENP019434 vhCDR3
TGWLGPFDY

SEQ ID NO: 4474 - protein, 215 aa, synthetic construct
  source 1..215: note = Description of Artificial Sequence: Synthetic polypeptide; note = XENP019434 [CTLA-4]_H0_L0.19_Fab Light Chain
EIVLTQSPGTLSLSPGERATLSCRASQSDGSSYLAWYQQKPGQAPRLLIYGAFSRATGIPDRFSGSGSGTDFTLTISRLEPEDFAVYYCQQYGSSPWTFGQGTKVEIKRTVAAPSVFIFPPSDEQLKSGTASVVCLLNNFYPREAKVQWKVDNALQSGNSQESVTEQDSKDSTYSLSSTLTLSKADYEKHKVYACEVTHQGLSSPVTKSFNRGEC

SEQ ID NO: 4475 - protein, 108 aa, synthetic construct; identical to SEQ ID NO: 1580
  source 1..108: note = Description of Artificial Sequence: Synthetic polypeptide; note = VL of XENP019434

SEQ ID NO: 4476 - protein, 12 aa, synthetic construct
  source 1..12: note = Description of Artificial Sequence: Synthetic peptide; note = XENP019434 vlCDR1
RASQSDGSSYLA

SEQ ID NO: 4477 - protein, 7 aa, synthetic construct
  source 1..7: note = Description of Artificial Sequence: Synthetic peptide; note = XENP019434 vlCDR2
GAFSRAT

SEQ ID NO: 4478 - protein, 9 aa, synthetic construct
  source 1..9: note = Description of Artificial Sequence: Synthetic peptide; note = XENP019434 vlCDR3
QQYGSSPWT

SEQ ID NO: 4479 - protein, 221 aa, synthetic construct; identical to SEQ ID NO: 2919
  source 1..221: note = Description of Artificial Sequence: Synthetic polypeptide; note = XENP019435 [CTLA-4]_H0_L0.20_Fab Heavy Chain

SEQ ID NO: 4480 - protein, 118 aa, synthetic construct; identical to SEQ ID NO: 22
  source 1..118: note = Description of Artificial Sequence: Synthetic polypeptide; note = VH of XENP019435

SEQ ID NO: 4481 - protein, 5 aa, synthetic construct
  source 1..5: note = Description of Artificial Sequence: Synthetic peptide; note = XENP019435 vhCDR1
SYTMH

SEQ ID NO: 4482 - protein, 17 aa, synthetic construct
  source 1..17: note = Description of Artificial Sequence: Synthetic peptide; note = XENP019435 vhCDR2
FISYDGNNKYYADSVKG

SEQ ID NO: 4483 - protein, 9 aa, synthetic construct
  source 1..9: note = Description of Artificial Sequence: Synthetic peptide; note = XENP019435 vhCDR3
TGWLGPFDY

SEQ ID NO: 4484 - protein, 215 aa, synthetic construct
  source 1..215: note = Description of Artificial Sequence: Synthetic polypeptide; note = XENP019435 [CTLA-4]_H0_L0.20_Fab Light Chain
EIVLTQSPGTLSLSPGERATLSCRASQSSGSSYLAWYQQKPGQAPRLLIYGAFSRATGIPDRFSGSGSGTDFTLTISRLEPEDFAVYYCQQYGSSPWTFGQGTKVEIKRTVAAPSVFIFPPSDEQLKSGTASVVCLLNNFYPREAKVQWKVDNALQSGNSQESVTEQDSKDSTYSLSSTLTLSKADYEKHKVYACEVTHQGLSSPVTKSFNRGEC

SEQ ID NO: 4485 - protein, 108 aa, synthetic construct; identical to SEQ ID NO: 1589
  source 1..108: note = Description of Artificial Sequence: Synthetic polypeptide; note = VL of XENP019435

SEQ ID NO: 4486 - protein, 12 aa, synthetic construct
  source 1..12: note = Description of Artificial Sequence: Synthetic peptide; note = XENP019435 vlCDR1
RASQSSGSSYLA

SEQ ID NO: 4487 - protein, 7 aa, synthetic construct
  source 1..7: note = Description of Artificial Sequence: Synthetic peptide; note = XENP019435 vlCDR2
GAFSRAT

SEQ ID NO: 4488 - protein, 9 aa, synthetic construct
  source 1..9: note = Description of Artificial Sequence: Synthetic peptide; note = XENP019435 vlCDR3
QQYGSSPWT

SEQ ID NO: 4489 - protein, 221 aa, synthetic construct; identical to SEQ ID NO: 2919
  source 1..221: note = Description of Artificial Sequence: Synthetic polypeptide; note = XENP019436 [CTLA-4]_H0_L0.21_Fab Heavy Chain

SEQ ID NO: 4490 - protein, 118 aa, synthetic construct; identical to SEQ ID NO: 22
  source 1..118: note = Description of Artificial Sequence: Synthetic polypeptide; note = VH of XENP019436

SEQ ID NO: 4491 - protein, 5 aa, synthetic construct
  source 1..5: note = Description of Artificial Sequence: Synthetic peptide; note = XENP019436 vhCDR1
SYTMH

SEQ ID NO: 4492 - protein, 17 aa, synthetic construct
  source 1..17: note = Description of Artificial Sequence: Synthetic peptide; note = XENP019436 vhCDR2
FISYDGNNKYYADSVKG

SEQ ID NO: 4493 - protein, 9 aa, synthetic construct
  source 1..9: note = Description of Artificial Sequence: Synthetic peptide; note = XENP019436 vhCDR3
TGWLGPFDY

SEQ ID NO: 4494 - protein, 215 aa, synthetic construct
  source 1..215: note = Description of Artificial Sequence: Synthetic polypeptide; note = XENP019436 [CTLA-4]_H0_L0.21_Fab Light Chain
EIVLTQSPGTLSLSPGERATLSCRASQSVASSYLAWYQQKPGQAPRLLIYGAFSRATGIPDRFSGSGSGTDFTLTISRLEPEDFAVYYCQQYGSSPWTFGQGTKVEIKRTVAAPSVFIFPPSDEQLKSGTASVVCLLNNFYPREAKVQWKVDNALQSGNSQESVTEQDSKDSTYSLSSTLTLSKADYEKHKVYACEVTHQGLSSPVTKSFNRGEC

SEQ ID NO: 4495 - protein, 108 aa, synthetic construct; identical to SEQ ID NO: 1598
  source 1..108: note = Description of Artificial Sequence: Synthetic polypeptide; note = VL of XENP019436

SEQ ID NO: 4496 - protein, 12 aa, synthetic construct
  source 1..12: note = Description of Artificial Sequence: Synthetic peptide; note = XENP019436 vlCDR1
RASQSVASSYLA

SEQ ID NO: 4497 - protein, 7 aa, synthetic construct
  source 1..7: note = Description of Artificial Sequence: Synthetic peptide; note = XENP019436 vlCDR2
GAFSRAT

SEQ ID NO: 4498 - protein, 9 aa, synthetic construct
  source 1..9: note = Description of Artificial Sequence: Synthetic peptide; note = XENP019436 vlCDR3
QQYGSSPWT

SEQ ID NO: 4499 - protein, 221 aa, synthetic construct; identical to SEQ ID NO: 2919
  source 1..221: note = Description of Artificial Sequence: Synthetic polypeptide; note = XENP019437 [CTLA-4]_H0_L0.22_Fab Heavy Chain

SEQ ID NO: 4500 - protein, 118 aa, synthetic construct; identical to SEQ ID NO: 22
  source 1..118: note = Description of Artificial Sequence: Synthetic polypeptide; note = VH of XENP019437

SEQ ID NO: 4501 - protein, 5 aa, synthetic construct
  source 1..5: note = Description of Artificial Sequence: Synthetic peptide; note = XENP019437 vhCDR1
SYTMH

SEQ ID NO: 4502 - protein, 17 aa, synthetic construct
  source 1..17: note = Description of Artificial Sequence: Synthetic peptide; note = XENP019437 vhCDR2
FISYDGNNKYYADSVKG

SEQ ID NO: 4503 - protein, 9 aa, synthetic construct
  source 1..9: note = Description of Artificial Sequence: Synthetic peptide; note = XENP019437 vhCDR3
TGWLGPFDY

SEQ ID NO: 4504 - protein, 215 aa, synthetic construct
  source 1..215: note = Description of Artificial Sequence: Synthetic polypeptide; note = XENP019437 [CTLA-4]_H0_L0.22_Fab Light Chain
EIVLTQSPGTLSLSPGERATLSCRASQSVSSSYLAWYQQKPGQAPRLLIYGAFSRATGIPDRFSGSGSGTDFTLTISRLEPEDFAVYYCQQYGSSPWTFGQGTKVEIKRTVAAPSVFIFPPSDEQLKSGTASVVCLLNNFYPREAKVQWKVDNALQSGNSQESVTEQDSKDSTYSLSSTLTLSKADYEKHKVYACEVTHQGLSSPVTKSFNRGEC

SEQ ID NO: 4505 - protein, 108 aa, synthetic construct; identical to SEQ ID NO: 1607
  source 1..108: note = Description of Artificial Sequence: Synthetic polypeptide; note = VL of XENP019437

SEQ ID NO: 4506 - protein, 12 aa, synthetic construct
  source 1..12: note = Description of Artificial Sequence: Synthetic peptide; note = XENP019437 vlCDR1
RASQSVSSSYLA

SEQ ID NO: 4507 - protein, 7 aa, synthetic construct
  source 1..7: note = Description of Artificial Sequence: Synthetic peptide; note = XENP019437 vlCDR2
GAFSRAT

SEQ ID NO: 4508 - protein, 9 aa, synthetic construct
  source 1..9: note = Description of Artificial Sequence: Synthetic peptide; note = XENP019437 vlCDR3
QQYGSSPWT

SEQ ID NO: 4509 - protein, 221 aa, synthetic construct; identical to SEQ ID NO: 2919
  source 1..221: note = Description of Artificial Sequence: Synthetic polypeptide; note = XENP019438 [CTLA-4]_H0_L0.23_Fab Heavy Chain

SEQ ID NO: 4510 - protein, 118 aa, synthetic construct; identical to SEQ ID NO: 22
  source 1..118: note = Description of Artificial Sequence: Synthetic polypeptide; note = VH of XENP019438

SEQ ID NO: 4511 - protein, 5 aa, synthetic construct
  source 1..5: note = Description of Artificial Sequence: Synthetic peptide; note = XENP019438 vhCDR1
SYTMH

SEQ ID NO: 4512 - protein, 17 aa, synthetic construct
  source 1..17: note = Description of Artificial Sequence: Synthetic peptide; note = XENP019438 vhCDR2
FISYDGNNKYYADSVKG

SEQ ID NO: 4513 - protein, 9 aa, synthetic construct
  source 1..9: note = Description of Artificial Sequence: Synthetic peptide; note = XENP019438 vhCDR3
TGWLGPFDY

SEQ ID NO: 4514 - protein, 215 aa, synthetic construct
  source 1..215: note = Description of Artificial Sequence: Synthetic polypeptide; note = XENP019438 [CTLA-4]_H0_L0.23_Fab Light Chain
EIVLTQSPGTLSLSPGERATLSCRASQSVTSSYLAWYQQKPGQAPRLLIYGAFSRATGIPDRFSGSGSGTDFTLTISRLEPEDFAVYYCQQYGSSPWTFGQGTKVEIKRTVAAPSVFIFPPSDEQLKSGTASVVCLLNNFYPREAKVQWKVDNALQSGNSQESVTEQDSKDSTYSLSSTLTLSKADYEKHKVYACEVTHQGLSSPVTKSFNRGEC

SEQ ID NO: 4515 - protein, 108 aa, synthetic construct; identical to SEQ ID NO: 1616
  source 1..108: note = Description of Artificial Sequence: Synthetic polypeptide; note = VL of XENP019438

SEQ ID NO: 4516 - protein, 12 aa, synthetic construct
  source 1..12: note = Description of Artificial Sequence: Synthetic peptide; note = XENP019438 vlCDR1
RASQSVTSSYLA

SEQ ID NO: 4517 - protein, 7 aa, synthetic construct
  source 1..7: note = Description of Artificial Sequence: Synthetic peptide; note = XENP019438 vlCDR2
GAFSRAT

SEQ ID NO: 4518 - protein, 9 aa, synthetic construct
  source 1..9: note = Description of Artificial Sequence: Synthetic peptide; note = XENP019438 vlCDR3
QQYGSSPWT

SEQ ID NO: 4519 - protein, 221 aa, synthetic construct; identical to SEQ ID NO: 2919
  source 1..221: note = Description of Artificial Sequence: Synthetic polypeptide; note = XENP019439 [CTLA-4]_H0_L0.24_Fab Heavy Chain

SEQ ID NO: 4520 - protein, 118 aa, synthetic construct; identical to SEQ ID NO: 22
  source 1..118: note = Description of Artificial Sequence: Synthetic polypeptide; note = VH of XENP019439

SEQ ID NO: 4521 - protein, 5 aa, synthetic construct
  source 1..5: note = Description of Artificial Sequence: Synthetic peptide; note = XENP019439 vhCDR1
SYTMH

SEQ ID NO: 4522 - protein, 17 aa, synthetic construct
  source 1..17: note = Description of Artificial Sequence: Synthetic peptide; note = XENP019439 vhCDR2
FISYDGNNKYYADSVKG

SEQ ID NO: 4523 - protein, 9 aa, synthetic construct
  source 1..9: note = Description of Artificial Sequence: Synthetic peptide; note = XENP019439 vhCDR3
TGWLGPFDY

SEQ ID NO: 4524 - protein, 215 aa, synthetic construct
  source 1..215: note = Description of Artificial Sequence: Synthetic polypeptide; note = XENP019439 [CTLA-4]_H0_L0.24_Fab Light Chain
EIVLTQSPGTLSLSPGERATLSCRASQSVGASYLAWYQQKPGQAPRLLIYGAFSRATGIPDRFSGSGSGTDFTLTISRLEPEDFAVYYCQQYGSSPWTFGQGTKVEIKRTVAAPSVFIFPPSDEQLKSGTASVVCLLNNFYPREAKVQWKVDNALQSGNSQESVTEQDSKDSTYSLSSTLTLSKADYEKHKVYACEVTHQGLSSPVTKSFNRGEC

SEQ ID NO: 4525 - protein, 108 aa, synthetic construct; identical to SEQ ID NO: 1625
  source 1..108: note = Description of Artificial Sequence: Synthetic polypeptide; note = VL of XENP019439

SEQ ID NO: 4526 - protein, 12 aa, synthetic construct
  source 1..12: note = Description of Artificial Sequence: Synthetic peptide; note = XENP019439 vlCDR1
RASQSVGASYLA

SEQ ID NO: 4527 - protein, 7 aa, synthetic construct
  source 1..7: note = Description of Artificial Sequence: Synthetic peptide; note = XENP019439 vlCDR2
GAFSRAT

SEQ ID NO: 4528 - protein, 9 aa, synthetic construct
  source 1..9: note = Description of Artificial Sequence: Synthetic peptide; note = XENP019439 vlCDR3
QQYGSSPWT

SEQ ID NO: 4529 - protein, 221 aa, synthetic construct; identical to SEQ ID NO: 2919
  source 1..221: note = Description of Artificial Sequence: Synthetic polypeptide; note = XENP019440 [CTLA-4]_H0_L0.25_Fab Heavy Chain

SEQ ID NO: 4530 - protein, 118 aa, synthetic construct; identical to SEQ ID NO: 22
  source 1..118: note = Description of Artificial Sequence: Synthetic polypeptide; note = VH of XENP019440

SEQ ID NO: 4531 - protein, 5 aa, synthetic construct
  source 1..5: note = Description of Artificial Sequence: Synthetic peptide; note = XENP019440 vhCDR1
SYTMH

SEQ ID NO: 4532 - protein, 17 aa, synthetic construct
  source 1..17: note = Description of Artificial Sequence: Synthetic peptide; note = XENP019440 vhCDR2
FISYDGNNKYYADSVKG

SEQ ID NO: 4533 - protein, 9 aa, synthetic construct
  source 1..9: note = Description of Artificial Sequence: Synthetic peptide; note = XENP019440 vhCDR3
TGWLGPFDY

SEQ ID NO: 4534 - protein, 215 aa, synthetic construct
  source 1..215: note = Description of Artificial Sequence: Synthetic polypeptide; note = XENP019440 [CTLA-4]_H0_L0.25_Fab Light Chain
EIVLTQSPGTLSLSPGERATLSCRASQSVGGSYLAWYQQKPGQAPRLLIYGAFSRATGIPDRFSGSGSGTDFTLTISRLEPEDFAVYYCQQYGSSPWTFGQGTKVEIKRTVAAPSVFIFPPSDEQLKSGTASVVCLLNNFYPREAKVQWKVDNALQSGNSQESVTEQDSKDSTYSLSSTLTLSKADYEKHKVYACEVTHQGLSSPVTKSFNRGEC

SEQ ID NO: 4535 - protein, 108 aa, synthetic construct; identical to SEQ ID NO: 1634
  source 1..108: note = Description of Artificial Sequence: Synthetic polypeptide; note = VL of XENP019440

SEQ ID NO: 4536 - protein, 12 aa, synthetic construct
  source 1..12: note = Description of Artificial Sequence: Synthetic peptide; note = XENP019440 vlCDR1
RASQSVGGSYLA

SEQ ID NO: 4537 - protein, 7 aa, synthetic construct
  source 1..7: note = Description of Artificial Sequence: Synthetic peptide; note = XENP019440 vlCDR2
GAFSRAT

SEQ ID NO: 4538 - protein, 9 aa, synthetic construct
  source 1..9: note = Description of Artificial Sequence: Synthetic peptide; note = XENP019440 vlCDR3
QQYGSSPWT

SEQ ID NO: 4539 - protein, 221 aa, synthetic construct; identical to SEQ ID NO: 2919
  source 1..221: note = Description of Artificial Sequence: Synthetic polypeptide; note = XENP019441 [CTLA-4]_H0_L0.26_Fab Heavy Chain

SEQ ID NO: 4540 - protein, 118 aa, synthetic construct; identical to SEQ ID NO: 22
  source 1..118: note = Description of Artificial Sequence: Synthetic polypeptide; note = VH of XENP019441

SEQ ID NO: 4541 - protein, 5 aa, synthetic construct
  source 1..5: note = Description of Artificial Sequence: Synthetic peptide; note = XENP019441 vhCDR1
SYTMH

SEQ ID NO: 4542 - protein, 17 aa, synthetic construct
  source 1..17: note = Description of Artificial Sequence: Synthetic peptide; note = XENP019441 vhCDR2
FISYDGNNKYYADSVKG

SEQ ID NO: 4543 - protein, 9 aa, synthetic construct
  source 1..9: note = Description of Artificial Sequence: Synthetic peptide; note = XENP019441 vhCDR3
TGWLGPFDY

SEQ ID NO: 4544 - protein, 215 aa, synthetic construct
  source 1..215: note = Description of Artificial Sequence: Synthetic polypeptide; note = XENP019441 [CTLA-4]_H0_L0.26_Fab Light Chain
EIVLTQSPGTLSLSPGERATLSCRASQSVGNSYLAWYQQKPGQAPRLLIYGAFSRATGIPDRFSGSGSGTDFTLTISRLEPEDFAVYYCQQYGSSPWTFGQGTKVEIKRTVAAPSVFIFPPSDEQLKSGTASVVCLLNNFYPREAKVQWKVDNALQSGNSQESVTEQDSKDSTYSLSSTLTLSKADYEKHKVYACEVTHQGLSSPVTKSFNRGEC

SEQ ID NO: 4545 - protein, 108 aa, synthetic construct; identical to SEQ ID NO: 1643
  source 1..108: note = Description of Artificial Sequence: Synthetic polypeptide; note = VL of XENP019441

SEQ ID NO: 4546 - protein, 12 aa, synthetic construct
  source 1..12: note = Description of Artificial Sequence: Synthetic peptide; note = XENP019441 vlCDR1
RASQSVGNSYLA

SEQ ID NO: 4547 - protein, 7 aa, synthetic construct
  source 1..7: note = Description of Artificial Sequence: Synthetic peptide; note = XENP019441 vlCDR2
GAFSRAT

SEQ ID NO: 4548 - protein, 9 aa, synthetic construct
  source 1..9: note = Description of Artificial Sequence: Synthetic peptide; note = XENP019441 vlCDR3
QQYGSSPWT

SEQ ID NO: 4549 - protein, 221 aa, synthetic construct; identical to SEQ ID NO: 2919
  source 1..221: note = Description of Artificial Sequence: Synthetic polypeptide; note = XENP019442 [CTLA-4]_H0_L0.27_Fab Heavy Chain

SEQ ID NO: 4550 - protein, 118 aa, synthetic construct; identical to SEQ ID NO: 22
  source 1..118: note = Description of Artificial Sequence: Synthetic polypeptide; note = VH of XENP019442

SEQ ID NO: 4551 - protein, 5 aa, synthetic construct
  source 1..5: note = Description of Artificial Sequence: Synthetic peptide; note = XENP019442 vhCDR1
SYTMH

SEQ ID NO: 4552 - protein, 17 aa, synthetic construct
  source 1..17: note = Description of Artificial Sequence: Synthetic peptide; note = XENP019442 vhCDR2
FISYDGNNKYYADSVKG

SEQ ID NO: 4553 - protein, 9 aa, synthetic construct
  source 1..9: note = Description of Artificial Sequence: Synthetic peptide; note = XENP019442 vhCDR3
TGWLGPFDY

SEQ ID NO: 4554 - protein, 215 aa, synthetic construct
  source 1..215: note = Description of Artificial Sequence: Synthetic polypeptide; note = XENP019442 [CTLA-4]_H0_L0.27_Fab Light Chain
EIVLTQSPGTLSLSPGERATLSCRASQSVGQSYLAWYQQKPGQAPRLLIYGAFSRATGIPDRFSGSGSGTDFTLTISRLEPEDFAVYYCQQYGSSPWTFGQGTKVEIKRTVAAPSVFIFPPSDEQLKSGTASVVCLLNNFYPREAKVQWKVDNALQSGNSQESVTEQDSKDSTYSLSSTLTLSKADYEKHKVYACEVTHQGLSSPVTKSFNRGEC

SEQ ID NO: 4555 - protein, 108 aa, synthetic construct; identical to SEQ ID NO: 1652
  source 1..108: note = Description of Artificial Sequence: Synthetic polypeptide; note = VL of XENP019442

SEQ ID NO: 4556 - protein, 12 aa, synthetic construct
  source 1..12: note = Description of Artificial Sequence: Synthetic peptide; note = XENP019442 vlCDR1
RASQSVGQSYLA

SEQ ID NO: 4557 - protein, 7 aa, synthetic construct
  source 1..7: note = Description of Artificial Sequence: Synthetic peptide; note = XENP019442 vlCDR2
GAFSRAT

SEQ ID NO: 4558 - protein, 9 aa, synthetic construct
  source 1..9: note = Description of Artificial Sequence: Synthetic peptide; note = XENP019442 vlCDR3
QQYGSSPWT

SEQ ID NO: 4559 - protein, 221 aa, synthetic construct; identical to SEQ ID NO: 2919
  source 1..221: note = Description of Artificial Sequence: Synthetic polypeptide; note = XENP019443 [CTLA-4]_H0_L0.28_Fab Heavy Chain

SEQ ID NO: 4560 - protein, 118 aa, synthetic construct; identical to SEQ ID NO: 22
  source 1..118: note = Description of Artificial Sequence: Synthetic polypeptide; note = VH of XENP019443

SEQ ID NO: 4561 - protein, 5 aa, synthetic construct
  source 1..5: note = Description of Artificial Sequence: Synthetic peptide; note = XENP019443 vhCDR1
SYTMH

SEQ ID NO: 4562 - protein, 17 aa, synthetic construct
  source 1..17: note = Description of Artificial Sequence: Synthetic peptide; note = XENP019443 vhCDR2
FISYDGNNKYYADSVKG

SEQ ID NO: 4563 - protein, 9 aa, synthetic construct
  source 1..9: note = Description of Artificial Sequence: Synthetic peptide; note = XENP019443 vhCDR3
TGWLGPFDY

SEQ ID NO: 4564 - protein, 215 aa, synthetic construct
  source 1..215: note = Description of Artificial Sequence: Synthetic polypeptide; note = XENP019443 [CTLA-4]_H0_L0.28_Fab Light Chain
EIVLTQSPGTLSLSPGERATLSCRASQSVGTSYLAWYQQKPGQAPRLLIYGAFSRATGIPDRFSGSGSGTDFTLTISRLEPEDFAVYYCQQYGSSPWTFGQGTKVEIKRTVAAPSVFIFPPSDEQLKSGTASVVCLLNNFYPREAKVQWKVDNALQSGNSQESVTEQDSKDSTYSLSSTLTLSKADYEKHKVYACEVTHQGLSSPVTKSFNRGEC

SEQ ID NO: 4565 - protein, 108 aa, synthetic construct; identical to SEQ ID NO: 1661
  source 1..108: note = Description of Artificial Sequence: Synthetic polypeptide; note = VL of XENP019443

SEQ ID NO: 4566 - protein, 12 aa, synthetic construct
  source 1..12: note = Description of Artificial Sequence: Synthetic peptide; note = XENP019443 vlCDR1
RASQSVGTSYLA

SEQ ID NO: 4567 - protein, 7 aa, synthetic construct
  source 1..7: note = Description of Artificial Sequence: Synthetic peptide; note = XENP019443 vlCDR2
GAFSRAT

SEQ ID NO: 4568 - protein, 9 aa, synthetic construct
  source 1..9: note = Description of Artificial Sequence: Synthetic peptide; note = XENP019443 vlCDR3
QQYGSSPWT

SEQ ID NO: 4569 - protein, 221 aa, synthetic construct; identical to SEQ ID NO: 2919
  source 1..221: note = Description of Artificial Sequence: Synthetic polypeptide; note = XENP019444 [CTLA-4]_H0_L0.29_Fab Heavy Chain

SEQ ID NO: 4570 - protein, 118 aa, synthetic construct; identical to SEQ ID NO: 22
  source 1..118: note = Description of Artificial Sequence: Synthetic polypeptide; note = VH of XENP019444

SEQ ID NO: 4571 - protein, 5 aa, synthetic construct
  source 1..5: note = Description of Artificial Sequence: Synthetic peptide; note = XENP019444 vhCDR1
SYTMH

SEQ ID NO: 4572 - protein, 17 aa, synthetic construct
  source 1..17: note = Description of Artificial Sequence: Synthetic peptide; note = XENP019444 vhCDR2
FISYDGNNKYYADSVKG

SEQ ID NO: 4573 - protein, 9 aa, synthetic construct
  source 1..9: note = Description of Artificial Sequence: Synthetic peptide; note = XENP019444 vhCDR3
TGWLGPFDY

SEQ ID NO: 4574 - protein, 215 aa, synthetic construct
  source 1..215: note = Description of Artificial Sequence: Synthetic polypeptide; note = XENP019444 [CTLA-4]_H0_L0.29_Fab Light Chain
EIVLTQSPGTLSLSPGERATLSCRASQSVGSAYLAWYQQKPGQAPRLLIYGAFSRATGIPDRFSGSGSGTDFTLTISRLEPEDFAVYYCQQYGSSPWTFGQGTKVEIKRTVAAPSVFIFPPSDEQLKSGTASVVCLLNNFYPREAKVQWKVDNALQSGNSQESVTEQDSKDSTYSLSSTLTLSKADYEKHKVYACEVTHQGLSSPVTKSFNRGEC

SEQ ID NO: 4575 - protein, 108 aa, synthetic construct; identical to SEQ ID NO: 1670
  source 1..108: note = Description of Artificial Sequence: Synthetic polypeptide; note = VL of XENP019444

SEQ ID NO: 4576 - protein, 12 aa, synthetic construct
  source 1..12: note = Description of Artificial Sequence: Synthetic peptide; note = XENP019444 vlCDR1
RASQSVGSAYLA

SEQ ID NO: 4577 - protein, 7 aa, synthetic construct
  source 1..7: note = Description of Artificial Sequence: Synthetic peptide; note = XENP019444 vlCDR2
GAFSRAT

SEQ ID NO: 4578 - protein, 9 aa, synthetic construct
  source 1..9: note = Description of Artificial Sequence: Synthetic peptide; note = XENP019444 vlCDR3
QQYGSSPWT

SEQ ID NO: 4579 - protein, 221 aa, synthetic construct; identical to SEQ ID NO: 2919
  source 1..221: note = Description of Artificial Sequence: Synthetic polypeptide; note = XENP019445 [CTLA-4]_H0_L0.30_Fab Heavy Chain

SEQ ID NO: 4580 - protein, 118 aa, synthetic construct; identical to SEQ ID NO: 22
  source 1..118: note = Description of Artificial Sequence: Synthetic polypeptide; note = VH of XENP019445

SEQ ID NO: 4581 - protein, 5 aa, synthetic construct
  source 1..5: note = Description of Artificial Sequence: Synthetic peptide; note = XENP019445 vhCDR1
SYTMH

SEQ ID NO: 4582 - protein, 17 aa, synthetic construct
  source 1..17: note = Description of Artificial Sequence: Synthetic peptide; note = XENP019445 vhCDR2
FISYDGNNKYYADSVKG

SEQ ID NO: 4583 - protein, 9 aa, synthetic construct
  source 1..9: note = Description of Artificial Sequence: Synthetic peptide; note = XENP019445 vhCDR3
TGWLGPFDY

SEQ ID NO: 4584 - protein, 215 aa, synthetic construct
  source 1..215: note = Description of Artificial Sequence: Synthetic polypeptide; note = XENP019445 [CTLA-4]_H0_L0.30_Fab Light Chain
EIVLTQSPGTLSLSPGERATLSCRASQSVGSGYLAWYQQKPGQAPRLLIYGAFSRATGIPDRFSGSGSGTDFTLTISRLEPEDFAVYYCQQYGSSPWTFGQGTKVEIKRTVAAPSVFIFPPSDEQLKSGTASVVCLLNNFYPREAKVQWKVDNALQSGNSQESVTEQDSKDSTYSLSSTLTLSKADYEKHKVYACEVTHQGLSSPVTKSFNRGEC

SEQ ID NO: 4585 - protein, 108 aa, synthetic construct; identical to SEQ ID NO: 1679
  source 1..108: note = Description of Artificial Sequence: Synthetic polypeptide; note = VL of XENP019445

SEQ ID NO: 4586 - protein, 12 aa, synthetic construct
  source 1..12: note = Description of Artificial Sequence: Synthetic peptide; note = XENP019445 vlCDR1
RASQSVGSGYLA

SEQ ID NO: 4587 - protein, 7 aa, synthetic construct
  source 1..7: note = Description of Artificial Sequence: Synthetic peptide; note = XENP019445 vlCDR2
GAFSRAT

SEQ ID NO: 4588 - protein, 9 aa, synthetic construct
  source 1..9: note = Description of Artificial Sequence: Synthetic peptide; note = XENP019445 vlCDR3
QQYGSSPWT

SEQ ID NO: 4589 - protein, 221 aa, synthetic construct; identical to SEQ ID NO: 2919
  source 1..221: note = Description of Artificial Sequence: Synthetic polypeptide; note = XENP019446 [CTLA-4]_H0_L0.31_Fab Heavy Chain

SEQ ID NO: 4590 - protein, 118 aa, synthetic construct; identical to SEQ ID NO: 22
  source 1..118: note = Description of Artificial Sequence: Synthetic polypeptide; note = VH of XENP019446

SEQ ID NO: 4591 - protein, 5 aa, synthetic construct
  source 1..5: note = Description of Artificial Sequence: Synthetic peptide; note = XENP019446 vhCDR1
SYTMH

SEQ ID NO: 4592 - protein, 17 aa, synthetic construct
  source 1..17: note = Description of Artificial Sequence: Synthetic peptide; note = XENP019446 vhCDR2
FISYDGNNKYYADSVKG

SEQ ID NO: 4593 - protein, 9 aa, synthetic construct
  source 1..9: note = Description of Artificial Sequence: Synthetic peptide; note = XENP019446 vhCDR3
TGWLGPFDY

SEQ ID NO: 4594 - protein, 215 aa, synthetic construct
  source 1..215: note = Description of Artificial Sequence: Synthetic polypeptide; note = XENP019446 [CTLA-4]_H0_L0.31_Fab Light Chain
EIVLTQSPGTLSLSPGERATLSCRASQSVGSNYLAWYQQKPGQAPRLLIYGAFSRATGIPDRFSGSGSGTDFTLTISRLEPEDFAVYYCQQYGSSPWTFGQGTKVEIKRTVAAPSVFIFPPSDEQLKSGTASVVCLLNNFYPREAKVQWKVDNALQSGNSQESVTEQDSKDSTYSLSSTLTLSKADYEKHKVYACEVTHQGLSSPVTKSFNRGEC

SEQ ID NO: 4595 - protein, 108 aa, synthetic construct; identical to SEQ ID NO: 1688
  source 1..108: note = Description of Artificial Sequence: Synthetic polypeptide; note = VL of XENP019446

SEQ ID NO: 4596 - protein, 12 aa, synthetic construct
  source 1..12: note = Description of Artificial Sequence: Synthetic peptide; note = XENP019446 vlCDR1
RASQSVGSNYLA

SEQ ID NO: 4597 - protein, 7 aa, synthetic construct
  source 1..7: note = Description of Artificial Sequence: Synthetic peptide; note = XENP019446 vlCDR2
GAFSRAT

SEQ ID NO: 4598 - protein, 9 aa, synthetic construct
  source 1..9: note = Description of Artificial Sequence: Synthetic peptide; note = XENP019446 vlCDR3
QQYGSSPWT

SEQ ID NO: 4599 - protein, 221 aa, synthetic construct; identical to SEQ ID NO: 2919
  source 1..221: note = Description of Artificial Sequence: Synthetic polypeptide; note = XENP019447 [CTLA-4]_H0_L0.32_Fab Heavy Chain

SEQ ID NO: 4600 - protein, 118 aa, synthetic construct; identical to SEQ ID NO: 22
  source 1..118: note = Description of Artificial Sequence: Synthetic polypeptide; note = VH of XENP019447

SEQ ID NO: 4601 - protein, 5 aa, synthetic construct
  source 1..5: note = Description of Artificial Sequence: Synthetic peptide; note = XENP019447 vhCDR1
SYTMH

SEQ ID NO: 4602 - protein, 17 aa, synthetic construct
  source 1..17: note = Description of Artificial Sequence: Synthetic peptide; note = XENP019447 vhCDR2
FISYDGNNKYYADSVKG

SEQ ID NO: 4603 - protein, 9 aa, synthetic construct
  source 1..9: note = Description of Artificial Sequence: Synthetic peptide; note = XENP019447 vhCDR3
TGWLGPFDY

SEQ ID NO: 4604 - protein, 215 aa, synthetic construct
  source 1..215: note = Description of Artificial Sequence: Synthetic polypeptide; note = XENP019447 [CTLA-4]_H0_L0.32_Fab Light Chain
EIVLTQSPGTLSLSPGERATLSCRASQSVGSQYLAWYQQKPGQAPRLLIYGAFSRATGIPDRFSGSGSGTDFTLTISRLEPEDFAVYYCQQYGSSPWTFGQGTKVEIKRTVAAPSVFIFPPSDEQLKSGTASVVCLLNNFYPREAKVQWKVDNALQSGNSQESVTEQDSKDSTYSLSSTLTLSKADYEKHKVYACEVTHQGLSSPVTKSFNRGEC

SEQ ID NO: 4605 - protein, 108 aa, synthetic construct; identical to SEQ ID NO: 1697
  source 1..108: note = Description of Artificial Sequence: Synthetic polypeptide; note = VL of XENP019447

SEQ ID NO: 4606 - protein, 12 aa, synthetic construct
  source 1..12: note = Description of Artificial Sequence: Synthetic peptide; note = XENP019447 vlCDR1
RASQSVGSQYLA

SEQ ID NO: 4607 - protein, 7 aa, synthetic construct
  source 1..7: note = Description of Artificial Sequence: Synthetic peptide; note = XENP019447 vlCDR2
GAFSRAT

SEQ ID NO: 4608 - protein, 9 aa, synthetic construct
  source 1..9: note = Description of Artificial Sequence: Synthetic peptide; note = XENP019447 vlCDR3
QQYGSSPWT

SEQ ID NO: 4609 - protein, 221 aa, synthetic construct; identical to SEQ ID NO: 2919
  source 1..221: note = Description of Artificial Sequence: Synthetic polypeptide; note = XENP019448 [CTLA-4]_H0_L0.33_Fab Heavy Chain

SEQ ID NO: 4610 - protein, 118 aa, synthetic construct; identical to SEQ ID NO: 22
  source 1..118: note = Description of Artificial Sequence: Synthetic polypeptide; note = VH of XENP019448

SEQ ID NO: 4611 - protein, 5 aa, synthetic construct
  source 1..5: note = Description of Artificial Sequence: Synthetic peptide; note = XENP019448 vhCDR1
SYTMH

SEQ ID NO: 4612 - protein, 17 aa, synthetic construct
  source 1..17: note = Description of Artificial Sequence: Synthetic peptide; note = XENP019448 vhCDR2
FISYDGNNKYYADSVKG

SEQ ID NO: 4613 - protein, 9 aa, synthetic construct
  source 1..9: note = Description of Artificial Sequence: Synthetic peptide; note = XENP019448 vhCDR3
TGWLGPFDY

SEQ ID NO: 4614 - protein, 215 aa, synthetic construct
  source 1..215: note = Description of Artificial Sequence: Synthetic polypeptide; note = XENP019448 [CTLA-4]_H0_L0.33_Fab Light Chain
EIVLTQSPGTLSLSPGERATLSCRASQSVGSTYLAWYQQKPGQAPRLLIYGAFSRATGIPDRFSGSGSGTDFTLTISRLEPEDFAVYYCQQYGSSPWTFGQGTKVEIKRTVAAPSVFIFPPSDEQLKSGTASVVCLLNNFYPREAKVQWKVDNALQSGNSQESVTEQDSKDSTYSLSSTLTLSKADYEKHKVYACEVTHQGLSSPVTKSFNRGEC

SEQ ID NO: 4615 - protein, 108 aa, synthetic construct; identical to SEQ ID NO: 1706
  source 1..108: note = Description of Artificial Sequence: Synthetic polypeptide; note = VL of XENP019448

SEQ ID NO: 4616 - protein, 12 aa, synthetic construct
  source 1..12: note = Description of Artificial Sequence: Synthetic peptide; note = XENP019448 vlCDR1
RASQSVGSTYLA

SEQ ID NO: 4617 - protein, 7 aa, synthetic construct
  source 1..7: note = Description of Artificial Sequence: Synthetic peptide; note = XENP019448 vlCDR2
GAFSRAT

SEQ ID NO: 4618 - protein, 9 aa, synthetic construct
  source 1..9: note = Description of Artificial Sequence: Synthetic peptide; note = XENP019448 vlCDR3
QQYGSSPWT

SEQ ID NO: 4619 - protein, 221 aa, synthetic construct; identical to SEQ ID NO: 2919
  source 1..221: note = Description of Artificial Sequence: Synthetic polypeptide; note = XENP019449 [CTLA-4]_H0_L0.34_Fab Heavy Chain

SEQ ID NO: 4620 - protein, 118 aa, synthetic construct; identical to SEQ ID NO: 22
  source 1..118: note = Description of Artificial Sequence: Synthetic polypeptide; note = VH of XENP019449

SEQ ID NO: 4621 - protein, 5 aa, synthetic construct
  source 1..5: note = Description of Artificial Sequence: Synthetic peptide; note = XENP019449 vhCDR1
SYTMH

SEQ ID NO: 4622 - protein, 17 aa, synthetic construct
  source 1..17: note = Description of Artificial Sequence: Synthetic peptide; note = XENP019449 vhCDR2
FISYDGNNKYYADSVKG

SEQ ID NO: 4623 - protein, 9 aa, synthetic construct
  source 1..9: note = Description of Artificial Sequence: Synthetic peptide; note = XENP019449 vhCDR3
TGWLGPFDY

SEQ ID NO: 4624 - protein, 215 aa, synthetic construct
  source 1..215: note = Description of Artificial Sequence: Synthetic polypeptide; note = XENP019449 [CTLA-4]_H0_L0.34_Fab Light Chain
EIVLTQSPGTLSLSPGERATLSCRASQSVGSSALAWYQQKPGQAPRLLIYGAFSRATGIPDRFSGSGSGTDFTLTISRLEPEDFAVYYCQQYGSSPWTFGQGTKVEIKRTVAAPSVFIFPPSDEQLKSGTASVVCLLNNFYPREAKVQWKVDNALQSGNSQESVTEQDSKDSTYSLSSTLTLSKADYEKHKVYACEVTHQGLSSPVTKSFNRGEC

SEQ ID NO: 4625 - protein, 108 aa, synthetic construct; identical to SEQ ID NO: 1715
  source 1..108: note = Description of Artificial Sequence: Synthetic polypeptide; note = VL of XENP019449

SEQ ID NO: 4626 - protein, 12 aa, synthetic construct
  source 1..12: note = Description of Artificial Sequence: Synthetic peptide; note = XENP019449 vlCDR1
RASQSVGSSALA

SEQ ID NO: 4627 - protein, 7 aa, synthetic construct
  source 1..7: note = Description of Artificial Sequence: Synthetic peptide; note = XENP019449 vlCDR2
GAFSRAT

SEQ ID NO: 4628 - protein, 9 aa, synthetic construct
  source 1..9: note = Description of Artificial Sequence: Synthetic peptide; note = XENP019449 vlCDR3
QQYGSSPWT

SEQ ID NO: 4629 - protein, 221 aa, synthetic construct; identical to SEQ ID NO: 2919
  source 1..221: note = Description of Artificial Sequence: Synthetic polypeptide; note = XENP019450 [CTLA-4]_H0_L0.35_Fab Heavy Chain

SEQ ID NO: 4630 - protein, 118 aa, synthetic construct; identical to SEQ ID NO: 22
  source 1..118: note = Description of Artificial Sequence: Synthetic polypeptide; note = VH of XENP019450

SEQ ID NO: 4631 - protein, 5 aa, synthetic construct
  source 1..5: note = Description of Artificial Sequence: Synthetic peptide; note = XENP019450 vhCDR1
SYTMH

SEQ ID NO: 4632 - protein, 17 aa, synthetic construct
  source 1..17: note = Description of Artificial Sequence: Synthetic peptide; note = XENP019450 vhCDR2
FISYDGNNKYYADSVKG

SEQ ID NO: 4633 - protein, 9 aa, synthetic construct
  source 1..9: note = Description of Artificial Sequence: Synthetic peptide; note = XENP019450 vhCDR3
TGWLGPFDY

SEQ ID NO: 4634 - protein, 215 aa, synthetic construct
  source 1..215: note = Description of Artificial Sequence: Synthetic polypeptide; note = XENP019450 [CTLA-4]_H0_L0.35_Fab Light Chain
EIVLTQSPGTLSLSPGERATLSCRASQSVGSSFLAWYQQKPGQAPRLLIYGAFSRATGIPDRFSGSGSGTDFTLTISRLEPEDFAVYYCQQYGSSPWTFGQGTKVEIKRTVAAPSVFIFPPSDEQLKSGTASVVCLLNNFYPREAKVQWKVDNALQSGNSQESVTEQDSKDSTYSLSSTLTLSKADYEKHKVYACEVTHQGLSSPVTKSFNRGEC

SEQ ID NO: 4635 - protein, 108 aa, synthetic construct; identical to SEQ ID NO: 1724
  source 1..108: note = Description of Artificial Sequence: Synthetic polypeptide; note = VL of XENP019450

SEQ ID NO: 4636 - protein, 12 aa, synthetic construct
  source 1..12: note = Description of Artificial Sequence: Synthetic peptide; note = XENP019450 vlCDR1
RASQSVGSSFLA

SEQ ID NO: 4637 - protein, 7 aa, synthetic construct
  source 1..7: note = Description of Artificial Sequence: Synthetic peptide; note = XENP019450 vlCDR2
GAFSRAT

SEQ ID NO: 4638 - protein, 9 aa, synthetic construct
  source 1..9: note = Description of Artificial Sequence: Synthetic peptide; note = XENP019450 vlCDR3
QQYGSSPWT

SEQ ID NO: 4639 - protein, 221 aa, synthetic construct; identical to SEQ ID NO: 2919
  source 1..221: note = Description of Artificial Sequence: Synthetic polypeptide; note = XENP019451 [CTLA-4]_H0_L0.36_Fab Heavy Chain

SEQ ID NO: 4640 - protein, 118 aa, synthetic construct; identical to SEQ ID NO: 22
  source 1..118: note = Description of Artificial Sequence: Synthetic polypeptide; note = VH of XENP019451

SEQ ID NO: 4641 - protein, 5 aa, synthetic construct
  source 1..5: note = Description of Artificial Sequence: Synthetic peptide; note = XENP019451 vhCDR1
SYTMH

SEQ ID NO: 4642 - protein, 17 aa, synthetic construct
  source 1..17: note = Description of Artificial Sequence: Synthetic peptide; note = XENP019451 vhCDR2
FISYDGNNKYYADSVKG

SEQ ID NO: 4643 - protein, 9 aa, synthetic construct
  source 1..9: note = Description of Artificial Sequence: Synthetic peptide; note = XENP019451 vhCDR3
TGWLGPFDY

SEQ ID NO: 4644 - protein, 215 aa, synthetic construct
  source 1..215: note = Description of Artificial Sequence: Synthetic polypeptide; note = XENP019451 [CTLA-4]_H0_L0.36_Fab Light Chain
EIVLTQSPGTLSLSPGERATLSCRASQSVGSSHLAWYQQKPGQAPRLLIYGAFSRATGIPDRFSGSGSGTDFTLTISRLEPEDFAVYYCQQYGSSPWTFGQGTKVEIKRTVAAPSVFIFPPSDEQLKSGTASVVCLLNNFYPREAKVQWKVDNALQSGNSQESVTEQDSKDSTYSLSSTLTLSKADYEKHKVYACEVTHQGLSSPVTKSFNRGEC

SEQ ID NO: 4645 - protein, 108 aa, synthetic construct; identical to SEQ ID NO: 1733
  source 1..108: note = Description of Artificial Sequence: Synthetic polypeptide; note = VL of XENP019451

SEQ ID NO: 4646 - protein, 12 aa, synthetic construct
  source 1..12: note = Description of Artificial Sequence: Synthetic peptide; note = XENP019451 vlCDR1
RASQSVGSSHLA

SEQ ID NO: 4647 - protein, 7 aa, synthetic construct
  source 1..7: note = Description of Artificial Sequence: Synthetic peptide; note = XENP019451 vlCDR2
GAFSRAT

SEQ ID NO: 4648 - protein, 9 aa, synthetic construct
  source 1..9: note = Description of Artificial Sequence: Synthetic peptide; note = XENP019451 vlCDR3
QQYGSSPWT

SEQ ID NO: 4649 - protein, 221 aa, synthetic construct; identical to SEQ ID NO: 2919
  source 1..221: note = Description of Artificial Sequence: Synthetic polypeptide; note = XENP019452 [CTLA-4]_H0_L0.37_Fab Heavy Chain

SEQ ID NO: 4650 - protein, 118 aa, synthetic construct; identical to SEQ ID NO: 22
  source 1..118: note = Description of Artificial Sequence: Synthetic polypeptide; note = VH of XENP019452

SEQ ID NO: 4651 - protein, 5 aa, synthetic construct
  source 1..5: note = Description of Artificial Sequence: Synthetic peptide; note = XENP019452 vhCDR1
SYTMH

SEQ ID NO: 4652 - protein, 17 aa, synthetic construct
  source 1..17: note = Description of Artificial Sequence: Synthetic peptide; note = XENP019452 vhCDR2
FISYDGNNKYYADSVKG

SEQ ID NO: 4653 - protein, 9 aa, synthetic construct
  source 1..9: note = Description of Artificial Sequence: Synthetic peptide; note = XENP019452 vhCDR3
TGWLGPFDY

SEQ ID NO: 4654 - protein, 215 aa, synthetic construct
  source 1..215: note = Description of Artificial Sequence: Synthetic polypeptide; note = XENP019452 [CTLA-4]_H0_L0.37_Fab Light Chain
EIVLTQSPGTLSLSPGERATLSCRASQSVGSSLLAWYQQKPGQAPRLLIYGAFSRATGIPDRFSGSGSGTDFTLTISRLEPEDFAVYYCQQYGSSPWTFGQGTKVEIKRTVAAPSVFIFPPSDEQLKSGTASVVCLLNNFYPREAKVQWKVDNALQSGNSQESVTEQDSKDSTYSLSSTLTLSKADYEKHKVYACEVTHQGLSSPVTKSFNRGEC

SEQ ID NO: 4655 - protein, 108 aa, synthetic construct; identical to SEQ ID NO: 1742
  source 1..108: note = Description of Artificial Sequence: Synthetic polypeptide; note = VL of XENP019452

SEQ ID NO: 4656 - protein, 12 aa, synthetic construct
  source 1..12: note = Description of Artificial Sequence: Synthetic peptide; note = XENP019452 vlCDR1
RASQSVGSSLLA

SEQ ID NO: 4657 - protein, 7 aa, synthetic construct
  source 1..7: note = Description of Artificial Sequence: Synthetic peptide; note = XENP019452 vlCDR2
GAFSRAT

SEQ ID NO: 4658 - protein, 9 aa, synthetic construct
  source 1..9: note = Description of Artificial Sequence: Synthetic peptide; note = XENP019452 vlCDR3
QQYGSSPWT

SEQ ID NO: 4659 - protein, 221 aa, synthetic construct; identical to SEQ ID NO: 2919
  source 1..221: note = Description of Artificial Sequence: Synthetic polypeptide; note = XENP019453 [CTLA-4]_H0_L0.38_Fab Heavy Chain

SEQ ID NO: 4660 - protein, 118 aa, synthetic construct; identical to SEQ ID NO: 22
  source 1..118: note = Description of Artificial Sequence: Synthetic polypeptide; note = VH of XENP019453

SEQ ID NO: 4661 - protein, 5 aa, synthetic construct
  source 1..5: note = Description of Artificial Sequence: Synthetic peptide; note = XENP019453 vhCDR1
SYTMH

SEQ ID NO: 4662 - protein, 17 aa, synthetic construct
  source 1..17: note = Description of Artificial Sequence: Synthetic peptide; note = XENP019453 vhCDR2
FISYDGNNKYYADSVKG

SEQ ID NO: 4663 - protein, 9 aa, synthetic construct
  source 1..9: note = Description of Artificial Sequence: Synthetic peptide; note = XENP019453 vhCDR3
TGWLGPFDY

SEQ ID NO: 4664 - protein, 215 aa, synthetic construct
  source 1..215: note = Description of Artificial Sequence: Synthetic polypeptide; note = XENP019453 [CTLA-4]_H0_L0.38_Fab Light Chain
EIVLTQSPGTLSLSPGERATLSCRASQSVGSSNLAWYQQKPGQAPRLLIYGAFSRATGIPDRFSGSGSGTDFTLTISRLEPEDFAVYYCQQYGSSPWTFGQGTKVEIKRTVAAPSVFIFPPSDEQLKSGTASVVCLLNNFYPREAKVQWKVDNALQSGNSQESVTEQDSKDSTYSLSSTLTLSKADYEKHKVYACEVTHQGLSSPVTKSFNRGEC

SEQ ID NO: 4665 - protein, 108 aa, synthetic construct; identical to SEQ ID NO: 1751
  source 1..108: note = Description of Artificial Sequence: Synthetic polypeptide; note = VL of XENP019453

SEQ ID NO: 4666 - protein, 12 aa, synthetic construct
  source 1..12: note = Description of Artificial Sequence: Synthetic peptide; note = XENP019453 vlCDR1
RASQSVGSSNLA

SEQ ID NO: 4667 - protein, 7 aa, synthetic construct
  source 1..7: note = Description of Artificial Sequence: Synthetic peptide; note = XENP019453 vlCDR2
GAFSRAT

SEQ ID NO: 4668 - protein, 9 aa, synthetic construct
  source 1..9: note = Description of Artificial Sequence: Synthetic peptide; note = XENP019453 vlCDR3
QQYGSSPWT

SEQ ID NO: 4669 - protein, 221 aa, synthetic construct; identical to SEQ ID NO: 2919
  source 1..221: note = Description of Artificial Sequence: Synthetic polypeptide; note = XENP019454 [CTLA-4]_H0_L0.39_Fab Heavy Chain

SEQ ID NO: 4670 - protein, 118 aa, synthetic construct; identical to SEQ ID NO: 22
  source 1..118: note = Description of Artificial Sequence: Synthetic polypeptide; note = VH of XENP019454

SEQ ID NO: 4671 - protein, 5 aa, synthetic construct
  source 1..5: note = Description of Artificial Sequence: Synthetic peptide; note = XENP019454 vhCDR1
SYTMH

SEQ ID NO: 4672 - protein, 17 aa, synthetic construct
  source 1..17: note = Description of Artificial Sequence: Synthetic peptide; note = XENP019454 vhCDR2
FISYDGNNKYYADSVKG

SEQ ID NO: 4673 - protein, 9 aa, synthetic construct
  source 1..9: note = Description of Artificial Sequence: Synthetic peptide; note = XENP019454 vhCDR3
TGWLGPFDY

SEQ ID NO: 4674 - protein, 215 aa, synthetic construct
  source 1..215: note = Description of Artificial Sequence: Synthetic polypeptide; note = XENP019454 [CTLA-4]_H0_L0.39_Fab Light Chain
EIVLTQSPGTLSLSPGERATLSCRASQSVGSSSLAWYQQKPGQAPRLLIYGAFSRATGIPDRFSGSGSGTDFTLTISRLEPEDFAVYYCQQYGSSPWTFGQGTKVEIKRTVAAPSVFIFPPSDEQLKSGTASVVCLLNNFYPREAKVQWKVDNALQSGNSQESVTEQDSKDSTYSLSSTLTLSKADYEKHKVYACEVTHQGLSSPVTKSFNRGEC

SEQ ID NO: 4675 - protein, 108 aa, synthetic construct; identical to SEQ ID NO: 1760
  source 1..108: note = Description of Artificial Sequence: Synthetic polypeptide; note = VL of XENP019454

SEQ ID NO: 4676 - protein, 12 aa, synthetic construct
  source 1..12: note = Description of Artificial Sequence: Synthetic peptide; note = XENP019454 vlCDR1
RASQSVGSSSLA

SEQ ID NO: 4677 - protein, 7 aa, synthetic construct
  source 1..7: note = Description of Artificial Sequence: Synthetic peptide; note = XENP019454 vlCDR2
GAFSRAT

SEQ ID NO: 4678 - protein, 9 aa, synthetic construct
  source 1..9: note = Description of Artificial Sequence: Synthetic peptide; note = XENP019454 vlCDR3
QQYGSSPWT

SEQ ID NO: 4679 - protein, 221 aa, synthetic construct; identical to SEQ ID NO: 2919
  source 1..221: note = Description of Artificial Sequence: Synthetic polypeptide; note = XENP019455 [CTLA-4]_H0_L0.40_Fab Heavy Chain

SEQ ID NO: 4680 - protein, 118 aa, synthetic construct; identical to SEQ ID NO: 22
  source 1..118: note = Description of Artificial Sequence: Synthetic polypeptide; note = VH of XENP019455

SEQ ID NO: 4681 - protein, 5 aa, synthetic construct
  source 1..5: note = Description of Artificial Sequence: Synthetic peptide; note = XENP019455 vhCDR1
SYTMH

SEQ ID NO: 4682 - protein, 17 aa, synthetic construct
  source 1..17: note = Description of Artificial Sequence: Synthetic peptide; note = XENP019455 vhCDR2
FISYDGNNKYYADSVKG

SEQ ID NO: 4683 - protein, 9 aa, synthetic construct
  source 1..9: note = Description of Artificial Sequence: Synthetic peptide; note = XENP019455 vhCDR3
TGWLGPFDY

SEQ ID NO: 4684 - protein, 215 aa, synthetic construct
  source 1..215: note = Description of Artificial Sequence: Synthetic polypeptide; note = XENP019455 [CTLA-4]_H0_L0.40_Fab Light Chain
EIVLTQSPGTLSLSPGERATLSCRASQSVGSSVLAWYQQKPGQAPRLLIYGAFSRATGIPDRFSGSGSGTDFTLTISRLEPEDFAVYYCQQYGSSPWTFGQGTKVEIKRTVAAPSVFIFPPSDEQLKSGTASVVCLLNNFYPREAKVQWKVDNALQSGNSQESVTEQDSKDSTYSLSSTLTLSKADYEKHKVYACEVTHQGLSSPVTKSFNRGEC

SEQ ID NO: 4685 - protein, 108 aa, synthetic construct; identical to SEQ ID NO: 1769
  source 1..108: note = Description of Artificial Sequence: Synthetic polypeptide; note = VL of XENP019455

SEQ ID NO: 4686 - protein, 12 aa, synthetic construct
  source 1..12: note = Description of Artificial Sequence: Synthetic peptide; note = XENP019455 vlCDR1
RASQSVGSSVLA

SEQ ID NO: 4687 - protein, 7 aa, synthetic construct
  source 1..7: note = Description of Artificial Sequence: Synthetic peptide; note = XENP019455 vlCDR2
GAFSRAT

SEQ ID NO: 4688 - protein, 9 aa, synthetic construct
  source 1..9: note = Description of Artificial Sequence: Synthetic peptide; note = XENP019455 vlCDR3
QQYGSSPWT

SEQ ID NO: 4689 - protein, 221 aa, synthetic construct; identical to SEQ ID NO: 2919
  source 1..221: note = Description of Artificial Sequence: Synthetic polypeptide; note = XENP019456 [CTLA-4]_H0_L0.41_Fab Heavy Chain

SEQ ID NO: 4690 - protein, 118 aa, synthetic construct; identical to SEQ ID NO: 22
  source 1..118: note = Description of Artificial Sequence: Synthetic polypeptide; note = VH of XENP019456

SEQ ID NO: 4691 - protein, 5 aa, synthetic construct
  source 1..5: note = Description of Artificial Sequence: Synthetic peptide; note = XENP019456 vhCDR1
SYTMH

SEQ ID NO: 4692 - protein, 17 aa, synthetic construct
  source 1..17: note = Description of Artificial Sequence: Synthetic peptide; note = XENP019456 vhCDR2
FISYDGNNKYYADSVKG

SEQ ID NO: 4693 - protein, 9 aa, synthetic construct
  source 1..9: note = Description of Artificial Sequence: Synthetic peptide; note = XENP019456 vhCDR3
TGWLGPFDY

SEQ ID NO: 4694 - protein, 215 aa, synthetic construct
  source 1..215: note = Description of Artificial Sequence: Synthetic polypeptide; note = XENP019456 [CTLA-4]_H0_L0.41_Fab Light Chain
EIVLTQSPGTLSLSPGERATLSCRASQSVGSSYMAWYQQKPGQAPRLLIYGAFSRATGIPDRFSGSGSGTDFTLTISRLEPEDFAVYYCQQYGSSPWTFGQGTKVEIKRTVAAPSVFIFPPSDEQLKSGTASVVCLLNNFYPREAKVQWKVDNALQSGNSQESVTEQDSKDSTYSLSSTLTLSKADYEKHKVYACEVTHQGLSSPVTKSFNRGEC

SEQ ID NO: 4695 - protein, 108 aa, synthetic construct; identical to SEQ ID NO: 1778
  source 1..108: note = Description of Artificial Sequence: Synthetic polypeptide; note = VL of XENP019456

SEQ ID NO: 4696 - protein, 12 aa, synthetic construct
  source 1..12: note = Description of Artificial Sequence: Synthetic peptide; note = XENP019456 vlCDR1
RASQSVGSSYMA

SEQ ID NO: 4697 - protein, 7 aa, synthetic construct
  source 1..7: note = Description of Artificial Sequence: Synthetic peptide; note = XENP019456 vlCDR2
GAFSRAT

SEQ ID NO: 4698 - protein, 9 aa, synthetic construct
  source 1..9: note = Description of Artificial Sequence: Synthetic peptide; note = XENP019456 vlCDR3
QQYGSSPWT

SEQ ID NO: 4699 - protein, 221 aa, synthetic construct; identical to SEQ ID NO: 2919
  source 1..221: note = Description of Artificial Sequence: Synthetic polypeptide; note = XENP019457 [CTLA-4]_H0_L0.42_Fab Heavy Chain

SEQ ID NO: 4700 - protein, 118 aa, synthetic construct; identical to SEQ ID NO: 22
  source 1..118: note = Description of Artificial Sequence: Synthetic polypeptide; note = VH of XENP019457

SEQ ID NO: 4701 - protein, 5 aa, synthetic construct
  source 1..5: note = Description of Artificial Sequence: Synthetic peptide; note = XENP019457 vhCDR1
SYTMH

SEQ ID NO: 4702 - protein, 17 aa, synthetic construct
  source 1..17: note = Description of Artificial Sequence: Synthetic peptide; note = XENP019457 vhCDR2
FISYDGNNKYYADSVKG

SEQ ID NO: 4703 - protein, 9 aa, synthetic construct
  source 1..9: note = Description of Artificial Sequence: Synthetic peptide; note = XENP019457 vhCDR3
TGWLGPFDY

SEQ ID NO: 4704 - protein, 215 aa, synthetic construct
  source 1..215: note = Description of Artificial Sequence: Synthetic polypeptide; note = XENP019457 [CTLA-4]_H0_L0.42_Fab Light Chain
EIVLTQSPGTLSLSPGERATLSCRASQSVGSSYLDWYQQKPGQAPRLLIYGAFSRATGIPDRFSGSGSGTDFTLTISRLEPEDFAVYYCQQYGSSPWTFGQGTKVEIKRTVAAPSVFIFPPSDEQLKSGTASVVCLLNNFYPREAKVQWKVDNALQSGNSQESVTEQDSKDSTYSLSSTLTLSKADYEKHKVYACEVTHQGLSSPVTKSFNRGEC

SEQ ID NO: 4705 - protein, 108 aa, synthetic construct; identical to SEQ ID NO: 1787
  source 1..108: note = Description of Artificial Sequence: Synthetic polypeptide; note = VL of XENP019457

SEQ ID NO: 4706 - protein, 12 aa, synthetic construct
  source 1..12: note = Description of Artificial Sequence: Synthetic peptide; note = XENP019457 vlCDR1
RASQSVGSSYLD

SEQ ID NO: 4707 - protein, 7 aa, synthetic construct
  source 1..7: note = Description of Artificial Sequence: Synthetic peptide; note = XENP019457 vlCDR2
GAFSRAT

SEQ ID NO: 4708 - protein, 9 aa, synthetic construct
  source 1..9: note = Description of Artificial Sequence: Synthetic peptide; note = XENP019457 vlCDR3
QQYGSSPWT

SEQ ID NO: 4709 - protein, 221 aa, synthetic construct; identical to SEQ ID NO: 2919
  source 1..221: note = Description of Artificial Sequence: Synthetic polypeptide; note = XENP019458 [CTLA-4]_H0_L0.43_Fab Heavy Chain

SEQ ID NO: 4710 - protein, 118 aa, synthetic construct; identical to SEQ ID NO: 22
  source 1..118: note = Description of Artificial Sequence: Synthetic polypeptide; note = VH of XENP019458

SEQ ID NO: 4711 - protein, 5 aa, synthetic construct
  source 1..5: note = Description of Artificial Sequence: Synthetic peptide; note = XENP019458 vhCDR1
SYTMH

SEQ ID NO: 4712 - protein, 17 aa, synthetic construct
  source 1..17: note = Description of Artificial Sequence: Synthetic peptide; note = XENP019458 vhCDR2
FISYDGNNKYYADSVKG

SEQ ID NO: 4713 - protein, 9 aa, synthetic construct
  source 1..9: note = Description of Artificial Sequence: Synthetic peptide; note = XENP019458 vhCDR3
TGWLGPFDY

SEQ ID NO: 4714 - protein, 215 aa, synthetic construct
  source 1..215: note = Description of Artificial Sequence: Synthetic polypeptide; note = XENP019458 [CTLA-4]_H0_L0.43_Fab Light Chain
EIVLTQSPGTLSLSPGERATLSCRASQSVGSSYLDWYQQKPGQAPRLLIYGAFSRATGIPDRFSGSGSGTDFTLTISRLEPEDFAVYYCKQYGSSPWTFGQGTKVEIKRTVAAPSVFIFPPSDEQLKSGTASVVCLLNNFYPREAKVQWKVDNALQSGNSQESVTEQDSKDSTYSLSSTLTLSKADYEKHKVYACEVTHQGLSSPVTKSFNRGEC

SEQ ID NO: 4715 - protein, 108 aa, synthetic construct; identical to SEQ ID NO: 1796
  source 1..108: note = Description of Artificial Sequence: Synthetic polypeptide; note = VL of XENP019458

SEQ ID NO: 4716 - protein, 12 aa, synthetic construct
  source 1..12: note = Description of Artificial Sequence: Synthetic peptide; note = XENP019458 vlCDR1
RASQSVGSSYLD

SEQ ID NO: 4717 - protein, 7 aa, synthetic construct
  source 1..7: note = Description of Artificial Sequence: Synthetic peptide; note = XENP019458 vlCDR2
GAFSRAT

SEQ ID NO: 4718 - protein, 9 aa, synthetic construct
  source 1..9: note = Description of Artificial Sequence: Synthetic peptide; note = XENP019458 vlCDR3
KQYGSSPWT

SEQ ID NO: 4719 - protein, 221 aa, synthetic construct; identical to SEQ ID NO: 2919
  source 1..221: note = Description of Artificial Sequence: Synthetic polypeptide; note = XENP019459 [CTLA-4]_H0_L0.44_Fab Heavy Chain

SEQ ID NO: 4720 - protein, 118 aa, synthetic construct; identical to SEQ ID NO: 22
  source 1..118: note = Description of Artificial Sequence: Synthetic polypeptide; note = VH of XENP019459

SEQ ID NO: 4721 - protein, 5 aa, synthetic construct
  source 1..5: note = Description of Artificial Sequence: Synthetic peptide; note = XENP019459 vhCDR1
SYTMH

SEQ ID NO: 4722 - protein, 17 aa, synthetic construct
  source 1..17: note = Description of Artificial Sequence: Synthetic peptide; note = XENP019459 vhCDR2
FISYDGNNKYYADSVKG

SEQ ID NO: 4723 - protein, 9 aa, synthetic construct
  source 1..9: note = Description of Artificial Sequence: Synthetic peptide; note = XENP019459 vhCDR3
TGWLGPFDY

SEQ ID NO: 4724 - protein, 215 aa, synthetic construct
  source 1..215: note = Description of Artificial Sequence: Synthetic polypeptide; note = XENP019459 [CTLA-4]_H0_L0.44_Fab Light Chain
EIVLTQSPGTLSLSPGERATLSCRASQSVGSSYLSWYQQKPGQAPRLLIYGAFSRATGIPDRFSGSGSGTDFTLTISRLEPEDFAVYYCQQYGSSPWTFGQGTKVEIKRTVAAPSVFIFPPSDEQLKSGTASVVCLLNNFYPREAKVQWKVDNALQSGNSQESVTEQDSKDSTYSLSSTLTLSKADYEKHKVYACEVTHQGLSSPVTKSFNRGEC

SEQ ID NO: 4725 - protein, 108 aa, synthetic construct; identical to SEQ ID NO: 1805
  source 1..108: note = Description of Artificial Sequence: Synthetic polypeptide; note = VL of XENP019459

SEQ ID NO: 4726 - protein, 12 aa, synthetic construct
  source 1..12: note = Description of Artificial Sequence: Synthetic peptide; note = XENP019459 vlCDR1
RASQSVGSSYLS

SEQ ID NO: 4727 - protein, 7 aa, synthetic construct
  source 1..7: note = Description of Artificial Sequence: Synthetic peptide; note = XENP019459 vlCDR2
GAFSRAT

SEQ ID NO: 4728 - protein, 9 aa, synthetic construct
  source 1..9: note = Description of Artificial Sequence: Synthetic peptide; note = XENP019459 vlCDR3
QQYGSSPWT

SEQ ID NO: 4729 - protein, 221 aa, synthetic construct; identical to SEQ ID NO: 2919
  source 1..221: note = Description of Artificial Sequence: Synthetic polypeptide; note = XENP019460 [CTLA-4]_H0_L0.45_Fab Heavy Chain

SEQ ID NO: 4730 - protein, 118 aa, synthetic construct; identical to SEQ ID NO: 22
  source 1..118: note = Description of Artificial Sequence: Synthetic polypeptide; note = VH of XENP019460

SEQ ID NO: 4731 - protein, 5 aa, synthetic construct
  source 1..5: note = Description of Artificial Sequence: Synthetic peptide; note = XENP019460 vhCDR1
SYTMH

SEQ ID NO: 4732 - protein, 17 aa, synthetic construct
  source 1..17: note = Description of Artificial Sequence: Synthetic peptide; note = XENP019460 vhCDR2
FISYDGNNKYYADSVKG

SEQ ID NO: 4733 - protein, 9 aa, synthetic construct
  source 1..9: note = Description of Artificial Sequence: Synthetic peptide; note = XENP019460 vhCDR3
TGWLGPFDY

SEQ ID NO: 4734 - protein, 215 aa, synthetic construct
  source 1..215: note = Description of Artificial Sequence: Synthetic polypeptide; note = XENP019460 [CTLA-4]_H0_L0.45_Fab Light Chain
EIVLTQSPGTLSLSPGERATLSCRASQSVGSSYLTWYQQKPGQAPRLLIYGAFSRATGIPDRFSGSGSGTDFTLTISRLEPEDFAVYYCQQYGSSPWTFGQGTKVEIKRTVAAPSVFIFPPSDEQLKSGTASVVCLLNNFYPREAKVQWKVDNALQSGNSQESVTEQDSKDSTYSLSSTLTLSKADYEKHKVYACEVTHQGLSSPVTKSFNRGEC

SEQ ID NO: 4735 - protein, 108 aa, synthetic construct; identical to SEQ ID NO: 1814
  source 1..108: note = Description of Artificial Sequence: Synthetic polypeptide; note = VL of XENP019460

SEQ ID NO: 4736 - protein, 12 aa, synthetic construct
  source 1..12: note = Description of Artificial Sequence: Synthetic peptide; note = XENP019460 vlCDR1
RASQSVGSSYLT

SEQ ID NO: 4737 - protein, 7 aa, synthetic construct
  source 1..7: note = Description of Artificial Sequence: Synthetic peptide; note = XENP019460 vlCDR2
GAFSRAT

SEQ ID NO: 4738 - protein, 9 aa, synthetic construct
  source 1..9: note = Description of Artificial Sequence: Synthetic peptide; note = XENP019460 vlCDR3
QQYGSSPWT

SEQ ID NO: 4739 - protein, 221 aa, synthetic construct; identical to SEQ ID NO: 2919
  source 1..221: note = Description of Artificial Sequence: Synthetic polypeptide; note = XENP019461 [CTLA-4]_H0_L0.46_Fab Heavy Chain

SEQ ID NO: 4740 - protein, 118 aa, synthetic construct; identical to SEQ ID NO: 22
  source 1..118: note = Description of Artificial Sequence: Synthetic polypeptide; note = VH of XENP019461

SEQ ID NO: 4741 - protein, 5 aa, synthetic construct
  source 1..5: note = Description of Artificial Sequence: Synthetic peptide; note = XENP019461 vhCDR1
SYTMH

SEQ ID NO: 4742 - protein, 17 aa, synthetic construct
  source 1..17: note = Description of Artificial Sequence: Synthetic peptide; note = XENP019461 vhCDR2
FISYDGNNKYYADSVKG

SEQ ID NO: 4743 - protein, 9 aa, synthetic construct
  source 1..9: note = Description of Artificial Sequence: Synthetic peptide; note = XENP019461 vhCDR3
TGWLGPFDY

SEQ ID NO: 4744 - protein, 215 aa, synthetic construct
  source 1..215: note = Description of Artificial Sequence: Synthetic polypeptide; note = XENP019461 [CTLA-4]_H0_L0.46_Fab Light Chain
EIVLTQSPGTLSLSPGERATLSCRASQSVGSSYLAWYEQKPGQAPRLLIYGAFSRATGIPDRFSGSGSGTDFTLTISRLEPEDFAVYYCQQYGSSPWTFGQGTKVEIKRTVAAPSVFIFPPSDEQLKSGTASVVCLLNNFYPREAKVQWKVDNALQSGNSQESVTEQDSKDSTYSLSSTLTLSKADYEKHKVYACEVTHQGLSSPVTKSFNRGEC

SEQ ID NO: 4745 - protein, 108 aa, synthetic construct; identical to SEQ ID NO: 1823
  source 1..108: note = Description of Artificial Sequence: Synthetic polypeptide; note = VL of XENP019461

SEQ ID NO: 4746 - protein, 12 aa, synthetic construct
  source 1..12: note = Description of Artificial Sequence: Synthetic peptide; note = XENP019461 vlCDR1
RASQSVGSSYLA

SEQ ID NO: 4747 - protein, 7 aa, synthetic construct
  source 1..7: note = Description of Artificial Sequence: Synthetic peptide; note = XENP019461 vlCDR2
GAFSRAT

SEQ ID NO: 4748 - protein, 9 aa, synthetic construct
  source 1..9: note = Description of Artificial Sequence: Synthetic peptide; note = XENP019461 vlCDR3
QQYGSSPWT

SEQ ID NO: 4749 - protein, 221 aa, synthetic construct; identical to SEQ ID NO: 2919
  source 1..221: note = Description of Artificial Sequence: Synthetic polypeptide; note = XENP019462 [CTLA-4]_H0_L0.47_Fab Heavy Chain

SEQ ID NO: 4750 - protein, 118 aa, synthetic construct; identical to SEQ ID NO: 22
  source 1..118: note = Description of Artificial Sequence: Synthetic polypeptide; note = VH of XENP019462

SEQ ID NO: 4751 - protein, 5 aa, synthetic construct
  source 1..5: note = Description of Artificial Sequence: Synthetic peptide; note = XENP019462 vhCDR1
SYTMH

SEQ ID NO: 4752 - protein, 17 aa, synthetic construct
  source 1..17: note = Description of Artificial Sequence: Synthetic peptide; note = XENP019462 vhCDR2
FISYDGNNKYYADSVKG

SEQ ID NO: 4753 - protein, 9 aa, synthetic construct
  source 1..9: note = Description of Artificial Sequence: Synthetic peptide; note = XENP019462 vhCDR3
TGWLGPFDY

SEQ ID NO: 4754 - protein, 215 aa, synthetic construct
  source 1..215: note = Description of Artificial Sequence: Synthetic polypeptide; note = XENP019462 [CTLA-4]_H0_L0.47_Fab Light Chain
EIVLTQSPGTLSLSPGERATLSCRASQSVGSSYLAWYLQKPGQAPRLLIYGAFSRATGIPDRFSGSGSGTDFTLTISRLEPEDFAVYYCQQYGSSPWTFGQGTKVEIKRTVAAPSVFIFPPSDEQLKSGTASVVCLLNNFYPREAKVQWKVDNALQSGNSQESVTEQDSKDSTYSLSSTLTLSKADYEKHKVYACEVTHQGLSSPVTKSFNRGEC

SEQ ID NO: 4755 - protein, 108 aa, synthetic construct; identical to SEQ ID NO: 1832
  source 1..108: note = Description of Artificial Sequence: Synthetic polypeptide; note = VL of XENP019462

SEQ ID NO: 4756 - protein, 12 aa, synthetic construct
  source 1..12: note = Description of Artificial Sequence: Synthetic peptide; note = XENP019462 vlCDR1
RASQSVGSSYLA

SEQ ID NO: 4757 - protein, 7 aa, synthetic construct
  source 1..7: note = Description of Artificial Sequence: Synthetic peptide; note = XENP019462 vlCDR2
GAFSRAT

SEQ ID NO: 4758 - protein, 9 aa, synthetic construct
  source 1..9: note = Description of Artificial Sequence: Synthetic peptide; note = XENP019462 vlCDR3
QQYGSSPWT

SEQ ID NO: 4759 - protein, 221 aa, synthetic construct; identical to SEQ ID NO: 2919
  source 1..221: note = Description of Artificial Sequence: Synthetic polypeptide; note = XENP019463 [CTLA-4]_H0_L0.48_Fab Heavy Chain

SEQ ID NO: 4760 - protein, 118 aa, synthetic construct; identical to SEQ ID NO: 22
  source 1..118: note = Description of Artificial Sequence: Synthetic polypeptide; note = VH of XENP019463

SEQ ID NO: 4761 - protein, 5 aa, synthetic construct
  source 1..5: note = Description of Artificial Sequence: Synthetic peptide; note = XENP019463 vhCDR1
SYTMH

SEQ ID NO: 4762 - protein, 17 aa, synthetic construct
  source 1..17: note = Description of Artificial Sequence: Synthetic peptide; note = XENP019463 vhCDR2
FISYDGNNKYYADSVKG

SEQ ID NO: 4763 - protein, 9 aa, synthetic construct
  source 1..9: note = Description of Artificial Sequence: Synthetic peptide; note = XENP019463 vhCDR3
TGWLGPFDY

SEQ ID NO: 4764 - protein, 215 aa, synthetic construct
  source 1..215: note = Description of Artificial Sequence: Synthetic polypeptide; note = XENP019463 [CTLA-4]_H0_L0.48_Fab Light Chain
EIVLTQSPGTLSLSPGERATLSCRASQSVGSSYLAWYRQKPGQAPRLLIYGAFSRATGIPDRFSGSGSGTDFTLTISRLEPEDFAVYYCQQYGSSPWTFGQGTKVEIKRTVAAPSVFIFPPSDEQLKSGTASVVCLLNNFYPREAKVQWKVDNALQSGNSQESVTEQDSKDSTYSLSSTLTLSKADYEKHKVYACEVTHQGLSSPVTKSFNRGEC

SEQ ID NO: 4765 - protein, 108 aa, synthetic construct; identical to SEQ ID NO: 1841
  source 1..108: note = Description of Artificial Sequence: Synthetic polypeptide; note = VL of XENP019463

SEQ ID NO: 4766 - protein, 12 aa, synthetic construct
  source 1..12: note = Description of Artificial Sequence: Synthetic peptide; note = XENP019463 vlCDR1
RASQSVGSSYLA

SEQ ID NO: 4767 - protein, 7 aa, synthetic construct
  source 1..7: note = Description of Artificial Sequence: Synthetic peptide; note = XENP019463 vlCDR2
GAFSRAT

SEQ ID NO: 4768 - protein, 9 aa, synthetic construct
  source 1..9: note = Description of Artificial Sequence: Synthetic peptide; note = XENP019463 vlCDR3
QQYGSSPWT

SEQ ID NO: 4769 - protein, 221 aa, synthetic construct; identical to SEQ ID NO: 2919
  source 1..221: note = Description of Artificial Sequence: Synthetic polypeptide; note = XENP019464 [CTLA-4]_H0_L0.49_Fab Heavy Chain

SEQ ID NO: 4770 - protein, 118 aa, synthetic construct; identical to SEQ ID NO: 22
  source 1..118: note = Description of Artificial Sequence: Synthetic polypeptide; note = VH of XENP019464

SEQ ID NO: 4771 - protein, 5 aa, synthetic construct
  source 1..5: note = Description of Artificial Sequence: Synthetic peptide; note = XENP019464 vhCDR1
SYTMH

SEQ ID NO: 4772 - protein, 17 aa, synthetic construct
  source 1..17: note = Description of Artificial Sequence: Synthetic peptide; note = XENP019464 vhCDR2
FISYDGNNKYYADSVKG

SEQ ID NO: 4773 - protein, 9 aa, synthetic construct
  source 1..9: note = Description of Artificial Sequence: Synthetic peptide; note = XENP019464 vhCDR3
TGWLGPFDY

SEQ ID NO: 4774 - protein, 215 aa, synthetic construct
  source 1..215: note = Description of Artificial Sequence: Synthetic polypeptide; note = XENP019464 [CTLA-4]_H0_L0.49_Fab Light Chain
EIVLTQSPGTLSLSPGERATLSCRASQSVGSSYLAWYRQKPGQAPELLIYGAFSRATGIPDRFSGSGSGTDFTLTISRLEPEDFAVYYCQQYGSSPWTFGQGTKVEIKRTVAAPSVFIFPPSDEQLKSGTASVVCLLNNFYPREAKVQWKVDNALQSGNSQESVTEQDSKDSTYSLSSTLTLSKADYEKHKVYACEVTHQGLSSPVTKSFNRGEC

SEQ ID NO: 4775 - protein, 108 aa, synthetic construct; identical to SEQ ID NO: 1850
  source 1..108: note = Description of Artificial Sequence: Synthetic polypeptide; note = VL of XENP019464

SEQ ID NO: 4776 - protein, 12 aa, synthetic construct
  source 1..12: note = Description of Artificial Sequence: Synthetic peptide; note = XENP019464 vlCDR1
RASQSVGSSYLA

SEQ ID NO: 4777 - protein, 7 aa, synthetic construct
  source 1..7: note = Description of Artificial Sequence: Synthetic peptide; note = XENP019464 vlCDR2
GAFSRAT

SEQ ID NO: 4778 - protein, 9 aa, synthetic construct
  source 1..9: note = Description of Artificial Sequence: Synthetic peptide; note = XENP019464 vlCDR3
QQYGSSPWT

SEQ ID NO: 4779 - protein, 221 aa, synthetic construct; identical to SEQ ID NO: 2919
  source 1..221: note = Description of Artificial Sequence: Synthetic polypeptide; note = XENP019465 [CTLA-4]_H0_L0.50_Fab Heavy Chain

SEQ ID NO: 4780 - protein, 118 aa, synthetic construct; identical to SEQ ID NO: 22
  source 1..118: note = Description of Artificial Sequence: Synthetic polypeptide; note = VH of XENP019465

SEQ ID NO: 4781 - protein, 5 aa, synthetic construct
  source 1..5: note = Description of Artificial Sequence: Synthetic peptide; note = XENP019465 vhCDR1
SYTMH

SEQ ID NO: 4782 - protein, 17 aa, synthetic construct
  source 1..17: note = Description of Artificial Sequence: Synthetic peptide; note = XENP019465 vhCDR2
FISYDGNNKYYADSVKG

SEQ ID NO: 4783 - protein, 9 aa, synthetic construct
  source 1..9: note = Description of Artificial Sequence: Synthetic peptide; note = XENP019465 vhCDR3
TGWLGPFDY

SEQ ID NO: 4784 - protein, 215 aa, synthetic construct
  source 1..215: note = Description of Artificial Sequence: Synthetic polypeptide; note = XENP019465 [CTLA-4]_H0_L0.50_Fab Light Chain
EIVLTQSPGTLSLSPGERATLSCRASQSVGSSYLAWYQEKPGQAPRLLIYGAFSRATGIPDRFSGSGSGTDFTLTISRLEPEDFAVYYCQQYGSSPWTFGQGTKVEIKRTVAAPSVFIFPPSDEQLKSGTASVVCLLNNFYPREAKVQWKVDNALQSGNSQESVTEQDSKDSTYSLSSTLTLSKADYEKHKVYACEVTHQGLSSPVTKSFNRGEC

SEQ ID NO: 4785 - protein, 108 aa, synthetic construct; identical to SEQ ID NO: 32
  source 1..108: note = Description of Artificial Sequence: Synthetic polypeptide; note = VL of XENP019465

SEQ ID NO: 4786 - protein, 12 aa, synthetic construct
  source 1..12: note = Description of Artificial Sequence: Synthetic peptide; note = XENP019465 vlCDR1
RASQSVGSSYLA

SEQ ID NO: 4787 - protein, 7 aa, synthetic construct
  source 1..7: note = Description of Artificial Sequence: Synthetic peptide; note = XENP019465 vlCDR2
GAFSRAT

SEQ ID NO: 4788 - protein, 9 aa, synthetic construct
  source 1..9: note = Description of Artificial Sequence: Synthetic peptide; note = XENP019465 vlCDR3
QQYGSSPWT

SEQ ID NO: 4789 - protein, 221 aa, synthetic construct; identical to SEQ ID NO: 2919
  source 1..221: note = Description of Artificial Sequence: Synthetic polypeptide; note = XENP019466 [CTLA-4]_H0_L0.51_Fab Heavy Chain

SEQ ID NO: 4790 - protein, 118 aa, synthetic construct; identical to SEQ ID NO: 22
  source 1..118: note = Description of Artificial Sequence: Synthetic polypeptide; note = VH of XENP019466

SEQ ID NO: 4791 - protein, 5 aa, synthetic construct
  source 1..5: note = Description of Artificial Sequence: Synthetic peptide; note = XENP019466 vhCDR1
SYTMH

SEQ ID NO: 4792 - protein, 17 aa, synthetic construct
  source 1..17: note = Description of Artificial Sequence: Synthetic peptide; note = XENP019466 vhCDR2
FISYDGNNKYYADSVKG

SEQ ID NO: 4793 - protein, 9 aa, synthetic construct
  source 1..9: note = Description of Artificial Sequence: Synthetic peptide; note = XENP019466 vhCDR3
TGWLGPFDY

SEQ ID NO: 4794 - protein, 215 aa, synthetic construct
  source 1..215: note = Description of Artificial Sequence: Synthetic polypeptide; note = XENP019466 [CTLA-4]_H0_L0.51_Fab Light Chain
EIVLTQSPGTLSLSPGERATLSCRASQSVGSSYLAWYQQKPDQAPRLLIYGAFSRATGIPDRFSGSGSGTDFTLTISRLEPEDFAVYYCQQYGSSPWTFGQGTKVEIKRTVAAPSVFIFPPSDEQLKSGTASVVCLLNNFYPREAKVQWKVDNALQSGNSQESVTEQDSKDSTYSLSSTLTLSKADYEKHKVYACEVTHQGLSSPVTKSFNRGEC

SEQ ID NO: 4795 - protein, 108 aa, synthetic construct; identical to SEQ ID NO: 41
  source 1..108: note = Description of Artificial Sequence: Synthetic polypeptide; note = VL of XENP019466

SEQ ID NO: 4796 - protein, 12 aa, synthetic construct
  source 1..12: note = Description of Artificial Sequence: Synthetic peptide; note = XENP019466 vlCDR1
RASQSVGSSYLA

SEQ ID NO: 4797 - protein, 7 aa, synthetic construct
  source 1..7: note = Description of Artificial Sequence: Synthetic peptide; note = XENP019466 vlCDR2
GAFSRAT

SEQ ID NO: 4798 - protein, 9 aa, synthetic construct
  source 1..9: note = Description of Artificial Sequence: Synthetic peptide; note = XENP019466 vlCDR3
QQYGSSPWT

SEQ ID NO: 4799 - protein, 221 aa, synthetic construct; identical to SEQ ID NO: 2919
  source 1..221: note = Description of Artificial Sequence: Synthetic polypeptide; note = XENP019467 [CTLA-4]_H0_L0.52_Fab Heavy Chain

SEQ ID NO: 4800 - protein, 118 aa, synthetic construct; identical to SEQ ID NO: 22
  source 1..118: note = Description of Artificial Sequence: Synthetic polypeptide; note = VH of XENP019467

SEQ ID NO: 4801 - protein, 5 aa, synthetic construct
  source 1..5: note = Description of Artificial Sequence: Synthetic peptide; note = XENP019467 vhCDR1
SYTMH

SEQ ID NO: 4802 - protein, 17 aa, synthetic construct
  source 1..17: note = Description of Artificial Sequence: Synthetic peptide; note = XENP019467 vhCDR2
FISYDGNNKYYADSVKG

SEQ ID NO: 4803 - protein, 9 aa, synthetic construct
  source 1..9: note = Description of Artificial Sequence: Synthetic peptide; note = XENP019467 vhCDR3
TGWLGPFDY

SEQ ID NO: 4804 - protein, 215 aa, synthetic construct
  source 1..215: note = Description of Artificial Sequence: Synthetic polypeptide; note = XENP019467 [CTLA-4]_H0_L0.52_Fab Light Chain
EIVLTQSPGTLSLSPGERATLSCRASQSVGSSYLAWYQQKPEQAPRLLIYGAFSRATGIPDRFSGSGSGTDFTLTISRLEPEDFAVYYCQQYGSSPWTFGQGTKVEIKRTVAAPSVFIFPPSDEQLKSGTASVVCLLNNFYPREAKVQWKVDNALQSGNSQESVTEQDSKDSTYSLSSTLTLSKADYEKHKVYACEVTHQGLSSPVTKSFNRGEC

SEQ ID NO: 4805 - protein, 108 aa, synthetic construct; identical to SEQ ID NO: 1877
  source 1..108: note = Description of Artificial Sequence: Synthetic polypeptide; note = VL of XENP019467

SEQ ID NO: 4806 - protein, 12 aa, synthetic construct
  source 1..12: note = Description of Artificial Sequence: Synthetic peptide; note = XENP019467 vlCDR1
RASQSVGSSYLA

SEQ ID NO: 4807 - protein, 7 aa, synthetic construct
  source 1..7: note = Description of Artificial Sequence: Synthetic peptide; note = XENP019467 vlCDR2
GAFSRAT

SEQ ID NO: 4808 - protein, 9 aa, synthetic construct
  source 1..9: note = Description of Artificial Sequence: Synthetic peptide; note = XENP019467 vlCDR3
QQYGSSPWT

SEQ ID NO: 4809 - protein, 221 aa, synthetic construct; identical to SEQ ID NO: 2919
  source 1..221: note = Description of Artificial Sequence: Synthetic polypeptide; note = XENP019468 [CTLA-4]_H0_L0.53_Fab Heavy Chain

SEQ ID NO: 4810 - protein, 118 aa, synthetic construct; identical to SEQ ID NO: 22
  source 1..118: note = Description of Artificial Sequence: Synthetic polypeptide; note = VH of XENP019468

SEQ ID NO: 4811 - protein, 5 aa, synthetic construct
  source 1..5: note = Description of Artificial Sequence: Synthetic peptide; note = XENP019468 vhCDR1
SYTMH

SEQ ID NO: 4812 - protein, 17 aa, synthetic construct
  source 1..17: note = Description of Artificial Sequence: Synthetic peptide; note = XENP019468 vhCDR2
FISYDGNNKYYADSVKG

SEQ ID NO: 4813 - protein, 9 aa, synthetic construct
  source 1..9: note = Description of Artificial Sequence: Synthetic peptide; note = XENP019468 vhCDR3
TGWLGPFDY

SEQ ID NO: 4814 - protein, 215 aa, synthetic construct
  source 1..215: note = Description of Artificial Sequence: Synthetic polypeptide; note = XENP019468 [CTLA-4]_H0_L0.53_Fab Light Chain
EIVLTQSPGTLSLSPGERATLSCRASQSVGSSYLAWYQQKPGEAPRLLIYGAFSRATGIPDRFSGSGSGTDFTLTISRLEPEDFAVYYCQQYGSSPWTFGQGTKVEIKRTVAAPSVFIFPPSDEQLKSGTASVVCLLNNFYPREAKVQWKVDNALQSGNSQESVTEQDSKDSTYSLSSTLTLSKADYEKHKVYACEVTHQGLSSPVTKSFNRGEC

SEQ ID NO: 4815 - protein, 108 aa, synthetic construct; identical to SEQ ID NO: 77
  source 1..108: note = Description of Artificial Sequence: Synthetic polypeptide; note = VL of XENP019468

SEQ ID NO: 4816 - protein, 12 aa, synthetic construct
  source 1..12: note = Description of Artificial Sequence: Synthetic peptide; note = XENP019468 vlCDR1
RASQSVGSSYLA

SEQ ID NO: 4817 - protein, 7 aa, synthetic construct
  source 1..7: note = Description of Artificial Sequence: Synthetic peptide; note = XENP019468 vlCDR2
GAFSRAT

SEQ ID NO: 4818 - protein, 9 aa, synthetic construct
  source 1..9: note = Description of Artificial Sequence: Synthetic peptide; note = XENP019468 vlCDR3
QQYGSSPWT

SEQ ID NO: 4819 - protein, 221 aa, synthetic construct; identical to SEQ ID NO: 2919
  source 1..221: note = Description of Artificial Sequence: Synthetic polypeptide; note = XENP019469 [CTLA-4]_H0_L0.54_Fab Heavy Chain

SEQ ID NO: 4820 - protein, 118 aa, synthetic construct; identical to SEQ ID NO: 22
  source 1..118: note = Description of Artificial Sequence: Synthetic polypeptide; note = VH of XENP019469

SEQ ID NO: 4821 - protein, 5 aa, synthetic construct
  source 1..5: note = Description of Artificial Sequence: Synthetic peptide; note = XENP019469 vhCDR1
SYTMH

SEQ ID NO: 4822 - protein, 17 aa, synthetic construct
  source 1..17: note = Description of Artificial Sequence: Synthetic peptide; note = XENP019469 vhCDR2
FISYDGNNKYYADSVKG

SEQ ID NO: 4823 - protein, 9 aa, synthetic construct
  source 1..9: note = Description of Artificial Sequence: Synthetic peptide; note = XENP019469 vhCDR3
TGWLGPFDY

SEQ ID NO: 4824 - protein, 215 aa, synthetic construct
  source 1..215: note = Description of Artificial Sequence: Synthetic polypeptide; note = XENP019469 [CTLA-4]_H0_L0.54_Fab Light Chain
EIVLTQSPGTLSLSPGERATLSCRASQSVGSSYLAWYQQKPGKAPRLLIYGAFSRATGIPDRFSGSGSGTDFTLTISRLEPEDFAVYYCQQYGSSPWTFGQGTKVEIKRTVAAPSVFIFPPSDEQLKSGTASVVCLLNNFYPREAKVQWKVDNALQSGNSQESVTEQDSKDSTYSLSSTLTLSKADYEKHKVYACEVTHQGLSSPVTKSFNRGEC

SEQ ID NO: 4825 - protein, 108 aa, synthetic construct; identical to SEQ ID NO: 1895
  source 1..108: note = Description of Artificial Sequence: Synthetic polypeptide; note = VL of XENP019469

SEQ ID NO: 4826 - protein, 12 aa, synthetic construct
  source 1..12: note = Description of Artificial Sequence: Synthetic peptide; note = XENP019469 vlCDR1
RASQSVGSSYLA

SEQ ID NO: 4827 - protein, 7 aa, synthetic construct
  source 1..7: note = Description of Artificial Sequence: Synthetic peptide; note = XENP019469 vlCDR2
GAFSRAT

SEQ ID NO: 4828 - protein, 9 aa, synthetic construct
  source 1..9: note = Description of Artificial Sequence: Synthetic peptide; note = XENP019469 vlCDR3
QQYGSSPWT

SEQ ID NO: 4829 - protein, 221 aa, synthetic construct; identical to SEQ ID NO: 2919
  source 1..221: note = Description of Artificial Sequence: Synthetic polypeptide; note = XENP019470 [CTLA-4]_H0_L0.55_Fab Heavy Chain

SEQ ID NO: 4830 - protein, 118 aa, synthetic construct; identical to SEQ ID NO: 22
  source 1..118: note = Description of Artificial Sequence: Synthetic polypeptide; note = VH of XENP019470

SEQ ID NO: 4831 - protein, 5 aa, synthetic construct
  source 1..5: note = Description of Artificial Sequence: Synthetic peptide; note = XENP019470 vhCDR1
SYTMH

SEQ ID NO: 4832 - protein, 17 aa, synthetic construct
  source 1..17: note = Description of Artificial Sequence: Synthetic peptide; note = XENP019470 vhCDR2
FISYDGNNKYYADSVKG

SEQ ID NO: 4833 - protein, 9 aa, synthetic construct
  source 1..9: note = Description of Artificial Sequence: Synthetic peptide; note = XENP019470 vhCDR3
TGWLGPFDY

SEQ ID NO: 4834 - protein, 215 aa, synthetic construct
  source 1..215: note = Description of Artificial Sequence: Synthetic polypeptide; note = XENP019470 [CTLA-4]_H0_L0.55_Fab Light Chain
EIVLTQSPGTLSLSPGERATLSCRASQSVGSSYLAWYQQKPGKSPRLLIYGAFSRATGIPDRFSGSGSGTDFTLTISRLEPEDFAVYYCQQYGSSPWTFGQGTKVEIKRTVAAPSVFIFPPSDEQLKSGTASVVCLLNNFYPREAKVQWKVDNALQSGNSQESVTEQDSKDSTYSLSSTLTLSKADYEKHKVYACEVTHQGLSSPVTKSFNRGEC

SEQ ID NO: 4835 - protein, 108 aa, synthetic construct; identical to SEQ ID NO: 1904
  source 1..108: note = Description of Artificial Sequence: Synthetic polypeptide; note = VL of XENP019470

SEQ ID NO: 4836 - protein, 12 aa, synthetic construct
  source 1..12: note = Description of Artificial Sequence: Synthetic peptide; note = XENP019470 vlCDR1
RASQSVGSSYLA

SEQ ID NO: 4837 - protein, 7 aa, synthetic construct
  source 1..7: note = Description of Artificial Sequence: Synthetic peptide; note = XENP019470 vlCDR2
GAFSRAT

SEQ ID NO: 4838 - protein, 9 aa, synthetic construct
  source 1..9: note = Description of Artificial Sequence: Synthetic peptide; note = XENP019470 vlCDR3
QQYGSSPWT

SEQ ID NO: 4839 - protein, 221 aa, synthetic construct; identical to SEQ ID NO: 2919
  source 1..221: note = Description of Artificial Sequence: Synthetic polypeptide; note = XENP019471 [CTLA-4]_H0_L0.56_Fab Heavy Chain

SEQ ID NO: 4840 - protein, 118 aa, synthetic construct; identical to SEQ ID NO: 22
  source 1..118: note = Description of Artificial Sequence: Synthetic polypeptide; note = VH of XENP019471

SEQ ID NO: 4841 - protein, 5 aa, synthetic construct
  source 1..5: note = Description of Artificial Sequence: Synthetic peptide; note = XENP019471 vhCDR1
SYTMH

SEQ ID NO: 4842 - protein, 17 aa, synthetic construct
  source 1..17: note = Description of Artificial Sequence: Synthetic peptide; note = XENP019471 vhCDR2
FISYDGNNKYYADSVKG

SEQ ID NO: 4843 - protein, 9 aa, synthetic construct
  source 1..9: note = Description of Artificial Sequence: Synthetic peptide; note = XENP019471 vhCDR3
TGWLGPFDY

SEQ ID NO: 4844 - protein, 215 aa, synthetic construct
  source 1..215: note = Description of Artificial Sequence: Synthetic polypeptide; note = XENP019471 [CTLA-4]_H0_L0.56_Fab Light Chain
EIVLTQSPGTLSLSPGERATLSCRASQSVGSSYLAWYQQKPGQSPRLLIYGAFSRATGIPDRFSGSGSGTDFTLTISRLEPEDFAVYYCQQYGSSPWTFGQGTKVEIKRTVAAPSVFIFPPSDEQLKSGTASVVCLLNNFYPREAKVQWKVDNALQSGNSQESVTEQDSKDSTYSLSSTLTLSKADYEKHKVYACEVTHQGLSSPVTKSFNRGEC

SEQ ID NO: 4845 - protein, 108 aa, synthetic construct; identical to SEQ ID NO: 1913
  source 1..108: note = Description of Artificial Sequence: Synthetic polypeptide; note = VL of XENP019471

SEQ ID NO: 4846 - protein, 12 aa, synthetic construct
  source 1..12: note = Description of Artificial Sequence: Synthetic peptide; note = XENP019471 vlCDR1
RASQSVGSSYLA

SEQ ID NO: 4847 - protein, 7 aa, synthetic construct
  source 1..7: note = Description of Artificial Sequence: Synthetic peptide; note = XENP019471 vlCDR2
GAFSRAT

SEQ ID NO: 4848 - protein, 9 aa, synthetic construct
  source 1..9: note = Description of Artificial Sequence: Synthetic peptide; note = XENP019471 vlCDR3
QQYGSSPWT

SEQ ID NO: 4849 - protein, 221 aa, synthetic construct; identical to SEQ ID NO: 2919
  source 1..221: note = Description of Artificial Sequence: Synthetic polypeptide; note = XENP019472 [CTLA-4]_H0_L0.57_Fab Heavy Chain

SEQ ID NO: 4850 - protein, 118 aa, synthetic construct; identical to SEQ ID NO: 22
  source 1..118: note = Description of Artificial Sequence: Synthetic polypeptide; note = VH of XENP019472

SEQ ID NO: 4851 - protein, 5 aa, synthetic construct
  source 1..5: note = Description of Artificial Sequence: Synthetic peptide; note = XENP019472 vhCDR1
SYTMH

SEQ ID NO: 4852 - protein, 17 aa, synthetic construct
  source 1..17: note = Description of Artificial Sequence: Synthetic peptide; note = XENP019472 vhCDR2
FISYDGNNKYYADSVKG

SEQ ID NO: 4853 - protein, 9 aa, synthetic construct
  source 1..9: note = Description of Artificial Sequence: Synthetic peptide; note = XENP019472 vhCDR3
TGWLGPFDY

SEQ ID NO: 4854 - protein, 215 aa, synthetic construct
  source 1..215: note = Description of Artificial Sequence: Synthetic polypeptide; note = XENP019472 [CTLA-4]_H0_L0.57_Fab Light Chain
EIVLTQSPGTLSLSPGERATLSCRASQSVGSSYLAWYQQKPGQAPELLIYGAFSRATGIPDRFSGSGSGTDFTLTISRLEPEDFAVYYCQQYGSSPWTFGQGTKVEIKRTVAAPSVFIFPPSDEQLKSGTASVVCLLNNFYPREAKVQWKVDNALQSGNSQESVTEQDSKDSTYSLSSTLTLSKADYEKHKVYACEVTHQGLSSPVTKSFNRGEC

SEQ ID NO: 4855 - protein, 108 aa, synthetic construct; identical to SEQ ID NO: 86
  source 1..108: note = Description of Artificial Sequence: Synthetic polypeptide; note = VL of XENP019472

SEQ ID NO: 4856 - protein, 12 aa, synthetic construct
  source 1..12: note = Description of Artificial Sequence: Synthetic peptide; note = XENP019472 vlCDR1
RASQSVGSSYLA

SEQ ID NO: 4857 - protein, 7 aa, synthetic construct
  source 1..7: note = Description of Artificial Sequence: Synthetic peptide; note = XENP019472 vlCDR2
GAFSRAT

SEQ ID NO: 4858 - protein, 9 aa, synthetic construct
  source 1..9: note = Description of Artificial Sequence: Synthetic peptide; note = XENP019472 vlCDR3
QQYGSSPWT

SEQ ID NO: 4859 - protein, 221 aa, synthetic construct; identical to SEQ ID NO: 2919
  source 1..221: note = Description of Artificial Sequence: Synthetic polypeptide; note = XENP019473 [CTLA-4]_H0_L0.58_Fab Heavy Chain

SEQ ID NO: 4860 - protein, 118 aa, synthetic construct; identical to SEQ ID NO: 22
  source 1..118: note = Description of Artificial Sequence: Synthetic polypeptide; note = VH of XENP019473

SEQ ID NO: 4861 - protein, 5 aa, synthetic construct
  source 1..5: note = Description of Artificial Sequence: Synthetic peptide; note = XENP019473 vhCDR1
SYTMH

SEQ ID NO: 4862 - protein, 17 aa, synthetic construct
  source 1..17: note = Description of Artificial Sequence: Synthetic peptide; note = XENP019473 vhCDR2
FISYDGNNKYYADSVKG

SEQ ID NO: 4863 - protein, 9 aa, synthetic construct
  source 1..9: note = Description of Artificial Sequence: Synthetic peptide; note = XENP019473 vhCDR3
TGWLGPFDY

SEQ ID NO: 4864 - protein, 215 aa, synthetic construct
  source 1..215: note = Description of Artificial Sequence: Synthetic polypeptide; note = XENP019473 [CTLA-4]_H0_L0.58_Fab Light Chain
EIVLTQSPGTLSLSPGERATLSCRASQSVGSSYLAWYQQKPGQAPELLIYGAFSRATGIPDRFSGSGSGTDFTLTISRLEPQDFAVYYCQQYGSSPWTFGQGTKVEIKRTVAAPSVFIFPPSDEQLKSGTASVVCLLNNFYPREAKVQWKVDNALQSGNSQESVTEQDSKDSTYSLSSTLTLSKADYEKHKVYACEVTHQGLSSPVTKSFNRGEC

SEQ ID NO: 4865 - protein, 108 aa, synthetic construct; identical to SEQ ID NO: 1931
  source 1..108: note = Description of Artificial Sequence: Synthetic polypeptide; note = VL of XENP019473

SEQ ID NO: 4866 - protein, 12 aa, synthetic construct
  source 1..12: note = Description of Artificial Sequence: Synthetic peptide; note = XENP019473 vlCDR1
RASQSVGSSYLA

SEQ ID NO: 4867 - protein, 7 aa, synthetic construct
  source 1..7: note = Description of Artificial Sequence: Synthetic peptide; note = XENP019473 vlCDR2
GAFSRAT

SEQ ID NO: 4868 - protein, 9 aa, synthetic construct
  source 1..9: note = Description of Artificial Sequence: Synthetic peptide; note = XENP019473 vlCDR3
QQYGSSPWT

SEQ ID NO: 4869 - protein, 221 aa, synthetic construct; identical to SEQ ID NO: 2919
  source 1..221: note = Description of Artificial Sequence: Synthetic polypeptide; note = XENP019474 [CTLA-4]_H0_L0.59_Fab Heavy Chain

SEQ ID NO: 4870 - protein, 118 aa, synthetic construct; identical to SEQ ID NO: 22
  source 1..118: note = Description of Artificial Sequence: Synthetic polypeptide; note = VH of XENP019474

SEQ ID NO: 4871 - protein, 5 aa, synthetic construct
  source 1..5: note = Description of Artificial Sequence: Synthetic peptide; note = XENP019474 vhCDR1
SYTMH

SEQ ID NO: 4872 - protein, 17 aa, synthetic construct
  source 1..17: note = Description of Artificial Sequence: Synthetic peptide; note = XENP019474 vhCDR2
FISYDGNNKYYADSVKG

SEQ ID NO: 4873 - protein, 9 aa, synthetic construct
  source 1..9: note = Description of Artificial Sequence: Synthetic peptide; note = XENP019474 vhCDR3
TGWLGPFDY

SEQ ID NO: 4874 - protein, 215 aa, synthetic construct
  source 1..215: note = Description of Artificial Sequence: Synthetic polypeptide; note = XENP019474 [CTLA-4]_H0_L0.59_Fab Light Chain
EIVLTQSPGTLSLSPGERATLSCRASQSVGSSYLAWYQQKPGQAPKLLIYGAFSRATGIPDRFSGSGSGTDFTLTISRLEPEDFAVYYCQQYGSSPWTFGQGTKVEIKRTVAAPSVFIFPPSDEQLKSGTASVVCLLNNFYPREAKVQWKVDNALQSGNSQESVTEQDSKDSTYSLSSTLTLSKADYEKHKVYACEVTHQGLSSPVTKSFNRGEC

SEQ ID NO: 4875 - protein, 108 aa, synthetic construct; identical to SEQ ID NO: 1940
  source 1..108: note = Description of Artificial Sequence: Synthetic polypeptide; note = VL of XENP019474

SEQ ID NO: 4876 - protein, 12 aa, synthetic construct
  source 1..12: note = Description of Artificial Sequence: Synthetic peptide; note = XENP019474 vlCDR1
RASQSVGSSYLA

SEQ ID NO: 4877 - protein, 7 aa, synthetic construct
  source 1..7: note = Description of Artificial Sequence: Synthetic peptide; note = XENP019474 vlCDR2
GAFSRAT

SEQ ID NO: 4878 - protein, 9 aa, synthetic construct
  source 1..9: note = Description of Artificial Sequence: Synthetic peptide; note = XENP019474 vlCDR3
QQYGSSPWT

SEQ ID NO: 4879 - protein, 221 aa, synthetic construct; identical to SEQ ID NO: 2919
  source 1..221: note = Description of Artificial Sequence: Synthetic polypeptide; note = XENP019475 [CTLA-4]_H0_L0.60_Fab Heavy Chain

SEQ ID NO: 4880 - protein, 118 aa, synthetic construct; identical to SEQ ID NO: 22
  source 1..118: note = Description of Artificial Sequence: Synthetic polypeptide; note = VH of XENP019475

SEQ ID NO: 4881 - protein, 5 aa, synthetic construct
  source 1..5: note = Description of Artificial Sequence: Synthetic peptide; note = XENP019475 vhCDR1
SYTMH

SEQ ID NO: 4882 - protein, 17 aa, synthetic construct
  source 1..17: note = Description of Artificial Sequence: Synthetic peptide; note = XENP019475 vhCDR2
FISYDGNNKYYADSVKG

SEQ ID NO: 4883 - protein, 9 aa, synthetic construct
  source 1..9: note = Description of Artificial Sequence: Synthetic peptide; note = XENP019475 vhCDR3
TGWLGPFDY

SEQ ID NO: 4884 - protein, 215 aa, synthetic construct
  source 1..215: note = Description of Artificial Sequence: Synthetic polypeptide; note = XENP019475 [CTLA-4]_H0_L0.60_Fab Light Chain
EIVLTQSPGTLSLSPGERATLSCRASQSVGSSYLAWYQQKPGQAPRRLIYGAFSRATGIPDRFSGSGSGTDFTLTISRLEPEDFAVYYCQQYGSSPWTFGQGTKVEIKRTVAAPSVFIFPPSDEQLKSGTASVVCLLNNFYPREAKVQWKVDNALQSGNSQESVTEQDSKDSTYSLSSTLTLSKADYEKHKVYACEVTHQGLSSPVTKSFNRGEC

SEQ ID NO: 4885 - protein, 108 aa, synthetic construct; identical to SEQ ID NO: 1949
  source 1..108: note = Description of Artificial Sequence: Synthetic polypeptide; note = VL of XENP019475

SEQ ID NO: 4886 - protein, 12 aa, synthetic construct
  source 1..12: note = Description of Artificial Sequence: Synthetic peptide; note = XENP019475 vlCDR1
RASQSVGSSYLA

SEQ ID NO: 4887 - protein, 7 aa, synthetic construct
  source 1..7: note = Description of Artificial Sequence: Synthetic peptide; note = XENP019475 vlCDR2
GAFSRAT

SEQ ID NO: 4888 - protein, 9 aa, synthetic construct
  source 1..9: note = Description of Artificial Sequence: Synthetic peptide; note = XENP019475 vlCDR3
QQYGSSPWT

SEQ ID NO: 4889 - protein, 221 aa, synthetic construct; identical to SEQ ID NO: 2919
  source 1..221: note = Description of Artificial Sequence: Synthetic polypeptide; note = XENP019476 [CTLA-4]_H0_L0.61_Fab Heavy Chain

SEQ ID NO: 4890 - protein, 118 aa, synthetic construct; identical to SEQ ID NO: 22
  source 1..118: note = Description of Artificial Sequence: Synthetic polypeptide; note = VH of XENP019476

SEQ ID NO: 4891 - protein, 5 aa, synthetic construct
  source 1..5: note = Description of Artificial Sequence: Synthetic peptide; note = XENP019476 vhCDR1
SYTMH

SEQ ID NO: 4892 - protein, 17 aa, synthetic construct
  source 1..17: note = Description of Artificial Sequence: Synthetic peptide; note = XENP019476 vhCDR2
FISYDGNNKYYADSVKG

SEQ ID NO: 4893 - protein, 9 aa, synthetic construct
  source 1..9: note = Description of Artificial Sequence: Synthetic peptide; note = XENP019476 vhCDR3
TGWLGPFDY

SEQ ID NO: 4894 - protein, 215 aa, synthetic construct
  source 1..215: note = Description of Artificial Sequence: Synthetic polypeptide; note = XENP019476 [CTLA-4]_H0_L0.61_Fab Light Chain
EIVLTQSPGTLSLSPGERATLSCRASQSVGSSYLAWYQQKPGQAPRRLIYGAFSRDTGIPDRFSGSGSGTDFTLTISRLEPEDFAVYYCQQYGSSPWTFGQGTKVEIKRTVAAPSVFIFPPSDEQLKSGTASVVCLLNNFYPREAKVQWKVDNALQSGNSQESVTEQDSKDSTYSLSSTLTLSKADYEKHKVYACEVTHQGLSSPVTKSFNRGEC

SEQ ID NO: 4895 - protein, 108 aa, synthetic construct; identical to SEQ ID NO: 1958
  source 1..108: note = Description of Artificial Sequence: Synthetic polypeptide; note = VL of XENP019476

SEQ ID NO: 4896 - protein, 12 aa, synthetic construct
  source 1..12: note = Description of Artificial Sequence: Synthetic peptide; note = XENP019476 vlCDR1
RASQSVGSSYLA

SEQ ID NO: 4897 - protein, 7 aa, synthetic construct
  source 1..7: note = Description of Artificial Sequence: Synthetic peptide; note = XENP019476 vlCDR2
GAFSRDT

SEQ ID NO: 4898 - protein, 9 aa, synthetic construct
  source 1..9: note = Description of Artificial Sequence: Synthetic peptide; note = XENP019476 vlCDR3
QQYGSSPWT

SEQ ID NO: 4899 - protein, 221 aa, synthetic construct; identical to SEQ ID NO: 2919
  source 1..221: note = Description of Artificial Sequence: Synthetic polypeptide; note = XENP019477 [CTLA-4]_H0_L0.62_Fab Heavy Chain

SEQ ID NO: 4900 - protein, 118 aa, synthetic construct; identical to SEQ ID NO: 22
  source 1..118: note = Description of Artificial Sequence: Synthetic polypeptide; note = VH of XENP019477

SEQ ID NO: 4901 - protein, 5 aa, synthetic construct
  source 1..5: note = Description of Artificial Sequence: Synthetic peptide; note = XENP019477 vhCDR1
SYTMH

SEQ ID NO: 4902 - protein, 17 aa, synthetic construct
  source 1..17: note = Description of Artificial Sequence: Synthetic peptide; note = XENP019477 vhCDR2
FISYDGNNKYYADSVKG

SEQ ID NO: 4903 - protein, 9 aa, synthetic construct
  source 1..9: note = Description of Artificial Sequence: Synthetic peptide; note = XENP019477 vhCDR3
TGWLGPFDY

SEQ ID NO: 4904 - protein, 215 aa, synthetic construct
  source 1..215: note = Description of Artificial Sequence: Synthetic polypeptide; note = XENP019477 [CTLA-4]_H0_L0.62_Fab Light Chain
EIVLTQSPGTLSLSPGERATLSCRASQSVGSSYLAWYQQKPGQAPRLLIAGAFSRATGIPDRFSGSGSGTDFTLTISRLEPEDFAVYYCQQYGSSPWTFGQGTKVEIKRTVAAPSVFIFPPSDEQLKSGTASVVCLLNNFYPREAKVQWKVDNALQSGNSQESVTEQDSKDSTYSLSSTLTLSKADYEKHKVYACEVTHQGLSSPVTKSFNRGEC

SEQ ID NO: 4905 - protein, 108 aa, synthetic construct; identical to SEQ ID NO: 1967
  source 1..108: note = Description of Artificial Sequence: Synthetic polypeptide; note = VL of XENP019477

SEQ ID NO: 4906 - protein, 12 aa, synthetic construct
  source 1..12: note = Description of Artificial Sequence: Synthetic peptide; note = XENP019477 vlCDR1
RASQSVGSSYLA

SEQ ID NO: 4907 - protein, 7 aa, synthetic construct
  source 1..7: note = Description of Artificial Sequence: Synthetic peptide; note = XENP019477 vlCDR2
GAFSRAT

SEQ ID NO: 4908 - protein, 9 aa, synthetic construct
  source 1..9: note = Description of Artificial Sequence: Synthetic peptide; note = XENP019477 vlCDR3
QQYGSSPWT

SEQ ID NO: 4909 - protein, 221 aa, synthetic construct; identical to SEQ ID NO: 2919
  source 1..221: note = Description of Artificial Sequence: Synthetic polypeptide; note = XENP019478 [CTLA-4]_H0_L0.63_Fab Heavy Chain

SEQ ID NO: 4910 - protein, 118 aa, synthetic construct; identical to SEQ ID NO: 22
  source 1..118: note = Description of Artificial Sequence: Synthetic polypeptide; note = VH of XENP019478

SEQ ID NO: 4911 - protein, 5 aa, synthetic construct
  source 1..5: note = Description of Artificial Sequence: Synthetic peptide; note = XENP019478 vhCDR1
SYTMH

SEQ ID NO: 4912 - protein, 17 aa, synthetic construct
  source 1..17: note = Description of Artificial Sequence: Synthetic peptide; note = XENP019478 vhCDR2
FISYDGNNKYYADSVKG

SEQ ID NO: 4913 - protein, 9 aa, synthetic construct
  source 1..9: note = Description of Artificial Sequence: Synthetic peptide; note = XENP019478 vhCDR3
TGWLGPFDY

SEQ ID NO: 4914 - protein, 215 aa, synthetic construct
  source 1..215: note = Description of Artificial Sequence: Synthetic polypeptide; note = XENP019478 [CTLA-4]_H0_L0.63_Fab Light Chain
EIVLTQSPGTLSLSPGERATLSCRASQSVGSSYLAWYQQKPGQAPRLLIFGAFSRATGIPDRFSGSGSGTDFTLTISRLEPEDFAVYYCQQYGSSPWTFGQGTKVEIKRTVAAPSVFIFPPSDEQLKSGTASVVCLLNNFYPREAKVQWKVDNALQSGNSQESVTEQDSKDSTYSLSSTLTLSKADYEKHKVYACEVTHQGLSSPVTKSFNRGEC

SEQ ID NO: 4915 - protein, 108 aa, synthetic construct; identical to SEQ ID NO: 1976
  source 1..108: note = Description of Artificial Sequence: Synthetic polypeptide; note = VL of XENP019478

SEQ ID NO: 4916 - protein, 12 aa, synthetic construct
  source 1..12: note = Description of Artificial Sequence: Synthetic peptide; note = XENP019478 vlCDR1
RASQSVGSSYLA

SEQ ID NO: 4917 - protein, 7 aa, synthetic construct
  source 1..7: note = Description of Artificial Sequence: Synthetic peptide; note = XENP019478 vlCDR2
GAFSRAT

SEQ ID NO: 4918 - protein, 9 aa, synthetic construct
  source 1..9: note = Description of Artificial Sequence: Synthetic peptide; note = XENP019478 vlCDR3
QQYGSSPWT

SEQ ID NO: 4919 - protein, 221 aa, synthetic construct; identical to SEQ ID NO: 2919
  source 1..221: note = Description of Artificial Sequence: Synthetic polypeptide; note = XENP019479 [CTLA-4]_H0_L0.64_Fab Heavy Chain

SEQ ID NO: 4920 - protein, 118 aa, synthetic construct; identical to SEQ ID NO: 22
  source 1..118: note = Description of Artificial Sequence: Synthetic polypeptide; note = VH of XENP019479

SEQ ID NO: 4921 - protein, 5 aa, synthetic construct
  source 1..5: note = Description of Artificial Sequence: Synthetic peptide; note = XENP019479 vhCDR1
SYTMH

SEQ ID NO: 4922 - protein, 17 aa, synthetic construct
  source 1..17: note = Description of Artificial Sequence: Synthetic peptide; note = XENP019479 vhCDR2
FISYDGNNKYYADSVKG

SEQ ID NO: 4923 - protein, 9 aa, synthetic construct
  source 1..9: note = Description of Artificial Sequence: Synthetic peptide; note = XENP019479 vhCDR3
TGWLGPFDY

SEQ ID NO: 4924 - protein, 215 aa, synthetic construct
  source 1..215: note = Description of Artificial Sequence: Synthetic polypeptide; note = XENP019479 [CTLA-4]_H0_L0.64_Fab Light Chain
EIVLTQSPGTLSLSPGERATLSCRASQSVGSSYLAWYQQKPGQAPRLLIHGAFSRATGIPDRFSGSGSGTDFTLTISRLEPEDFAVYYCQQYGSSPWTFGQGTKVEIKRTVAAPSVFIFPPSDEQLKSGTASVVCLLNNFYPREAKVQWKVDNALQSGNSQESVTEQDSKDSTYSLSSTLTLSKADYEKHKVYACEVTHQGLSSPVTKSFNRGEC

SEQ ID NO: 4925 - protein, 108 aa, synthetic construct; identical to SEQ ID NO: 1985
  source 1..108: note = Description of Artificial Sequence: Synthetic polypeptide; note = VL of XENP019479

SEQ ID NO: 4926 - protein, 12 aa, synthetic construct
  source 1..12: note = Description of Artificial Sequence: Synthetic peptide; note = XENP019479 vlCDR1
RASQSVGSSYLA

SEQ ID NO: 4927 - protein, 7 aa, synthetic construct
  source 1..7: note = Description of Artificial Sequence: Synthetic peptide; note = XENP019479 vlCDR2
GAFSRAT

SEQ ID NO: 4928 - protein, 9 aa, synthetic construct
  source 1..9: note = Description of Artificial Sequence: Synthetic peptide; note = XENP019479 vlCDR3
QQYGSSPWT

SEQ ID NO: 4929 - protein, 221 aa, synthetic construct; identical to SEQ ID NO: 2919
  source 1..221: note = Description of Artificial Sequence: Synthetic polypeptide; note = XENP019480 [CTLA-4]_H0_L0.65_Fab Heavy Chain

SEQ ID NO: 4930 - protein, 118 aa, synthetic construct; identical to SEQ ID NO: 22
  source 1..118: note = Description of Artificial Sequence: Synthetic polypeptide; note = VH of XENP019480

SEQ ID NO: 4931 - protein, 5 aa, synthetic construct
  source 1..5: note = Description of Artificial Sequence: Synthetic peptide; note = XENP019480 vhCDR1
SYTMH

SEQ ID NO: 4932 - protein, 17 aa, synthetic construct
  source 1..17: note = Description of Artificial Sequence: Synthetic peptide; note = XENP019480 vhCDR2
FISYDGNNKYYADSVKG

SEQ ID NO: 4933 - protein, 9 aa, synthetic construct
  source 1..9: note = Description of Artificial Sequence: Synthetic peptide; note = XENP019480 vhCDR3
TGWLGPFDY

SEQ ID NO: 4934 - protein, 215 aa, synthetic construct
  source 1..215: note = Description of Artificial Sequence: Synthetic polypeptide; note = XENP019480 [CTLA-4]_H0_L0.65_Fab Light Chain
EIVLTQSPGTLSLSPGERATLSCRASQSVGSSYLAWYQQKPGQAPRLLILGAFSRATGIPDRFSGSGSGTDFTLTISRLEPEDFAVYYCQQYGSSPWTFGQGTKVEIKRTVAAPSVFIFPPSDEQLKSGTASVVCLLNNFYPREAKVQWKVDNALQSGNSQESVTEQDSKDSTYSLSSTLTLSKADYEKHKVYACEVTHQGLSSPVTKSFNRGEC

SEQ ID NO: 4935 - protein, 108 aa, synthetic construct; identical to SEQ ID NO: 1994
  source 1..108: note = Description of Artificial Sequence: Synthetic polypeptide; note = VL of XENP019480

SEQ ID NO: 4936 - protein, 12 aa, synthetic construct
  source 1..12: note = Description of Artificial Sequence: Synthetic peptide; note = XENP019480 vlCDR1
RASQSVGSSYLA

SEQ ID NO: 4937 - protein, 7 aa, synthetic construct
  source 1..7: note = Description of Artificial Sequence: Synthetic peptide; note = XENP019480 vlCDR2
GAFSRAT

SEQ ID NO: 4938 - protein, 9 aa, synthetic construct
  source 1..9: note = Description of Artificial Sequence: Synthetic peptide; note = XENP019480 vlCDR3
QQYGSSPWT

SEQ ID NO: 4939 - protein, 221 aa, synthetic construct; identical to SEQ ID NO: 2919
  source 1..221: note = Description of Artificial Sequence: Synthetic polypeptide; note = XENP019481 [CTLA-4]_H0_L0.66_Fab Heavy Chain

SEQ ID NO: 4940 - protein, 118 aa, synthetic construct; identical to SEQ ID NO: 22
  source 1..118: note = Description of Artificial Sequence: Synthetic polypeptide; note = VH of XENP019481

SEQ ID NO: 4941 - protein, 5 aa, synthetic construct
  source 1..5: note = Description of Artificial Sequence: Synthetic peptide; note = XENP019481 vhCDR1
SYTMH

SEQ ID NO: 4942 - protein, 17 aa, synthetic construct
  source 1..17: note = Description of Artificial Sequence: Synthetic peptide; note = XENP019481 vhCDR2
FISYDGNNKYYADSVKG

SEQ ID NO: 4943 - protein, 9 aa, synthetic construct
  source 1..9: note = Description of Artificial Sequence: Synthetic peptide; note = XENP019481 vhCDR3
TGWLGPFDY

SEQ ID NO: 4944 - protein, 215 aa, synthetic construct
  source 1..215: note = Description of Artificial Sequence: Synthetic polypeptide; note = XENP019481 [CTLA-4]_H0_L0.66_Fab Light Chain
EIVLTQSPGTLSLSPGERATLSCRASQSVGSSYLAWYQQKPGQAPRLLIVGAFSRATGIPDRFSGSGSGTDFTLTISRLEPEDFAVYYCQQYGSSPWTFGQGTKVEIKRTVAAPSVFIFPPSDEQLKSGTASVVCLLNNFYPREAKVQWKVDNALQSGNSQESVTEQDSKDSTYSLSSTLTLSKADYEKHKVYACEVTHQGLSSPVTKSFNRGEC

SEQ ID NO: 4945 - protein, 108 aa, synthetic construct; identical to SEQ ID NO: 2003
  source 1..108: note = Description of Artificial Sequence: Synthetic polypeptide; note = VL of XENP019481

SEQ ID NO: 4946 - protein, 12 aa, synthetic construct
  source 1..12: note = Description of Artificial Sequence: Synthetic peptide; note = XENP019481 vlCDR1
RASQSVGSSYLA

SEQ ID NO: 4947 - protein, 7 aa, synthetic construct
  source 1..7: note = Description of Artificial Sequence: Synthetic peptide; note = XENP019481 vlCDR2
GAFSRAT

SEQ ID NO: 4948 - protein, 9 aa, synthetic construct
  source 1..9: note = Description of Artificial Sequence: Synthetic peptide; note = XENP019481 vlCDR3
QQYGSSPWT

SEQ ID NO: 4949 - protein, 221 aa, synthetic construct; identical to SEQ ID NO: 2919
  source 1..221: note = Description of Artificial Sequence: Synthetic polypeptide; note = XENP019482 [CTLA-4]_H0_L0.67_Fab Heavy Chain

SEQ ID NO: 4950 - protein, 118 aa, synthetic construct; identical to SEQ ID NO: 22
  source 1..118: note = Description of Artificial Sequence: Synthetic polypeptide; note = VH of XENP019482

SEQ ID NO: 4951 - protein, 5 aa, synthetic construct
  source 1..5: note = Description of Artificial Sequence: Synthetic peptide; note = XENP019482 vhCDR1
SYTMH

SEQ ID NO: 4952 - protein, 17 aa, synthetic construct
  source 1..17: note = Description of Artificial Sequence: Synthetic peptide; note = XENP019482 vhCDR2
FISYDGNNKYYADSVKG

SEQ ID NO: 4953 - protein, 9 aa, synthetic construct
  source 1..9: note = Description of Artificial Sequence: Synthetic peptide; note = XENP019482 vhCDR3
TGWLGPFDY

SEQ ID NO: 4954 - protein, 215 aa, synthetic construct
  source 1..215: note = Description of Artificial Sequence: Synthetic polypeptide; note = XENP019482 [CTLA-4]_H0_L0.67_Fab Light Chain
EIVLTQSPGTLSLSPGERATLSCRASQSVGSSYLAWYQQKPGQAPRLLIYDAFSRATGIPDRFSGSGSGTDFTLTISRLEPEDFAVYYCQQYGSSPWTFGQGTKVEIKRTVAAPSVFIFPPSDEQLKSGTASVVCLLNNFYPREAKVQWKVDNALQSGNSQESVTEQDSKDSTYSLSSTLTLSKADYEKHKVYACEVTHQGLSSPVTKSFNRGEC

SEQ ID NO: 4955 - protein, 108 aa, synthetic construct; identical to SEQ ID NO: 2012
  source 1..108: note = Description of Artificial Sequence: Synthetic polypeptide; note = VL of XENP019482

SEQ ID NO: 4956 - protein, 12 aa, synthetic construct
  source 1..12: note = Description of Artificial Sequence: Synthetic peptide; note = XENP019482 vlCDR1
RASQSVGSSYLA

SEQ ID NO: 4957 - protein, 7 aa, synthetic construct
  source 1..7: note = Description of Artificial Sequence: Synthetic peptide; note = XENP019482 vlCDR2
DAFSRAT

SEQ ID NO: 4958 - protein, 9 aa, synthetic construct
  source 1..9: note = Description of Artificial Sequence: Synthetic peptide; note = XENP019482 vlCDR3
QQYGSSPWT

SEQ ID NO: 4959 - protein, 221 aa, synthetic construct; identical to SEQ ID NO: 2919
  source 1..221: note = Description of Artificial Sequence: Synthetic polypeptide; note = XENP019483 [CTLA-4]_H0_L0.68_Fab Heavy Chain

SEQ ID NO: 4960 - protein, 118 aa, synthetic construct; identical to SEQ ID NO: 22
  source 1..118: note = Description of Artificial Sequence: Synthetic polypeptide; note = VH of XENP019483

SEQ ID NO: 4961 - protein, 5 aa, synthetic construct
  source 1..5: note = Description of Artificial Sequence: Synthetic peptide; note = XENP019483 vhCDR1
SYTMH

SEQ ID NO: 4962 - protein, 17 aa, synthetic construct
  source 1..17: note = Description of Artificial Sequence: Synthetic peptide; note = XENP019483 vhCDR2
FISYDGNNKYYADSVKG

SEQ ID NO: 4963 - protein, 9 aa, synthetic construct
  source 1..9: note = Description of Artificial Sequence: Synthetic peptide; note = XENP019483 vhCDR3
TGWLGPFDY

SEQ ID NO: 4964 - protein, 215 aa, synthetic construct
  source 1..215: note = Description of Artificial Sequence: Synthetic polypeptide; note = XENP019483 [CTLA-4]_H0_L0.68_Fab Light Chain
EIVLTQSPGTLSLSPGERATLSCRASQSVGSSYLAWYQQKPGQAPRLLIYSAFSRATGIPDRFSGSGSGTDFTLTISRLEPEDFAVYYCQQYGSSPWTFGQGTKVEIKRTVAAPSVFIFPPSDEQLKSGTASVVCLLNNFYPREAKVQWKVDNALQSGNSQESVTEQDSKDSTYSLSSTLTLSKADYEKHKVYACEVTHQGLSSPVTKSFNRGEC

SEQ ID NO: 4965 - protein, 108 aa, synthetic construct; identical to SEQ ID NO: 2021
  source 1..108: note = Description of Artificial Sequence: Synthetic polypeptide; note = VL of XENP019483

SEQ ID NO: 4966 - protein, 12 aa, synthetic construct
  source 1..12: note = Description of Artificial Sequence: Synthetic peptide; note = XENP019483 vlCDR1
RASQSVGSSYLA

SEQ ID NO: 4967 - protein, 7 aa, synthetic construct
  source 1..7: note = Description of Artificial Sequence: Synthetic peptide; note = XENP019483 vlCDR2
SAFSRAT

SEQ ID NO: 4968 - protein, 9 aa, synthetic construct
  source 1..9: note = Description of Artificial Sequence: Synthetic peptide; note = XENP019483 vlCDR3
QQYGSSPWT

SEQ ID NO: 4969 - protein, 221 aa, synthetic construct; identical to SEQ ID NO: 2919
  source 1..221: note = Description of Artificial Sequence: Synthetic polypeptide; note = XENP019484 [CTLA-4]_H0_L0.69_Fab Heavy Chain

SEQ ID NO: 4970 - protein, 118 aa, synthetic construct; identical to SEQ ID NO: 22
  source 1..118: note = Description of Artificial Sequence: Synthetic polypeptide; note = VH of XENP019484

SEQ ID NO: 4971 - protein, 5 aa, synthetic construct
  source 1..5: note = Description of Artificial Sequence: Synthetic peptide; note = XENP019484 vhCDR1
SYTMH

SEQ ID NO: 4972 - protein, 17 aa, synthetic construct
  source 1..17: note = Description of Artificial Sequence: Synthetic peptide; note = XENP019484 vhCDR2
FISYDGNNKYYADSVKG

SEQ ID NO: 4973 - protein, 9 aa, synthetic construct
  source 1..9: note = Description of Artificial Sequence: Synthetic peptide; note = XENP019484 vhCDR3
TGWLGPFDY

SEQ ID NO: 4974 - protein, 215 aa, synthetic construct
  source 1..215: note = Description of Artificial Sequence: Synthetic polypeptide; note = XENP019484 [CTLA-4]_H0_L0.69_Fab Light Chain
EIVLTQSPGTLSLSPGERATLSCRASQSVGSSYLAWYQQKPGQAPRLLIYGVFSRATGIPDRFSGSGSGTDFTLTISRLEPEDFAVYYCQQYGSSPWTFGQGTKVEIKRTVAAPSVFIFPPSDEQLKSGTASVVCLLNNFYPREAKVQWKVDNALQSGNSQESVTEQDSKDSTYSLSSTLTLSKADYEKHKVYACEVTHQGLSSPVTKSFNRGEC

SEQ ID NO: 4975 - protein, 108 aa, synthetic construct; identical to SEQ ID NO: 2030
  source 1..108: note = Description of Artificial Sequence: Synthetic polypeptide; note = VL of XENP019484

SEQ ID NO: 4976 - protein, 12 aa, synthetic construct
  source 1..12: note = Description of Artificial Sequence: Synthetic peptide; note = XENP019484 vlCDR1
RASQSVGSSYLA

SEQ ID NO: 4977 - protein, 7 aa, synthetic construct
  source 1..7: note = Description of Artificial Sequence: Synthetic peptide; note = XENP019484 vlCDR2
GVFSRAT

SEQ ID NO: 4978 - protein, 9 aa, synthetic construct
  source 1..9: note = Description of Artificial Sequence: Synthetic peptide; note = XENP019484 vlCDR3
QQYGSSPWT

SEQ ID NO: 4979 - protein, 221 aa, synthetic construct; identical to SEQ ID NO: 2919
  source 1..221: note = Description of Artificial Sequence: Synthetic polypeptide; note = XENP019485 [CTLA-4]_H0_L0.70_Fab Heavy Chain

SEQ ID NO: 4980 - protein, 118 aa, synthetic construct; identical to SEQ ID NO: 22
  source 1..118: note = Description of Artificial Sequence: Synthetic polypeptide; note = VH of XENP019485

SEQ ID NO: 4981 - protein, 5 aa, synthetic construct
  source 1..5: note = Description of Artificial Sequence: Synthetic peptide; note = XENP019485 vhCDR1
SYTMH

SEQ ID NO: 4982 - protein, 17 aa, synthetic construct
  source 1..17: note = Description of Artificial Sequence: Synthetic peptide; note = XENP019485 vhCDR2
FISYDGNNKYYADSVKG

SEQ ID NO: 4983 - protein, 9 aa, synthetic construct
  source 1..9: note = Description of Artificial Sequence: Synthetic peptide; note = XENP019485 vhCDR3
TGWLGPFDY

SEQ ID NO: 4984 - protein, 215 aa, synthetic construct
  source 1..215: note = Description of Artificial Sequence: Synthetic polypeptide; note = XENP019485 [CTLA-4]_H0_L0.70_Fab Light Chain
EIVLTQSPGTLSLSPGERATLSCRASQSVGSSYLAWYQQKPGQAPRLLIYGAHSRATGIPDRFSGSGSGTDFTLTISRLEPEDFAVYYCQQYGSSPWTFGQGTKVEIKRTVAAPSVFIFPPSDEQLKSGTASVVCLLNNFYPREAKVQWKVDNALQSGNSQESVTEQDSKDSTYSLSSTLTLSKADYEKHKVYACEVTHQGLSSPVTKSFNRGEC

SEQ ID NO: 4985 - protein, 108 aa, synthetic construct; identical to SEQ ID NO: 2039
  source 1..108: note = Description of Artificial Sequence: Synthetic polypeptide; note = VL of XENP019485

SEQ ID NO: 4986 - protein, 12 aa, synthetic construct
  source 1..12: note = Description of Artificial Sequence: Synthetic peptide; note = XENP019485 vlCDR1
RASQSVGSSYLA

SEQ ID NO: 4987 - protein, 7 aa, synthetic construct
  source 1..7: note = Description of Artificial Sequence: Synthetic peptide; note = XENP019485 vlCDR2
GAHSRAT

SEQ ID NO: 4988 - protein, 9 aa, synthetic construct
  source 1..9: note = Description of Artificial Sequence: Synthetic peptide; note = XENP019485 vlCDR3
QQYGSSPWT

SEQ ID NO: 4989 - protein, 221 aa, synthetic construct; identical to SEQ ID NO: 2919
  source 1..221: note = Description of Artificial Sequence: Synthetic polypeptide; note = XENP019486 [CTLA-4]_H0_L0.71_Fab Heavy Chain

SEQ ID NO: 4990 - protein, 118 aa, synthetic construct; identical to SEQ ID NO: 22
  source 1..118: note = Description of Artificial Sequence: Synthetic polypeptide; note = VH of XENP019486

SEQ ID NO: 4991 - protein, 5 aa, synthetic construct
  source 1..5: note = Description of Artificial Sequence: Synthetic peptide; note = XENP019486 vhCDR1
SYTMH

SEQ ID NO: 4992 - protein, 17 aa, synthetic construct
  source 1..17: note = Description of Artificial Sequence: Synthetic peptide; note = XENP019486 vhCDR2
FISYDGNNKYYADSVKG

SEQ ID NO: 4993 - protein, 9 aa, synthetic construct
  source 1..9: note = Description of Artificial Sequence: Synthetic peptide; note = XENP019486 vhCDR3
TGWLGPFDY

SEQ ID NO: 4994 - protein, 215 aa, synthetic construct
  source 1..215: note = Description of Artificial Sequence: Synthetic polypeptide; note = XENP019486 [CTLA-4]_H0_L0.71_Fab Light Chain
EIVLTQSPGTLSLSPGERATLSCRASQSVGSSYLAWYQQKPGQAPRLLIYGAISRATGIPDRFSGSGSGTDFTLTISRLEPEDFAVYYCQQYGSSPWTFGQGTKVEIKRTVAAPSVFIFPPSDEQLKSGTASVVCLLNNFYPREAKVQWKVDNALQSGNSQESVTEQDSKDSTYSLSSTLTLSKADYEKHKVYACEVTHQGLSSPVTKSFNRGEC

SEQ ID NO: 4995 - protein, 108 aa, synthetic construct; identical to SEQ ID NO: 2048
  source 1..108: note = Description of Artificial Sequence: Synthetic polypeptide; note = VL of XENP019486

SEQ ID NO: 4996 - protein, 12 aa, synthetic construct
  source 1..12: note = Description of Artificial Sequence: Synthetic peptide; note = XENP019486 vlCDR1
RASQSVGSSYLA

SEQ ID NO: 4997 - protein, 7 aa, synthetic construct
  source 1..7: note = Description of Artificial Sequence: Synthetic peptide; note = XENP019486 vlCDR2
GAISRAT

SEQ ID NO: 4998 - protein, 9 aa, synthetic construct
  source 1..9: note = Description of Artificial Sequence: Synthetic peptide; note = XENP019486 vlCDR3
QQYGSSPWT

SEQ ID NO: 4999 - protein, 221 aa, synthetic construct; identical to SEQ ID NO: 2919
  source 1..221: note = Description of Artificial Sequence: Synthetic polypeptide; note = XENP019487 [CTLA-4]_H0_L0.72_Fab Heavy Chain

SEQ ID NO: 5000 - protein, 118 aa, synthetic construct; identical to SEQ ID NO: 22
  source 1..118: note = Description of Artificial Sequence: Synthetic polypeptide; note = VH of XENP019487

SEQ ID NO: 5001 - protein, 5 aa, synthetic construct
  source 1..5: note = Description of Artificial Sequence: Synthetic peptide; note = XENP019487 vhCDR1
SYTMH

SEQ ID NO: 5002 - protein, 17 aa, synthetic construct
  source 1..17: note = Description of Artificial Sequence: Synthetic peptide; note = XENP019487 vhCDR2
FISYDGNNKYYADSVKG

SEQ ID NO: 5003 - protein, 9 aa, synthetic construct
  source 1..9: note = Description of Artificial Sequence: Synthetic peptide; note = XENP019487 vhCDR3
TGWLGPFDY

SEQ ID NO: 5004 - protein, 215 aa, synthetic construct
  source 1..215: note = Description of Artificial Sequence: Synthetic polypeptide; note = XENP019487 [CTLA-4]_H0_L0.72_Fab Light Chain
EIVLTQSPGTLSLSPGERATLSCRASQSVGSSYLAWYQQKPGQAPRLLIYGALSRATGIPDRFSGSGSGTDFTLTISRLEPEDFAVYYCQQYGSSPWTFGQGTKVEIKRTVAAPSVFIFPPSDEQLKSGTASVVCLLNNFYPREAKVQWKVDNALQSGNSQESVTEQDSKDSTYSLSSTLTLSKADYEKHKVYACEVTHQGLSSPVTKSFNRGEC

SEQ ID NO: 5005 - protein, 108 aa, synthetic construct; identical to SEQ ID NO: 2057
  source 1..108: note = Description of Artificial Sequence: Synthetic polypeptide; note = VL of XENP019487

SEQ ID NO: 5006 - protein, 12 aa, synthetic construct
  source 1..12: note = Description of Artificial Sequence: Synthetic peptide; note = XENP019487 vlCDR1
RASQSVGSSYLA

SEQ ID NO: 5007 - protein, 7 aa, synthetic construct
  source 1..7: note = Description of Artificial Sequence: Synthetic peptide; note = XENP019487 vlCDR2
GALSRAT

SEQ ID NO: 5008 - protein, 9 aa, synthetic construct
  source 1..9: note = Description of Artificial Sequence: Synthetic peptide; note = XENP019487 vlCDR3
QQYGSSPWT

SEQ ID NO: 5009 - protein, 221 aa, synthetic construct; identical to SEQ ID NO: 2919
  source 1..221: note = Description of Artificial Sequence: Synthetic polypeptide; note = XENP019488 [CTLA-4]_H0_L0.73_Fab Heavy Chain

SEQ ID NO: 5010 - protein, 118 aa, synthetic construct; identical to SEQ ID NO: 22
  source 1..118: note = Description of Artificial Sequence: Synthetic polypeptide; note = VH of XENP019488

SEQ ID NO: 5011 - protein, 5 aa, synthetic construct
  source 1..5: note = Description of Artificial Sequence: Synthetic peptide; note = XENP019488 vhCDR1
SYTMH

SEQ ID NO: 5012 - protein, 17 aa, synthetic construct
  source 1..17: note = Description of Artificial Sequence: Synthetic peptide; note = XENP019488 vhCDR2
FISYDGNNKYYADSVKG

SEQ ID NO: 5013 - protein, 9 aa, synthetic construct
  source 1..9: note = Description of Artificial Sequence: Synthetic peptide; note = XENP019488 vhCDR3
TGWLGPFDY

SEQ ID NO: 5014 - protein, 215 aa, synthetic construct
  source 1..215: note = Description of Artificial Sequence: Synthetic polypeptide; note = XENP019488 [CTLA-4]_H0_L0.73_Fab Light Chain
EIVLTQSPGTLSLSPGERATLSCRASQSVGSSYLAWYQQKPGQAPRLLIYGASSRATGIPDRFSGSGSGTDFTLTISRLEPEDFAVYYCQQYGSSPWTFGQGTKVEIKRTVAAPSVFIFPPSDEQLKSGTASVVCLLNNFYPREAKVQWKVDNALQSGNSQESVTEQDSKDSTYSLSSTLTLSKADYEKHKVYACEVTHQGLSSPVTKSFNRGEC

SEQ ID NO: 5015 - protein, 108 aa, synthetic construct; identical to SEQ ID NO: 2066
  source 1..108: note = Description of Artificial Sequence: Synthetic polypeptide; note = VL of XENP019488

SEQ ID NO: 5016 - protein, 12 aa, synthetic construct
  source 1..12: note = Description of Artificial Sequence: Synthetic peptide; note = XENP019488 vlCDR1
RASQSVGSSYLA

SEQ ID NO: 5017 - protein, 7 aa, synthetic construct
  source 1..7: note = Description of Artificial Sequence: Synthetic peptide; note = XENP019488 vlCDR2
GASSRAT

SEQ ID NO: 5018 - protein, 9 aa, synthetic construct
  source 1..9: note = Description of Artificial Sequence: Synthetic peptide; note = XENP019488 vlCDR3
QQYGSSPWT

SEQ ID NO: 5019 - protein, 221 aa, synthetic construct; identical to SEQ ID NO: 2919
  source 1..221: note = Description of Artificial Sequence: Synthetic polypeptide; note = XENP019489 [CTLA-4]_H0_L0.74_Fab Heavy Chain

SEQ ID NO: 5020 - protein, 118 aa, synthetic construct; identical to SEQ ID NO: 22
  source 1..118: note = Description of Artificial Sequence: Synthetic polypeptide; note = VH of XENP019489

SEQ ID NO: 5021 - protein, 5 aa, synthetic construct
  source 1..5: note = Description of Artificial Sequence: Synthetic peptide; note = XENP019489 vhCDR1
SYTMH

SEQ ID NO: 5022 - protein, 17 aa, synthetic construct
  source 1..17: note = Description of Artificial Sequence: Synthetic peptide; note = XENP019489 vhCDR2
FISYDGNNKYYADSVKG

SEQ ID NO: 5023 - protein, 9 aa, synthetic construct
  source 1..9: note = Description of Artificial Sequence: Synthetic peptide; note = XENP019489 vhCDR3
TGWLGPFDY

SEQ ID NO: 5024 - protein, 215 aa, synthetic construct
  source 1..215: note = Description of Artificial Sequence: Synthetic polypeptide; note = XENP019489 [CTLA-4]_H0_L0.74_Fab Light Chain
EIVLTQSPGTLSLSPGERATLSCRASQSVGSSYLAWYQQKPGQAPRLLIYGAYSRATGIPDRFSGSGSGTDFTLTISRLEPEDFAVYYCQQYGSSPWTFGQGTKVEIKRTVAAPSVFIFPPSDEQLKSGTASVVCLLNNFYPREAKVQWKVDNALQSGNSQESVTEQDSKDSTYSLSSTLTLSKADYEKHKVYACEVTHQGLSSPVTKSFNRGEC

SEQ ID NO: 5025 - protein, 108 aa, synthetic construct; identical to SEQ ID NO: 2075
  source 1..108: note = Description of Artificial Sequence: Synthetic polypeptide; note = VL of XENP019489

SEQ ID NO: 5026 - protein, 12 aa, synthetic construct
  source 1..12: note = Description of Artificial Sequence: Synthetic peptide; note = XENP019489 vlCDR1
RASQSVGSSYLA

SEQ ID NO: 5027 - protein, 7 aa, synthetic construct
  source 1..7: note = Description of Artificial Sequence: Synthetic peptide; note = XENP019489 vlCDR2
GAYSRAT

SEQ ID NO: 5028 - protein, 9 aa, synthetic construct
  source 1..9: note = Description of Artificial Sequence: Synthetic peptide; note = XENP019489 vlCDR3
QQYGSSPWT

SEQ ID NO: 5029 - protein, 221 aa, synthetic construct; identical to SEQ ID NO: 2919
  source 1..221: note = Description of Artificial Sequence: Synthetic polypeptide; note = XENP019490 [CTLA-4]_H0_L0.75_Fab Heavy Chain

SEQ ID NO: 5030 - protein, 118 aa, synthetic construct; identical to SEQ ID NO: 22
  source 1..118: note = Description of Artificial Sequence: Synthetic polypeptide; note = VH of XENP019490

SEQ ID NO: 5031 - protein, 5 aa, synthetic construct
  source 1..5: note = Description of Artificial Sequence: Synthetic peptide; note = XENP019490 vhCDR1
SYTMH

SEQ ID NO: 5032 - protein, 17 aa, synthetic construct
  source 1..17: note = Description of Artificial Sequence: Synthetic peptide; note = XENP019490 vhCDR2
FISYDGNNKYYADSVKG

SEQ ID NO: 5033 - protein, 9 aa, synthetic construct
  source 1..9: note = Description of Artificial Sequence: Synthetic peptide; note = XENP019490 vhCDR3
TGWLGPFDY

SEQ ID NO: 5034 - protein, 215 aa, synthetic construct
  source 1..215: note = Description of Artificial Sequence: Synthetic polypeptide; note = XENP019490 [CTLA-4]_H0_L0.75_Fab Light Chain
EIVLTQSPGTLSLSPGERATLSCRASQSVGSSYLAWYQQKPGQAPRLLIYGAFARATGIPDRFSGSGSGTDFTLTISRLEPEDFAVYYCQQYGSSPWTFGQGTKVEIKRTVAAPSVFIFPPSDEQLKSGTASVVCLLNNFYPREAKVQWKVDNALQSGNSQESVTEQDSKDSTYSLSSTLTLSKADYEKHKVYACEVTHQGLSSPVTKSFNRGEC

SEQ ID NO: 5035 - protein, 108 aa, synthetic construct; identical to SEQ ID NO: 2084
  source 1..108: note = Description of Artificial Sequence: Synthetic polypeptide; note = VL of XENP019490

SEQ ID NO: 5036 - protein, 12 aa, synthetic construct
  source 1..12: note = Description of Artificial Sequence: Synthetic peptide; note = XENP019490 vlCDR1
RASQSVGSSYLA

SEQ ID NO: 5037 - protein, 7 aa, synthetic construct
  source 1..7: note = Description of Artificial Sequence: Synthetic peptide; note = XENP019490 vlCDR2
GAFARAT

SEQ ID NO: 5038 - protein, 9 aa, synthetic construct
  source 1..9: note = Description of Artificial Sequence: Synthetic peptide; note = XENP019490 vlCDR3
QQYGSSPWT

SEQ ID NO: 5039 - protein, 221 aa, synthetic construct; identical to SEQ ID NO: 2919
  source 1..221: note = Description of Artificial Sequence: Synthetic polypeptide; note = XENP019491 [CTLA-4]_H0_L0.76_Fab Heavy Chain

SEQ ID NO: 5040 - protein, 118 aa, synthetic construct; identical to SEQ ID NO: 22
  source 1..118: note = Description of Artificial Sequence: Synthetic polypeptide; note = VH of XENP019491

SEQ ID NO: 5041 - protein, 5 aa, synthetic construct
  source 1..5: note = Description of Artificial Sequence: Synthetic peptide; note = XENP019491 vhCDR1
SYTMH

SEQ ID NO: 5042 - protein, 17 aa, synthetic construct
  source 1..17: note = Description of Artificial Sequence: Synthetic peptide; note = XENP019491 vhCDR2
FISYDGNNKYYADSVKG

SEQ ID NO: 5043 - protein, 9 aa, synthetic construct
  source 1..9: note = Description of Artificial Sequence: Synthetic peptide; note = XENP019491 vhCDR3
TGWLGPFDY

SEQ ID NO: 5044 - protein, 215 aa, synthetic construct
  source 1..215: note = Description of Artificial Sequence: Synthetic polypeptide; note = XENP019491 [CTLA-4]_H0_L0.76_Fab Light Chain
EIVLTQSPGTLSLSPGERATLSCRASQSVGSSYLAWYQQKPGQAPRLLIYGAFGRATGIPDRFSGSGSGTDFTLTISRLEPEDFAVYYCQQYGSSPWTFGQGTKVEIKRTVAAPSVFIFPPSDEQLKSGTASVVCLLNNFYPREAKVQWKVDNALQSGNSQESVTEQDSKDSTYSLSSTLTLSKADYEKHKVYACEVTHQGLSSPVTKSFNRGEC

SEQ ID NO: 5045 - protein, 108 aa, synthetic construct; identical to SEQ ID NO: 2093
  source 1..108: note = Description of Artificial Sequence: Synthetic polypeptide; note = VL of XENP019491

SEQ ID NO: 5046 - protein, 12 aa, synthetic construct
  source 1..12: note = Description of Artificial Sequence: Synthetic peptide; note = XENP019491 vlCDR1
RASQSVGSSYLA

SEQ ID NO: 5047 - protein, 7 aa, synthetic construct
  source 1..7: note = Description of Artificial Sequence: Synthetic peptide; note = XENP019491 vlCDR2
GAFGRAT

SEQ ID NO: 5048 - protein, 9 aa, synthetic construct
  source 1..9: note = Description of Artificial Sequence: Synthetic peptide; note = XENP019491 vlCDR3
QQYGSSPWT

SEQ ID NO: 5049 - protein, 221 aa, synthetic construct; identical to SEQ ID NO: 2919
  source 1..221: note = Description of Artificial Sequence: Synthetic polypeptide; note = XENP019492 [CTLA-4]_H0_L0.77_Fab Heavy Chain

SEQ ID NO: 5050 - protein, 118 aa, synthetic construct; identical to SEQ ID NO: 22
  source 1..118: note = Description of Artificial Sequence: Synthetic polypeptide; note = VH of XENP019492

SEQ ID NO: 5051 - protein, 5 aa, synthetic construct
  source 1..5: note = Description of Artificial Sequence: Synthetic peptide; note = XENP019492 vhCDR1
SYTMH

SEQ ID NO: 5052 - protein, 17 aa, synthetic construct
  source 1..17: note = Description of Artificial Sequence: Synthetic peptide; note = XENP019492 vhCDR2
FISYDGNNKYYADSVKG

SEQ ID NO: 5053 - protein, 9 aa, synthetic construct
  source 1..9: note = Description of Artificial Sequence: Synthetic peptide; note = XENP019492 vhCDR3
TGWLGPFDY

SEQ ID NO: 5054 - protein, 215 aa, synthetic construct
  source 1..215: note = Description of Artificial Sequence: Synthetic polypeptide; note = XENP019492 [CTLA-4]_H0_L0.77_Fab Light Chain
EIVLTQSPGTLSLSPGERATLSCRASQSVGSSYLAWYQQKPGQAPRLLIYGAFNRATGIPDRFSGSGSGTDFTLTISRLEPEDFAVYYCQQYGSSPWTFGQGTKVEIKRTVAAPSVFIFPPSDEQLKSGTASVVCLLNNFYPREAKVQWKVDNALQSGNSQESVTEQDSKDSTYSLSSTLTLSKADYEKHKVYACEVTHQGLSSPVTKSFNRGEC

SEQ ID NO: 5055 - protein, 108 aa, synthetic construct; identical to SEQ ID NO: 2102
  source 1..108: note = Description of Artificial Sequence: Synthetic polypeptide; note = VL of XENP019492

SEQ ID NO: 5056 - protein, 12 aa, synthetic construct
  source 1..12: note = Description of Artificial Sequence: Synthetic peptide; note = XENP019492 vlCDR1
RASQSVGSSYLA

SEQ ID NO: 5057 - protein, 7 aa, synthetic construct
  source 1..7: note = Description of Artificial Sequence: Synthetic peptide; note = XENP019492 vlCDR2
GAFNRAT

SEQ ID NO: 5058 - protein, 9 aa, synthetic construct
  source 1..9: note = Description of Artificial Sequence: Synthetic peptide; note = XENP019492 vlCDR3
QQYGSSPWT

SEQ ID NO: 5059 - protein, 221 aa, synthetic construct; identical to SEQ ID NO: 2919
  source 1..221: note = Description of Artificial Sequence: Synthetic polypeptide; note = XENP019493 [CTLA-4]_H0_L0.78_Fab Heavy Chain

SEQ ID NO: 5060 - protein, 118 aa, synthetic construct; identical to SEQ ID NO: 22
  source 1..118: note = Description of Artificial Sequence: Synthetic polypeptide; note = VH of XENP019493

SEQ ID NO: 5061 - protein, 5 aa, synthetic construct
  source 1..5: note = Description of Artificial Sequence: Synthetic peptide; note = XENP019493 vhCDR1
SYTMH

SEQ ID NO: 5062 - protein, 17 aa, synthetic construct
  source 1..17: note = Description of Artificial Sequence: Synthetic peptide; note = XENP019493 vhCDR2
FISYDGNNKYYADSVKG

SEQ ID NO: 5063 - protein, 9 aa, synthetic construct
  source 1..9: note = Description of Artificial Sequence: Synthetic peptide; note = XENP019493 vhCDR3
TGWLGPFDY

SEQ ID NO: 5064 - protein, 215 aa, synthetic construct
  source 1..215: note = Description of Artificial Sequence: Synthetic polypeptide; note = XENP019493 [CTLA-4]_H0_L0.78_Fab Light Chain
EIVLTQSPGTLSLSPGERATLSCRASQSVGSSYLAWYQQKPGQAPRLLIYGAFQRATGIPDRFSGSGSGTDFTLTISRLEPEDFAVYYCQQYGSSPWTFGQGTKVEIKRTVAAPSVFIFPPSDEQLKSGTASVVCLLNNFYPREAKVQWKVDNALQSGNSQESVTEQDSKDSTYSLSSTLTLSKADYEKHKVYACEVTHQGLSSPVTKSFNRGEC

SEQ ID NO: 5065 - protein, 108 aa, synthetic construct; identical to SEQ ID NO: 2111
  source 1..108: note = Description of Artificial Sequence: Synthetic polypeptide; note = VL of XENP019493

SEQ ID NO: 5066 - protein, 12 aa, synthetic construct
  source 1..12: note = Description of Artificial Sequence: Synthetic peptide; note = XENP019493 vlCDR1
RASQSVGSSYLA

SEQ ID NO: 5067 - protein, 7 aa, synthetic construct
  source 1..7: note = Description of Artificial Sequence: Synthetic peptide; note = XENP019493 vlCDR2
GAFQRAT

SEQ ID NO: 5068 - protein, 9 aa, synthetic construct
  source 1..9: note = Description of Artificial Sequence: Synthetic peptide; note = XENP019493 vlCDR3
QQYGSSPWT

SEQ ID NO: 5069 - protein, 221 aa, synthetic construct; identical to SEQ ID NO: 2919
  source 1..221: note = Description of Artificial Sequence: Synthetic polypeptide; note = XENP019494 [CTLA-4]_H0_L0.79_Fab Heavy Chain

SEQ ID NO: 5070 - protein, 118 aa, synthetic construct; identical to SEQ ID NO: 22
  source 1..118: note = Description of Artificial Sequence: Synthetic polypeptide; note = VH of XENP019494

SEQ ID NO: 5071 - protein, 5 aa, synthetic construct
  source 1..5: note = Description of Artificial Sequence: Synthetic peptide; note = XENP019494 vhCDR1
SYTMH

SEQ ID NO: 5072 - protein, 17 aa, synthetic construct
  source 1..17: note = Description of Artificial Sequence: Synthetic peptide; note = XENP019494 vhCDR2
FISYDGNNKYYADSVKG

SEQ ID NO: 5073 - protein, 9 aa, synthetic construct
  source 1..9: note = Description of Artificial Sequence: Synthetic peptide; note = XENP019494 vhCDR3
TGWLGPFDY

SEQ ID NO: 5074 - protein, 215 aa, synthetic construct
  source 1..215: note = Description of Artificial Sequence: Synthetic polypeptide; note = XENP019494 [CTLA-4]_H0_L0.79_Fab Light Chain
EIVLTQSPGTLSLSPGERATLSCRASQSVGSSYLAWYQQKPGQAPRLLIYGAFTRATGIPDRFSGSGSGTDFTLTISRLEPEDFAVYYCQQYGSSPWTFGQGTKVEIKRTVAAPSVFIFPPSDEQLKSGTASVVCLLNNFYPREAKVQWKVDNALQSGNSQESVTEQDSKDSTYSLSSTLTLSKADYEKHKVYACEVTHQGLSSPVTKSFNRGEC

SEQ ID NO: 5075 - protein, 108 aa, synthetic construct; identical to SEQ ID NO: 2120
  source 1..108: note = Description of Artificial Sequence: Synthetic polypeptide; note = VL of XENP019494

SEQ ID NO: 5076 - protein, 12 aa, synthetic construct
  source 1..12: note = Description of Artificial Sequence: Synthetic peptide; note = XENP019494 vlCDR1
RASQSVGSSYLA

SEQ ID NO: 5077 - protein, 7 aa, synthetic construct
  source 1..7: note = Description of Artificial Sequence: Synthetic peptide; note = XENP019494 vlCDR2
GAFTRAT

SEQ ID NO: 5078 - protein, 9 aa, synthetic construct
  source 1..9: note = Description of Artificial Sequence: Synthetic peptide; note = XENP019494 vlCDR3
QQYGSSPWT

SEQ ID NO: 5079 - protein, 221 aa, synthetic construct; identical to SEQ ID NO: 2919
  source 1..221: note = Description of Artificial Sequence: Synthetic polypeptide; note = XENP019495 [CTLA-4]_H0_L0.80_Fab Heavy Chain

SEQ ID NO: 5080 - protein, 118 aa, synthetic construct; identical to SEQ ID NO: 22
  source 1..118: note = Description of Artificial Sequence: Synthetic polypeptide; note = VH of XENP019495

SEQ ID NO: 5081 - protein, 5 aa, synthetic construct
  source 1..5: note = Description of Artificial Sequence: Synthetic peptide; note = XENP019495 vhCDR1
SYTMH

SEQ ID NO: 5082 - protein, 17 aa, synthetic construct
  source 1..17: note = Description of Artificial Sequence: Synthetic peptide; note = XENP019495 vhCDR2
FISYDGNNKYYADSVKG

SEQ ID NO: 5083 - protein, 9 aa, synthetic construct
  source 1..9: note = Description of Artificial Sequence: Synthetic peptide; note = XENP019495 vhCDR3
TGWLGPFDY

SEQ ID NO: 5084 - protein, 215 aa, synthetic construct
  source 1..215: note = Description of Artificial Sequence: Synthetic polypeptide; note = XENP019495 [CTLA-4]_H0_L0.80_Fab Light Chain
EIVLTQSPGTLSLSPGERATLSCRASQSVGSSYLAWYQQKPGQAPRLLIYGAFSRDTGIPDRFSGSGSGTDFTLTISRLEPEDFAVYYCQQYGSSPWTFGQGTKVEIKRTVAAPSVFIFPPSDEQLKSGTASVVCLLNNFYPREAKVQWKVDNALQSGNSQESVTEQDSKDSTYSLSSTLTLSKADYEKHKVYACEVTHQGLSSPVTKSFNRGEC

SEQ ID NO: 5085 - protein, 108 aa, synthetic construct; identical to SEQ ID NO: 2129
  source 1..108: note = Description of Artificial Sequence: Synthetic polypeptide; note = VL of XENP019495

SEQ ID NO: 5086 - protein, 12 aa, synthetic construct
  source 1..12: note = Description of Artificial Sequence: Synthetic peptide; note = XENP019495 vlCDR1
RASQSVGSSYLA

SEQ ID NO: 5087 - protein, 7 aa, synthetic construct
  source 1..7: note = Description of Artificial Sequence: Synthetic peptide; note = XENP019495 vlCDR2
GAFSRDT

SEQ ID NO: 5088 - protein, 9 aa, synthetic construct
  source 1..9: note = Description of Artificial Sequence: Synthetic peptide; note = XENP019495 vlCDR3
QQYGSSPWT

SEQ ID NO: 5089 - protein, 221 aa, synthetic construct; identical to SEQ ID NO: 2919
  source 1..221: note = Description of Artificial Sequence: Synthetic polypeptide; note = XENP019496 [CTLA-4]_H0_L0.81_Fab Heavy Chain

SEQ ID NO: 5090 - protein, 118 aa, synthetic construct; identical to SEQ ID NO: 22
  source 1..118: note = Description of Artificial Sequence: Synthetic polypeptide; note = VH of XENP019496

SEQ ID NO: 5091 - protein, 5 aa, synthetic construct
  source 1..5: note = Description of Artificial Sequence: Synthetic peptide; note = XENP019496 vhCDR1
SYTMH

SEQ ID NO: 5092 - protein, 17 aa, synthetic construct
  source 1..17: note = Description of Artificial Sequence: Synthetic peptide; note = XENP019496 vhCDR2
FISYDGNNKYYADSVKG

SEQ ID NO: 5093 - protein, 9 aa, synthetic construct
  source 1..9: note = Description of Artificial Sequence: Synthetic peptide; note = XENP019496 vhCDR3
TGWLGPFDY

SEQ ID NO: 5094 - protein, 215 aa, synthetic construct
  source 1..215: note = Description of Artificial Sequence: Synthetic polypeptide; note = XENP019496 [CTLA-4]_H0_L0.81_Fab Light Chain
EIVLTQSPGTLSLSPGERATLSCRASQSVGSSYLAWYQQKPGQAPRLLIYGAFSRASGIPDRFSGSGSGTDFTLTISRLEPEDFAVYYCQQYGSSPWTFGQGTKVEIKRTVAAPSVFIFPPSDEQLKSGTASVVCLLNNFYPREAKVQWKVDNALQSGNSQESVTEQDSKDSTYSLSSTLTLSKADYEKHKVYACEVTHQGLSSPVTKSFNRGEC

SEQ ID NO: 5095 - protein, 108 aa, synthetic construct; identical to SEQ ID NO: 2138
  source 1..108: note = Description of Artificial Sequence: Synthetic polypeptide; note = VL of XENP019496

SEQ ID NO: 5096 - protein, 12 aa, synthetic construct
  source 1..12: note = Description of Artificial Sequence: Synthetic peptide; note = XENP019496 vlCDR1
RASQSVGSSYLA

SEQ ID NO: 5097 - protein, 7 aa, synthetic construct
  source 1..7: note = Description of Artificial Sequence: Synthetic peptide; note = XENP019496 vlCDR2
GAFSRAS

SEQ ID NO: 5098 - protein, 9 aa, synthetic construct
  source 1..9: note = Description of Artificial Sequence: Synthetic peptide; note = XENP019496 vlCDR3
QQYGSSPWT

SEQ ID NO: 5099 - protein, 221 aa, synthetic construct; identical to SEQ ID NO: 2919
  source 1..221: note = Description of Artificial Sequence: Synthetic polypeptide; note = XENP019501 [CTLA-4]_H0_L0.82_Fab Heavy Chain

SEQ ID NO: 5100 - protein, 118 aa, synthetic construct; identical to SEQ ID NO: 22
  source 1..118: note = Description of Artificial Sequence: Synthetic polypeptide; note = VH of XENP019501

SEQ ID NO: 5101 - protein, 5 aa, synthetic construct
  source 1..5: note = Description of Artificial Sequence: Synthetic peptide; note = XENP019501 vhCDR1
SYTMH

SEQ ID NO: 5102 - protein, 17 aa, synthetic construct
  source 1..17: note = Description of Artificial Sequence: Synthetic peptide; note = XENP019501 vhCDR2
FISYDGNNKYYADSVKG

SEQ ID NO: 5103 - protein, 9 aa, synthetic construct
  source 1..9: note = Description of Artificial Sequence: Synthetic peptide; note = XENP019501 vhCDR3
TGWLGPFDY

SEQ ID NO: 5104 - protein, 215 aa, synthetic construct
  source 1..215: note = Description of Artificial Sequence: Synthetic polypeptide; note = XENP019501 [CTLA-4]_H0_L0.82_Fab Light Chain
EIVLTQSPGTLSLSPGERATLSCRASQSVGSSYLAWYQQKPGQAPRLLIYGAFSRATGVPDRFSGSGSGTDFTLTISRLEPEDFAVYYCQQYGSSPWTFGQGTKVEIKRTVAAPSVFIFPPSDEQLKSGTASVVCLLNNFYPREAKVQWKVDNALQSGNSQESVTEQDSKDSTYSLSSTLTLSKADYEKHKVYACEVTHQGLSSPVTKSFNRGEC

SEQ ID NO: 5105 - protein, 108 aa, synthetic construct; identical to SEQ ID NO: 2147
  source 1..108: note = Description of Artificial Sequence: Synthetic polypeptide; note = VL of XENP019501

SEQ ID NO: 5106 - protein, 12 aa, synthetic construct
  source 1..12: note = Description of Artificial Sequence: Synthetic peptide; note = XENP019501 vlCDR1
RASQSVGSSYLA

SEQ ID NO: 5107 - protein, 7 aa, synthetic construct
  source 1..7: note = Description of Artificial Sequence: Synthetic peptide; note = XENP019501 vlCDR2
GAFSRAT

SEQ ID NO: 5108 - protein, 9 aa, synthetic construct
  source 1..9: note = Description of Artificial Sequence: Synthetic peptide; note = XENP019501 vlCDR3
QQYGSSPWT

SEQ ID NO: 5109 - protein, 221 aa, synthetic construct; identical to SEQ ID NO: 2919
  source 1..221: note = Description of Artificial Sequence: Synthetic polypeptide; note = XENP019502 [CTLA-4]_H0_L0.83_Fab Heavy Chain

SEQ ID NO: 5110 - protein, 118 aa, synthetic construct; identical to SEQ ID NO: 22
  source 1..118: note = Description of Artificial Sequence: Synthetic polypeptide; note = VH of XENP019502

SEQ ID NO: 5111 - protein, 5 aa, synthetic construct
  source 1..5: note = Description of Artificial Sequence: Synthetic peptide; note = XENP019502 vhCDR1
SYTMH

SEQ ID NO: 5112 - protein, 17 aa, synthetic construct
  source 1..17: note = Description of Artificial Sequence: Synthetic peptide; note = XENP019502 vhCDR2
FISYDGNNKYYADSVKG

SEQ ID NO: 5113 - protein, 9 aa, synthetic construct
  source 1..9: note = Description of Artificial Sequence: Synthetic peptide; note = XENP019502 vhCDR3
TGWLGPFDY

SEQ ID NO: 5114 - protein, 215 aa, synthetic construct
  source 1..215: note = Description of Artificial Sequence: Synthetic polypeptide; note = XENP019502 [CTLA-4]_H0_L0.83_Fab Light Chain
EIVLTQSPGTLSLSPGERATLSCRASQSVGSSYLAWYQQKPGQAPRLLIYGAFSRATGIPARFSGSGSGTDFTLTISRLEPEDFAVYYCQQYGSSPWTFGQGTKVEIKRTVAAPSVFIFPPSDEQLKSGTASVVCLLNNFYPREAKVQWKVDNALQSGNSQESVTEQDSKDSTYSLSSTLTLSKADYEKHKVYACEVTHQGLSSPVTKSFNRGEC

SEQ ID NO: 5115 - protein, 108 aa, synthetic construct; identical to SEQ ID NO: 2156
  source 1..108: note = Description of Artificial Sequence: Synthetic polypeptide; note = VL of XENP019502

SEQ ID NO: 5116 - protein, 12 aa, synthetic construct
  source 1..12: note = Description of Artificial Sequence: Synthetic peptide; note = XENP019502 vlCDR1
RASQSVGSSYLA

SEQ ID NO: 5117 - protein, 7 aa, synthetic construct
  source 1..7: note = Description of Artificial Sequence: Synthetic peptide; note = XENP019502 vlCDR2
GAFSRAT

SEQ ID NO: 5118 - protein, 9 aa, synthetic construct
  source 1..9: note = Description of Artificial Sequence: Synthetic peptide; note = XENP019502 vlCDR3
QQYGSSPWT

SEQ ID NO: 5119 - protein, 221 aa, synthetic construct; identical to SEQ ID NO: 2919
  source 1..221: note = Description of Artificial Sequence: Synthetic polypeptide; note = XENP019503 [CTLA-4]_H0_L0.84_Fab Heavy Chain

SEQ ID NO: 5120 - protein, 118 aa, synthetic construct; identical to SEQ ID NO: 22
  source 1..118: note = Description of Artificial Sequence: Synthetic polypeptide; note = VH of XENP019503

SEQ ID NO: 5121 - protein, 5 aa, synthetic construct
  source 1..5: note = Description of Artificial Sequence: Synthetic peptide; note = XENP019503 vhCDR1
SYTMH

SEQ ID NO: 5122 - protein, 17 aa, synthetic construct
  source 1..17: note = Description of Artificial Sequence: Synthetic peptide; note = XENP019503 vhCDR2
FISYDGNNKYYADSVKG

SEQ ID NO: 5123 - protein, 9 aa, synthetic construct
  source 1..9: note = Description of Artificial Sequence: Synthetic peptide; note = XENP019503 vhCDR3
TGWLGPFDY

SEQ ID NO: 5124 - protein, 215 aa, synthetic construct
  source 1..215: note = Description of Artificial Sequence: Synthetic polypeptide; note = XENP019503 [CTLA-4]_H0_L0.84_Fab Light Chain
EIVLTQSPGTLSLSPGERATLSCRASQSVGSSYLAWYQQKPGQAPRLLIYGAFSRATGIPDRFSGSGSRTDFTLTISRLEPEDFAVYYCQQYGSSPWTFGQGTKVEIKRTVAAPSVFIFPPSDEQLKSGTASVVCLLNNFYPREAKVQWKVDNALQSGNSQESVTEQDSKDSTYSLSSTLTLSKADYEKHKVYACEVTHQGLSSPVTKSFNRGEC

SEQ ID NO: 5125 - protein, 108 aa, synthetic construct; identical to SEQ ID NO: 2165
  source 1..108: note = Description of Artificial Sequence: Synthetic polypeptide; note = VL of XENP019503

SEQ ID NO: 5126 - protein, 12 aa, synthetic construct
  source 1..12: note = Description of Artificial Sequence: Synthetic peptide; note = XENP019503 vlCDR1
RASQSVGSSYLA

SEQ ID NO: 5127 - protein, 7 aa, synthetic construct
  source 1..7: note = Description of Artificial Sequence: Synthetic peptide; note = XENP019503 vlCDR2
GAFSRAT

SEQ ID NO: 5128 - protein, 9 aa, synthetic construct
  source 1..9: note = Description of Artificial Sequence: Synthetic peptide; note = XENP019503 vlCDR3
QQYGSSPWT

SEQ ID NO: 5129 - protein, 221 aa, synthetic construct; identical to SEQ ID NO: 2919
  source 1..221: note = Description of Artificial Sequence: Synthetic polypeptide; note = XENP019504 [CTLA-4]_H0_L0.85_Fab Heavy Chain

SEQ ID NO: 5130 - protein, 118 aa, synthetic construct; identical to SEQ ID NO: 22
  source 1..118: note = Description of Artificial Sequence: Synthetic polypeptide; note = VH of XENP019504

SEQ ID NO: 5131 - protein, 5 aa, synthetic construct
  source 1..5: note = Description of Artificial Sequence: Synthetic peptide; note = XENP019504 vhCDR1
SYTMH

SEQ ID NO: 5132 - protein, 17 aa, synthetic construct
  source 1..17: note = Description of Artificial Sequence: Synthetic peptide; note = XENP019504 vhCDR2
FISYDGNNKYYADSVKG

SEQ ID NO: 5133 - protein, 9 aa, synthetic construct
  source 1..9: note = Description of Artificial Sequence: Synthetic peptide; note = XENP019504 vhCDR3
TGWLGPFDY

SEQ ID NO: 5134 - protein, 215 aa, synthetic construct
  source 1..215: note = Description of Artificial Sequence: Synthetic polypeptide; note = XENP019504 [CTLA-4]_H0_L0.85_Fab Light Chain
EIVLTQSPGTLSLSPGERATLSCRASQSVGSSYLAWYQQKPGQAPRLLIYGAFSRATGIPDRFSGSGSGTEFTLTISRLEPEDFAVYYCQQYGSSPWTFGQGTKVEIKRTVAAPSVFIFPPSDEQLKSGTASVVCLLNNFYPREAKVQWKVDNALQSGNSQESVTEQDSKDSTYSLSSTLTLSKADYEKHKVYACEVTHQGLSSPVTKSFNRGEC

SEQ ID NO: 5135 - protein, 108 aa, synthetic construct; identical to SEQ ID NO: 2174
  source 1..108: note = Description of Artificial Sequence: Synthetic polypeptide; note = VL of XENP019504

SEQ ID NO: 5136 - protein, 12 aa, synthetic construct
  source 1..12: note = Description of Artificial Sequence: Synthetic peptide; note = XENP019504 vlCDR1
RASQSVGSSYLA

SEQ ID NO: 5137 - protein, 7 aa, synthetic construct
  source 1..7: note = Description of Artificial Sequence: Synthetic peptide; note = XENP019504 vlCDR2
GAFSRAT

SEQ ID NO: 5138 - protein, 9 aa, synthetic construct
  source 1..9: note = Description of Artificial Sequence: Synthetic peptide; note = XENP019504 vlCDR3
QQYGSSPWT

SEQ ID NO: 5139 - protein, 221 aa, synthetic construct; identical to SEQ ID NO: 2919
  source 1..221: note = Description of Artificial Sequence: Synthetic polypeptide; note = XENP019505 [CTLA-4]_H0_L0.86_Fab Heavy Chain

SEQ ID NO: 5140 - protein, 118 aa, synthetic construct; identical to SEQ ID NO: 22
  source 1..118: note = Description of Artificial Sequence: Synthetic polypeptide; note = VH of XENP019505

SEQ ID NO: 5141 - protein, 5 aa, synthetic construct
  source 1..5: note = Description of Artificial Sequence: Synthetic peptide; note = XENP019505 vhCDR1
SYTMH

SEQ ID NO: 5142 - protein, 17 aa, synthetic construct
  source 1..17: note = Description of Artificial Sequence: Synthetic peptide; note = XENP019505 vhCDR2
FISYDGNNKYYADSVKG

SEQ ID NO: 5143 - protein, 9 aa, synthetic construct
  source 1..9: note = Description of Artificial Sequence: Synthetic peptide; note = XENP019505 vhCDR3
TGWLGPFDY

SEQ ID NO: 5144 - protein, 215 aa, synthetic construct
  source 1..215: note = Description of Artificial Sequence: Synthetic polypeptide; note = XENP019505 [CTLA-4]_H0_L0.86_Fab Light Chain
EIVLTQSPGTLSLSPGERATLSCRASQSVGSSYLAWYQQKPGQAPRLLIYGAFSRATGIPDRFSGSGSGTDFTLKISRLEPEDFAVYYCQQYGSSPWTFGQGTKVEIKRTVAAPSVFIFPPSDEQLKSGTASVVCLLNNFYPREAKVQWKVDNALQSGNSQESVTEQDSKDSTYSLSSTLTLSKADYEKHKVYACEVTHQGLSSPVTKSFNRGEC

SEQ ID NO: 5145 - protein, 108 aa, synthetic construct; identical to SEQ ID NO: 2183
  source 1..108: note = Description of Artificial Sequence: Synthetic polypeptide; note = VL of XENP019505

SEQ ID NO: 5146 - protein, 12 aa, synthetic construct
  source 1..12: note = Description of Artificial Sequence: Synthetic peptide; note = XENP019505 vlCDR1
RASQSVGSSYLA

SEQ ID NO: 5147 - protein, 7 aa, synthetic construct
  source 1..7: note = Description of Artificial Sequence: Synthetic peptide; note = XENP019505 vlCDR2
GAFSRAT

SEQ ID NO: 5148 - protein, 9 aa, synthetic construct
  source 1..9: note = Description of Artificial Sequence: Synthetic peptide; note = XENP019505 vlCDR3
QQYGSSPWT

SEQ ID NO: 5149 - protein, 221 aa, synthetic construct; identical to SEQ ID NO: 2919
  source 1..221: note = Description of Artificial Sequence: Synthetic polypeptide; note = XENP019506 [CTLA-4]_H0_L0.87_Fab Heavy Chain

SEQ ID NO: 5150 - protein, 118 aa, synthetic construct; identical to SEQ ID NO: 22
  source 1..118: note = Description of Artificial Sequence: Synthetic polypeptide; note = VH of XENP019506

SEQ ID NO: 5151 - protein, 5 aa, synthetic construct
  source 1..5: note = Description of Artificial Sequence: Synthetic peptide; note = XENP019506 vhCDR1
SYTMH

SEQ ID NO: 5152 - protein, 17 aa, synthetic construct
  source 1..17: note = Description of Artificial Sequence: Synthetic peptide; note = XENP019506 vhCDR2
FISYDGNNKYYADSVKG

SEQ ID NO: 5153 - protein, 9 aa, synthetic construct
  source 1..9: note = Description of Artificial Sequence: Synthetic peptide; note = XENP019506 vhCDR3
TGWLGPFDY

SEQ ID NO: 5154 - protein, 215 aa, synthetic construct
  source 1..215: note = Description of Artificial Sequence: Synthetic polypeptide; note = XENP019506 [CTLA-4]_H0_L0.87_Fab Light Chain
EIVLTQSPGTLSLSPGERATLSCRASQSVGSSYLAWYQQKPGQAPRLLIYGAFSRATGIPDRFSGSGSGTDFTLTISSLEPEDFAVYYCQQYGSSPWTFGQGTKVEIKRTVAAPSVFIFPPSDEQLKSGTASVVCLLNNFYPREAKVQWKVDNALQSGNSQESVTEQDSKDSTYSLSSTLTLSKADYEKHKVYACEVTHQGLSSPVTKSFNRGEC

SEQ ID NO: 5155 - protein, 108 aa, synthetic construct; identical to SEQ ID NO: 2192
  source 1..108: note = Description of Artificial Sequence: Synthetic polypeptide; note = VL of XENP019506

SEQ ID NO: 5156 - protein, 12 aa, synthetic construct
  source 1..12: note = Description of Artificial Sequence: Synthetic peptide; note = XENP019506 vlCDR1
RASQSVGSSYLA

SEQ ID NO: 5157 - protein, 7 aa, synthetic construct
  source 1..7: note = Description of Artificial Sequence: Synthetic peptide; note = XENP019506 vlCDR2
GAFSRAT

SEQ ID NO: 5158 - protein, 9 aa, synthetic construct
  source 1..9: note = Description of Artificial Sequence: Synthetic peptide; note = XENP019506 vlCDR3
QQYGSSPWT

SEQ ID NO: 5159 - protein, 221 aa, synthetic construct; identical to SEQ ID NO: 2919
  source 1..221: note = Description of Artificial Sequence: Synthetic polypeptide; note = XENP019507 [CTLA-4]_H0_L0.88_Fab Heavy Chain

SEQ ID NO: 5160 - protein, 118 aa, synthetic construct; identical to SEQ ID NO: 22
  source 1..118: note = Description of Artificial Sequence: Synthetic polypeptide; note = VH of XENP019507

SEQ ID NO: 5161 - protein, 5 aa, synthetic construct
  source 1..5: note = Description of Artificial Sequence: Synthetic peptide; note = XENP019507 vhCDR1
SYTMH

SEQ ID NO: 5162 - protein, 17 aa, synthetic construct
  source 1..17: note = Description of Artificial Sequence: Synthetic peptide; note = XENP019507 vhCDR2
FISYDGNNKYYADSVKG

SEQ ID NO: 5163 - protein, 9 aa, synthetic construct
  source 1..9: note = Description of Artificial Sequence: Synthetic peptide; note = XENP019507 vhCDR3
TGWLGPFDY

SEQ ID NO: 5164 - protein, 215 aa, synthetic construct
  source 1..215: note = Description of Artificial Sequence: Synthetic polypeptide; note = XENP019507 [CTLA-4]_H0_L0.88_Fab Light Chain
EIVLTQSPGTLSLSPGERATLSCRASQSVGSSYLAWYQQKPGQAPRLLIYGAFSRATGIPDRFSGSGSGTDFTLTISSLQSEDFAVYYCQQYGSSPWTFGQGTKVEIKRTVAAPSVFIFPPSDEQLKSGTASVVCLLNNFYPREAKVQWKVDNALQSGNSQESVTEQDSKDSTYSLSSTLTLSKADYEKHKVYACEVTHQGLSSPVTKSFNRGEC

SEQ ID NO: 5165 - protein, 108 aa, synthetic construct; identical to SEQ ID NO: 2201
  source 1..108: note = Description of Artificial Sequence: Synthetic polypeptide; note = VL of XENP019507

SEQ ID NO: 5166 - protein, 12 aa, synthetic construct
  source 1..12: note = Description of Artificial Sequence: Synthetic peptide; note = XENP019507 vlCDR1
RASQSVGSSYLA

SEQ ID NO: 5167 - protein, 7 aa, synthetic construct
  source 1..7: note = Description of Artificial Sequence: Synthetic peptide; note = XENP019507 vlCDR2
GAFSRAT

SEQ ID NO: 5168 - protein, 9 aa, synthetic construct
  source 1..9: note = Description of Artificial Sequence: Synthetic peptide; note = XENP019507 vlCDR3
QQYGSSPWT

SEQ ID NO: 5169 - protein, 221 aa, synthetic construct; identical to SEQ ID NO: 2919
  source 1..221: note = Description of Artificial Sequence: Synthetic polypeptide; note = XENP019508 [CTLA-4]_H0_L0.89_Fab Heavy Chain

SEQ ID NO: 5170 - protein, 118 aa, synthetic construct; identical to SEQ ID NO: 22
  source 1..118: note = Description of Artificial Sequence: Synthetic polypeptide; note = VH of XENP019508

SEQ ID NO: 5171 - protein, 5 aa, synthetic construct
  source 1..5: note = Description of Artificial Sequence: Synthetic peptide; note = XENP019508 vhCDR1
SYTMH

SEQ ID NO: 5172 - protein, 17 aa, synthetic construct
  source 1..17: note = Description of Artificial Sequence: Synthetic peptide; note = XENP019508 vhCDR2
FISYDGNNKYYADSVKG

SEQ ID NO: 5173 - protein, 9 aa, synthetic construct
  source 1..9: note = Description of Artificial Sequence: Synthetic peptide; note = XENP019508 vhCDR3
TGWLGPFDY

SEQ ID NO: 5174 - protein, 215 aa, synthetic construct
  source 1..215: note = Description of Artificial Sequence: Synthetic polypeptide; note = XENP019508 [CTLA-4]_H0_L0.89_Fab Light Chain
EIVLTQSPGTLSLSPGERATLSCRASQSVGSSYLAWYQQKPGQAPRLLIYGAFSRATGIPDRFSGSGSGTDFTLTISRVEPEDFAVYYCQQYGSSPWTFGQGTKVEIKRTVAAPSVFIFPPSDEQLKSGTASVVCLLNNFYPREAKVQWKVDNALQSGNSQESVTEQDSKDSTYSLSSTLTLSKADYEKHKVYACEVTHQGLSSPVTKSFNRGEC

SEQ ID NO: 5175 - protein, 108 aa, synthetic construct; identical to SEQ ID NO: 2210
  source 1..108: note = Description of Artificial Sequence: Synthetic polypeptide; note = VL of XENP019508

SEQ ID NO: 5176 - protein, 12 aa, synthetic construct
  source 1..12: note = Description of Artificial Sequence: Synthetic peptide; note = XENP019508 vlCDR1
RASQSVGSSYLA

SEQ ID NO: 5177 - protein, 7 aa, synthetic construct
  source 1..7: note = Description of Artificial Sequence: Synthetic peptide; note = XENP019508 vlCDR2
GAFSRAT

SEQ ID NO: 5178 - protein, 9 aa, synthetic construct
  source 1..9: note = Description of Artificial Sequence: Synthetic peptide; note = XENP019508 vlCDR3
QQYGSSPWT

SEQ ID NO: 5179 - protein, 221 aa, synthetic construct; identical to SEQ ID NO: 2919
  source 1..221: note = Description of Artificial Sequence: Synthetic polypeptide; note = XENP019509 [CTLA-4]_H0_L0.90_Fab Heavy Chain

SEQ ID NO: 5180 - protein, 118 aa, synthetic construct; identical to SEQ ID NO: 22
  source 1..118: note = Description of Artificial Sequence: Synthetic polypeptide; note = VH of XENP019509

SEQ ID NO: 5181 - protein, 5 aa, synthetic construct
  source 1..5: note = Description of Artificial Sequence: Synthetic peptide; note = XENP019509 vhCDR1
SYTMH

SEQ ID NO: 5182 - protein, 17 aa, synthetic construct
  source 1..17: note = Description of Artificial Sequence: Synthetic peptide; note = XENP019509 vhCDR2
FISYDGNNKYYADSVKG

SEQ ID NO: 5183 - protein, 9 aa, synthetic construct
  source 1..9: note = Description of Artificial Sequence: Synthetic peptide; note = XENP019509 vhCDR3
TGWLGPFDY

SEQ ID NO: 5184 - protein, 215 aa, synthetic construct
  source 1..215: note = Description of Artificial Sequence: Synthetic polypeptide; note = XENP019509 [CTLA-4]_H0_L0.90_Fab Light Chain
EIVLTQSPGTLSLSPGERATLSCRASQSVGSSYLAWYQQKPGQAPRLLIYGAFSRATGIPDRFSGSGSGTDFTLTISRLQPEDFAVYYCQQYGSSPWTFGQGTKVEIKRTVAAPSVFIFPPSDEQLKSGTASVVCLLNNFYPREAKVQWKVDNALQSGNSQESVTEQDSKDSTYSLSSTLTLSKADYEKHKVYACEVTHQGLSSPVTKSFNRGEC

SEQ ID NO: 5185 - protein, 108 aa, synthetic construct; identical to SEQ ID NO: 2219
  source 1..108: note = Description of Artificial Sequence: Synthetic polypeptide; note = VL of XENP019509

SEQ ID NO: 5186 - protein, 12 aa, synthetic construct
  source 1..12: note = Description of Artificial Sequence: Synthetic peptide; note = XENP019509 vlCDR1
RASQSVGSSYLA

SEQ ID NO: 5187 - protein, 7 aa, synthetic construct
  source 1..7: note = Description of Artificial Sequence: Synthetic peptide; note = XENP019509 vlCDR2
GAFSRAT

SEQ ID NO: 5188 - protein, 9 aa, synthetic construct
  source 1..9: note = Description of Artificial Sequence: Synthetic peptide; note = XENP019509 vlCDR3
QQYGSSPWT

SEQ ID NO: 5189 - protein, 221 aa, synthetic construct; identical to SEQ ID NO: 2919
  source 1..221: note = Description of Artificial Sequence: Synthetic polypeptide; note = XENP019510 [CTLA-4]_H0_L0.91_Fab Heavy Chain

SEQ ID NO: 5190 - protein, 118 aa, synthetic construct; identical to SEQ ID NO: 22
  source 1..118: note = Description of Artificial Sequence: Synthetic polypeptide; note = VH of XENP019510

SEQ ID NO: 5191 - protein, 5 aa, synthetic construct
  source 1..5: note = Description of Artificial Sequence: Synthetic peptide; note = XENP019510 vhCDR1
SYTMH

SEQ ID NO: 5192 - protein, 17 aa, synthetic construct
  source 1..17: note = Description of Artificial Sequence: Synthetic peptide; note = XENP019510 vhCDR2
FISYDGNNKYYADSVKG

SEQ ID NO: 5193 - protein, 9 aa, synthetic construct
  source 1..9: note = Description of Artificial Sequence: Synthetic peptide; note = XENP019510 vhCDR3
TGWLGPFDY

SEQ ID NO: 5194 - protein, 215 aa, synthetic construct
  source 1..215: note = Description of Artificial Sequence: Synthetic polypeptide; note = XENP019510 [CTLA-4]_H0_L0.91_Fab Light Chain
EIVLTQSPGTLSLSPGERATLSCRASQSVGSSYLAWYQQKPGQAPRLLIYGAFSRATGIPDRFSGSGSGTDFTLTISRLESEDFAVYYCQQYGSSPWTFGQGTKVEIKRTVAAPSVFIFPPSDEQLKSGTASVVCLLNNFYPREAKVQWKVDNALQSGNSQESVTEQDSKDSTYSLSSTLTLSKADYEKHKVYACEVTHQGLSSPVTKSFNRGEC

SEQ ID NO: 5195 - protein, 108 aa, synthetic construct; identical to SEQ ID NO: 2228
  source 1..108: note = Description of Artificial Sequence: Synthetic polypeptide; note = VL of XENP019510

SEQ ID NO: 5196 - protein, 12 aa, synthetic construct
  source 1..12: note = Description of Artificial Sequence: Synthetic peptide; note = XENP019510 vlCDR1
RASQSVGSSYLA

SEQ ID NO: 5197 - protein, 7 aa, synthetic construct
  source 1..7: note = Description of Artificial Sequence: Synthetic peptide; note = XENP019510 vlCDR2
GAFSRAT

SEQ ID NO: 5198 - protein, 9 aa, synthetic construct
  source 1..9: note = Description of Artificial Sequence: Synthetic peptide; note = XENP019510 vlCDR3
QQYGSSPWT

SEQ ID NO: 5199 - protein, 221 aa, synthetic construct; identical to SEQ ID NO: 2919
  source 1..221: note = Description of Artificial Sequence: Synthetic polypeptide; note = XENP019511 [CTLA-4]_H0_L0.92_Fab Heavy Chain

SEQ ID NO: 5200 - protein, 118 aa, synthetic construct; identical to SEQ ID NO: 22
  source 1..118: note = Description of Artificial Sequence: Synthetic polypeptide; note = VH of XENP019511

SEQ ID NO: 5201 - protein, 5 aa, synthetic construct
  source 1..5: note = Description of Artificial Sequence: Synthetic peptide; note = XENP019511 vhCDR1
SYTMH

SEQ ID NO: 5202 - protein, 17 aa, synthetic construct
  source 1..17: note = Description of Artificial Sequence: Synthetic peptide; note = XENP019511 vhCDR2
FISYDGNNKYYADSVKG

SEQ ID NO: 5203 - protein, 9 aa, synthetic construct
  source 1..9: note = Description of Artificial Sequence: Synthetic peptide; note = XENP019511 vhCDR3
TGWLGPFDY

SEQ ID NO: 5204 - protein, 215 aa, synthetic construct
  source 1..215: note = Description of Artificial Sequence: Synthetic polypeptide; note = XENP019511 [CTLA-4]_H0_L0.92_Fab Light Chain
EIVLTQSPGTLSLSPGERATLSCRASQSVGSSYLAWYQQKPGQAPRLLIYGAFSRATGIPDRFSGSGSGTDFTLTISRLEPQDFAVYYCQQYGSSPWTFGQGTKVEIKRTVAAPSVFIFPPSDEQLKSGTASVVCLLNNFYPREAKVQWKVDNALQSGNSQESVTEQDSKDSTYSLSSTLTLSKADYEKHKVYACEVTHQGLSSPVTKSFNRGEC

SEQ ID NO: 5205 - protein, 108 aa, synthetic construct; identical to SEQ ID NO: 2237
  source 1..108: note = Description of Artificial Sequence: Synthetic polypeptide; note = VL of XENP019511

SEQ ID NO: 5206 - protein, 12 aa, synthetic construct
  source 1..12: note = Description of Artificial Sequence: Synthetic peptide; note = XENP019511 vlCDR1
RASQSVGSSYLA

SEQ ID NO: 5207 - protein, 7 aa, synthetic construct
  source 1..7: note = Description of Artificial Sequence: Synthetic peptide; note = XENP019511 vlCDR2
GAFSRAT

SEQ ID NO: 5208 - protein, 9 aa, synthetic construct
  source 1..9: note = Description of Artificial Sequence: Synthetic peptide; note = XENP019511 vlCDR3
QQYGSSPWT

SEQ ID NO: 5209 - protein, 221 aa, synthetic construct; identical to SEQ ID NO: 2919
  source 1..221: note = Description of Artificial Sequence: Synthetic polypeptide; note = XENP019512 [CTLA-4]_H0_L0.93_Fab Heavy Chain

SEQ ID NO: 5210 - protein, 118 aa, synthetic construct; identical to SEQ ID NO: 22
  source 1..118: note = Description of Artificial Sequence: Synthetic polypeptide; note = VH of XENP019512

SEQ ID NO: 5211 - protein, 5 aa, synthetic construct
  source 1..5: note = Description of Artificial Sequence: Synthetic peptide; note = XENP019512 vhCDR1
SYTMH

SEQ ID NO: 5212 - protein, 17 aa, synthetic construct
  source 1..17: note = Description of Artificial Sequence: Synthetic peptide; note = XENP019512 vhCDR2
FISYDGNNKYYADSVKG

SEQ ID NO: 5213 - protein, 9 aa, synthetic construct
  source 1..9: note = Description of Artificial Sequence: Synthetic peptide; note = XENP019512 vhCDR3
TGWLGPFDY

SEQ ID NO: 5214 - protein, 215 aa, synthetic construct
  source 1..215: note = Description of Artificial Sequence: Synthetic polypeptide; note = XENP019512 [CTLA-4]_H0_L0.93_Fab Light Chain
EIVLTQSPGTLSLSPGERATLSCRASQSVGSSYLAWYQQKPGQAPRLLIYGAFSRATGIPDRFSGSGSGTDFTLTISRLEPEDFAVYYCKQYGSSPWTFGQGTKVEIKRTVAAPSVFIFPPSDEQLKSGTASVVCLLNNFYPREAKVQWKVDNALQSGNSQESVTEQDSKDSTYSLSSTLTLSKADYEKHKVYACEVTHQGLSSPVTKSFNRGEC

SEQ ID NO: 5215 - protein, 108 aa, synthetic construct; identical to SEQ ID NO: 2246
  source 1..108: note = Description of Artificial Sequence: Synthetic polypeptide; note = VL of XENP019512

SEQ ID NO: 5216 - protein, 12 aa, synthetic construct
  source 1..12: note = Description of Artificial Sequence: Synthetic peptide; note = XENP019512 vlCDR1
RASQSVGSSYLA

SEQ ID NO: 5217 - protein, 7 aa, synthetic construct
  source 1..7: note = Description of Artificial Sequence: Synthetic peptide; note = XENP019512 vlCDR2
GAFSRAT

SEQ ID NO: 5218 - protein, 9 aa, synthetic construct
  source 1..9: note = Description of Artificial Sequence: Synthetic peptide; note = XENP019512 vlCDR3
KQYGSSPWT

SEQ ID NO: 5219 - protein, 221 aa, synthetic construct; identical to SEQ ID NO: 2919
  source 1..221: note = Description of Artificial Sequence: Synthetic polypeptide; note = XENP019513 [CTLA-4]_H0_L0.94_Fab Heavy Chain

SEQ ID NO: 5220 - protein, 118 aa, synthetic construct; identical to SEQ ID NO: 22
  source 1..118: note = Description of Artificial Sequence: Synthetic polypeptide; note = VH of XENP019513

SEQ ID NO: 5221 - protein, 5 aa, synthetic construct
  source 1..5: note = Description of Artificial Sequence: Synthetic peptide; note = XENP019513 vhCDR1
SYTMH

SEQ ID NO: 5222 - protein, 17 aa, synthetic construct
  source 1..17: note = Description of Artificial Sequence: Synthetic peptide; note = XENP019513 vhCDR2
FISYDGNNKYYADSVKG

SEQ ID NO: 5223 - protein, 9 aa, synthetic construct
  source 1..9: note = Description of Artificial Sequence: Synthetic peptide; note = XENP019513 vhCDR3
TGWLGPFDY

SEQ ID NO: 5224 - protein, 215 aa, synthetic construct
  source 1..215: note = Description of Artificial Sequence: Synthetic polypeptide; note = XENP019513 [CTLA-4]_H0_L0.94_Fab Light Chain
EIVLTQSPGTLSLSPGERATLSCRASQSVGSSYLAWYQQKPGQAPRLLIYGAFSRATGIPDRFSGSGSGTDFTLTISRLEPEDFAVYYCLQYGSSPWTFGQGTKVEIKRTVAAPSVFIFPPSDEQLKSGTASVVCLLNNFYPREAKVQWKVDNALQSGNSQESVTEQDSKDSTYSLSSTLTLSKADYEKHKVYACEVTHQGLSSPVTKSFNRGEC

SEQ ID NO: 5225 - protein, 108 aa, synthetic construct; identical to SEQ ID NO: 2255
  source 1..108: note = Description of Artificial Sequence: Synthetic polypeptide; note = VL of XENP019513

SEQ ID NO: 5226 - protein, 12 aa, synthetic construct
  source 1..12: note = Description of Artificial Sequence: Synthetic peptide; note = XENP019513 vlCDR1
RASQSVGSSYLA

SEQ ID NO: 5227 - protein, 7 aa, synthetic construct
  source 1..7: note = Description of Artificial Sequence: Synthetic peptide; note = XENP019513 vlCDR2
GAFSRAT

SEQ ID NO: 5228 - protein, 9 aa, synthetic construct
  source 1..9: note = Description of Artificial Sequence: Synthetic peptide; note = XENP019513 vlCDR3
LQYGSSPWT

SEQ ID NO: 5229 - protein, 221 aa, synthetic construct; identical to SEQ ID NO: 2919
  source 1..221: note = Description of Artificial Sequence: Synthetic polypeptide; note = XENP019514 [CTLA-4]_H0_L0.95_Fab Heavy Chain

SEQ ID NO: 5230 - protein, 118 aa, synthetic construct; identical to SEQ ID NO: 22
  source 1..118: note = Description of Artificial Sequence: Synthetic polypeptide; note = VH of XENP019514

SEQ ID NO: 5231 - protein, 5 aa, synthetic construct
  source 1..5: note = Description of Artificial Sequence: Synthetic peptide; note = XENP019514 vhCDR1
SYTMH

SEQ ID NO: 5232 - protein, 17 aa, synthetic construct
  source 1..17: note = Description of Artificial Sequence: Synthetic peptide; note = XENP019514 vhCDR2
FISYDGNNKYYADSVKG

SEQ ID NO: 5233 - protein, 9 aa, synthetic construct
  source 1..9: note = Description of Artificial Sequence: Synthetic peptide; note = XENP019514 vhCDR3
TGWLGPFDY

SEQ ID NO: 5234 - protein, 215 aa, synthetic construct
  source 1..215: note = Description of Artificial Sequence: Synthetic polypeptide; note = XENP019514 [CTLA-4]_H0_L0.95_Fab Light Chain
EIVLTQSPGTLSLSPGERATLSCRASQSVGSSYLAWYQQKPGQAPRLLIYGAFSRATGIPDRFSGSGSGTDFTLTISRLEPEDFAVYYCMQYGSSPWTFGQGTKVEIKRTVAAPSVFIFPPSDEQLKSGTASVVCLLNNFYPREAKVQWKVDNALQSGNSQESVTEQDSKDSTYSLSSTLTLSKADYEKHKVYACEVTHQGLSSPVTKSFNRGEC

SEQ ID NO: 5235 - protein, 108 aa, synthetic construct; identical to SEQ ID NO: 2264
  source 1..108: note = Description of Artificial Sequence: Synthetic polypeptide; note = VL of XENP019514

SEQ ID NO: 5236 - protein, 12 aa, synthetic construct
  source 1..12: note = Description of Artificial Sequence: Synthetic peptide; note = XENP019514 vlCDR1
RASQSVGSSYLA

SEQ ID NO: 5237 - protein, 7 aa, synthetic construct
  source 1..7: note = Description of Artificial Sequence: Synthetic peptide; note = XENP019514 vlCDR2
GAFSRAT

SEQ ID NO: 5238 - protein, 9 aa, synthetic construct
  source 1..9: note = Description of Artificial Sequence: Synthetic peptide; note = XENP019514 vlCDR3
MQYGSSPWT

SEQ ID NO: 5239 - protein, 221 aa, synthetic construct; identical to SEQ ID NO: 2919
  source 1..221: note = Description of Artificial Sequence: Synthetic polypeptide; note = XENP019515 [CTLA-4]_H0_L0.96_Fab Heavy Chain

SEQ ID NO: 5240 - protein, 118 aa, synthetic construct; identical to SEQ ID NO: 22
  source 1..118: note = Description of Artificial Sequence: Synthetic polypeptide; note = VH of XENP019515

SEQ ID NO: 5241 - protein, 5 aa, synthetic construct
  source 1..5: note = Description of Artificial Sequence: Synthetic peptide; note = XENP019515 vhCDR1
SYTMH

SEQ ID NO: 5242 - protein, 17 aa, synthetic construct
  source 1..17: note = Description of Artificial Sequence: Synthetic peptide; note = XENP019515 vhCDR2
FISYDGNNKYYADSVKG

SEQ ID NO: 5243 - protein, 9 aa, synthetic construct
  source 1..9: note = Description of Artificial Sequence: Synthetic peptide; note = XENP019515 vhCDR3
TGWLGPFDY

SEQ ID NO: 5244 - protein, 215 aa, synthetic construct
  source 1..215: note = Description of Artificial Sequence: Synthetic polypeptide; note = XENP019515 [CTLA-4]_H0_L0.96_Fab Light Chain
EIVLTQSPGTLSLSPGERATLSCRASQSVGSSYLAWYQQKPGQAPRLLIYGAFSRATGIPDRFSGSGSGTDFTLTISRLEPEDFAVYYCQSYGSSPWTFGQGTKVEIKRTVAAPSVFIFPPSDEQLKSGTASVVCLLNNFYPREAKVQWKVDNALQSGNSQESVTEQDSKDSTYSLSSTLTLSKADYEKHKVYACEVTHQGLSSPVTKSFNRGEC

SEQ ID NO: 5245 - protein, 108 aa, synthetic construct; identical to SEQ ID NO: 2273
  source 1..108: note = Description of Artificial Sequence: Synthetic polypeptide; note = VL of XENP019515

SEQ ID NO: 5246 - protein, 12 aa, synthetic construct
  source 1..12: note = Description of Artificial Sequence: Synthetic peptide; note = XENP019515 vlCDR1
RASQSVGSSYLA

SEQ ID NO: 5247 - protein, 7 aa, synthetic construct
  source 1..7: note = Description of Artificial Sequence: Synthetic peptide; note = XENP019515 vlCDR2
GAFSRAT

SEQ ID NO: 5248 - protein, 9 aa, synthetic construct
  source 1..9: note = Description of Artificial Sequence: Synthetic peptide; note = XENP019515 vlCDR3
QSYGSSPWT

SEQ ID NO: 5249 - protein, 221 aa, synthetic construct; identical to SEQ ID NO: 2919
  source 1..221: note = Description of Artificial Sequence: Synthetic polypeptide; note = XENP019516 [CTLA-4]_H0_L0.97_Fab Heavy Chain

SEQ ID NO: 5250 - protein, 118 aa, synthetic construct; identical to SEQ ID NO: 22
  source 1..118: note = Description of Artificial Sequence: Synthetic polypeptide; note = VH of XENP019516

SEQ ID NO: 5251 - protein, 5 aa, synthetic construct
  source 1..5: note = Description of Artificial Sequence: Synthetic peptide; note = XENP019516 vhCDR1
SYTMH

SEQ ID NO: 5252 - protein, 17 aa, synthetic construct
  source 1..17: note = Description of Artificial Sequence: Synthetic peptide; note = XENP019516 vhCDR2
FISYDGNNKYYADSVKG

SEQ ID NO: 5253 - protein, 9 aa, synthetic construct
  source 1..9: note = Description of Artificial Sequence: Synthetic peptide; note = XENP019516 vhCDR3
TGWLGPFDY

SEQ ID NO: 5254 - protein, 215 aa, synthetic construct
  source 1..215: note = Description of Artificial Sequence: Synthetic polypeptide; note = XENP019516 [CTLA-4]_H0_L0.97_Fab Light Chain
EIVLTQSPGTLSLSPGERATLSCRASQSVGSSYLAWYQQKPGQAPRLLIYGAFSRATGIPDRFSGSGSGTDFTLTISRLEPEDFAVYYCQQAGSSPWTFGQGTKVEIKRTVAAPSVFIFPPSDEQLKSGTASVVCLLNNFYPREAKVQWKVDNALQSGNSQESVTEQDSKDSTYSLSSTLTLSKADYEKHKVYACEVTHQGLSSPVTKSFNRGEC

SEQ ID NO: 5255 - protein, 108 aa, synthetic construct; identical to SEQ ID NO: 2282
  source 1..108: note = Description of Artificial Sequence: Synthetic polypeptide; note = VL of XENP019516

SEQ ID NO: 5256 - protein, 12 aa, synthetic construct
  source 1..12: note = Description of Artificial Sequence: Synthetic peptide; note = XENP019516 vlCDR1
RASQSVGSSYLA

SEQ ID NO: 5257 - protein, 7 aa, synthetic construct
  source 1..7: note = Description of Artificial Sequence: Synthetic peptide; note = XENP019516 vlCDR2
GAFSRAT

SEQ ID NO: 5258 - protein, 9 aa, synthetic construct
  source 1..9: note = Description of Artificial Sequence: Synthetic peptide; note = XENP019516 vlCDR3
QQAGSSPWT

SEQ ID NO: 5259 - protein, 221 aa, synthetic construct; identical to SEQ ID NO: 2919
  source 1..221: note = Description of Artificial Sequence: Synthetic polypeptide; note = XENP019517 [CTLA-4]_H0_L0.98_Fab Heavy Chain

SEQ ID NO: 5260 - protein, 118 aa, synthetic construct; identical to SEQ ID NO: 22
  source 1..118: note = Description of Artificial Sequence: Synthetic polypeptide; note = VH of XENP019517

SEQ ID NO: 5261 - protein, 5 aa, synthetic construct
  source 1..5: note = Description of Artificial Sequence: Synthetic peptide; note = XENP019517 vhCDR1
SYTMH

SEQ ID NO: 5262 - protein, 17 aa, synthetic construct
  source 1..17: note = Description of Artificial Sequence: Synthetic peptide; note = XENP019517 vhCDR2
FISYDGNNKYYADSVKG

SEQ ID NO: 5263 - protein, 9 aa, synthetic construct
  source 1..9: note = Description of Artificial Sequence: Synthetic peptide; note = XENP019517 vhCDR3
TGWLGPFDY

SEQ ID NO: 5264 - protein, 215 aa, synthetic construct
  source 1..215: note = Description of Artificial Sequence: Synthetic polypeptide; note = XENP019517 [CTLA-4]_H0_L0.98_Fab Light Chain
EIVLTQSPGTLSLSPGERATLSCRASQSVGSSYLAWYQQKPGQAPRLLIYGAFSRATGIPDRFSGSGSGTDFTLTISRLEPEDFAVYYCQQFGSSPWTFGQGTKVEIKRTVAAPSVFIFPPSDEQLKSGTASVVCLLNNFYPREAKVQWKVDNALQSGNSQESVTEQDSKDSTYSLSSTLTLSKADYEKHKVYACEVTHQGLSSPVTKSFNRGEC

SEQ ID NO: 5265 - protein, 108 aa, synthetic construct; identical to SEQ ID NO: 2291
  source 1..108: note = Description of Artificial Sequence: Synthetic polypeptide; note = VL of XENP019517

SEQ ID NO: 5266 - protein, 12 aa, synthetic construct
  source 1..12: note = Description of Artificial Sequence: Synthetic peptide; note = XENP019517 vlCDR1
RASQSVGSSYLA

SEQ ID NO: 5267 - protein, 7 aa, synthetic construct
  source 1..7: note = Description of Artificial Sequence: Synthetic peptide; note = XENP019517 vlCDR2
GAFSRAT

SEQ ID NO: 5268 - protein, 9 aa, synthetic construct
  source 1..9: note = Description of Artificial Sequence: Synthetic peptide; note = XENP019517 vlCDR3
QQFGSSPWT

SEQ ID NO: 5269 - protein, 221 aa, synthetic construct; identical to SEQ ID NO: 2919
  source 1..221: note = Description of Artificial Sequence: Synthetic polypeptide; note = XENP019518 [CTLA-4]_H0_L0.99_Fab Heavy Chain

SEQ ID NO: 5270 - protein, 118 aa, synthetic construct; identical to SEQ ID NO: 22
  source 1..118: note = Description of Artificial Sequence: Synthetic polypeptide; note = VH of XENP019518

SEQ ID NO: 5271 - protein, 5 aa, synthetic construct
  source 1..5: note = Description of Artificial Sequence: Synthetic peptide; note = XENP019518 vhCDR1
SYTMH

SEQ ID NO: 5272 - protein, 17 aa, synthetic construct
  source 1..17: note = Description of Artificial Sequence: Synthetic peptide; note = XENP019518 vhCDR2
FISYDGNNKYYADSVKG

SEQ ID NO: 5273 - protein, 9 aa, synthetic construct
  source 1..9: note = Description of Artificial Sequence: Synthetic peptide; note = XENP019518 vhCDR3
TGWLGPFDY

SEQ ID NO: 5274 - protein, 215 aa, synthetic construct
  source 1..215: note = Description of Artificial Sequence: Synthetic polypeptide; note = XENP019518 [CTLA-4]_H0_L0.99_Fab Light Chain
EIVLTQSPGTLSLSPGERATLSCRASQSVGSSYLAWYQQKPGQAPRLLIYGAFSRATGIPDRFSGSGSGTDFTLTISRLEPEDFAVYYCQQHGSSPWTFGQGTKVEIKRTVAAPSVFIFPPSDEQLKSGTASVVCLLNNFYPREAKVQWKVDNALQSGNSQESVTEQDSKDSTYSLSSTLTLSKADYEKHKVYACEVTHQGLSSPVTKSFNRGEC

SEQ ID NO: 5275 - protein, 108 aa, synthetic construct; identical to SEQ ID NO: 2300
  source 1..108: note = Description of Artificial Sequence: Synthetic polypeptide; note = VL of XENP019518

SEQ ID NO: 5276 - protein, 12 aa, synthetic construct
  source 1..12: note = Description of Artificial Sequence: Synthetic peptide; note = XENP019518 vlCDR1
RASQSVGSSYLA

SEQ ID NO: 5277 - protein, 7 aa, synthetic construct
  source 1..7: note = Description of Artificial Sequence: Synthetic peptide; note = XENP019518 vlCDR2
GAFSRAT

SEQ ID NO: 5278 - protein, 9 aa, synthetic construct
  source 1..9: note = Description of Artificial Sequence: Synthetic peptide; note = XENP019518 vlCDR3
QQHGSSPWT

SEQ ID NO: 5279 - protein, 221 aa, synthetic construct; identical to SEQ ID NO: 2919
  source 1..221: note = Description of Artificial Sequence: Synthetic polypeptide; note = XENP019519 [CTLA-4]_H0_L0.100_Fab Heavy Chain

SEQ ID NO: 5280 - protein, 118 aa, synthetic construct; identical to SEQ ID NO: 22
  source 1..118: note = Description of Artificial Sequence: Synthetic polypeptide; note = VH of XENP019519

SEQ ID NO: 5281 - protein, 5 aa, synthetic construct
  source 1..5: note = Description of Artificial Sequence: Synthetic peptide; note = XENP019519 vhCDR1
SYTMH

SEQ ID NO: 5282 - protein, 17 aa, synthetic construct
  source 1..17: note = Description of Artificial Sequence: Synthetic peptide; note = XENP019519 vhCDR2
FISYDGNNKYYADSVKG

SEQ ID NO: 5283 - protein, 9 aa, synthetic construct
  source 1..9: note = Description of Artificial Sequence: Synthetic peptide; note = XENP019519 vhCDR3
TGWLGPFDY

SEQ ID NO: 5284 - protein, 215 aa, synthetic construct
  source 1..215: note = Description of Artificial Sequence: Synthetic polypeptide; note = XENP019519 [CTLA-4]_H0_L0.100_Fab Light Chain
EIVLTQSPGTLSLSPGERATLSCRASQSVGSSYLAWYQQKPGQAPRLLIYGAFSRATGIPDRFSGSGSGTDFTLTISRLEPEDFAVYYCQQLGSSPWTFGQGTKVEIKRTVAAPSVFIFPPSDEQLKSGTASVVCLLNNFYPREAKVQWKVDNALQSGNSQESVTEQDSKDSTYSLSSTLTLSKADYEKHKVYACEVTHQGLSSPVTKSFNRGEC

SEQ ID NO: 5285 - protein, 108 aa, synthetic construct; identical to SEQ ID NO: 2309
  source 1..108: note = Description of Artificial Sequence: Synthetic polypeptide; note = VL of XENP019519

SEQ ID NO: 5286 - protein, 12 aa, synthetic construct
  source 1..12: note = Description of Artificial Sequence: Synthetic peptide; note = XENP019519 vlCDR1
RASQSVGSSYLA

SEQ ID NO: 5287 - protein, 7 aa, synthetic construct
  source 1..7: note = Description of Artificial Sequence: Synthetic peptide; note = XENP019519 vlCDR2
GAFSRAT

SEQ ID NO: 5288 - protein, 9 aa, synthetic construct
  source 1..9: note = Description of Artificial Sequence: Synthetic peptide; note = XENP019519 vlCDR3
QQLGSSPWT

SEQ ID NO: 5289 - protein, 221 aa, synthetic construct; identical to SEQ ID NO: 2919
  source 1..221: note = Description of Artificial Sequence: Synthetic polypeptide; note = XENP019520 [CTLA-4]_H0_L0.101_Fab Heavy Chain

SEQ ID NO: 5290 - protein, 118 aa, synthetic construct; identical to SEQ ID NO: 22
  source 1..118: note = Description of Artificial Sequence: Synthetic polypeptide; note = VH of XENP019520

SEQ ID NO: 5291 - protein, 5 aa, synthetic construct
  source 1..5: note = Description of Artificial Sequence: Synthetic peptide; note = XENP019520 vhCDR1
SYTMH

SEQ ID NO: 5292 - protein, 17 aa, synthetic construct
  source 1..17: note = Description of Artificial Sequence: Synthetic peptide; note = XENP019520 vhCDR2
FISYDGNNKYYADSVKG

SEQ ID NO: 5293 - protein, 9 aa, synthetic construct
  source 1..9: note = Description of Artificial Sequence: Synthetic peptide; note = XENP019520 vhCDR3
TGWLGPFDY

SEQ ID NO: 5294 - protein, 215 aa, synthetic construct
  source 1..215: note = Description of Artificial Sequence: Synthetic polypeptide; note = XENP019520 [CTLA-4]_H0_L0.101_Fab Light Chain
EIVLTQSPGTLSLSPGERATLSCRASQSVGSSYLAWYQQKPGQAPRLLIYGAFSRATGIPDRFSGSGSGTDFTLTISRLEPEDFAVYYCQQVGSSPWTFGQGTKVEIKRTVAAPSVFIFPPSDEQLKSGTASVVCLLNNFYPREAKVQWKVDNALQSGNSQESVTEQDSKDSTYSLSSTLTLSKADYEKHKVYACEVTHQGLSSPVTKSFNRGEC

SEQ ID NO: 5295 - protein, 108 aa, synthetic construct; identical to SEQ ID NO: 2318
  source 1..108: note = Description of Artificial Sequence: Synthetic polypeptide; note = VL of XENP019520

SEQ ID NO: 5296 - protein, 12 aa, synthetic construct
  source 1..12: note = Description of Artificial Sequence: Synthetic peptide; note = XENP019520 vlCDR1
RASQSVGSSYLA

SEQ ID NO: 5297 - protein, 7 aa, synthetic construct
  source 1..7: note = Description of Artificial Sequence: Synthetic peptide; note = XENP019520 vlCDR2
GAFSRAT

SEQ ID NO: 5298 - protein, 9 aa, synthetic construct
  source 1..9: note = Description of Artificial Sequence: Synthetic peptide; note = XENP019520 vlCDR3
QQVGSSPWT

SEQ ID NO: 5299 - protein, 221 aa, synthetic construct; identical to SEQ ID NO: 2919
  source 1..221: note = Description of Artificial Sequence: Synthetic polypeptide; note = XENP019521 [CTLA-4]_H0_L0.102_Fab Heavy Chain

SEQ ID NO: 5300 - protein, 118 aa, synthetic construct; identical to SEQ ID NO: 22
  source 1..118: note = Description of Artificial Sequence: Synthetic polypeptide; note = VH of XENP019521

SEQ ID NO: 5301 - protein, 5 aa, synthetic construct
  source 1..5: note = Description of Artificial Sequence: Synthetic peptide; note = XENP019521 vhCDR1
SYTMH

SEQ ID NO: 5302 - protein, 17 aa, synthetic construct
  source 1..17: note = Description of Artificial Sequence: Synthetic peptide; note = XENP019521 vhCDR2
FISYDGNNKYYADSVKG

SEQ ID NO: 5303 - protein, 9 aa, synthetic construct
  source 1..9: note = Description of Artificial Sequence: Synthetic peptide; note = XENP019521 vhCDR3
TGWLGPFDY

SEQ ID NO: 5304 - protein, 215 aa, synthetic construct
  source 1..215: note = Description of Artificial Sequence: Synthetic polypeptide; note = XENP019521 [CTLA-4]_H0_L0.102_Fab Light Chain
EIVLTQSPGTLSLSPGERATLSCRASQSVGSSYLAWYQQKPGQAPRLLIYGAFSRATGIPDRFSGSGSGTDFTLTISRLEPEDFAVYYCQQYGESPWTFGQGTKVEIKRTVAAPSVFIFPPSDEQLKSGTASVVCLLNNFYPREAKVQWKVDNALQSGNSQESVTEQDSKDSTYSLSSTLTLSKADYEKHKVYACEVTHQGLSSPVTKSFNRGEC

SEQ ID NO: 5305 - protein, 108 aa, synthetic construct; identical to SEQ ID NO: 2327
  source 1..108: note = Description of Artificial Sequence: Synthetic polypeptide; note = VL of XENP019521

SEQ ID NO: 5306 - protein, 12 aa, synthetic construct
  source 1..12: note = Description of Artificial Sequence: Synthetic peptide; note = XENP019521 vlCDR1
RASQSVGSSYLA

SEQ ID NO: 5307 - protein, 7 aa, synthetic construct
  source 1..7: note = Description of Artificial Sequence: Synthetic peptide; note = XENP019521 vlCDR2
GAFSRAT

SEQ ID NO: 5308 - protein, 9 aa, synthetic construct
  source 1..9: note = Description of Artificial Sequence: Synthetic peptide; note = XENP019521 vlCDR3
QQYGESPWT

SEQ ID NO: 5309 - protein, 221 aa, synthetic construct; identical to SEQ ID NO: 2919
  source 1..221: note = Description of Artificial Sequence: Synthetic polypeptide; note = XENP019522 [CTLA-4]_H0_L0.103_Fab Heavy Chain

SEQ ID NO: 5310 - protein, 118 aa, synthetic construct; identical to SEQ ID NO: 22
  source 1..118: note = Description of Artificial Sequence: Synthetic polypeptide; note = VH of XENP019522

SEQ ID NO: 5311 - protein, 5 aa, synthetic construct
  source 1..5: note = Description of Artificial Sequence: Synthetic peptide; note = XENP019522 vhCDR1
SYTMH

SEQ ID NO: 5312 - protein, 17 aa, synthetic construct
  source 1..17: note = Description of Artificial Sequence: Synthetic peptide; note = XENP019522 vhCDR2
FISYDGNNKYYADSVKG

SEQ ID NO: 5313 - protein, 9 aa, synthetic construct
  source 1..9: note = Description of Artificial Sequence: Synthetic peptide; note = XENP019522 vhCDR3
TGWLGPFDY

SEQ ID NO: 5314 - protein, 215 aa, synthetic construct
  source 1..215: note = Description of Artificial Sequence: Synthetic polypeptide; note = XENP019522 [CTLA-4]_H0_L0.103_Fab Light Chain
EIVLTQSPGTLSLSPGERATLSCRASQSVGSSYLAWYQQKPGQAPRLLIYGAFSRATGIPDRFSGSGSGTDFTLTISRLEPEDFAVYYCQQYGKSPWTFGQGTKVEIKRTVAAPSVFIFPPSDEQLKSGTASVVCLLNNFYPREAKVQWKVDNALQSGNSQESVTEQDSKDSTYSLSSTLTLSKADYEKHKVYACEVTHQGLSSPVTKSFNRGEC

SEQ ID NO: 5315 - protein, 108 aa, synthetic construct; identical to SEQ ID NO: 2336
  source 1..108: note = Description of Artificial Sequence: Synthetic polypeptide; note = VL of XENP019522

SEQ ID NO: 5316 - protein, 12 aa, synthetic construct
  source 1..12: note = Description of Artificial Sequence: Synthetic peptide; note = XENP019522 vlCDR1
RASQSVGSSYLA

SEQ ID NO: 5317 - protein, 7 aa, synthetic construct
  source 1..7: note = Description of Artificial Sequence: Synthetic peptide; note = XENP019522 vlCDR2
GAFSRAT

SEQ ID NO: 5318 - protein, 9 aa, synthetic construct
  source 1..9: note = Description of Artificial Sequence: Synthetic peptide; note = XENP019522 vlCDR3
QQYGKSPWT

SEQ ID NO: 5319 - protein, 221 aa, synthetic construct; identical to SEQ ID NO: 2919
  source 1..221: note = Description of Artificial Sequence: Synthetic polypeptide; note = XENP019523 [CTLA-4]_H0_L0.104_Fab Heavy Chain

SEQ ID NO: 5320 - protein, 118 aa, synthetic construct; identical to SEQ ID NO: 22
  source 1..118: note = Description of Artificial Sequence: Synthetic polypeptide; note = VH of XENP019523

SEQ ID NO: 5321 - protein, 5 aa, synthetic construct
  source 1..5: note = Description of Artificial Sequence: Synthetic peptide; note = XENP019523 vhCDR1
SYTMH

SEQ ID NO: 5322 - protein, 17 aa, synthetic construct
  source 1..17: note = Description of Artificial Sequence: Synthetic peptide; note = XENP019523 vhCDR2
FISYDGNNKYYADSVKG

SEQ ID NO: 5323 - protein, 9 aa, synthetic construct
  source 1..9: note = Description of Artificial Sequence: Synthetic peptide; note = XENP019523 vhCDR3
TGWLGPFDY

SEQ ID NO: 5324 - protein, 215 aa, synthetic construct
  source 1..215: note = Description of Artificial Sequence: Synthetic polypeptide; note = XENP019523 [CTLA-4]_H0_L0.104_Fab Light Chain
EIVLTQSPGTLSLSPGERATLSCRASQSVGSSYLAWYQQKPGQAPRLLIYGAFSRATGIPDRFSGSGSGTDFTLTISRLEPEDFAVYYCQQYGSYPWTFGQGTKVEIKRTVAAPSVFIFPPSDEQLKSGTASVVCLLNNFYPREAKVQWKVDNALQSGNSQESVTEQDSKDSTYSLSSTLTLSKADYEKHKVYACEVTHQGLSSPVTKSFNRGEC

SEQ ID NO: 5325 - protein, 108 aa, synthetic construct; identical to SEQ ID NO: 2345
  source 1..108: note = Description of Artificial Sequence: Synthetic polypeptide; note = VL of XENP019523

SEQ ID NO: 5326 - protein, 12 aa, synthetic construct
  source 1..12: note = Description of Artificial Sequence: Synthetic peptide; note = XENP019523 vlCDR1
RASQSVGSSYLA

SEQ ID NO: 5327 - protein, 7 aa, synthetic construct
  source 1..7: note = Description of Artificial Sequence: Synthetic peptide; note = XENP019523 vlCDR2
GAFSRAT

SEQ ID NO: 5328 - protein, 9 aa, synthetic construct
  source 1..9: note = Description of Artificial Sequence: Synthetic peptide; note = XENP019523 vlCDR3
QQYGSYPWT

SEQ ID NO: 5329 - protein, 221 aa, synthetic construct; identical to SEQ ID NO: 2919
  source 1..221: note = Description of Artificial Sequence: Synthetic polypeptide; note = XENP019524 [CTLA-4]_H0_L0.105_Fab Heavy Chain

SEQ ID NO: 5330 - protein, 118 aa, synthetic construct; identical to SEQ ID NO: 22
  source 1..118: note = Description of Artificial Sequence: Synthetic polypeptide; note = VH of XENP019524

SEQ ID NO: 5331 - protein, 5 aa, synthetic construct
  source 1..5: note = Description of Artificial Sequence: Synthetic peptide; note = XENP019524 vhCDR1
SYTMH

SEQ ID NO: 5332 - protein, 17 aa, synthetic construct
  source 1..17: note = Description of Artificial Sequence: Synthetic peptide; note = XENP019524 vhCDR2
FISYDGNNKYYADSVKG

SEQ ID NO: 5333 - protein, 9 aa, synthetic construct
  source 1..9: note = Description of Artificial Sequence: Synthetic peptide; note = XENP019524 vhCDR3
TGWLGPFDY

SEQ ID NO: 5334 - protein, 215 aa, synthetic construct
  source 1..215: note = Description of Artificial Sequence: Synthetic polypeptide; note = XENP019524 [CTLA-4]_H0_L0.105_Fab Light Chain
EIVLTQSPGTLSLSPGERATLSCRASQSVGSSYLAWYQQKPGQAPRLLIYGAFSRATGIPDRFSGSGSGTDFTLTISRLEPEDFAVYYCQQYGSSHWTFGQGTKVEIKRTVAAPSVFIFPPSDEQLKSGTASVVCLLNNFYPREAKVQWKVDNALQSGNSQESVTEQDSKDSTYSLSSTLTLSKADYEKHKVYACEVTHQGLSSPVTKSFNRGEC

SEQ ID NO: 5335 - protein, 108 aa, synthetic construct; identical to SEQ ID NO: 2354
  source 1..108: note = Description of Artificial Sequence: Synthetic polypeptide; note = VL of XENP019524

SEQ ID NO: 5336 - protein, 12 aa, synthetic construct
  source 1..12: note = Description of Artificial Sequence: Synthetic peptide; note = XENP019524 vlCDR1
RASQSVGSSYLA

SEQ ID NO: 5337 - protein, 7 aa, synthetic construct
  source 1..7: note = Description of Artificial Sequence: Synthetic peptide; note = XENP019524 vlCDR2
GAFSRAT

SEQ ID NO: 5338 - protein, 9 aa, synthetic construct
  source 1..9: note = Description of Artificial Sequence: Synthetic peptide; note = XENP019524 vlCDR3
QQYGSSHWT

SEQ ID NO: 5339 - protein, 221 aa, synthetic construct; identical to SEQ ID NO: 2919
  source 1..221: note = Description of Artificial Sequence: Synthetic polypeptide; note = XENP019525 [CTLA-4]_H0_L0.106_Fab Heavy Chain

SEQ ID NO: 5340 - protein, 118 aa, synthetic construct; identical to SEQ ID NO: 22
  source 1..118: note = Description of Artificial Sequence: Synthetic polypeptide; note = VH of XENP019525

SEQ ID NO: 5341 - protein, 5 aa, synthetic construct
  source 1..5: note = Description of Artificial Sequence: Synthetic peptide; note = XENP019525 vhCDR1
SYTMH

SEQ ID NO: 5342 - protein, 17 aa, synthetic construct
  source 1..17: note = Description of Artificial Sequence: Synthetic peptide; note = XENP019525 vhCDR2
FISYDGNNKYYADSVKG

SEQ ID NO: 5343 - protein, 9 aa, synthetic construct
  source 1..9: note = Description of Artificial Sequence: Synthetic peptide; note = XENP019525 vhCDR3
TGWLGPFDY

SEQ ID NO: 5344 - protein, 215 aa, synthetic construct
  source 1..215: note = Description of Artificial Sequence: Synthetic polypeptide; note = XENP019525 [CTLA-4]_H0_L0.106_Fab Light Chain
EIVLTQSPGTLSLSPGERATLSCRASQSVGSSYLAWYQQKPGQAPRLLIYGAFSRATGIPDRFSGSGSGTDFTLTISRLEPEDFAVYYCQQYGSSPFTFGQGTKVEIKRTVAAPSVFIFPPSDEQLKSGTASVVCLLNNFYPREAKVQWKVDNALQSGNSQESVTEQDSKDSTYSLSSTLTLSKADYEKHKVYACEVTHQGLSSPVTKSFNRGEC

SEQ ID NO: 5345 - protein, 108 aa, synthetic construct; identical to SEQ ID NO: 2363
  source 1..108: note = Description of Artificial Sequence: Synthetic polypeptide; note = VL of XENP019525

SEQ ID NO: 5346 - protein, 12 aa, synthetic construct
  source 1..12: note = Description of Artificial Sequence: Synthetic peptide; note = XENP019525 vlCDR1
RASQSVGSSYLA

SEQ ID NO: 5347 - protein, 7 aa, synthetic construct
  source 1..7: note = Description of Artificial Sequence: Synthetic peptide; note = XENP019525 vlCDR2
GAFSRAT

SEQ ID NO: 5348 - protein, 9 aa, synthetic construct
  source 1..9: note = Description of Artificial Sequence: Synthetic peptide; note = XENP019525 vlCDR3
QQYGSSPFT

SEQ ID NO: 5349 - protein, 221 aa, synthetic construct; identical to SEQ ID NO: 2919
  source 1..221: note = Description of Artificial Sequence: Synthetic polypeptide; note = XENP019526 [CTLA-4]_H0_L0.107_Fab Heavy Chain

SEQ ID NO: 5350 - protein, 118 aa, synthetic construct; identical to SEQ ID NO: 22
  source 1..118: note = Description of Artificial Sequence: Synthetic polypeptide; note = VH of XENP019526

SEQ ID NO: 5351 - protein, 5 aa, synthetic construct
  source 1..5: note = Description of Artificial Sequence: Synthetic peptide; note = XENP019526 vhCDR1
SYTMH

SEQ ID NO: 5352 - protein, 17 aa, synthetic construct
  source 1..17: note = Description of Artificial Sequence: Synthetic peptide; note = XENP019526 vhCDR2
FISYDGNNKYYADSVKG

SEQ ID NO: 5353 - protein, 9 aa, synthetic construct
  source 1..9: note = Description of Artificial Sequence: Synthetic peptide; note = XENP019526 vhCDR3
TGWLGPFDY

SEQ ID NO: 5354 - protein, 215 aa, synthetic construct
  source 1..215: note = Description of Artificial Sequence: Synthetic polypeptide; note = XENP019526 [CTLA-4]_H0_L0.107_Fab Light Chain
EIVLTQSPGTLSLSPGERATLSCRASQSVGSSYLAWYQQKPGQAPRLLIYGAFSRATGIPDRFSGSGSGTDFTLTISRLEPEDFAVYYCQQYGSSPHTFGQGTKVEIKRTVAAPSVFIFPPSDEQLKSGTASVVCLLNNFYPREAKVQWKVDNALQSGNSQESVTEQDSKDSTYSLSSTLTLSKADYEKHKVYACEVTHQGLSSPVTKSFNRGEC

SEQ ID NO: 5355 - protein, 108 aa, synthetic construct; identical to SEQ ID NO: 2372
  source 1..108: note = Description of Artificial Sequence: Synthetic polypeptide; note = VL of XENP019526

SEQ ID NO: 5356 - protein, 12 aa, synthetic construct
  source 1..12: note = Description of Artificial Sequence: Synthetic peptide; note = XENP019526 vlCDR1
RASQSVGSSYLA

SEQ ID NO: 5357 - protein, 7 aa, synthetic construct
  source 1..7: note = Description of Artificial Sequence: Synthetic peptide; note = XENP019526 vlCDR2
GAFSRAT

SEQ ID NO: 5358 - protein, 9 aa, synthetic construct
  source 1..9: note = Description of Artificial Sequence: Synthetic peptide; note = XENP019526 vlCDR3
QQYGSSPHT

SEQ ID NO: 5359 - protein, 221 aa, synthetic construct; identical to SEQ ID NO: 2919
  source 1..221: note = Description of Artificial Sequence: Synthetic polypeptide; note = XENP019527 [CTLA-4]_H0_L0.108_Fab Heavy Chain

SEQ ID NO: 5360 - protein, 118 aa, synthetic construct; identical to SEQ ID NO: 22
  source 1..118: note = Description of Artificial Sequence: Synthetic polypeptide; note = VH of XENP019527

SEQ ID NO: 5361 - protein, 5 aa, synthetic construct
  source 1..5: note = Description of Artificial Sequence: Synthetic peptide; note = XENP019527 vhCDR1
SYTMH

SEQ ID NO: 5362 - protein, 17 aa, synthetic construct
  source 1..17: note = Description of Artificial Sequence: Synthetic peptide; note = XENP019527 vhCDR2
FISYDGNNKYYADSVKG

SEQ ID NO: 5363 - protein, 9 aa, synthetic construct
  source 1..9: note = Description of Artificial Sequence: Synthetic peptide; note = XENP019527 vhCDR3
TGWLGPFDY

SEQ ID NO: 5364 - protein, 215 aa, synthetic construct
  source 1..215: note = Description of Artificial Sequence: Synthetic polypeptide; note = XENP019527 [CTLA-4]_H0_L0.108_Fab Light Chain
EIVLTQSPGTLSLSPGERATLSCRASQSVGSSYLAWYQQKPGQAPRLLIYGAFSRATGIPDRFSGSGSGTDFTLTISRLEPEDFAVYYCQQYGSSPITFGQGTKVEIKRTVAAPSVFIFPPSDEQLKSGTASVVCLLNNFYPREAKVQWKVDNALQSGNSQESVTEQDSKDSTYSLSSTLTLSKADYEKHKVYACEVTHQGLSSPVTKSFNRGEC

SEQ ID NO: 5365 - protein, 108 aa, synthetic construct; identical to SEQ ID NO: 2381
  source 1..108: note = Description of Artificial Sequence: Synthetic polypeptide; note = VL of XENP019527

SEQ ID NO: 5366 - protein, 12 aa, synthetic construct
  source 1..12: note = Description of Artificial Sequence: Synthetic peptide; note = XENP019527 vlCDR1
RASQSVGSSYLA

SEQ ID NO: 5367 - protein, 7 aa, synthetic construct
  source 1..7: note = Description of Artificial Sequence: Synthetic peptide; note = XENP019527 vlCDR2
GAFSRAT

SEQ ID NO: 5368 - protein, 9 aa, synthetic construct
  source 1..9: note = Description of Artificial Sequence: Synthetic peptide; note = XENP019527 vlCDR3
QQYGSSPIT

SEQ ID NO: 5369 - protein, 221 aa, synthetic construct; identical to SEQ ID NO: 2919
  source 1..221: note = Description of Artificial Sequence: Synthetic polypeptide; note = XENP019528 [CTLA-4]_H0_L0.109_Fab Heavy Chain

SEQ ID NO: 5370 - protein, 118 aa, synthetic construct; identical to SEQ ID NO: 22
  source 1..118: note = Description of Artificial Sequence: Synthetic polypeptide; note = VH of XENP019528

SEQ ID NO: 5371 - protein, 5 aa, synthetic construct
  source 1..5: note = Description of Artificial Sequence: Synthetic peptide; note = XENP019528 vhCDR1
SYTMH

SEQ ID NO: 5372 - protein, 17 aa, synthetic construct
  source 1..17: note = Description of Artificial Sequence: Synthetic peptide; note = XENP019528 vhCDR2
FISYDGNNKYYADSVKG

SEQ ID NO: 5373 - protein, 9 aa, synthetic construct
  source 1..9: note = Description of Artificial Sequence: Synthetic peptide; note = XENP019528 vhCDR3
TGWLGPFDY

SEQ ID NO: 5374 - protein, 215 aa, synthetic construct
  source 1..215: note = Description of Artificial Sequence: Synthetic polypeptide; note = XENP019528 [CTLA-4]_H0_L0.109_Fab Light Chain
EIVLTQSPGTLSLSPGERATLSCRASQSVGSSYLAWYQQKPGQAPRLLIYGAFSRATGIPDRFSGSGSGTDFTLTISRLEPEDFAVYYCQQYGSSPLTFGQGTKVEIKRTVAAPSVFIFPPSDEQLKSGTASVVCLLNNFYPREAKVQWKVDNALQSGNSQESVTEQDSKDSTYSLSSTLTLSKADYEKHKVYACEVTHQGLSSPVTKSFNRGEC

SEQ ID NO: 5375 - protein, 108 aa, synthetic construct; identical to SEQ ID NO: 2390
  source 1..108: note = Description of Artificial Sequence: Synthetic polypeptide; note = VL of XENP019528

SEQ ID NO: 5376 - protein, 12 aa, synthetic construct
  source 1..12: note = Description of Artificial Sequence: Synthetic peptide; note = XENP019528 vlCDR1
RASQSVGSSYLA

SEQ ID NO: 5377 - protein, 7 aa, synthetic construct
  source 1..7: note = Description of Artificial Sequence: Synthetic peptide; note = XENP019528 vlCDR2
GAFSRAT

SEQ ID NO: 5378 - protein, 9 aa, synthetic construct
  source 1..9: note = Description of Artificial Sequence: Synthetic peptide; note = XENP019528 vlCDR3
QQYGSSPLT

SEQ ID NO: 5379 - protein, 221 aa, synthetic construct; identical to SEQ ID NO: 2919
  source 1..221: note = Description of Artificial Sequence: Synthetic polypeptide; note = XENP019529 [CTLA-4]_H0_L0.110_Fab Heavy Chain

SEQ ID NO: 5380 - protein, 118 aa, synthetic construct; identical to SEQ ID NO: 22
  source 1..118: note = Description of Artificial Sequence: Synthetic polypeptide; note = VH of XENP019529

SEQ ID NO: 5381 - protein, 5 aa, synthetic construct
  source 1..5: note = Description of Artificial Sequence: Synthetic peptide; note = XENP019529 vhCDR1
SYTMH

SEQ ID NO: 5382 - protein, 17 aa, synthetic construct
  source 1..17: note = Description of Artificial Sequence: Synthetic peptide; note = XENP019529 vhCDR2
FISYDGNNKYYADSVKG

SEQ ID NO: 5383 - protein, 9 aa, synthetic construct
  source 1..9: note = Description of Artificial Sequence: Synthetic peptide; note = XENP019529 vhCDR3
TGWLGPFDY

SEQ ID NO: 5384 - protein, 215 aa, synthetic construct
  source 1..215: note = Description of Artificial Sequence: Synthetic polypeptide; note = XENP019529 [CTLA-4]_H0_L0.110_Fab Light Chain
EIVLTQSPGTLSLSPGERATLSCRASQSVGSSYLAWYQQKPGQAPRLLIYGAFSRATGIPDRFSGSGSGTDFTLTISRLEPEDFAVYYCQQYGSSPYTFGQGTKVEIKRTVAAPSVFIFPPSDEQLKSGTASVVCLLNNFYPREAKVQWKVDNALQSGNSQESVTEQDSKDSTYSLSSTLTLSKADYEKHKVYACEVTHQGLSSPVTKSFNRGEC

SEQ ID NO: 5385 - protein, 108 aa, synthetic construct; identical to SEQ ID NO: 2399
  source 1..108: note = Description of Artificial Sequence: Synthetic polypeptide; note = VL of XENP019529

SEQ ID NO: 5386 - protein, 12 aa, synthetic construct
  source 1..12: note = Description of Artificial Sequence: Synthetic peptide; note = XENP019529 vlCDR1
RASQSVGSSYLA

SEQ ID NO: 5387 - protein, 7 aa, synthetic construct
  source 1..7: note = Description of Artificial Sequence: Synthetic peptide; note = XENP019529 vlCDR2
GAFSRAT

SEQ ID NO: 5388 - protein, 9 aa, synthetic construct
  source 1..9: note = Description of Artificial Sequence: Synthetic peptide; note = XENP019529 vlCDR3
QQYGSSPYT

SEQ ID NO: 5389 - protein, 221 aa, synthetic construct; identical to SEQ ID NO: 2919
  source 1..221: note = Description of Artificial Sequence: Synthetic polypeptide; note = XENP019530 [CTLA-4]_H0_L0.111_Fab Heavy Chain

SEQ ID NO: 5390 - protein, 118 aa, synthetic construct; identical to SEQ ID NO: 22
  source 1..118: note = Description of Artificial Sequence: Synthetic polypeptide; note = VH of XENP019530

SEQ ID NO: 5391 - protein, 5 aa, synthetic construct
  source 1..5: note = Description of Artificial Sequence: Synthetic peptide; note = XENP019530 vhCDR1
SYTMH

SEQ ID NO: 5392 - protein, 17 aa, synthetic construct
  source 1..17: note = Description of Artificial Sequence: Synthetic peptide; note = XENP019530 vhCDR2
FISYDGNNKYYADSVKG

SEQ ID NO: 5393 - protein, 9 aa, synthetic construct
  source 1..9: note = Description of Artificial Sequence: Synthetic peptide; note = XENP019530 vhCDR3
TGWLGPFDY

SEQ ID NO: 5394 - protein, 215 aa, synthetic construct
  source 1..215: note = Description of Artificial Sequence: Synthetic polypeptide; note = XENP019530 [CTLA-4]_H0_L0.111_Fab Light Chain
EIVLTQSPGTLSLSPGERATLSCRASQSVGSSYLAWYQQKPGQAPRLLIYGAFSRATGIPDRFSGSGSGTDFTLTISRLEPEDFAVYYCQQYGSSPWVFGQGTKVEIKRTVAAPSVFIFPPSDEQLKSGTASVVCLLNNFYPREAKVQWKVDNALQSGNSQESVTEQDSKDSTYSLSSTLTLSKADYEKHKVYACEVTHQGLSSPVTKSFNRGEC

SEQ ID NO: 5395 - protein, 108 aa, synthetic construct; identical to SEQ ID NO: 2408
  source 1..108: note = Description of Artificial Sequence: Synthetic polypeptide; note = VL of XENP019530

SEQ ID NO: 5396 - protein, 12 aa, synthetic construct
  source 1..12: note = Description of Artificial Sequence: Synthetic peptide; note = XENP019530 vlCDR1
RASQSVGSSYLA

SEQ ID NO: 5397 - protein, 7 aa, synthetic construct
  source 1..7: note = Description of Artificial Sequence: Synthetic peptide; note = XENP019530 vlCDR2
GAFSRAT

SEQ ID NO: 5398 - protein, 9 aa, synthetic construct
  source 1..9: note = Description of Artificial Sequence: Synthetic peptide; note = XENP019530 vlCDR3
QQYGSSPWV

SEQ ID NO: 5399 - protein, 221 aa, synthetic construct; identical to SEQ ID NO: 2919
  source 1..221: note = Description of Artificial Sequence: Synthetic polypeptide; note = XENP019531 [CTLA-4]_H0_L0.112_Fab Heavy Chain

SEQ ID NO: 5400 - protein, 118 aa, synthetic construct; identical to SEQ ID NO: 22
  source 1..118: note = Description of Artificial Sequence: Synthetic polypeptide; note = VH of XENP019531

SEQ ID NO: 5401 - protein, 5 aa, synthetic construct
  source 1..5: note = Description of Artificial Sequence: Synthetic peptide; note = XENP019531 vhCDR1
SYTMH

SEQ ID NO: 5402 - protein, 17 aa, synthetic construct
  source 1..17: note = Description of Artificial Sequence: Synthetic peptide; note = XENP019531 vhCDR2
FISYDGNNKYYADSVKG

SEQ ID NO: 5403 - protein, 9 aa, synthetic construct
  source 1..9: note = Description of Artificial Sequence: Synthetic peptide; note = XENP019531 vhCDR3
TGWLGPFDY

SEQ ID NO: 5404 - protein, 215 aa, synthetic construct
  source 1..215: note = Description of Artificial Sequence: Synthetic polypeptide; note = XENP019531 [CTLA-4]_H0_L0.112_Fab Light Chain
EIVLTQSPGTLSLSPGERATLSCRASQSVGSSYLAWYQQKPGQAPRLLIYGAFSRATGIPDRFSGSGSGTDFTLTISRLEPEDFAVYYCQQYGSSPWTFGGGTKVEIKRTVAAPSVFIFPPSDEQLKSGTASVVCLLNNFYPREAKVQWKVDNALQSGNSQESVTEQDSKDSTYSLSSTLTLSKADYEKHKVYACEVTHQGLSSPVTKSFNRGEC

SEQ ID NO: 5405 - protein, 108 aa, synthetic construct; identical to SEQ ID NO: 2417
  source 1..108: note = Description of Artificial Sequence: Synthetic polypeptide; note = VL of XENP019531

SEQ ID NO: 5406 - protein, 12 aa, synthetic construct
  source 1..12: note = Description of Artificial Sequence: Synthetic peptide; note = XENP019531 vlCDR1
RASQSVGSSYLA

SEQ ID NO: 5407 - protein, 7 aa, synthetic construct
  source 1..7: note = Description of Artificial Sequence: Synthetic peptide; note = XENP019531 vlCDR2
GAFSRAT

SEQ ID NO: 5408 - protein, 9 aa, synthetic construct
  source 1..9: note = Description of Artificial Sequence: Synthetic peptide; note = XENP019531 vlCDR3
QQYGSSPWT

SEQ ID NO: 5409 - protein, 221 aa, synthetic construct; identical to SEQ ID NO: 2919
  source 1..221: note = Description of Artificial Sequence: Synthetic polypeptide; note = XENP019532 [CTLA-4]_H0_L0.113_Fab Heavy Chain

SEQ ID NO: 5410 - protein, 118 aa, synthetic construct; identical to SEQ ID NO: 22
  source 1..118: note = Description of Artificial Sequence: Synthetic polypeptide; note = VH of XENP019532

SEQ ID NO: 5411 - protein, 5 aa, synthetic construct
  source 1..5: note = Description of Artificial Sequence: Synthetic peptide; note = XENP019532 vhCDR1
SYTMH

SEQ ID NO: 5412 - protein, 17 aa, synthetic construct
  source 1..17: note = Description of Artificial Sequence: Synthetic peptide; note = XENP019532 vhCDR2
FISYDGNNKYYADSVKG

SEQ ID NO: 5413 - protein, 9 aa, synthetic construct
  source 1..9: note = Description of Artificial Sequence: Synthetic peptide; note = XENP019532 vhCDR3
TGWLGPFDY

SEQ ID NO: 5414 - protein, 215 aa, synthetic construct
  source 1..215: note = Description of Artificial Sequence: Synthetic polypeptide; note = XENP019532 [CTLA-4]_H0_L0.113_Fab Light Chain
EIVLTQSPGTLSLSPGERATLSCRASQSVGSSYLAWYQQKPGQAPRLLIYGAFSRATGIPDRFSGSGSGTDFTLTISRLEPEDFAVYYCQQYGSSPWTFGEGTKVEIKRTVAAPSVFIFPPSDEQLKSGTASVVCLLNNFYPREAKVQWKVDNALQSGNSQESVTEQDSKDSTYSLSSTLTLSKADYEKHKVYACEVTHQGLSSPVTKSFNRGEC

SEQ ID NO: 5415 - protein, 108 aa, synthetic construct; identical to SEQ ID NO: 59
  source 1..108: note = Description of Artificial Sequence: Synthetic polypeptide; note = VL of XENP019532

SEQ ID NO: 5416 - protein, 12 aa, synthetic construct
  source 1..12: note = Description of Artificial Sequence: Synthetic peptide; note = XENP019532 vlCDR1
RASQSVGSSYLA

SEQ ID NO: 5417 - protein, 7 aa, synthetic construct
  source 1..7: note = Description of Artificial Sequence: Synthetic peptide; note = XENP019532 vlCDR2
GAFSRAT

SEQ ID NO: 5418 - protein, 9 aa, synthetic construct
  source 1..9: note = Description of Artificial Sequence: Synthetic peptide; note = XENP019532 vlCDR3
QQYGSSPWT

SEQ ID NO: 5419 - protein, 221 aa, synthetic construct
  source 1..221: note = Description of Artificial Sequence: Synthetic polypeptide; note = XENP019544 [CTLA-4]_H1_L0_Fab Heavy Chain
EVQLVESGGGLVQPGGSLRLSCAASGFTFSSYTMHWVRQAPGKGLEWVTFISYDGNNKYYVDSVKGRFTISRDNAKNSLYLQMNSLRAEDTAVYYCARTGWLGPFDYWGQGTLVTVSSASTKGPSVFPLAPSSKSTSGGTAALGCLVKDYFPEPVTVSWNSGALTSGVHTFPAVLQSSGLYSLSSVVTVPSSSLGTQTYICNVNHKPSNTKVDKKVEPKSC

SEQ ID NO: 5420 - protein, 118 aa, synthetic construct; identical to SEQ ID NO: 121
  source 1..118: note = Description of Artificial Sequence: Synthetic polypeptide; note = VH of XENP019544

SEQ ID NO: 5421 - protein, 5 aa, synthetic construct
  source 1..5: note = Description of Artificial Sequence: Synthetic peptide; note = XENP019544 vhCDR1
SYTMH

SEQ ID NO: 5422 - protein, 17 aa, synthetic construct
  source 1..17: note = Description of Artificial Sequence: Synthetic peptide; note = XENP019544 vhCDR2
FISYDGNNKYYVDSVKG

SEQ ID NO: 5423 - protein, 9 aa, synthetic construct
  source 1..9: note = Description of Artificial Sequence: Synthetic peptide; note = XENP019544 vhCDR3
TGWLGPFDY

SEQ ID NO: 5424 - protein, 215 aa, synthetic construct; identical to SEQ ID NO: 2924
  source 1..215: note = Description of Artificial Sequence: Synthetic polypeptide; note = XENP019544 [CTLA-4]_H1_L0_Fab Light Chain

SEQ ID NO: 5425 - protein, 108 aa, synthetic construct; identical to SEQ ID NO: 23
  source 1..108: note = Description of Artificial Sequence: Synthetic polypeptide; note = VL of XENP019544

SEQ ID NO: 5426 - protein, 12 aa, synthetic construct
  source 1..12: note = Description of Artificial Sequence: Synthetic peptide; note = XENP019544 vlCDR1
RASQSVGSSYLA

SEQ ID NO: 5427 - protein, 7 aa, synthetic construct
  source 1..7: note = Description of Artificial Sequence: Synthetic peptide; note = XENP019544 vlCDR2
GAFSRAT

SEQ ID NO: 5428 - protein, 9 aa, synthetic construct
  source 1..9: note = Description of Artificial Sequence: Synthetic peptide; note = XENP019544 vlCDR3
QQYGSSPWT

SEQ ID NO: 5429 - protein, 221 aa, synthetic construct
  source 1..221: note = Description of Artificial Sequence: Synthetic polypeptide; note = XENP019545 [CTLA-4]_H2_L0_Fab Heavy Chain
EVQLVESGGGLVQPGGSLRLSCAASGFTFSSYTMHWVRQAPGKGLEWVTFISYDGNNKYYPGSVKGRFTISRENAKNSLYLQMNSLRAGDTAVYYCARTGWLGPFDYWGQGTLVTVSSASTKGPSVFPLAPSSKSTSGGTAALGCLVKDYFPEPVTVSWNSGALTSGVHTFPAVLQSSGLYSLSSVVTVPSSSLGTQTYICNVNHKPSNTKVDKKVEPKSC

SEQ ID NO: 5430 - protein, 118 aa, synthetic construct; identical to SEQ ID NO: 130
  source 1..118: note = Description of Artificial Sequence: Synthetic polypeptide; note = VH of XENP019545

SEQ ID NO: 5431 - protein, 5 aa, synthetic construct
  source 1..5: note = Description of Artificial Sequence: Synthetic peptide; note = XENP019545 vhCDR1
SYTMH

SEQ ID NO: 5432 - protein, 17 aa, synthetic construct
  source 1..17: note = Description of Artificial Sequence: Synthetic peptide; note = XENP019545 vhCDR2
FISYDGNNKYYPGSVKG

SEQ ID NO: 5433 - protein, 9 aa, synthetic construct
  source 1..9: note = Description of Artificial Sequence: Synthetic peptide; note = XENP019545 vhCDR3
TGWLGPFDY

SEQ ID NO: 5434 - protein, 215 aa, synthetic construct; identical to SEQ ID NO: 2924
  source 1..215: note = Description of Artificial Sequence: Synthetic polypeptide; note = XENP019545 [CTLA-4]_H2_L0_Fab Light Chain

SEQ ID NO: 5435 - protein, 108 aa, synthetic construct; identical to SEQ ID NO: 23
  source 1..108: note = Description of Artificial Sequence: Synthetic polypeptide; note = VL of XENP019545

SEQ ID NO: 5436 - protein, 12 aa, synthetic construct
  source 1..12: note = Description of Artificial Sequence: Synthetic peptide; note = XENP019545 vlCDR1
RASQSVGSSYLA

SEQ ID NO: 5437 - protein, 7 aa, synthetic construct
  source 1..7: note = Description of Artificial Sequence: Synthetic peptide; note = XENP019545 vlCDR2
GAFSRAT

SEQ ID NO: 5438 - protein, 9 aa, synthetic construct
  source 1..9: note = Description of Artificial Sequence: Synthetic peptide; note = XENP019545 vlCDR3
QQYGSSPWT

SEQ ID NO: 5439 - protein, 221 aa, synthetic construct
  source 1..221: note = Description of Artificial Sequence: Synthetic polypeptide; note = XENP019546 [CTLA-4]_H3_L0_Fab Heavy Chain
EVQLVESGGGLVKPGGSLRLSCAASGFTFSSYTMHWVRQAPGKGLEWVSFISYDGNNKYYADSVKGRFTISRDNAKNSLYLQMNSLRAEDTAVYYCARTGWLGPFDYWGQGTLVTVSSASTKGPSVFPLAPSSKSTSGGTAALGCLVKDYFPEPVTVSWNSGALTSGVHTFPAVLQSSGLYSLSSVVTVPSSSLGTQTYICNVNHKPSNTKVDKKVEPKSC

SEQ ID NO: 5440 - protein, 118 aa, synthetic construct; identical to SEQ ID NO: 139
  source 1..118: note = Description of Artificial Sequence: Synthetic polypeptide; note = VH of XENP019546

SEQ ID NO: 5441 - protein, 5 aa, synthetic construct
  source 1..5: note = Description of Artificial Sequence: Synthetic peptide; note = XENP019546 vhCDR1
SYTMH

SEQ ID NO: 5442 - protein, 17 aa, synthetic construct
  source 1..17: note = Description of Artificial Sequence: Synthetic peptide; note = XENP019546 vhCDR2
FISYDGNNKYYADSVKG

SEQ ID NO: 5443 - protein, 9 aa, synthetic construct
  source 1..9: note = Description of Artificial Sequence: Synthetic peptide; note = XENP019546 vhCDR3
TGWLGPFDY

SEQ ID NO: 5444 - protein, 215 aa, synthetic construct; identical to SEQ ID NO: 2924
  source 1..215: note = Description of Artificial Sequence: Synthetic polypeptide; note = XENP019546 [CTLA-4]_H3_L0_Fab Light Chain

SEQ ID NO: 5445 - protein, 108 aa, synthetic construct; identical to SEQ ID NO: 23
  source 1..108: note = Description of Artificial Sequence: Synthetic polypeptide; note = VL of XENP019546

SEQ ID NO: 5446 - protein, 12 aa, synthetic construct
  source 1..12: note = Description of Artificial Sequence: Synthetic peptide; note = XENP019546 vlCDR1
RASQSVGSSYLA

SEQ ID NO: 5447 - protein, 7 aa, synthetic construct
  source 1..7: note = Description of Artificial Sequence: Synthetic peptide; note = XENP019546 vlCDR2
GAFSRAT

SEQ ID NO: 5448 - protein, 9 aa, synthetic construct
  source 1..9: note = Description of Artificial Sequence: Synthetic peptide; note = XENP019546 vlCDR3
QQYGSSPWT

SEQ ID NO: 5449 - protein, 221 aa, synthetic construct
  source 1..221: note = Description of Artificial Sequence: Synthetic polypeptide; note = XENP019547 [CTLA-4]_H4_L0_Fab Heavy Chain
EVQLVESGGGLVQPGGSLRLSCAASGFTFSSYTMHWVRQAPGKGLEYVTFISYDGNNKYYADSVKGRFTISRDNSKNTLYLQMGSLRAEDMAVYYCARTGWLGPFDYWGQGTLVTVSSASTKGPSVFPLAPSSKSTSGGTAALGCLVKDYFPEPVTVSWNSGALTSGVHTFPAVLQSSGLYSLSSVVTVPSSSLGTQTYICNVNHKPSNTKVDKKVEPKSC

SEQ ID NO: 5450 - protein, 118 aa, synthetic construct; identical to SEQ ID NO: 148
  source 1..118: note = Description of Artificial Sequence: Synthetic polypeptide; note = VH of XENP019547

SEQ ID NO: 5451 - protein, 5 aa, synthetic construct
  source 1..5: note = Description of Artificial Sequence: Synthetic peptide; note = XENP019547 vhCDR1
SYTMH

SEQ ID NO: 5452 - protein, 17 aa, synthetic construct
  source 1..17: note = Description of Artificial Sequence: Synthetic peptide; note = XENP019547 vhCDR2
FISYDGNNKYYADSVKG

SEQ ID NO: 5453 - protein, 9 aa, synthetic construct
  source 1..9: note = Description of Artificial Sequence: Synthetic peptide; note = XENP019547 vhCDR3
TGWLGPFDY

SEQ ID NO: 5454 - protein, 215 aa, synthetic construct; identical to SEQ ID NO: 2924
  source 1..215: note = Description of Artificial Sequence: Synthetic polypeptide; note = XENP019547 [CTLA-4]_H4_L0_Fab Light Chain

SEQ ID NO: 5455 - protein, 108 aa, synthetic construct; identical to SEQ ID NO: 23
  source 1..108: note = Description of Artificial Sequence: Synthetic polypeptide; note = VL of XENP019547

SEQ ID NO: 5456 - protein, 12 aa, synthetic construct
  source 1..12: note = Description of Artificial Sequence: Synthetic peptide; note = XENP019547 vlCDR1
RASQSVGSSYLA

SEQ ID NO: 5457 - protein, 7 aa, synthetic construct
  source 1..7: note = Description of Artificial Sequence: Synthetic peptide; note = XENP019547 vlCDR2
GAFSRAT

SEQ ID NO: 5458 - protein, 9 aa, synthetic construct
  source 1..9: note = Description of Artificial Sequence: Synthetic peptide; note = XENP019547 vlCDR3
QQYGSSPWT

SEQ ID NO: 5459 - protein, 221 aa, synthetic construct; identical to SEQ ID NO: 2919
  source 1..221: note = Description of Artificial Sequence: Synthetic polypeptide; note = XENP019548 [CTLA-4]_H0_L1_Fab Heavy Chain

SEQ ID NO: 5460 - protein, 118 aa, synthetic construct; identical to SEQ ID NO: 22
  source 1..118: note = Description of Artificial Sequence: Synthetic polypeptide; note = VH of XENP019548

SEQ ID NO: 5461 - protein, 5 aa, synthetic construct
  source 1..5: note = Description of Artificial Sequence: Synthetic peptide; note = XENP019548 vhCDR1
SYTMH

SEQ ID NO: 5462 - protein, 17 aa, synthetic construct
  source 1..17: note = Description of Artificial Sequence: Synthetic peptide; note = XENP019548 vhCDR2
FISYDGNNKYYADSVKG

SEQ ID NO: 5463 - protein, 9 aa, synthetic construct
  source 1..9: note = Description of Artificial Sequence: Synthetic peptide; note = XENP019548 vhCDR3
TGWLGPFDY

SEQ ID NO: 5464 - protein, 215 aa, synthetic construct
  source 1..215: note = Description of Artificial Sequence: Synthetic polypeptide; note = XENP019548 [CTLA-4]_H0_L1_Fab Light Chain
EIVLTQSPATLSLSPGERATLSCGASQSVGSSYLAWYQQKPGLAPRLLIYGAFSRATGIPDRFSGSGSGTDFTLTISRLEPEDFAVYYCQQYGSSPWTFGQGTKVEIKRTVAAPSVFIFPPSDEQLKSGTASVVCLLNNFYPREAKVQWKVDNALQSGNSQESVTEQDSKDSTYSLSSTLTLSKADYEKHKVYACEVTHQGLSSPVTKSFNRGEC

SEQ ID NO: 5465 - protein, 108 aa, synthetic construct; identical to SEQ ID NO: 158
  source 1..108: note = Description of Artificial Sequence: Synthetic polypeptide; note = VL of XENP019548

SEQ ID NO: 5466 - protein, 12 aa, synthetic construct
  source 1..12: note = Description of Artificial Sequence: Synthetic peptide; note = XENP019548 vlCDR1
GASQSVGSSYLA

SEQ ID NO: 5467 - protein, 7 aa, synthetic construct
  source 1..7: note = Description of Artificial Sequence: Synthetic peptide; note = XENP019548 vlCDR2
GAFSRAT

SEQ ID NO: 5468 - protein, 9 aa, synthetic construct
  source 1..9: note = Description of Artificial Sequence: Synthetic peptide; note = XENP019548 vlCDR3
QQYGSSPWT

SEQ ID NO: 5469 - protein, 221 aa, synthetic construct; identical to SEQ ID NO: 2919
  source 1..221: note = Description of Artificial Sequence: Synthetic polypeptide; note = XENP019549 [CTLA-4]_H0_L2_Fab Heavy Chain

SEQ ID NO: 5470 - protein, 118 aa, synthetic construct; identical to SEQ ID NO: 22
  source 1..118: note = Description of Artificial Sequence: Synthetic polypeptide; note = VH of XENP019549

SEQ ID NO: 5471 - protein, 5 aa, synthetic construct
  source 1..5: note = Description of Artificial Sequence: Synthetic peptide; note = XENP019549 vhCDR1
SYTMH

SEQ ID NO: 5472 - protein, 17 aa, synthetic construct
  source 1..17: note = Description of Artificial Sequence: Synthetic peptide; note = XENP019549 vhCDR2
FISYDGNNKYYADSVKG

SEQ ID NO: 5473 - protein, 9 aa, synthetic construct
  source 1..9: note = Description of Artificial Sequence: Synthetic peptide; note = XENP019549 vhCDR3
TGWLGPFDY

SEQ ID NO: 5474 - protein, 215 aa, synthetic construct
  source 1..215: note = Description of Artificial Sequence: Synthetic polypeptide; note = XENP019549 [CTLA-4]_H0_L2_Fab Light Chain
EIVMTQSPATLSVSPGERATLSCRASQSVGSSYLAWYQQKPGQAPRLLIYGAFSRATGIPARFSGSGSGTEFTLTISSLQSEDFAVYYCQQYGSSPWTFGQGTKVEIKRTVAAPSVFIFPPSDEQLKSGTASVVCLLNNFYPREAKVQWKVDNALQSGNSQESVTEQDSKDSTYSLSSTLTLSKADYEKHKVYACEVTHQGLSSPVTKSFNRGEC

SEQ ID NO: 5475 - protein, 108 aa, synthetic construct; identical to SEQ ID NO: 167
  source 1..108: note = Description of Artificial Sequence: Synthetic polypeptide; note = VL of XENP019549

SEQ ID NO: 5476 - protein, 12 aa, synthetic construct
  source 1..12: note = Description of Artificial Sequence: Synthetic peptide; note = XENP019549 vlCDR1
RASQSVGSSYLA

SEQ ID NO: 5477 - protein, 7 aa, synthetic construct
  source 1..7: note = Description of Artificial Sequence: Synthetic peptide; note = XENP019549 vlCDR2
GAFSRAT

SEQ ID NO: 5478 - protein, 9 aa, synthetic construct
  source 1..9: note = Description of Artificial Sequence: Synthetic peptide; note = XENP019549 vlCDR3
QQYGSSPWT

SEQ ID NO: 5479 - protein, 221 aa, synthetic construct
  source 1..221: note = Description of Artificial Sequence: Synthetic polypeptide; note = XENP019585 [CTLA-4]_H0.140_L0_Fab Heavy Chain
QVQLVESGGGVVQPGRSLRLSCAASGFTFSSYTMHWVRQAPGKGLEWVCFISYDGNNKYYADSVKGRFTCSRDNSKNTLYLQMNSLRAEDTAIYYCARTGWLGPFDYWGQGTLVTVSSASTKGPSVFPLAPSSKSTSGGTAALGCLVKDYFPEPVTVSWNSGALTSGVHTFPAVLQSSGLYSLSSVVTVPSSSLGTQTYICNVNHKPSNTKVDKKVEPKSC

SEQ ID NO: 5480 - protein, 118 aa, synthetic construct; identical to SEQ ID NO: 175
  source 1..118: note = Description of Artificial Sequence: Synthetic polypeptide; note = VH of XENP019585

SEQ ID NO: 5481 - protein, 5 aa, synthetic construct
  source 1..5: note = Description of Artificial Sequence: Synthetic peptide; note = XENP019585 vhCDR1
SYTMH

SEQ ID NO: 5482 - protein, 17 aa, synthetic construct
  source 1..17: note = Description of Artificial Sequence: Synthetic peptide; note = XENP019585 vhCDR2
FISYDGNNKYYADSVKG

SEQ ID NO: 5483 - protein, 9 aa, synthetic construct
  source 1..9: note = Description of Artificial Sequence: Synthetic peptide; note = XENP019585 vhCDR3
TGWLGPFDY

SEQ ID NO: 5484 - protein, 215 aa, synthetic construct; identical to SEQ ID NO: 2924
  source 1..215: note = Description of Artificial Sequence: Synthetic polypeptide; note = XENP019585 [CTLA-4]_H0.140_L0_Fab Light Chain

SEQ ID NO: 5485 - protein, 108 aa, synthetic construct; identical to SEQ ID NO: 23
  source 1..108: note = Description of Artificial Sequence: Synthetic polypeptide; note = VL of XENP019585

SEQ ID NO: 5486 - protein, 12 aa, synthetic construct
  source 1..12: note = Description of Artificial Sequence: Synthetic peptide; note = XENP019585 vlCDR1
RASQSVGSSYLA

SEQ ID NO: 5487 - protein, 7 aa, synthetic construct
  source 1..7: note = Description of Artificial Sequence: Synthetic peptide; note = XENP019585 vlCDR2
GAFSRAT

SEQ ID NO: 5488 - protein, 9 aa, synthetic construct
  source 1..9: note = Description of Artificial Sequence: Synthetic peptide; note = XENP019585 vlCDR3
QQYGSSPWT

SEQ ID NO: 5489 - protein, 221 aa, synthetic construct; identical to SEQ ID NO: 2919
  source 1..221: note = Description of Artificial Sequence: Synthetic polypeptide; note = XENP019586 [CTLA-4]_H0_L0.117_Fab Heavy Chain

SEQ ID NO: 5490 - protein, 118 aa, synthetic construct; identical to SEQ ID NO: 22
  source 1..118: note = Description of Artificial Sequence: Synthetic polypeptide; note = VH of XENP019586

SEQ ID NO: 5491 - protein, 5 aa, synthetic construct
  source 1..5: note = Description of Artificial Sequence: Synthetic peptide; note = XENP019586 vhCDR1
SYTMH

SEQ ID NO: 5492 - protein, 17 aa, synthetic construct
  source 1..17: note = Description of Artificial Sequence: Synthetic peptide; note = XENP019586 vhCDR2
FISYDGNNKYYADSVKG

SEQ ID NO: 5493 - protein, 9 aa, synthetic construct
  source 1..9: note = Description of Artificial Sequence: Synthetic peptide; note = XENP019586 vhCDR3
TGWLGPFDY

SEQ ID NO: 5494 - protein, 215 aa, synthetic construct
  source 1..215: note = Description of Artificial Sequence: Synthetic polypeptide; note = XENP019586 [CTLA-4]_H0_L0.117_Fab Light Chain
EIVLTQSPGTLSLSPGERATLSCRASQSVGSSYLAWYQQKPGQAPRLLCYGAFSRATGIPDRFSCSGSGTDFTLTISRLEPEDFAVYYCQQYGSSPWTFGQGTKVEIKRTVAAPSVFIFPPSDEQLKSGTASVVCLLNNFYPREAKVQWKVDNALQSGNSQESVTEQDSKDSTYSLSSTLTLSKADYEKHKVYACEVTHQGLSSPVTKSFNRGEC

SEQ ID NO: 5495 - protein, 108 aa, synthetic construct; identical to SEQ ID NO: 185
  source 1..108: note = Description of Artificial Sequence: Synthetic polypeptide; note = VL of XENP019586

SEQ ID NO: 5496 - protein, 12 aa, synthetic construct
  source 1..12: note = Description of Artificial Sequence: Synthetic peptide; note = XENP019586 vlCDR1
RASQSVGSSYLA

SEQ ID NO: 5497 - protein, 7 aa, synthetic construct
  source 1..7: note = Description of Artificial Sequence: Synthetic peptide; note = XENP019586 vlCDR2
GAFSRAT

SEQ ID NO: 5498 - protein, 9 aa, synthetic construct
  source 1..9: note = Description of Artificial Sequence: Synthetic peptide; note = XENP019586 vlCDR3
QQYGSSPWT

SEQ ID NO: 5499 - protein, 221 aa, synthetic construct; identical to SEQ ID NO: 4259
  source 1..221: note = Description of Artificial Sequence: Synthetic polypeptide; note = XENP020006 [CTLA-4]_H0.134_L0.53_Fab Heavy Chain

SEQ ID NO: 5500 - protein, 118 aa, synthetic construct; identical to SEQ ID NO: 67
  source 1..118: note = Description of Artificial Sequence: Synthetic polypeptide; note = VH of XENP020006

SEQ ID NO: 5501 - protein, 5 aa, synthetic construct
  source 1..5: note = Description of Artificial Sequence: Synthetic peptide; note = XENP020006 vhCDR1
SYTMH

SEQ ID NO: 5502 - protein, 17 aa, synthetic construct
  source 1..17: note = Description of Artificial Sequence: Synthetic peptide; note = XENP020006 vhCDR2
FISYDGNNKYYADSVKG

SEQ ID NO: 5503 - protein, 9 aa, synthetic construct
  source 1..9: note = Description of Artificial Sequence: Synthetic peptide; note = XENP020006 vhCDR3
TGWLGPFDY

SEQ ID NO: 5504 - protein, 215 aa, synthetic construct; identical to SEQ ID NO: 4814
  source 1..215: note = Description of Artificial Sequence: Synthetic polypeptide; note = XENP020006 [CTLA-4]_H0.134_L0.53_Fab Light Chain

SEQ ID NO: 5505 - protein, 108 aa, synthetic construct; identical to SEQ ID NO: 77
  source 1..108: note = Description of Artificial Sequence: Synthetic polypeptide; note = VL of XENP020006

SEQ ID NO: 5506 - protein, 12 aa, synthetic construct
  source 1..12: note = Description of Artificial Sequence: Synthetic peptide; note = XENP020006 vlCDR1
RASQSVGSSYLA

SEQ ID NO: 5507 - protein, 7 aa, synthetic construct
  source 1..7: note = Description of Artificial Sequence: Synthetic peptide; note = XENP020006 vlCDR2
GAFSRAT

SEQ ID NO: 5508 - protein, 9 aa, synthetic construct
  source 1..9: note = Description of Artificial Sequence: Synthetic peptide; note = XENP020006 vlCDR3
QQYGSSPWT

SEQ ID NO: 5509 - protein, 221 aa, synthetic construct; identical to SEQ ID NO: 5439
  source 1..221: note = Description of Artificial Sequence: Synthetic polypeptide; note = XENP020007 [CTLA-4]_H3_L1_Fab Heavy Chain

SEQ ID NO: 5510 - protein, 118 aa, synthetic construct; identical to SEQ ID NO: 139
  source 1..118: note = Description of Artificial Sequence: Synthetic polypeptide; note = VH of XENP020007

SEQ ID NO: 5511 - protein, 5 aa, synthetic construct
  source 1..5: note = Description of Artificial Sequence: Synthetic peptide; note = XENP020007 vhCDR1
SYTMH

SEQ ID NO: 5512 - protein, 17 aa, synthetic construct
  source 1..17: note = Description of Artificial Sequence: Synthetic peptide; note = XENP020007 vhCDR2
FISYDGNNKYYADSVKG

SEQ ID NO: 5513 - protein, 9 aa, synthetic construct
  source 1..9: note = Description of Artificial Sequence: Synthetic peptide; note = XENP020007 vhCDR3
TGWLGPFDY

SEQ ID NO: 5514 - protein, 215 aa, synthetic construct; identical to SEQ ID NO: 5464
  source 1..215: note = Description of Artificial Sequence: Synthetic polypeptide; note = XENP020007 [CTLA-4]_H3_L1_Fab Light Chain

SEQ ID NO: 5515 - protein, 108 aa, synthetic construct; identical to SEQ ID NO: 158
  source 1..108: note = Description of Artificial Sequence: Synthetic polypeptide; note = VL of XENP020007

SEQ ID NO: 5516 - protein, 12 aa, synthetic construct
  source 1..12: note = Description of Artificial Sequence: Synthetic peptide; note = XENP020007 vlCDR1
GASQSVGSSYLA

SEQ ID NO: 5517 - protein, 7 aa, synthetic construct
  source 1..7: note = Description of Artificial Sequence: Synthetic peptide; note = XENP020007 vlCDR2
GAFSRAT

SEQ ID NO: 5518 - protein, 9 aa, synthetic construct
  source 1..9: note = Description of Artificial Sequence: Synthetic peptide; note = XENP020007 vlCDR3
QQYGSSPWT

SEQ ID NO: 5519 - protein, 221 aa, synthetic construct; identical to SEQ ID NO: 5439
  source 1..221: note = Description of Artificial Sequence: Synthetic polypeptide; note = XENP020008 [CTLA-4]_H3_L2_Fab Heavy Chain

SEQ ID NO: 5520 - protein, 118 aa, synthetic construct; identical to SEQ ID NO: 139
  source 1..118: note = Description of Artificial Sequence: Synthetic polypeptide; note = VH of XENP020008

SEQ ID NO: 5521 - protein, 5 aa, synthetic construct
  source 1..5: note = Description of Artificial Sequence: Synthetic peptide; note = XENP020008 vhCDR1
SYTMH

SEQ ID NO: 5522 - protein, 17 aa, synthetic construct
  source 1..17: note = Description of Artificial Sequence: Synthetic peptide; note = XENP020008 vhCDR2
FISYDGNNKYYADSVKG

SEQ ID NO: 5523 - protein, 9 aa, synthetic construct
  source 1..9: note = Description of Artificial Sequence: Synthetic peptide; note = XENP020008 vhCDR3
TGWLGPFDY

SEQ ID NO: 5524 - protein, 215 aa, synthetic construct; identical to SEQ ID NO: 5474
  source 1..215: note = Description of Artificial Sequence: Synthetic polypeptide; note = XENP020008 [CTLA-4]_H3_L2_Fab Light Chain

SEQ ID NO: 5525 - protein, 108 aa, synthetic construct; identical to SEQ ID NO: 167
  source 1..108: note = Description of Artificial Sequence: Synthetic polypeptide; note = VL of XENP020008

SEQ ID NO: 5526 - protein, 12 aa, synthetic construct
  source 1..12: note = Description of Artificial Sequence: Synthetic peptide; note = XENP020008 vlCDR1
RASQSVGSSYLA

SEQ ID NO: 5527 - protein, 7 aa, synthetic construct
  source 1..7: note = Description of Artificial Sequence: Synthetic peptide; note = XENP020008 vlCDR2
GAFSRAT

SEQ ID NO: 5528 - protein, 9 aa, synthetic construct
  source 1..9: note = Description of Artificial Sequence: Synthetic peptide; note = XENP020008 vlCDR3
QQYGSSPWT

SEQ ID NO: 5529 - protein, 221 aa, synthetic construct; identical to SEQ ID NO: 5439
  source 1..221: note = Description of Artificial Sequence: Synthetic polypeptide; note = XENP020009 [CTLA-4]_H3_L0.12_Fab Heavy Chain

SEQ ID NO: 5530 - protein, 118 aa, synthetic construct; identical to SEQ ID NO: 139
  source 1..118: note = Description of Artificial Sequence: Synthetic polypeptide; note = VH of XENP020009

SEQ ID NO: 5531 - protein, 5 aa, synthetic construct
  source 1..5: note = Description of Artificial Sequence: Synthetic peptide; note = XENP020009 vhCDR1
SYTMH

SEQ ID NO: 5532 - protein, 17 aa, synthetic construct
  source 1..17: note = Description of Artificial Sequence: Synthetic peptide; note = XENP020009 vhCDR2
FISYDGNNKYYADSVKG

SEQ ID NO: 5533 - protein, 9 aa, synthetic construct
  source 1..9: note = Description of Artificial Sequence: Synthetic peptide; note = XENP020009 vhCDR3
TGWLGPFDY

SEQ ID NO: 5534 - protein, 215 aa, synthetic construct; identical to SEQ ID NO: 4404
  source 1..215: note = Description of Artificial Sequence: Synthetic polypeptide; note = XENP020009 [CTLA-4]_H3_L0.12_Fab Light Chain

SEQ ID NO: 5535 - protein, 108 aa, synthetic construct; identical to SEQ ID NO: 1517
  source 1..108: note = Description of Artificial Sequence: Synthetic polypeptide; note = VL of XENP020009

SEQ ID NO: 5536 - protein, 12 aa, synthetic construct
  source 1..12: note = Description of Artificial Sequence: Synthetic peptide; note = XENP020009 vlCDR1
RASQSVGSSYLA

SEQ ID NO: 5537 - protein, 7 aa, synthetic construct
  source 1..7: note = Description of Artificial Sequence: Synthetic peptide; note = XENP020009 vlCDR2
GAFSRAT

SEQ ID NO: 5538 - protein, 9 aa, synthetic construct
  source 1..9: note = Description of Artificial Sequence: Synthetic peptide; note = XENP020009 vlCDR3
QQYGSSPWT

SEQ ID NO: 5539 - protein, 221 aa, synthetic construct; identical to SEQ ID NO: 5439
  source 1..221: note = Description of Artificial Sequence: Synthetic polypeptide; note = XENP020010 [CTLA-4]_H3_L0.18_Fab Heavy Chain

SEQ ID NO: 5540 - protein, 118 aa, synthetic construct; identical to SEQ ID NO: 139
  source 1..118: note = Description of Artificial Sequence: Synthetic polypeptide; note = VH of XENP020010

SEQ ID NO: 5541 - protein, 5 aa, synthetic construct
  source 1..5: note = Description of Artificial Sequence: Synthetic peptide; note = XENP020010 vhCDR1
SYTMH

SEQ ID NO: 5542 - protein, 17 aa, synthetic construct
  source 1..17: note = Description of Artificial Sequence: Synthetic peptide; note = XENP020010 vhCDR2
FISYDGNNKYYADSVKG

SEQ ID NO: 5543 - protein, 9 aa, synthetic construct
  source 1..9: note = Description of Artificial Sequence: Synthetic peptide; note = XENP020010 vhCDR3
TGWLGPFDY

SEQ ID NO: 5544 - protein, 215 aa, synthetic construct; identical to SEQ ID NO: 4464
  source 1..215: note = Description of Artificial Sequence: Synthetic polypeptide; note = XENP020010 [CTLA-4]_H3_L0.18_Fab Light Chain

SEQ ID NO: 5545 - protein, 108 aa, synthetic construct; identical to SEQ ID NO: 1571
  source 1..108: note = Description of Artificial Sequence: Synthetic polypeptide; note = VL of XENP020010

SEQ ID NO: 5546 - protein, 12 aa, synthetic construct
  source 1..12: note = Description of Artificial Sequence: Synthetic peptide; note = XENP020010 vlCDR1
RSSQSVGSSYLA

SEQ ID NO: 5547 - protein, 7 aa, synthetic construct
  source 1..7: note = Description of Artificial Sequence: Synthetic peptide; note = XENP020010 vlCDR2
GAFSRAT

SEQ ID NO: 5548 - protein, 9 aa, synthetic construct
  source 1..9: note = Description of Artificial Sequence: Synthetic peptide; note = XENP020010 vlCDR3
QQYGSSPWT

SEQ ID NO: 5549 - protein, 221 aa, synthetic construct; identical to SEQ ID NO: 5439
  source 1..221: note = Description of Artificial Sequence: Synthetic polypeptide; note = XENP020011 [CTLA-4]_H3_L0.22_Fab Heavy Chain

SEQ ID NO: 5550 - protein, 118 aa, synthetic construct; identical to SEQ ID NO: 139
  source 1..118: note = Description of Artificial Sequence: Synthetic polypeptide; note = VH of XENP020011

SEQ ID NO: 5551 - protein, 5 aa, synthetic construct
  source 1..5: note = Description of Artificial Sequence: Synthetic peptide; note = XENP020011 vhCDR1
SYTMH

SEQ ID NO: 5552 - protein, 17 aa, synthetic construct
  source 1..17: note = Description of Artificial Sequence: Synthetic peptide; note = XENP020011 vhCDR2
FISYDGNNKYYADSVKG

SEQ ID NO: 5553 - protein, 9 aa, synthetic construct
  source 1..9: note = Description of Artificial Sequence: Synthetic peptide; note = XENP020011 vhCDR3
TGWLGPFDY

SEQ ID NO: 5554 - protein, 215 aa, synthetic construct; identical to SEQ ID NO: 4504
  source 1..215: note = Description of Artificial Sequence: Synthetic polypeptide; note = XENP020011 [CTLA-4]_H3_L0.22_Fab Light Chain

SEQ ID NO: 5555 - protein, 108 aa, synthetic construct; identical to SEQ ID NO: 1607
  source 1..108: note = Description of Artificial Sequence: Synthetic polypeptide; note = VL of XENP020011

SEQ ID NO: 5556 - protein, 12 aa, synthetic construct
  source 1..12: note = Description of Artificial Sequence: Synthetic peptide; note = XENP020011 vlCDR1
RASQSVSSSYLA

SEQ ID NO: 5557 - protein, 7 aa, synthetic construct
  source 1..7: note = Description of Artificial Sequence: Synthetic peptide; note = XENP020011 vlCDR2
GAFSRAT

SEQ ID NO: 5558 - protein, 9 aa, synthetic construct
  source 1..9: note = Description of Artificial Sequence: Synthetic peptide; note = XENP020011 vlCDR3
QQYGSSPWT

SEQ ID NO: 5559 - protein, 221 aa, synthetic construct; identical to SEQ ID NO: 5439
  source 1..221: note = Description of Artificial Sequence: Synthetic polypeptide; note = XENP020012 [CTLA-4]_H3_L0.27_Fab Heavy Chain

SEQ ID NO: 5560 - protein, 118 aa, synthetic construct; identical to SEQ ID NO: 139
  source 1..118: note = Description of Artificial Sequence: Synthetic polypeptide; note = VH of XENP020012

SEQ ID NO: 5561 - protein, 5 aa, synthetic construct
  source 1..5: note = Description of Artificial Sequence: Synthetic peptide; note = XENP020012 vhCDR1
SYTMH

SEQ ID NO: 5562 - protein, 17 aa, synthetic construct
  source 1..17: note = Description of Artificial Sequence: Synthetic peptide; note = XENP020012 vhCDR2
FISYDGNNKYYADSVKG

SEQ ID NO: 5563 - protein, 9 aa, synthetic construct
  source 1..9: note = Description of Artificial Sequence: Synthetic peptide; note = XENP020012 vhCDR3
TGWLGPFDY

SEQ ID NO: 5564 - protein, 215 aa, synthetic construct; identical to SEQ ID NO: 4554
  source 1..215: note = Description of Artificial Sequence: Synthetic polypeptide; note = XENP020012 [CTLA-4]_H3_L0.27_Fab Light Chain

SEQ ID NO: 5565 - protein, 108 aa, synthetic construct; identical to SEQ ID NO: 1652
  source 1..108: note = Description of Artificial Sequence: Synthetic polypeptide; note = VL of XENP020012

SEQ ID NO: 5566 - protein, 12 aa, synthetic construct
  source 1..12: note = Description of Artificial Sequence: Synthetic peptide; note = XENP020012 vlCDR1
RASQSVGQSYLA

SEQ ID NO: 5567 - protein, 7 aa, synthetic construct
  source 1..7: note = Description of Artificial Sequence: Synthetic peptide; note = XENP020012 vlCDR2
GAFSRAT

SEQ ID NO: 5568 - protein, 9 aa, synthetic construct
  source 1..9: note = Description of Artificial Sequence: Synthetic peptide; note = XENP020012 vlCDR3
QQYGSSPWT

SEQ ID NO: 5569 - protein, 221 aa, synthetic construct; identical to SEQ ID NO: 5439
  source 1..221: note = Description of Artificial Sequence: Synthetic polypeptide; note = XENP020013 [CTLA-4]_H3_L0.32_Fab Heavy Chain

SEQ ID NO: 5570 - protein, 118 aa, synthetic construct; identical to SEQ ID NO: 139
  source 1..118: note = Description of Artificial Sequence: Synthetic polypeptide; note = VH of XENP020013

SEQ ID NO: 5571 - protein, 5 aa, synthetic construct
  source 1..5: note = Description of Artificial Sequence: Synthetic peptide; note = XENP020013 vhCDR1
SYTMH

SEQ ID NO: 5572 - protein, 17 aa, synthetic construct
  source 1..17: note = Description of Artificial Sequence: Synthetic peptide; note = XENP020013 vhCDR2
FISYDGNNKYYADSVKG

SEQ ID NO: 5573 - protein, 9 aa, synthetic construct
  source 1..9: note = Description of Artificial Sequence: Synthetic peptide; note = XENP020013 vhCDR3
TGWLGPFDY

SEQ ID NO: 5574 - protein, 215 aa, synthetic construct; identical to SEQ ID NO: 4604
  source 1..215: note = Description of Artificial Sequence: Synthetic polypeptide; note = XENP020013 [CTLA-4]_H3_L0.32_Fab Light Chain

SEQ ID NO: 5575 - protein, 108 aa, synthetic construct; identical to SEQ ID NO: 1697
  source 1..108: note = Description of Artificial Sequence: Synthetic polypeptide; note = VL of XENP020013

SEQ ID NO: 5576 - protein, 12 aa, synthetic construct
  source 1..12: note = Description of Artificial Sequence: Synthetic peptide; note = XENP020013 vlCDR1
RASQSVGSQYLA

SEQ ID NO: 5577 - protein, 7 aa, synthetic construct
  source 1..7: note = Description of Artificial Sequence: Synthetic peptide; note = XENP020013 vlCDR2
GAFSRAT

SEQ ID NO: 5578 - protein, 9 aa, synthetic construct
  source 1..9: note = Description of Artificial Sequence: Synthetic peptide; note = XENP020013 vlCDR3
QQYGSSPWT

SEQ ID NO: 5579 - protein, 221 aa, synthetic construct; identical to SEQ ID NO: 5439
  source 1..221: note = Description of Artificial Sequence: Synthetic polypeptide; note = XENP020014 [CTLA-4]_H3_L0.36_Fab Heavy Chain

SEQ ID NO: 5580 - protein, 118 aa, synthetic construct; identical to SEQ ID NO: 139
  source 1..118: note = Description of Artificial Sequence: Synthetic polypeptide; note = VH of XENP020014

SEQ ID NO: 5581 - protein, 5 aa, synthetic construct
  source 1..5: note = Description of Artificial Sequence: Synthetic peptide; note = XENP020014 vhCDR1
SYTMH

SEQ ID NO: 5582 - protein, 17 aa, synthetic construct
  source 1..17: note = Description of Artificial Sequence: Synthetic peptide; note = XENP020014 vhCDR2
FISYDGNNKYYADSVKG

SEQ ID NO: 5583 - protein, 9 aa, synthetic construct
  source 1..9: note = Description of Artificial Sequence: Synthetic peptide; note = XENP020014 vhCDR3
TGWLGPFDY

SEQ ID NO: 5584 - protein, 215 aa, synthetic construct; identical to SEQ ID NO: 4644
  source 1..215: note = Description of Artificial Sequence: Synthetic polypeptide; note = XENP020014 [CTLA-4]_H3_L0.36_Fab Light Chain

SEQ ID NO: 5585 - protein, 108 aa, synthetic construct; identical to SEQ ID NO: 1733
  source 1..108: note = Description of Artificial Sequence: Synthetic polypeptide; note = VL of XENP020014

SEQ ID NO: 5586 - protein, 12 aa, synthetic construct
  source 1..12: note = Description of Artificial Sequence: Synthetic peptide; note = XENP020014 vlCDR1
RASQSVGSSHLA

SEQ ID NO: 5587 - protein, 7 aa, synthetic construct
  source 1..7: note = Description of Artificial Sequence: Synthetic peptide; note = XENP020014 vlCDR2
GAFSRAT

SEQ ID NO: 5588 - protein, 9 aa, synthetic construct
  source 1..9: note = Description of Artificial Sequence: Synthetic peptide; note = XENP020014 vlCDR3
QQYGSSPWT

SEQ ID NO: 5589 - protein, 221 aa, synthetic construct; identical to SEQ ID NO: 5439
  source 1..221: note = Description of Artificial Sequence: Synthetic polypeptide; note = XENP020015 [CTLA-4]_H3_L0.37_Fab Heavy Chain

SEQ ID NO: 5590 - protein, 118 aa, synthetic construct; identical to SEQ ID NO: 139
  source 1..118: note = Description of Artificial Sequence: Synthetic polypeptide; note = VH of XENP020015

SEQ ID NO: 5591 - protein, 5 aa, synthetic construct
  source 1..5: note = Description of Artificial Sequence: Synthetic peptide; note = XENP020015 vhCDR1
SYTMH

SEQ ID NO: 5592 - protein, 17 aa, synthetic construct
  source 1..17: note = Description of Artificial Sequence: Synthetic peptide; note = XENP020015 vhCDR2
FISYDGNNKYYADSVKG

SEQ ID NO: 5593 - protein, 9 aa, synthetic construct
  source 1..9: note = Description of Artificial Sequence: Synthetic peptide; note = XENP020015 vhCDR3
TGWLGPFDY

SEQ ID NO: 5594 - protein, 215 aa, synthetic construct; identical to SEQ ID NO: 4654
  source 1..215: note = Description of Artificial Sequence: Synthetic polypeptide; note = XENP020015 [CTLA-4]_H3_L0.37_Fab Light Chain

SEQ ID NO: 5595 - protein, 108 aa, synthetic construct; identical to SEQ ID NO: 1742
  source 1..108: note = Description of Artificial Sequence: Synthetic polypeptide; note = VL of XENP020015

SEQ ID NO: 5596 - protein, 12 aa, synthetic construct
  source 1..12: note = Description of Artificial Sequence: Synthetic peptide; note = XENP020015 vlCDR1
RASQSVGSSLLA

SEQ ID NO: 5597 - protein, 7 aa, synthetic construct
  source 1..7: note = Description of Artificial Sequence: Synthetic peptide; note = XENP020015 vlCDR2
GAFSRAT

SEQ ID NO: 5598 - protein, 9 aa, synthetic construct
  source 1..9: note = Description of Artificial Sequence: Synthetic peptide; note = XENP020015 vlCDR3
QQYGSSPWT

SEQ ID NO: 5599 - protein, 221 aa, synthetic construct; identical to SEQ ID NO: 5439
  source 1..221: note = Description of Artificial Sequence: Synthetic polypeptide; note = XENP020016 [CTLA-4]_H3_L0.39_Fab Heavy Chain

SEQ ID NO: 5600 - protein, 118 aa, synthetic construct; identical to SEQ ID NO: 139
  source 1..118: note = Description of Artificial Sequence: Synthetic polypeptide; note = VH of XENP020016

SEQ ID NO: 5601 - protein, 5 aa, synthetic construct
  source 1..5: note = Description of Artificial Sequence: Synthetic peptide; note = XENP020016 vhCDR1
SYTMH

SEQ ID NO: 5602 - protein, 17 aa, synthetic construct
  source 1..17: note = Description of Artificial Sequence: Synthetic peptide; note = XENP020016 vhCDR2
FISYDGNNKYYADSVKG

SEQ ID NO: 5603 - protein, 9 aa, synthetic construct
  source 1..9: note = Description of Artificial Sequence: Synthetic peptide; note = XENP020016 vhCDR3
TGWLGPFDY

SEQ ID NO: 5604 - protein, 215 aa, synthetic construct; identical to SEQ ID NO: 4674
  source 1..215: note = Description of Artificial Sequence: Synthetic polypeptide; note = XENP020016 [CTLA-4]_H3_L0.39_Fab Light Chain

SEQ ID NO: 5605 - protein, 108 aa, synthetic construct; identical to SEQ ID NO: 1760
  source 1..108: note = Description of Artificial Sequence: Synthetic polypeptide; note = VL of XENP020016

SEQ ID NO: 5606 - protein, 12 aa, synthetic construct
  source 1..12: note = Description of Artificial Sequence: Synthetic peptide; note = XENP020016 vlCDR1
RASQSVGSSSLA

SEQ ID NO: 5607 - protein, 7 aa, synthetic construct
  source 1..7: note = Description of Artificial Sequence: Synthetic peptide; note = XENP020016 vlCDR2
GAFSRAT

SEQ ID NO: 5608 - protein, 9 aa, synthetic construct
  source 1..9: note = Description of Artificial Sequence: Synthetic peptide; note = XENP020016 vlCDR3
QQYGSSPWT

SEQ ID NO: 5609 - protein, 221 aa, synthetic construct; identical to SEQ ID NO: 5439
  source 1..221: note = Description of Artificial Sequence: Synthetic polypeptide; note = XENP020017 [CTLA-4]_H3_L0.41_Fab Heavy Chain

SEQ ID NO: 5610 - protein, 118 aa, synthetic construct; identical to SEQ ID NO: 139
  source 1..118: note = Description of Artificial Sequence: Synthetic polypeptide; note = VH of XENP020017

SEQ ID NO: 5611 - protein, 5 aa, synthetic construct
  source 1..5: note = Description of Artificial Sequence: Synthetic peptide; note = XENP020017 vhCDR1
SYTMH

SEQ ID NO: 5612 - protein, 17 aa, synthetic construct
  source 1..17: note = Description of Artificial Sequence: Synthetic peptide; note = XENP020017 vhCDR2
FISYDGNNKYYADSVKG

SEQ ID NO: 5613 - protein, 9 aa, synthetic construct
  source 1..9: note = Description of Artificial Sequence: Synthetic peptide; note = XENP020017 vhCDR3
TGWLGPFDY

SEQ ID NO: 5614 - protein, 215 aa, synthetic construct; identical to SEQ ID NO: 4694
  source 1..215: note = Description of Artificial Sequence: Synthetic polypeptide; note = XENP020017 [CTLA-4]_H3_L0.41_Fab Light Chain

SEQ ID NO: 5615 - protein, 108 aa, synthetic construct; identical to SEQ ID NO: 1778
  source 1..108: note = Description of Artificial Sequence: Synthetic polypeptide; note = VL of XENP020017

SEQ ID NO: 5616 - protein, 12 aa, synthetic construct
  source 1..12: note = Description of Artificial Sequence: Synthetic peptide; note = XENP020017 vlCDR1
RASQSVGSSYMA

SEQ ID NO: 5617 - protein, 7 aa, synthetic construct
  source 1..7: note = Description of Artificial Sequence: Synthetic peptide; note = XENP020017 vlCDR2
GAFSRAT

SEQ ID NO: 5618 - protein, 9 aa, synthetic construct
  source 1..9: note = Description of Artificial Sequence: Synthetic peptide; note = XENP020017 vlCDR3
QQYGSSPWT

SEQ ID NO: 5619 - protein, 221 aa, synthetic construct; identical to SEQ ID NO: 5439
  source 1..221: note = Description of Artificial Sequence: Synthetic polypeptide; note = XENP020018 [CTLA-4]_H3_L0.67_Fab Heavy Chain

SEQ ID NO: 5620 - protein, 118 aa, synthetic construct; identical to SEQ ID NO: 139
  source 1..118: note = Description of Artificial Sequence: Synthetic polypeptide; note = VH of XENP020018

SEQ ID NO: 5621 - protein, 5 aa, synthetic construct
  source 1..5: note = Description of Artificial Sequence: Synthetic peptide; note = XENP020018 vhCDR1
SYTMH

SEQ ID NO: 5622 - protein, 17 aa, synthetic construct
  source 1..17: note = Description of Artificial Sequence: Synthetic peptide; note = XENP020018 vhCDR2
FISYDGNNKYYADSVKG

SEQ ID NO: 5623 - protein, 9 aa, synthetic construct
  source 1..9: note = Description of Artificial Sequence: Synthetic peptide; note = XENP020018 vhCDR3
TGWLGPFDY

SEQ ID NO: 5624 - protein, 215 aa, synthetic construct; identical to SEQ ID NO: 4954
  source 1..215: note = Description of Artificial Sequence: Synthetic polypeptide; note = XENP020018 [CTLA-4]_H3_L0.67_Fab Light Chain

SEQ ID NO: 5625 - protein, 108 aa, synthetic construct; identical to SEQ ID NO: 2012
  source 1..108: note = Description of Artificial Sequence: Synthetic polypeptide; note = VL of XENP020018

SEQ ID NO: 5626 - protein, 12 aa, synthetic construct
  source 1..12: note = Description of Artificial Sequence: Synthetic peptide; note = XENP020018 vlCDR1
RASQSVGSSYLA

SEQ ID NO: 5627 - protein, 7 aa, synthetic construct
  source 1..7: note = Description of Artificial Sequence: Synthetic peptide; note = XENP020018 vlCDR2
DAFSRAT

SEQ ID NO: 5628 - protein, 9 aa, synthetic construct
  source 1..9: note = Description of Artificial Sequence: Synthetic peptide; note = XENP020018 vlCDR3
QQYGSSPWT

SEQ ID NO: 5629 - protein, 221 aa, synthetic construct; identical to SEQ ID NO: 5439
  source 1..221: note = Description of Artificial Sequence: Synthetic polypeptide; note = XENP020019 [CTLA-4]_H3_L0.69_Fab Heavy Chain

SEQ ID NO: 5630 - protein, 118 aa, synthetic construct; identical to SEQ ID NO: 139
  source 1..118: note = Description of Artificial Sequence: Synthetic polypeptide; note = VH of XENP020019

SEQ ID NO: 5631 - protein, 5 aa, synthetic construct
  source 1..5: note = Description of Artificial Sequence: Synthetic peptide; note = XENP020019 vhCDR1
SYTMH

SEQ ID NO: 5632 - protein, 17 aa, synthetic construct
  source 1..17: note = Description of Artificial Sequence: Synthetic peptide; note = XENP020019 vhCDR2
FISYDGNNKYYADSVKG

SEQ ID NO: 5633 - protein, 9 aa, synthetic construct
  source 1..9: note = Description of Artificial Sequence: Synthetic peptide; note = XENP020019 vhCDR3
TGWLGPFDY

SEQ ID NO: 5634 - protein, 215 aa, synthetic construct; identical to SEQ ID NO: 4974
  source 1..215: note = Description of Artificial Sequence: Synthetic polypeptide; note = XENP020019 [CTLA-4]_H3_L0.69_Fab Light Chain

SEQ ID NO: 5635 - protein, 108 aa, synthetic construct; identical to SEQ ID NO: 2030
  source 1..108: note = Description of Artificial Sequence: Synthetic polypeptide; note = VL of XENP020019

SEQ ID NO: 5636 - protein, 12 aa, synthetic construct
  source 1..12: note = Description of Artificial Sequence: Synthetic peptide; note = XENP020019 vlCDR1
RASQSVGSSYLA

SEQ ID NO: 5637 - protein, 7 aa, synthetic construct
  source 1..7: note = Description of Artificial Sequence: Synthetic peptide; note = XENP020019 vlCDR2
GVFSRAT

SEQ ID NO: 5638 - protein, 9 aa, synthetic construct
  source 1..9: note = Description of Artificial Sequence: Synthetic peptide; note = XENP020019 vlCDR3
QQYGSSPWT

SEQ ID NO: 5639 - protein, 221 aa, synthetic construct; identical to SEQ ID NO: 5439
  source 1..221: note = Description of Artificial Sequence: Synthetic polypeptide; note = XENP020020 [CTLA-4]_H3_L0.74_Fab Heavy Chain

SEQ ID NO: 5640 - protein, 118 aa, synthetic construct; identical to SEQ ID NO: 139
  source 1..118: note = Description of Artificial Sequence: Synthetic polypeptide; note = VH of XENP020020

SEQ ID NO: 5641 - protein, 5 aa, synthetic construct
  source 1..5: note = Description of Artificial Sequence: Synthetic peptide; note = XENP020020 vhCDR1
SYTMH

SEQ ID NO: 5642 - protein, 17 aa, synthetic construct
  source 1..17: note = Description of Artificial Sequence: Synthetic peptide; note = XENP020020 vhCDR2
FISYDGNNKYYADSVKG

SEQ ID NO: 5643 - protein, 9 aa, synthetic construct
  source 1..9: note = Description of Artificial Sequence: Synthetic peptide; note = XENP020020 vhCDR3
TGWLGPFDY

SEQ ID NO: 5644 - protein, 215 aa, synthetic construct; identical to SEQ ID NO: 5024
  source 1..215: note = Description of Artificial Sequence: Synthetic polypeptide; note = XENP020020 [CTLA-4]_H3_L0.74_Fab Light Chain

SEQ ID NO: 5645 - protein, 108 aa, synthetic construct; identical to SEQ ID NO: 2075
  source 1..108: note = Description of Artificial Sequence: Synthetic polypeptide; note = VL of XENP020020

SEQ ID NO: 5646 - protein, 12 aa, synthetic construct
  source 1..12: note = Description of Artificial Sequence: Synthetic peptide; note = XENP020020 vlCDR1
RASQSVGSSYLA

SEQ ID NO: 5647 - protein, 7 aa, synthetic construct
  source 1..7: note = Description of Artificial Sequence: Synthetic peptide; note = XENP020020 vlCDR2
GAYSRAT

SEQ ID NO: 5648 - protein, 9 aa, synthetic construct
  source 1..9: note = Description of Artificial Sequence: Synthetic peptide; note = XENP020020 vlCDR3
QQYGSSPWT

SEQ ID NO: 5649 - protein, 221 aa, synthetic construct; identical to SEQ ID NO: 5439
  source 1..221: note = Description of Artificial Sequence: Synthetic polypeptide; note = XENP020021 [CTLA-4]_H3_L0.75_Fab Heavy Chain

SEQ ID NO: 5650 - protein, 118 aa, synthetic construct; identical to SEQ ID NO: 139
  source 1..118: note = Description of Artificial Sequence: Synthetic polypeptide; note = VH of XENP020021

SEQ ID NO: 5651 - protein, 5 aa, synthetic construct
  source 1..5: note = Description of Artificial Sequence: Synthetic peptide; note = XENP020021 vhCDR1
SYTMH

SEQ ID NO: 5652 - protein, 17 aa, synthetic construct
  source 1..17: note = Description of Artificial Sequence: Synthetic peptide; note = XENP020021 vhCDR2
FISYDGNNKYYADSVKG

SEQ ID NO: 5653 - protein, 9 aa, synthetic construct
  source 1..9: note = Description of Artificial Sequence: Synthetic peptide; note = XENP020021 vhCDR3
TGWLGPFDY

SEQ ID NO: 5654 - protein, 215 aa, synthetic construct; identical to SEQ ID NO: 5034
  source 1..215: note = Description of Artificial Sequence: Synthetic polypeptide; note = XENP020021 [CTLA-4]_H3_L0.75_Fab Light Chain

SEQ ID NO: 5655 - protein, 108 aa, synthetic construct; identical to SEQ ID NO: 2084
  source 1..108: note = Description of Artificial Sequence: Synthetic polypeptide; note = VL of XENP020021

SEQ ID NO: 5656 - protein, 12 aa, synthetic construct
  source 1..12: note = Description of Artificial Sequence: Synthetic peptide; note = XENP020021 vlCDR1
RASQSVGSSYLA

SEQ ID NO: 5657 - protein, 7 aa, synthetic construct
  source 1..7: note = Description of Artificial Sequence: Synthetic peptide; note = XENP020021 vlCDR2
GAFARAT

SEQ ID NO: 5658 - protein, 9 aa, synthetic construct
  source 1..9: note = Description of Artificial Sequence: Synthetic peptide; note = XENP020021 vlCDR3
QQYGSSPWT

SEQ ID NO: 5659 - protein, 221 aa, synthetic construct; identical to SEQ ID NO: 5439
  source 1..221: note = Description of Artificial Sequence: Synthetic polypeptide; note = XENP020022 [CTLA-4]_H3_L0.103_Fab Heavy Chain

SEQ ID NO: 5660 - protein, 118 aa, synthetic construct; identical to SEQ ID NO: 139
  source 1..118: note = Description of Artificial Sequence: Synthetic polypeptide; note = VH of XENP020022

SEQ ID NO: 5661 - protein, 5 aa, synthetic construct
  source 1..5: note = Description of Artificial Sequence: Synthetic peptide; note = XENP020022 vhCDR1
SYTMH

SEQ ID NO: 5662 - protein, 17 aa, synthetic construct
  source 1..17: note = Description of Artificial Sequence: Synthetic peptide; note = XENP020022 vhCDR2
FISYDGNNKYYADSVKG

SEQ ID NO: 5663 - protein, 9 aa, synthetic construct
  source 1..9: note = Description of Artificial Sequence: Synthetic peptide; note = XENP020022 vhCDR3
TGWLGPFDY

SEQ ID NO: 5664 - protein, 215 aa, synthetic construct; identical to SEQ ID NO: 5314
  source 1..215: note = Description of Artificial Sequence: Synthetic polypeptide; note = XENP020022 [CTLA-4]_H3_L0.103_Fab Light Chain

SEQ ID NO: 5665 - protein, 108 aa, synthetic construct; identical to SEQ ID NO: 2336
  source 1..108: note = Description of Artificial Sequence: Synthetic polypeptide; note = VL of XENP020022

SEQ ID NO: 5666 - protein, 12 aa, synthetic construct
  source 1..12: note = Description of Artificial Sequence: Synthetic peptide; note = XENP020022 vlCDR1
RASQSVGSSYLA

SEQ ID NO: 5667 - protein, 7 aa, synthetic construct
  source 1..7: note = Description of Artificial Sequence: Synthetic peptide; note = XENP020022 vlCDR2
GAFSRAT

SEQ ID NO: 5668 - protein, 9 aa, synthetic construct
  source 1..9: note = Description of Artificial Sequence: Synthetic peptide; note = XENP020022 vlCDR3
QQYGKSPWT

SEQ ID NO: 5669 - protein, 221 aa, synthetic construct; identical to SEQ ID NO: 5439
  source 1..221: note = Description of Artificial Sequence: Synthetic polypeptide; note = XENP020052 [CTLA-4]_H3_L0.44_Fab Heavy Chain

SEQ ID NO: 5670 - protein, 118 aa, synthetic construct; identical to SEQ ID NO: 139
  source 1..118: note = Description of Artificial Sequence: Synthetic polypeptide; note = VH of XENP020052

SEQ ID NO: 5671 - protein, 5 aa, synthetic construct
  source 1..5: note = Description of Artificial Sequence: Synthetic peptide; note = XENP020052 vhCDR1
SYTMH

SEQ ID NO: 5672 - protein, 17 aa, synthetic construct
  source 1..17: note = Description of Artificial Sequence: Synthetic peptide; note = XENP020052 vhCDR2
FISYDGNNKYYADSVKG

SEQ ID NO: 5673 - protein, 9 aa, synthetic construct
  source 1..9: note = Description of Artificial Sequence: Synthetic peptide; note = XENP020052 vhCDR3
TGWLGPFDY

SEQ ID NO: 5674 - protein, 215 aa, synthetic construct; identical to SEQ ID NO: 4724
  source 1..215: note = Description of Artificial Sequence: Synthetic polypeptide; note = XENP020052 [CTLA-4]_H3_L0.44_Fab Light Chain

SEQ ID NO: 5675 - protein, 108 aa, synthetic construct; identical to SEQ ID NO: 1805
  source 1..108: note = Description of Artificial Sequence: Synthetic polypeptide; note = VL of XENP020052

SEQ ID NO: 5676 - protein, 12 aa, synthetic construct
  source 1..12: note = Description of Artificial Sequence: Synthetic peptide; note = XENP020052 vlCDR1
RASQSVGSSYLS

SEQ ID NO: 5677 - protein, 7 aa, synthetic construct
  source 1..7: note = Description of Artificial Sequence: Synthetic peptide; note = XENP020052 vlCDR2
GAFSRAT

SEQ ID NO: 5678 - protein, 9 aa, synthetic construct
  source 1..9: note = Description of Artificial Sequence: Synthetic peptide; note = XENP020052 vlCDR3
QQYGSSPWT

SEQ ID NO: 5679 - protein, 221 aa, synthetic construct
  source 1..221: note = Description of Artificial Sequence: Synthetic polypeptide; note = XENP020068 [CTLA-4]_H3.1_L0.12_Fab Heavy Chain
EVQLVESGGGLVKPGGSLRLSCAASGFTFSSYTMHWVRQAPGKGLEWVSFISYDGNHKYYADSVKGRFTISRDNAKNSLYLQMNSLRAEDTAVYYCARTGLLGPFDLWGQGTMVTVSSASTKGPSVFPLAPSSKSTSGGTAALGCLVKDYFPEPVTVSWNSGALTSGVHTFPAVLQSSGLYSLSSVVTVPSSSLGTQTYICNVNHKPSNTKVDKKVEPKSC

SEQ ID NO: 5680 - protein, 118 aa, synthetic construct; identical to SEQ ID NO: 2434
  source 1..118: note = Description of Artificial Sequence: Synthetic polypeptide; note = VH of XENP020068

SEQ ID NO: 5681 - protein, 5 aa, synthetic construct
  source 1..5: note = Description of Artificial Sequence: Synthetic peptide; note = XENP020068 vhCDR1
SYTMH

SEQ ID NO: 5682 - protein, 17 aa, synthetic construct
  source 1..17: note = Description of Artificial Sequence: Synthetic peptide; note = XENP020068 vhCDR2
FISYDGNHKYYADSVKG

SEQ ID NO: 5683 - protein, 9 aa, synthetic construct
  source 1..9: note = Description of Artificial Sequence: Synthetic peptide; note = XENP020068 vhCDR3
TGLLGPFDL

SEQ ID NO: 5684 - protein, 215 aa, synthetic construct; identical to SEQ ID NO: 4404
  source 1..215: note = Description of Artificial Sequence: Synthetic polypeptide; note = XENP020068 [CTLA-4]_H3.1_L0.12_Fab Light Chain

SEQ ID NO: 5685 - protein, 108 aa, synthetic construct; identical to SEQ ID NO: 1517
  source 1..108: note = Description of Artificial Sequence: Synthetic polypeptide; note = VL of XENP020068

SEQ ID NO: 5686 - protein, 12 aa, synthetic construct
  source 1..12: note = Description of Artificial Sequence: Synthetic peptide; note = XENP020068 vlCDR1
RASQSVGSSYLA

SEQ ID NO: 5687 - protein, 7 aa, synthetic construct
  source 1..7: note = Description of Artificial Sequence: Synthetic peptide; note = XENP020068 vlCDR2
GAFSRAT

SEQ ID NO: 5688 - protein, 9 aa, synthetic construct
  source 1..9: note = Description of Artificial Sequence: Synthetic peptide; note = XENP020068 vlCDR3
QQYGSSPWT

SEQ ID NO: 5689 - protein, 221 aa, synthetic construct
  source 1..221: note = Description of Artificial Sequence: Synthetic polypeptide; note = XENP020069 [CTLA-4]_H3.2_L0.12_Fab Heavy Chain
EVQLVESGGGLVKPGGSLRLSCAASGFTFSSYTMHWVRQAPGKGLEWVSFISYDGNTKYYADSVKGRFTISRDNAKNSLYLQMNSLRAEDTAVYYCARTGLLGPFDLWGQGTMVTVSSASTKGPSVFPLAPSSKSTSGGTAALGCLVKDYFPEPVTVSWNSGALTSGVHTFPAVLQSSGLYSLSSVVTVPSSSLGTQTYICNVNHKPSNTKVDKKVEPKSC

SEQ ID NO: 5690 - protein, 118 aa, synthetic construct; identical to SEQ ID NO: 2443
  source 1..118: note = Description of Artificial Sequence: Synthetic polypeptide; note = VH of XENP020069

SEQ ID NO: 5691 - protein, 5 aa, synthetic construct
  source 1..5: note = Description of Artificial Sequence: Synthetic peptide; note = XENP020069 vhCDR1
SYTMH

SEQ ID NO: 5692 - protein, 17 aa, synthetic construct
  source 1..17: note = Description of Artificial Sequence: Synthetic peptide; note = XENP020069 vhCDR2
FISYDGNTKYYADSVKG

SEQ ID NO: 5693 - protein, 9 aa, synthetic construct
  source 1..9: note = Description of Artificial Sequence: Synthetic peptide; note = XENP020069 vhCDR3
TGLLGPFDL

SEQ ID NO: 5694 - protein, 215 aa, synthetic construct; identical to SEQ ID NO: 4404
  source 1..215: note = Description of Artificial Sequence: Synthetic polypeptide; note = XENP020069 [CTLA-4]_H3.2_L0.12_Fab Light Chain

SEQ ID NO: 5695 - protein, 108 aa, synthetic construct; identical to SEQ ID NO: 1517
  source 1..108: note = Description of Artificial Sequence: Synthetic polypeptide; note = VL of XENP020069

SEQ ID NO: 5696 - protein, 12 aa, synthetic construct
  source 1..12: note = Description of Artificial Sequence: Synthetic peptide; note = XENP020069 vlCDR1
RASQSVGSSYLA

SEQ ID NO: 5697 - protein, 7 aa, synthetic construct
  source 1..7: note = Description of Artificial Sequence: Synthetic peptide; note = XENP020069 vlCDR2
GAFSRAT

SEQ ID NO: 5698 - protein, 9 aa, synthetic construct
  source 1..9: note = Description of Artificial Sequence: Synthetic peptide; note = XENP020069 vlCDR3
QQYGSSPWT

SEQ ID NO: 5699 - protein, 221 aa, synthetic construct
  source 1..221: note = Description of Artificial Sequence: Synthetic polypeptide; note = XENP020070 [CTLA-4]_H3.3_L0.12_Fab Heavy Chain
EVQLVESGGGLVKPGGSLRLSCAASGFTFSSYTMHWVRQAPGKGLEWVSFISYDGNQKYYADSVKGRFTISRDNAKNSLYLQMNSLRAEDTAVYYCARTGLLGPFDLWGQGTMVTVSSASTKGPSVFPLAPSSKSTSGGTAALGCLVKDYFPEPVTVSWNSGALTSGVHTFPAVLQSSGLYSLSSVVTVPSSSLGTQTYICNVNHKPSNTKVDKKVEPKSC

SEQ ID NO: 5700 - protein, 118 aa, synthetic construct; identical to SEQ ID NO: 2452
  source 1..118: note = Description of Artificial Sequence: Synthetic polypeptide; note = VH of XENP020070

SEQ ID NO: 5701 - protein, 5 aa, synthetic construct
  source 1..5: note = Description of Artificial Sequence: Synthetic peptide; note = XENP020070 vhCDR1
SYTMH

SEQ ID NO: 5702 - protein, 17 aa, synthetic construct
  source 1..17: note = Description of Artificial Sequence: Synthetic peptide; note = XENP020070 vhCDR2
FISYDGNQKYYADSVKG

SEQ ID NO: 5703 - protein, 9 aa, synthetic construct
  source 1..9: note = Description of Artificial Sequence: Synthetic peptide; note = XENP020070 vhCDR3
TGLLGPFDL

SEQ ID NO: 5704 - protein, 215 aa, synthetic construct; identical to SEQ ID NO: 4404
  source 1..215: note = Description of Artificial Sequence: Synthetic polypeptide; note = XENP020070 [CTLA-4]_H3.3_L0.12_Fab Light Chain

SEQ ID NO: 5705 - protein, 108 aa, synthetic construct; identical to SEQ ID NO: 1517
  source 1..108: note = Description of Artificial Sequence: Synthetic polypeptide; note = VL of XENP020070

SEQ ID NO: 5706 - protein, 12 aa, synthetic construct
  source 1..12: note = Description of Artificial Sequence: Synthetic peptide; note = XENP020070 vlCDR1
RASQSVGSSYLA

SEQ ID NO: 5707 - protein, 7 aa, synthetic construct
  source 1..7: note = Description of Artificial Sequence: Synthetic peptide; note = XENP020070 vlCDR2
GAFSRAT

SEQ ID NO: 5708 - protein, 9 aa, synthetic construct
  source 1..9: note = Description of Artificial Sequence: Synthetic peptide; note = XENP020070 vlCDR3
QQYGSSPWT

SEQ ID NO: 5709 - protein, 221 aa, synthetic construct
  source 1..221: note = Description of Artificial Sequence: Synthetic polypeptide; note = XENP020071 [CTLA-4]_H3.4_L0.12_Fab Heavy Chain
EVQLVESGGGLVKPGGSLRLSCAASGFTFSSYTMHWVRQAPGKGLEWVSFISYDGNHKYYADSVKGRFTISRDNAKNSLYLQMNSLRAEDTAVYYCARTGHLGPFDLWGQGTMVTVSSASTKGPSVFPLAPSSKSTSGGTAALGCLVKDYFPEPVTVSWNSGALTSGVHTFPAVLQSSGLYSLSSVVTVPSSSLGTQTYICNVNHKPSNTKVDKKVEPKSC

SEQ ID NO: 5710 - protein, 118 aa, synthetic construct; identical to SEQ ID NO: 2461
  source 1..118: note = Description of Artificial Sequence: Synthetic polypeptide; note = VH of XENP020071

SEQ ID NO: 5711 - protein, 5 aa, synthetic construct
  source 1..5: note = Description of Artificial Sequence: Synthetic peptide; note = XENP020071 vhCDR1
SYTMH

SEQ ID NO: 5712 - protein, 17 aa, synthetic construct
  source 1..17: note = Description of Artificial Sequence: Synthetic peptide; note = XENP020071 vhCDR2
FISYDGNHKYYADSVKG

SEQ ID NO: 5713 - protein, 9 aa, synthetic construct
  source 1..9: note = Description of Artificial Sequence: Synthetic peptide; note = XENP020071 vhCDR3
TGHLGPFDL

SEQ ID NO: 5714 - protein, 215 aa, synthetic construct; identical to SEQ ID NO: 4404
  source 1..215: note = Description of Artificial Sequence: Synthetic polypeptide; note = XENP020071 [CTLA-4]_H3.4_L0.12_Fab Light Chain

SEQ ID NO: 5715 - protein, 108 aa, synthetic construct; identical to SEQ ID NO: 1517
  source 1..108: note = Description of Artificial Sequence: Synthetic polypeptide; note = VL of XENP020071

SEQ ID NO: 5716 - protein, 12 aa, synthetic construct
  source 1..12: note = Description of Artificial Sequence: Synthetic peptide; note = XENP020071 vlCDR1
RASQSVGSSYLA

SEQ ID NO: 5717 - protein, 7 aa, synthetic construct
  source 1..7: note = Description of Artificial Sequence: Synthetic peptide; note = XENP020071 vlCDR2
GAFSRAT

SEQ ID NO: 5718 - protein, 9 aa, synthetic construct
  source 1..9: note = Description of Artificial Sequence: Synthetic peptide; note = XENP020071 vlCDR3
QQYGSSPWT

SEQ ID NO: 5719 - protein, 221 aa, synthetic construct
  source 1..221: note = Description of Artificial Sequence: Synthetic polypeptide; note = XENP020072 [CTLA-4]_H3.5_L0.12_Fab Heavy Chain
EVQLVESGGGLVKPGGSLRLSCAASGFTFSSYTMHWVRQAPGKGLEWVSFISYDGNTKYYADSVKGRFTISRDNAKNSLYLQMNSLRAEDTAVYYCARTGHLGPFDLWGQGTMVTVSSASTKGPSVFPLAPSSKSTSGGTAALGCLVKDYFPEPVTVSWNSGALTSGVHTFPAVLQSSGLYSLSSVVTVPSSSLGTQTYICNVNHKPSNTKVDKKVEPKSC

SEQ ID NO: 5720 - protein, 118 aa, synthetic construct; identical to SEQ ID NO: 2470
  source 1..118: note = Description of Artificial Sequence: Synthetic polypeptide; note = VH of XENP020072

SEQ ID NO: 5721 - protein, 5 aa, synthetic construct
  source 1..5: note = Description of Artificial Sequence: Synthetic peptide; note = XENP020072 vhCDR1
SYTMH

SEQ ID NO: 5722 - protein, 17 aa, synthetic construct
  source 1..17: note = Description of Artificial Sequence: Synthetic peptide; note = XENP020072 vhCDR2
FISYDGNTKYYADSVKG

SEQ ID NO: 5723 - protein, 9 aa, synthetic construct
  source 1..9: note = Description of Artificial Sequence: Synthetic peptide; note = XENP020072 vhCDR3
TGHLGPFDL

SEQ ID NO: 5724 - protein, 215 aa, synthetic construct; identical to SEQ ID NO: 4404
  source 1..215: note = Description of Artificial Sequence: Synthetic polypeptide; note = XENP020072 [CTLA-4]_H3.5_L0.12_Fab Light Chain

SEQ ID NO: 5725 - protein, 108 aa, synthetic construct; identical to SEQ ID NO: 1517
  source 1..108: note = Description of Artificial Sequence: Synthetic polypeptide; note = VL of XENP020072

SEQ ID NO: 5726 - protein, 12 aa, synthetic construct
  source 1..12: note = Description of Artificial Sequence: Synthetic peptide; note = XENP020072 vlCDR1
RASQSVGSSYLA

SEQ ID NO: 5727 - protein, 7 aa, synthetic construct
  source 1..7: note = Description of Artificial Sequence: Synthetic peptide; note = XENP020072 vlCDR2
GAFSRAT

SEQ ID NO: 5728 - protein, 9 aa, synthetic construct
  source 1..9: note = Description of Artificial Sequence: Synthetic peptide; note = XENP020072 vlCDR3
QQYGSSPWT

SEQ ID NO: 5729 - protein, 221 aa, synthetic construct
  source 1..221: note = Description of Artificial Sequence: Synthetic polypeptide; note = XENP020073 [CTLA-4]_H3.6_L0.12_Fab Heavy Chain
EVQLVESGGGLVKPGGSLRLSCAASGFTFSSYTMHWVRQAPGKGLEWVSFISYDGNQKYYADSVKGRFTISRDNAKNSLYLQMNSLRAEDTAVYYCARTGHLGPFDLWGQGTMVTVSSASTKGPSVFPLAPSSKSTSGGTAALGCLVKDYFPEPVTVSWNSGALTSGVHTFPAVLQSSGLYSLSSVVTVPSSSLGTQTYICNVNHKPSNTKVDKKVEPKSC

SEQ ID NO: 5730 - protein, 118 aa, synthetic construct; identical to SEQ ID NO: 2479
  source 1..118: note = Description of Artificial Sequence: Synthetic polypeptide; note = VH of XENP020073

SEQ ID NO: 5731 - protein, 5 aa, synthetic construct
  source 1..5: note = Description of Artificial Sequence: Synthetic peptide; note = XENP020073 vhCDR1
SYTMH

SEQ ID NO: 5732 - protein, 17 aa, synthetic construct
  source 1..17: note = Description of Artificial Sequence: Synthetic peptide; note = XENP020073 vhCDR2
FISYDGNQKYYADSVKG

SEQ ID NO: 5733 - protein, 9 aa, synthetic construct
  source 1..9: note = Description of Artificial Sequence: Synthetic peptide; note = XENP020073 vhCDR3
TGHLGPFDL

SEQ ID NO: 5734 - protein, 215 aa, synthetic construct; identical to SEQ ID NO: 4404
  source 1..215: note = Description of Artificial Sequence: Synthetic polypeptide; note = XENP020073 [CTLA-4]_H3.6_L0.12_Fab Light Chain

SEQ ID NO: 5735 - protein, 108 aa, synthetic construct; identical to SEQ ID NO: 1517
  source 1..108: note = Description of Artificial Sequence: Synthetic polypeptide; note = VL of XENP020073

SEQ ID NO: 5736 - protein, 12 aa, synthetic construct
  source 1..12: note = Description of Artificial Sequence: Synthetic peptide; note = XENP020073 vlCDR1
RASQSVGSSYLA

SEQ ID NO: 5737 - protein, 7 aa, synthetic construct
  source 1..7: note = Description of Artificial Sequence: Synthetic peptide; note = XENP020073 vlCDR2
GAFSRAT

SEQ ID NO: 5738 - protein, 9 aa, synthetic construct
  source 1..9: note = Description of Artificial Sequence: Synthetic peptide; note = XENP020073 vlCDR3
QQYGSSPWT

SEQ ID NO: 5739 - protein, 221 aa, synthetic construct
  source 1..221: note = Description of Artificial Sequence: Synthetic polypeptide; note = XENP020074 [CTLA-4]_H3.7_L0.12_Fab Heavy Chain
EVQLVESGGGLVKPGGSLRLSCAASGFTFSSYTMHWVRQAPGKGLEWVCFISYDGNNKYYADSVKGRFTCSRDNAKNSLYLQMNSLRAEDTAVYYCARTGWLGPFDYWGQGTLVTVSSASTKGPSVFPLAPSSKSTSGGTAALGCLVKDYFPEPVTVSWNSGALTSGVHTFPAVLQSSGLYSLSSVVTVPSSSLGTQTYICNVNHKPSNTKVDKKVEPKSC

SEQ ID NO: 5740 - protein, 118 aa, synthetic construct; identical to SEQ ID NO: 2488
  source 1..118: note = Description of Artificial Sequence: Synthetic polypeptide; note = VH of XENP020074

SEQ ID NO: 5741 - protein, 5 aa, synthetic construct
  source 1..5: note = Description of Artificial Sequence: Synthetic peptide; note = XENP020074 vhCDR1
SYTMH

SEQ ID NO: 5742 - protein, 17 aa, synthetic construct
  source 1..17: note = Description of Artificial Sequence: Synthetic peptide; note = XENP020074 vhCDR2
FISYDGNNKYYADSVKG

SEQ ID NO: 5743 - protein, 9 aa, synthetic construct
  source 1..9: note = Description of Artificial Sequence: Synthetic peptide; note = XENP020074 vhCDR3
TGWLGPFDY

SEQ ID NO: 5744 - protein, 215 aa, synthetic construct; identical to SEQ ID NO: 4404
  source 1..215: note = Description of Artificial Sequence: Synthetic polypeptide; note = XENP020074 [CTLA-4]_H3.7_L0.12_Fab Light Chain

SEQ ID NO: 5745 - protein, 108 aa, synthetic construct; identical to SEQ ID NO: 1517
  source 1..108: note = Description of Artificial Sequence: Synthetic polypeptide; note = VL of XENP020074

SEQ ID NO: 5746 - protein, 12 aa, synthetic construct
  source 1..12: note = Description of Artificial Sequence: Synthetic peptide; note = XENP020074 vlCDR1
RASQSVGSSYLA

SEQ ID NO: 5747 - protein, 7 aa, synthetic construct
  source 1..7: note = Description of Artificial Sequence: Synthetic peptide; note = XENP020074 vlCDR2
GAFSRAT

SEQ ID NO: 5748 - protein, 9 aa, synthetic construct
  source 1..9: note = Description of Artificial Sequence: Synthetic peptide; note = XENP020074 vlCDR3
QQYGSSPWT

SEQ ID NO: 5749 - protein, 221 aa, synthetic construct
  source 1..221: note = Description of Artificial Sequence: Synthetic polypeptide; note = XENP020323 [CTLA-4]_H3.9_L0.12_Fab Heavy Chain
EVQLVESGGGLVKPGGSLRLSCAASGFTFSSYTMHWVRQAPGKGLEWVSFISYDGNYKYYADSVKGRFTISRDNAKNSLYLQMNSLRAEDTAVYYCARTGHLGPFDLWGQGTMVTVSSASTKGPSVFPLAPSSKSTSGGTAALGCLVKDYFPEPVTVSWNSGALTSGVHTFPAVLQSSGLYSLSSVVTVPSSSLGTQTYICNVNHKPSNTKVDKKVEPKSC

SEQ ID NO: 5750 - protein, 118 aa, synthetic construct; identical to SEQ ID NO: 2506
  source 1..118: note = Description of Artificial Sequence: Synthetic polypeptide; note = VH of XENP020323

SEQ ID NO: 5751 - protein, 5 aa, synthetic construct
  source 1..5: note = Description of Artificial Sequence: Synthetic peptide; note = XENP020323 vhCDR1
SYTMH

SEQ ID NO: 5752 - protein, 17 aa, synthetic construct
  source 1..17: note = Description of Artificial Sequence: Synthetic peptide; note = XENP020323 vhCDR2
FISYDGNYKYYADSVKG

SEQ ID NO: 5753 - protein, 9 aa, synthetic construct
  source 1..9: note = Description of Artificial Sequence: Synthetic peptide; note = XENP020323 vhCDR3
TGHLGPFDL

SEQ ID NO: 5754 - protein, 215 aa, synthetic construct; identical to SEQ ID NO: 4404
  source 1..215: note = Description of Artificial Sequence: Synthetic polypeptide; note = XENP020323 [CTLA-4]_H3.9_L0.12_Fab Light Chain

SEQ ID NO: 5755 - protein, 108 aa, synthetic construct; identical to SEQ ID NO: 1517
  source 1..108: note = Description of Artificial Sequence: Synthetic polypeptide; note = VL of XENP020323

SEQ ID NO: 5756 - protein, 12 aa, synthetic construct
  source 1..12: note = Description of Artificial Sequence: Synthetic peptide; note = XENP020323 vlCDR1
RASQSVGSSYLA

SEQ ID NO: 5757 - protein, 7 aa, synthetic construct
  source 1..7: note = Description of Artificial Sequence: Synthetic peptide; note = XENP020323 vlCDR2
GAFSRAT

SEQ ID NO: 5758 - protein, 9 aa, synthetic construct
  source 1..9: note = Description of Artificial Sequence: Synthetic peptide; note = XENP020323 vlCDR3
QQYGSSPWT

SEQ ID NO: 5759 - protein, 221 aa, synthetic construct
  source 1..221: note = Description of Artificial Sequence: Synthetic polypeptide; note = XENP020324 [CTLA-4]_H3.10_L0.12_Fab Heavy Chain
EVQLVESGGGLVKPGGSLRLSCAASGFTFSSYTMHWVRQAPGKGLEWVSFISYDGNYKYYADSVKGRFTISRDNAKNSLYLQMNSLRAEDTAVYYCARTGLLGPFDLWGQGTMVTVSSASTKGPSVFPLAPSSKSTSGGTAALGCLVKDYFPEPVTVSWNSGALTSGVHTFPAVLQSSGLYSLSSVVTVPSSSLGTQTYICNVNHKPSNTKVDKKVEPKSC

SEQ ID NO: 5760 - protein, 118 aa, synthetic construct; identical to SEQ ID NO: 2515
  source 1..118: note = Description of Artificial Sequence: Synthetic polypeptide; note = VH of XENP020324

SEQ ID NO: 5761 - protein, 5 aa, synthetic construct
  source 1..5: note = Description of Artificial Sequence: Synthetic peptide; note = XENP020324 vhCDR1
SYTMH

SEQ ID NO: 5762 - protein, 17 aa, synthetic construct
  source 1..17: note = Description of Artificial Sequence: Synthetic peptide; note = XENP020324 vhCDR2
FISYDGNYKYYADSVKG

SEQ ID NO: 5763 - protein, 9 aa, synthetic construct
  source 1..9: note = Description of Artificial Sequence: Synthetic peptide; note = XENP020324 vhCDR3
TGLLGPFDL

SEQ ID NO: 5764 - protein, 215 aa, synthetic construct; identical to SEQ ID NO: 4404
  source 1..215: note = Description of Artificial Sequence: Synthetic polypeptide; note = XENP020324 [CTLA-4]_H3.10_L0.12_Fab Light Chain

SEQ ID NO: 5765 - protein, 108 aa, synthetic construct; identical to SEQ ID NO: 1517
  source 1..108: note = Description of Artificial Sequence: Synthetic polypeptide; note = VL of XENP020324

SEQ ID NO: 5766 - protein, 12 aa, synthetic construct
  source 1..12: note = Description of Artificial Sequence: Synthetic peptide; note = XENP020324 vlCDR1
RASQSVGSSYLA

SEQ ID NO: 5767 - protein, 7 aa, synthetic construct
  source 1..7: note = Description of Artificial Sequence: Synthetic peptide; note = XENP020324 vlCDR2
GAFSRAT

SEQ ID NO: 5768 - protein, 9 aa, synthetic construct
  source 1..9: note = Description of Artificial Sequence: Synthetic peptide; note = XENP020324 vlCDR3
QQYGSSPWT

SEQ ID NO: 5769 - protein, 221 aa, synthetic construct
  source 1..221: note = Description of Artificial Sequence: Synthetic polypeptide; note = XENP020325 [CTLA-4]_H3.11_L0.12_Fab Heavy Chain
EVQLVESGGGLVKPGGSLRLSCAASGFTFSSYTMHWVRQAPGKGLEWVSFISYDGNHKYYADSVKGRFTISRDNAKNSLYLQMNSLRAEDTAVYYCARGGHLGPFDLWGQGTMVTVSSASTKGPSVFPLAPSSKSTSGGTAALGCLVKDYFPEPVTVSWNSGALTSGVHTFPAVLQSSGLYSLSSVVTVPSSSLGTQTYICNVNHKPSNTKVDKKVEPKSC

SEQ ID NO: 5770 - protein, 118 aa, synthetic construct; identical to SEQ ID NO: 2524
  source 1..118: note = Description of Artificial Sequence: Synthetic polypeptide; note = VH of XENP020325

SEQ ID NO: 5771 - protein, 5 aa, synthetic construct
  source 1..5: note = Description of Artificial Sequence: Synthetic peptide; note = XENP020325 vhCDR1
SYTMH

SEQ ID NO: 5772 - protein, 17 aa, synthetic construct
  source 1..17: note = Description of Artificial Sequence: Synthetic peptide; note = XENP020325 vhCDR2
FISYDGNHKYYADSVKG

SEQ ID NO: 5773 - protein, 9 aa, synthetic construct
  source 1..9: note = Description of Artificial Sequence: Synthetic peptide; note = XENP020325 vhCDR3
GGHLGPFDL

SEQ ID NO: 5774 - protein, 215 aa, synthetic construct; identical to SEQ ID NO: 4404
  source 1..215: note = Description of Artificial Sequence: Synthetic polypeptide; note = XENP020325 [CTLA-4]_H3.11_L0.12_Fab Light Chain

SEQ ID NO: 5775 - protein, 108 aa, synthetic construct; identical to SEQ ID NO: 1517
  source 1..108: note = Description of Artificial Sequence: Synthetic polypeptide; note = VL of XENP020325

SEQ ID NO: 5776 - protein, 12 aa, synthetic construct
  source 1..12: note = Description of Artificial Sequence: Synthetic peptide; note = XENP020325 vlCDR1
RASQSVGSSYLA

SEQ ID NO: 5777 - protein, 7 aa, synthetic construct
  source 1..7: note = Description of Artificial Sequence: Synthetic peptide; note = XENP020325 vlCDR2
GAFSRAT

SEQ ID NO: 5778 - protein, 9 aa, synthetic construct
  source 1..9: note = Description of Artificial Sequence: Synthetic peptide; note = XENP020325 vlCDR3
QQYGSSPWT

SEQ ID NO: 5779 - protein, 221 aa, synthetic construct
  source 1..221: note = Description of Artificial Sequence: Synthetic polypeptide; note = XENP020326 [CTLA-4]_H3.12_L0.12_Fab Heavy Chain
EVQLVESGGGLVKPGGSLRLSCAASGFTFSSYTMHWVRQAPGKGLEWVSFISYDGNHKYYADSVKGRFTISRDNAKNSLYLQMNSLRAEDTAVYYCARTSHLGPFDLWGQGTMVTVSSASTKGPSVFPLAPSSKSTSGGTAALGCLVKDYFPEPVTVSWNSGALTSGVHTFPAVLQSSGLYSLSSVVTVPSSSLGTQTYICNVNHKPSNTKVDKKVEPKSC

SEQ ID NO: 5780 - protein, 118 aa, synthetic construct; identical to SEQ ID NO: 2533
  source 1..118: note = Description of Artificial Sequence: Synthetic polypeptide; note = VH of XENP020326

SEQ ID NO: 5781 - protein, 5 aa, synthetic construct
  source 1..5: note = Description of Artificial Sequence: Synthetic peptide; note = XENP020326 vhCDR1
SYTMH

SEQ ID NO: 5782 - protein, 17 aa, synthetic construct
  source 1..17: note = Description of Artificial Sequence: Synthetic peptide; note = XENP020326 vhCDR2
FISYDGNHKYYADSVKG

SEQ ID NO: 5783 - protein, 9 aa, synthetic construct
  source 1..9: note = Description of Artificial Sequence: Synthetic peptide; note = XENP020326 vhCDR3
TSHLGPFDL

SEQ ID NO: 5784 - protein, 215 aa, synthetic construct; identical to SEQ ID NO: 4404
  source 1..215: note = Description of Artificial Sequence: Synthetic polypeptide; note = XENP020326 [CTLA-4]_H3.12_L0.12_Fab Light Chain

SEQ ID NO: 5785 - protein, 108 aa, synthetic construct; identical to SEQ ID NO: 1517
  source 1..108: note = Description of Artificial Sequence: Synthetic polypeptide; note = VL of XENP020326

SEQ ID NO: 5786 - protein, 12 aa, synthetic construct
  source 1..12: note = Description of Artificial Sequence: Synthetic peptide; note = XENP020326 vlCDR1
RASQSVGSSYLA

SEQ ID NO: 5787 - protein, 7 aa, synthetic construct
  source 1..7: note = Description of Artificial Sequence: Synthetic peptide; note = XENP020326 vlCDR2
GAFSRAT

SEQ ID NO: 5788 - protein, 9 aa, synthetic construct
  source 1..9: note = Description of Artificial Sequence: Synthetic peptide; note = XENP020326 vlCDR3
QQYGSSPWT

SEQ ID NO: 5789 - protein, 221 aa, synthetic construct
  source 1..221: note = Description of Artificial Sequence: Synthetic polypeptide; note = XENP020327 [CTLA-4]_H3.13_L0.12_Fab Heavy Chain
EVQLVESGGGLVKPGGSLRLSCAASGFTFSSYTMHWVRQAPGKGLEWVSFISYDGNHKYYADSVKGRFTISRDNAKNSLYLQMNSLRAEDTAVYYCARGGLLGPFDLWGQGTMVTVSSASTKGPSVFPLAPSSKSTSGGTAALGCLVKDYFPEPVTVSWNSGALTSGVHTFPAVLQSSGLYSLSSVVTVPSSSLGTQTYICNVNHKPSNTKVDKKVEPKSC

SEQ ID NO: 5790 - protein, 118 aa, synthetic construct; identical to SEQ ID NO: 2542
  source 1..118: note = Description of Artificial Sequence: Synthetic polypeptide; note = VH of XENP020327

SEQ ID NO: 5791 - protein, 5 aa, synthetic construct
  source 1..5: note = Description of Artificial Sequence: Synthetic peptide; note = XENP020327 vhCDR1
SYTMH

SEQ ID NO: 5792 - protein, 17 aa, synthetic construct
  source 1..17: note = Description of Artificial Sequence: Synthetic peptide; note = XENP020327 vhCDR2
FISYDGNHKYYADSVKG

SEQ ID NO: 5793 - protein, 9 aa, synthetic construct
  source 1..9: note = Description of Artificial Sequence: Synthetic peptide; note = XENP020327 vhCDR3
GGLLGPFDL

SEQ ID NO: 5794 - protein, 215 aa, synthetic construct; identical to SEQ ID NO: 4404
  source 1..215: note = Description of Artificial Sequence: Synthetic polypeptide; note = XENP020327 [CTLA-4]_H3.13_L0.12_Fab Light Chain

SEQ ID NO: 5795 - protein, 108 aa, synthetic construct; identical to SEQ ID NO: 1517
  source 1..108: note = Description of Artificial Sequence: Synthetic polypeptide; note = VL of XENP020327

SEQ ID NO: 5796 - protein, 12 aa, synthetic construct
  source 1..12: note = Description of Artificial Sequence: Synthetic peptide; note = XENP020327 vlCDR1
RASQSVGSSYLA

SEQ ID NO: 5797 - protein, 7 aa, synthetic construct
  source 1..7: note = Description of Artificial Sequence: Synthetic peptide; note = XENP020327 vlCDR2
GAFSRAT

SEQ ID NO: 5798 - protein, 9 aa, synthetic construct
  source 1..9: note = Description of Artificial Sequence: Synthetic peptide; note = XENP020327 vlCDR3
QQYGSSPWT

SEQ ID NO: 5799 - protein, 221 aa, synthetic construct
  source 1..221: note = Description of Artificial Sequence: Synthetic polypeptide; note = XENP020328 [CTLA-4]_H3.14_L0.12_Fab Heavy Chain
EVQLVESGGGLVKPGGSLRLSCAASGFTFSSYTMHWVRQAPGKGLEWVSFISYDGNHKYYADSVKGRFTISRDNAKNSLYLQMNSLRAEDTAVYYCARTSLLGPFDLWGQGTMVTVSSASTKGPSVFPLAPSSKSTSGGTAALGCLVKDYFPEPVTVSWNSGALTSGVHTFPAVLQSSGLYSLSSVVTVPSSSLGTQTYICNVNHKPSNTKVDKKVEPKSC

SEQ ID NO: 5800 - protein, 118 aa, synthetic construct; identical to SEQ ID NO: 2551
  source 1..118: note = Description of Artificial Sequence: Synthetic polypeptide; note = VH of XENP020328

SEQ ID NO: 5801 - protein, 5 aa, synthetic construct
  source 1..5: note = Description of Artificial Sequence: Synthetic peptide; note = XENP020328 vhCDR1
SYTMH

SEQ ID NO: 5802 - protein, 17 aa, synthetic construct
  source 1..17: note = Description of Artificial Sequence: Synthetic peptide; note = XENP020328 vhCDR2
FISYDGNHKYYADSVKG

SEQ ID NO: 5803 - protein, 9 aa, synthetic construct
  source 1..9: note = Description of Artificial Sequence: Synthetic peptide; note = XENP020328 vhCDR3
TSLLGPFDL

SEQ ID NO: 5804 - protein, 215 aa, synthetic construct; identical to SEQ ID NO: 4404
  source 1..215: note = Description of Artificial Sequence: Synthetic polypeptide; note = XENP020328 [CTLA-4]_H3.14_L0.12_Fab Light Chain

SEQ ID NO: 5805 - protein, 108 aa, synthetic construct; identical to SEQ ID NO: 1517
  source 1..108: note = Description of Artificial Sequence: Synthetic polypeptide; note = VL of XENP020328

SEQ ID NO: 5806 - protein, 12 aa, synthetic construct
  source 1..12: note = Description of Artificial Sequence: Synthetic peptide; note = XENP020328 vlCDR1
RASQSVGSSYLA

SEQ ID NO: 5807 - protein, 7 aa, synthetic construct
  source 1..7: note = Description of Artificial Sequence: Synthetic peptide; note = XENP020328 vlCDR2
GAFSRAT

SEQ ID NO: 5808 - protein, 9 aa, synthetic construct
  source 1..9: note = Description of Artificial Sequence: Synthetic peptide; note = XENP020328 vlCDR3
QQYGSSPWT

SEQ ID NO: 5809 - protein, 221 aa, synthetic construct
  source 1..221: note = Description of Artificial Sequence: Synthetic polypeptide; note = XENP020329 [CTLA-4]_H3.15_L0.12_Fab Heavy Chain
EVQLVESGGGLVKPGGSLRLSCAASGFTFSSYTMHWVRQAPGKGLEWVSFISYDGNQKYYADSVKGRFTISRDNAKNSLYLQMNSLRAEDTAVYYCARGGHLGPFDLWGQGTMVTVSSASTKGPSVFPLAPSSKSTSGGTAALGCLVKDYFPEPVTVSWNSGALTSGVHTFPAVLQSSGLYSLSSVVTVPSSSLGTQTYICNVNHKPSNTKVDKKVEPKSC

SEQ ID NO: 5810 - protein, 118 aa, synthetic construct; identical to SEQ ID NO: 2560
  source 1..118: note = Description of Artificial Sequence: Synthetic polypeptide; note = VH of XENP020329

SEQ ID NO: 5811 - protein, 5 aa, synthetic construct
  source 1..5: note = Description of Artificial Sequence: Synthetic peptide; note = XENP020329 vhCDR1
SYTMH

SEQ ID NO: 5812 - protein, 17 aa, synthetic construct
  source 1..17: note = Description of Artificial Sequence: Synthetic peptide; note = XENP020329 vhCDR2
FISYDGNQKYYADSVKG

SEQ ID NO: 5813 - protein, 9 aa, synthetic construct
  source 1..9: note = Description of Artificial Sequence: Synthetic peptide; note = XENP020329 vhCDR3
GGHLGPFDL

SEQ ID NO: 5814 - protein, 215 aa, synthetic construct; identical to SEQ ID NO: 4404
  source 1..215: note = Description of Artificial Sequence: Synthetic polypeptide; note = XENP020329 [CTLA-4]_H3.15_L0.12_Fab Light Chain

SEQ ID NO: 5815 - protein, 108 aa, synthetic construct; identical to SEQ ID NO: 1517
  source 1..108: note = Description of Artificial Sequence: Synthetic polypeptide; note = VL of XENP020329

SEQ ID NO: 5816 - protein, 12 aa, synthetic construct
  source 1..12: note = Description of Artificial Sequence: Synthetic peptide; note = XENP020329 vlCDR1
RASQSVGSSYLA

SEQ ID NO: 5817 - protein, 7 aa, synthetic construct
  source 1..7: note = Description of Artificial Sequence: Synthetic peptide; note = XENP020329 vlCDR2
GAFSRAT

SEQ ID NO: 5818 - protein, 9 aa, synthetic construct
  source 1..9: note = Description of Artificial Sequence: Synthetic peptide; note = XENP020329 vlCDR3
QQYGSSPWT

SEQ ID NO: 5819 - protein, 221 aa, synthetic construct
  source 1..221: note = Description of Artificial Sequence: Synthetic polypeptide; note = XENP020330 [CTLA-4]_H3.16_L0.12_Fab Heavy Chain
EVQLVESGGGLVKPGGSLRLSCAASGFTFSSYTMHWVRQAPGKGLEWVSFISYDGNQKYYADSVKGRFTISRDNAKNSLYLQMNSLRAEDTAVYYCARTSHLGPFDLWGQGTMVTVSSASTKGPSVFPLAPSSKSTSGGTAALGCLVKDYFPEPVTVSWNSGALTSGVHTFPAVLQSSGLYSLSSVVTVPSSSLGTQTYICNVNHKPSNTKVDKKVEPKSC

SEQ ID NO: 5820 - protein, 118 aa, synthetic construct; identical to SEQ ID NO: 2569
  source 1..118: note = Description of Artificial Sequence: Synthetic polypeptide; note = VH of XENP020330

SEQ ID NO: 5821 - protein, 5 aa, synthetic construct
  source 1..5: note = Description of Artificial Sequence: Synthetic peptide; note = XENP020330 vhCDR1
SYTMH

SEQ ID NO: 5822 - protein, 17 aa, synthetic construct
  source 1..17: note = Description of Artificial Sequence: Synthetic peptide; note = XENP020330 vhCDR2
FISYDGNQKYYADSVKG

SEQ ID NO: 5823 - protein, 9 aa, synthetic construct
  source 1..9: note = Description of Artificial Sequence: Synthetic peptide; note = XENP020330 vhCDR3
TSHLGPFDL

SEQ ID NO: 5824 - protein, 215 aa, synthetic construct; identical to SEQ ID NO: 4404
  source 1..215: note = Description of Artificial Sequence: Synthetic polypeptide; note = XENP020330 [CTLA-4]_H3.16_L0.12_Fab Light Chain

SEQ ID NO: 5825 - protein, 108 aa, synthetic construct; identical to SEQ ID NO: 1517
  source 1..108: note = Description of Artificial Sequence: Synthetic polypeptide; note = VL of XENP020330

SEQ ID NO: 5826 - protein, 12 aa, synthetic construct
  source 1..12: note = Description of Artificial Sequence: Synthetic peptide; note = XENP020330 vlCDR1
RASQSVGSSYLA

SEQ ID NO: 5827 - protein, 7 aa, synthetic construct
  source 1..7: note = Description of Artificial Sequence: Synthetic peptide; note = XENP020330 vlCDR2
GAFSRAT

SEQ ID NO: 5828 - protein, 9 aa, synthetic construct
  source 1..9: note = Description of Artificial Sequence: Synthetic peptide; note = XENP020330 vlCDR3
QQYGSSPWT

SEQ ID NO: 5829 - protein, 221 aa, synthetic construct
  source 1..221: note = Description of Artificial Sequence: Synthetic polypeptide; note = XENP020331 [CTLA-4]_H3.17_L0.12_Fab Heavy Chain
EVQLVESGGGLVKPGGSLRLSCAASGFTFSSYTMHWVRQAPGKGLEWVSFISYDGNQKYYADSVKGRFTISRDNAKNSLYLQMNSLRAEDTAVYYCARGGLLGPFDLWGQGTMVTVSSASTKGPSVFPLAPSSKSTSGGTAALGCLVKDYFPEPVTVSWNSGALTSGVHTFPAVLQSSGLYSLSSVVTVPSSSLGTQTYICNVNHKPSNTKVDKKVEPKSC

SEQ ID NO: 5830 - protein, 118 aa, synthetic construct; identical to SEQ ID NO: 2578
  source 1..118: note = Description of Artificial Sequence: Synthetic polypeptide; note = VH of XENP020331

SEQ ID NO: 5831 - protein, 5 aa, synthetic construct
  source 1..5: note = Description of Artificial Sequence: Synthetic peptide; note = XENP020331 vhCDR1
SYTMH

SEQ ID NO: 5832 - protein, 17 aa, synthetic construct
  source 1..17: note = Description of Artificial Sequence: Synthetic peptide; note = XENP020331 vhCDR2
FISYDGNQKYYADSVKG

SEQ ID NO: 5833 - protein, 9 aa, synthetic construct
  source 1..9: note = Description of Artificial Sequence: Synthetic peptide; note = XENP020331 vhCDR3
GGLLGPFDL

SEQ ID NO: 5834 - protein, 215 aa, synthetic construct; identical to SEQ ID NO: 4404
  source 1..215: note = Description of Artificial Sequence: Synthetic polypeptide; note = XENP020331 [CTLA-4]_H3.17_L0.12_Fab Light Chain

SEQ ID NO: 5835 - protein, 108 aa, synthetic construct; identical to SEQ ID NO: 1517
  source 1..108: note = Description of Artificial Sequence: Synthetic polypeptide; note = VL of XENP020331

SEQ ID NO: 5836 - protein, 12 aa, synthetic construct
  source 1..12: note = Description of Artificial Sequence: Synthetic peptide; note = XENP020331 vlCDR1
RASQSVGSSYLA

SEQ ID NO: 5837 - protein, 7 aa, synthetic construct
  source 1..7: note = Description of Artificial Sequence: Synthetic peptide; note = XENP020331 vlCDR2
GAFSRAT

SEQ ID NO: 5838 - protein, 9 aa, synthetic construct
  source 1..9: note = Description of Artificial Sequence: Synthetic peptide; note = XENP020331 vlCDR3
QQYGSSPWT

SEQ ID NO: 5839 - protein, 221 aa, synthetic construct
  source 1..221: note = Description of Artificial Sequence: Synthetic polypeptide; note = XENP020332 [CTLA-4]_H3.18_L0.12_Fab Heavy Chain
EVQLVESGGGLVKPGGSLRLSCAASGFTFSSYTMHWVRQAPGKGLEWVSFISYDGNQKYYADSVKGRFTISRDNAKNSLYLQMNSLRAEDTAVYYCARTSLLGPFDLWGQGTMVTVSSASTKGPSVFPLAPSSKSTSGGTAALGCLVKDYFPEPVTVSWNSGALTSGVHTFPAVLQSSGLYSLSSVVTVPSSSLGTQTYICNVNHKPSNTKVDKKVEPKSC

SEQ ID NO: 5840 - protein, 118 aa, synthetic construct; identical to SEQ ID NO: 2587
  source 1..118: note = Description of Artificial Sequence: Synthetic polypeptide; note = VH of XENP020332

SEQ ID NO: 5841 - protein, 5 aa, synthetic construct
  source 1..5: note = Description of Artificial Sequence: Synthetic peptide; note = XENP020332 vhCDR1
SYTMH

SEQ ID NO: 5842 - protein, 17 aa, synthetic construct
  source 1..17: note = Description of Artificial Sequence: Synthetic peptide; note = XENP020332 vhCDR2
FISYDGNQKYYADSVKG

SEQ ID NO: 5843 - protein, 9 aa, synthetic construct
  source 1..9: note = Description of Artificial Sequence: Synthetic peptide; note = XENP020332 vhCDR3
TSLLGPFDL

SEQ ID NO: 5844 - protein, 215 aa, synthetic construct; identical to SEQ ID NO: 4404
  source 1..215: note = Description of Artificial Sequence: Synthetic polypeptide; note = XENP020332 [CTLA-4]_H3.18_L0.12_Fab Light Chain

SEQ ID NO: 5845 - protein, 108 aa, synthetic construct; identical to SEQ ID NO: 1517
  source 1..108: note = Description of Artificial Sequence: Synthetic polypeptide; note = VL of XENP020332

SEQ ID NO: 5846 - protein, 12 aa, synthetic construct
  source 1..12: note = Description of Artificial Sequence: Synthetic peptide; note = XENP020332 vlCDR1
RASQSVGSSYLA

SEQ ID NO: 5847 - protein, 7 aa, synthetic construct
  source 1..7: note = Description of Artificial Sequence: Synthetic peptide; note = XENP020332 vlCDR2
GAFSRAT

SEQ ID NO: 5848 - protein, 9 aa, synthetic construct
  source 1..9: note = Description of Artificial Sequence: Synthetic peptide; note = XENP020332 vlCDR3
QQYGSSPWT

SEQ ID NO: 5849 - protein, 221 aa, synthetic construct
  source 1..221: note = Description of Artificial Sequence: Synthetic polypeptide; note = XENP020333 [CTLA-4]_H3.19_L0.12_Fab Heavy Chain
EVQLVESGGGLVKPGGSLRLSCAASGFTFSSYTMHWVRQAPGKGLEWVSFISYDGNTKYYADSVKGRFTISRDNAKNSLYLQMNSLRAEDTAVYYCARGGHLGPFDLWGQGTMVTVSSASTKGPSVFPLAPSSKSTSGGTAALGCLVKDYFPEPVTVSWNSGALTSGVHTFPAVLQSSGLYSLSSVVTVPSSSLGTQTYICNVNHKPSNTKVDKKVEPKSC

SEQ ID NO: 5850 - protein, 118 aa, synthetic construct; identical to SEQ ID NO: 2596
  source 1..118: note = Description of Artificial Sequence: Synthetic polypeptide; note = VH of XENP020333

SEQ ID NO: 5851 - protein, 5 aa, synthetic construct
  source 1..5: note = Description of Artificial Sequence: Synthetic peptide; note = XENP020333 vhCDR1
SYTMH

SEQ ID NO: 5852 - protein, 17 aa, synthetic construct
  source 1..17: note = Description of Artificial Sequence: Synthetic peptide; note = XENP020333 vhCDR2
FISYDGNTKYYADSVKG

SEQ ID NO: 5853 - protein, 9 aa, synthetic construct
  source 1..9: note = Description of Artificial Sequence: Synthetic peptide; note = XENP020333 vhCDR3
GGHLGPFDL

SEQ ID NO: 5854 - protein, 215 aa, synthetic construct; identical to SEQ ID NO: 4404
  source 1..215: note = Description of Artificial Sequence: Synthetic polypeptide; note = XENP020333 [CTLA-4]_H3.19_L0.12_Fab Light Chain

SEQ ID NO: 5855 - protein, 108 aa, synthetic construct; identical to SEQ ID NO: 1517
  source 1..108: note = Description of Artificial Sequence: Synthetic polypeptide; note = VL of XENP020333

SEQ ID NO: 5856 - protein, 12 aa, synthetic construct
  source 1..12: note = Description of Artificial Sequence: Synthetic peptide; note = XENP020333 vlCDR1
RASQSVGSSYLA

SEQ ID NO: 5857 - protein, 7 aa, synthetic construct
  source 1..7: note = Description of Artificial Sequence: Synthetic peptide; note = XENP020333 vlCDR2
GAFSRAT

SEQ ID NO: 5858 - protein, 9 aa, synthetic construct
  source 1..9: note = Description of Artificial Sequence: Synthetic peptide; note = XENP020333 vlCDR3
QQYGSSPWT

SEQ ID NO: 5859 - protein, 221 aa, synthetic construct
  source 1..221: note = Description of Artificial Sequence: Synthetic polypeptide; note = XENP020334 [CTLA-4]_H3.20_L0.12_Fab Heavy Chain
EVQLVESGGGLVKPGGSLRLSCAASGFTFSSYTMHWVRQAPGKGLEWVSFISYDGNTKYYADSVKGRFTISRDNAKNSLYLQMNSLRAEDTAVYYCARTSHLGPFDLWGQGTMVTVSSASTKGPSVFPLAPSSKSTSGGTAALGCLVKDYFPEPVTVSWNSGALTSGVHTFPAVLQSSGLYSLSSVVTVPSSSLGTQTYICNVNHKPSNTKVDKKVEPKSC

SEQ ID NO: 5860 - protein, 118 aa, synthetic construct; identical to SEQ ID NO: 2605
  source 1..118: note = Description of Artificial Sequence: Synthetic polypeptide; note = VH of XENP020334

SEQ ID NO: 5861 - protein, 5 aa, synthetic construct
  source 1..5: note = Description of Artificial Sequence: Synthetic peptide; note = XENP020334 vhCDR1
SYTMH

SEQ ID NO: 5862 - protein, 17 aa, synthetic construct
  source 1..17: note = Description of Artificial Sequence: Synthetic peptide; note = XENP020334 vhCDR2
FISYDGNTKYYADSVKG

SEQ ID NO: 5863 - protein, 9 aa, synthetic construct
  source 1..9: note = Description of Artificial Sequence: Synthetic peptide; note = XENP020334 vhCDR3
TSHLGPFDL

SEQ ID NO: 5864 - protein, 215 aa, synthetic construct; identical to SEQ ID NO: 4404
  source 1..215: note = Description of Artificial Sequence: Synthetic polypeptide; note = XENP020334 [CTLA-4]_H3.20_L0.12_Fab Light Chain

SEQ ID NO: 5865 - protein, 108 aa, synthetic construct; identical to SEQ ID NO: 1517
  source 1..108: note = Description of Artificial Sequence: Synthetic polypeptide; note = VL of XENP020334

SEQ ID NO: 5866 - protein, 12 aa, synthetic construct
  source 1..12: note = Description of Artificial Sequence: Synthetic peptide; note = XENP020334 vlCDR1
RASQSVGSSYLA

SEQ ID NO: 5867 - protein, 7 aa, synthetic construct
  source 1..7: note = Description of Artificial Sequence: Synthetic peptide; note = XENP020334 vlCDR2
GAFSRAT

SEQ ID NO: 5868 - protein, 9 aa, synthetic construct
  source 1..9: note = Description of Artificial Sequence: Synthetic peptide; note = XENP020334 vlCDR3
QQYGSSPWT

SEQ ID NO: 5869 - protein, 221 aa, synthetic construct
  source 1..221: note = Description of Artificial Sequence: Synthetic polypeptide; note = XENP020335 [CTLA-4]_H3.21_L0.12_Fab Heavy Chain
EVQLVESGGGLVKPGGSLRLSCAASGFTFSSYTMHWVRQAPGKGLEWVSFISYDGNTKYYADSVKGRFTISRDNAKNSLYLQMNSLRAEDTAVYYCARGGLLGPFDLWGQGTMVTVSSASTKGPSVFPLAPSSKSTSGGTAALGCLVKDYFPEPVTVSWNSGALTSGVHTFPAVLQSSGLYSLSSVVTVPSSSLGTQTYICNVNHKPSNTKVDKKVEPKSC

SEQ ID NO: 5870 - protein, 118 aa, synthetic construct; identical to SEQ ID NO: 2614
  source 1..118: note = Description of Artificial Sequence: Synthetic polypeptide; note = VH of XENP020335

SEQ ID NO: 5871 - protein, 5 aa, synthetic construct
  source 1..5: note = Description of Artificial Sequence: Synthetic peptide; note = XENP020335 vhCDR1
SYTMH

SEQ ID NO: 5872 - protein, 17 aa, synthetic construct
  source 1..17: note = Description of Artificial Sequence: Synthetic peptide; note = XENP020335 vhCDR2
FISYDGNTKYYADSVKG

SEQ ID NO: 5873 - protein, 9 aa, synthetic construct
  source 1..9: note = Description of Artificial Sequence: Synthetic peptide; note = XENP020335 vhCDR3
GGLLGPFDL

SEQ ID NO: 5874 - protein, 215 aa, synthetic construct; identical to SEQ ID NO: 4404
  source 1..215: note = Description of Artificial Sequence: Synthetic polypeptide; note = XENP020335 [CTLA-4]_H3.21_L0.12_Fab Light Chain

SEQ ID NO: 5875 - protein, 108 aa, synthetic construct; identical to SEQ ID NO: 1517
  source 1..108: note = Description of Artificial Sequence: Synthetic polypeptide; note = VL of XENP020335

SEQ ID NO: 5876 - protein, 12 aa, synthetic construct
  source 1..12: note = Description of Artificial Sequence: Synthetic peptide; note = XENP020335 vlCDR1
RASQSVGSSYLA

SEQ ID NO: 5877 - protein, 7 aa, synthetic construct
  source 1..7: note = Description of Artificial Sequence: Synthetic peptide; note = XENP020335 vlCDR2
GAFSRAT

SEQ ID NO: 5878 - protein, 9 aa, synthetic construct
  source 1..9: note = Description of Artificial Sequence: Synthetic peptide; note = XENP020335 vlCDR3
QQYGSSPWT

SEQ ID NO: 5879 - protein, 221 aa, synthetic construct
  source 1..221: note = Description of Artificial Sequence: Synthetic polypeptide; note = XENP020336 [CTLA-4]_H3.22_L0.12_Fab Heavy Chain
EVQLVESGGGLVKPGGSLRLSCAASGFTFSSYTMHWVRQAPGKGLEWVSFISYDGNTKYYADSVKGRFTISRDNAKNSLYLQMNSLRAEDTAVYYCARTSLLGPFDLWGQGTMVTVSSASTKGPSVFPLAPSSKSTSGGTAALGCLVKDYFPEPVTVSWNSGALTSGVHTFPAVLQSSGLYSLSSVVTVPSSSLGTQTYICNVNHKPSNTKVDKKVEPKSC

SEQ ID NO: 5880 - protein, 118 aa, synthetic construct; identical to SEQ ID NO: 2623
  source 1..118: note = Description of Artificial Sequence: Synthetic polypeptide; note = VH of XENP020336

SEQ ID NO: 5881 - protein, 5 aa, synthetic construct
  source 1..5: note = Description of Artificial Sequence: Synthetic peptide; note = XENP020336 vhCDR1
SYTMH

SEQ ID NO: 5882 - protein, 17 aa, synthetic construct
  source 1..17: note = Description of Artificial Sequence: Synthetic peptide; note = XENP020336 vhCDR2
FISYDGNTKYYADSVKG

SEQ ID NO: 5883 - protein, 9 aa, synthetic construct
  source 1..9: note = Description of Artificial Sequence: Synthetic peptide; note = XENP020336 vhCDR3
TSLLGPFDL

SEQ ID NO: 5884 - protein, 215 aa, synthetic construct; identical to SEQ ID NO: 4404
  source 1..215: note = Description of Artificial Sequence: Synthetic polypeptide; note = XENP020336 [CTLA-4]_H3.22_L0.12_Fab Light Chain

SEQ ID NO: 5885 - protein, 108 aa, synthetic construct; identical to SEQ ID NO: 1517
  source 1..108: note = Description of Artificial Sequence: Synthetic polypeptide; note = VL of XENP020336

SEQ ID NO: 5886 - protein, 12 aa, synthetic construct
  source 1..12: note = Description of Artificial Sequence: Synthetic peptide; note = XENP020336 vlCDR1
RASQSVGSSYLA

SEQ ID NO: 5887 - protein, 7 aa, synthetic construct
  source 1..7: note = Description of Artificial Sequence: Synthetic peptide; note = XENP020336 vlCDR2
GAFSRAT

SEQ ID NO: 5888 - protein, 9 aa, synthetic construct
  source 1..9: note = Description of Artificial Sequence: Synthetic peptide; note = XENP020336 vlCDR3
QQYGSSPWT

SEQ ID NO: 5889 - protein, 221 aa, synthetic construct
  source 1..221: note = Description of Artificial Sequence: Synthetic polypeptide; note = XENP020337 [CTLA-4]_H3.23_L0.12_Fab Heavy Chain
EVQLVESGGGLVKPGGSLRLSCAASGFTFSSYTMHWVRQAPGKGLEWVSFISYDGNYKYYADSVKGRFTISRDNAKNSLYLQMNSLRAEDTAVYYCARGGHLGPFDLWGQGTMVTVSSASTKGPSVFPLAPSSKSTSGGTAALGCLVKDYFPEPVTVSWNSGALTSGVHTFPAVLQSSGLYSLSSVVTVPSSSLGTQTYICNVNHKPSNTKVDKKVEPKSC

SEQ ID NO: 5890 - protein, 118 aa, synthetic construct; identical to SEQ ID NO: 2632
  source 1..118: note = Description of Artificial Sequence: Synthetic polypeptide; note = VH of XENP020337

SEQ ID NO: 5891 - protein, 5 aa, synthetic construct
  source 1..5: note = Description of Artificial Sequence: Synthetic peptide; note = XENP020337 vhCDR1
SYTMH

SEQ ID NO: 5892 - protein, 17 aa, synthetic construct
  source 1..17: note = Description of Artificial Sequence: Synthetic peptide; note = XENP020337 vhCDR2
FISYDGNYKYYADSVKG

SEQ ID NO: 5893 - protein, 9 aa, synthetic construct
  source 1..9: note = Description of Artificial Sequence: Synthetic peptide; note = XENP020337 vhCDR3
GGHLGPFDL

SEQ ID NO: 5894 - protein, 215 aa, synthetic construct; identical to SEQ ID NO: 4404
  source 1..215: note = Description of Artificial Sequence: Synthetic polypeptide; note = XENP020337 [CTLA-4]_H3.23_L0.12_Fab Light Chain

SEQ ID NO: 5895 - protein, 108 aa, synthetic construct; identical to SEQ ID NO: 1517
  source 1..108: note = Description of Artificial Sequence: Synthetic polypeptide; note = VL of XENP020337

SEQ ID NO: 5896 - protein, 12 aa, synthetic construct
  source 1..12: note = Description of Artificial Sequence: Synthetic peptide; note = XENP020337 vlCDR1
RASQSVGSSYLA

SEQ ID NO: 5897 - protein, 7 aa, synthetic construct
  source 1..7: note = Description of Artificial Sequence: Synthetic peptide; note = XENP020337 vlCDR2
GAFSRAT

SEQ ID NO: 5898 - protein, 9 aa, synthetic construct
  source 1..9: note = Description of Artificial Sequence: Synthetic peptide; note = XENP020337 vlCDR3
QQYGSSPWT

SEQ ID NO: 5899 - protein, 221 aa, synthetic construct
  source 1..221: note = Description of Artificial Sequence: Synthetic polypeptide; note = XENP020338 [CTLA-4]_H3.24_L0.12_Fab Heavy Chain
EVQLVESGGGLVKPGGSLRLSCAASGFTFSSYTMHWVRQAPGKGLEWVSFISYDGNYKYYADSVKGRFTISRDNAKNSLYLQMNSLRAEDTAVYYCARTSHLGPFDLWGQGTMVTVSSASTKGPSVFPLAPSSKSTSGGTAALGCLVKDYFPEPVTVSWNSGALTSGVHTFPAVLQSSGLYSLSSVVTVPSSSLGTQTYICNVNHKPSNTKVDKKVEPKSC

SEQ ID NO: 5900 - protein, 118 aa, synthetic construct; identical to SEQ ID NO: 2641
  source 1..118: note = Description of Artificial Sequence: Synthetic polypeptide; note = VH of XENP020338

SEQ ID NO: 5901 - protein, 5 aa, synthetic construct
  source 1..5: note = Description of Artificial Sequence: Synthetic peptide; note = XENP020338 vhCDR1
SYTMH

SEQ ID NO: 5902 - protein, 17 aa, synthetic construct
  source 1..17: note = Description of Artificial Sequence: Synthetic peptide; note = XENP020338 vhCDR2
FISYDGNYKYYADSVKG

SEQ ID NO: 5903 - protein, 9 aa, synthetic construct
  source 1..9: note = Description of Artificial Sequence: Synthetic peptide; note = XENP020338 vhCDR3
TSHLGPFDL

SEQ ID NO: 5904 - protein, 215 aa, synthetic construct; identical to SEQ ID NO: 4404
  source 1..215: note = Description of Artificial Sequence: Synthetic polypeptide; note = XENP020338 [CTLA-4]_H3.24_L0.12_Fab Light Chain

SEQ ID NO: 5905 - protein, 108 aa, synthetic construct; identical to SEQ ID NO: 1517
  source 1..108: note = Description of Artificial Sequence: Synthetic polypeptide; note = VL of XENP020338

SEQ ID NO: 5906 - protein, 12 aa, synthetic construct
  source 1..12: note = Description of Artificial Sequence: Synthetic peptide; note = XENP020338 vlCDR1
RASQSVGSSYLA

SEQ ID NO: 5907 - protein, 7 aa, synthetic construct
  source 1..7: note = Description of Artificial Sequence: Synthetic peptide; note = XENP020338 vlCDR2
GAFSRAT

SEQ ID NO: 5908 - protein, 9 aa, synthetic construct
  source 1..9: note = Description of Artificial Sequence: Synthetic peptide; note = XENP020338 vlCDR3
QQYGSSPWT

SEQ ID NO: 5909 - protein, 221 aa, synthetic construct
  source 1..221: note = Description of Artificial Sequence: Synthetic polypeptide; note = XENP020339 [CTLA-4]_H3.25_L0.12_Fab Heavy Chain
EVQLVESGGGLVKPGGSLRLSCAASGFTFSSYTMHWVRQAPGKGLEWVSFISYDGNYKYYADSVKGRFTISRDNAKNSLYLQMNSLRAEDTAVYYCARGGLLGPFDLWGQGTMVTVSSASTKGPSVFPLAPSSKSTSGGTAALGCLVKDYFPEPVTVSWNSGALTSGVHTFPAVLQSSGLYSLSSVVTVPSSSLGTQTYICNVNHKPSNTKVDKKVEPKSC

SEQ ID NO: 5910 - protein, 118 aa, synthetic construct; identical to SEQ ID NO: 2650
  source 1..118: note = Description of Artificial Sequence: Synthetic polypeptide; note = VH of XENP020339

SEQ ID NO: 5911 - protein, 5 aa, synthetic construct
  source 1..5: note = Description of Artificial Sequence: Synthetic peptide; note = XENP020339 vhCDR1
SYTMH

SEQ ID NO: 5912 - protein, 17 aa, synthetic construct
  source 1..17: note = Description of Artificial Sequence: Synthetic peptide; note = XENP020339 vhCDR2
FISYDGNYKYYADSVKG

SEQ ID NO: 5913 - protein, 9 aa, synthetic construct
  source 1..9: note = Description of Artificial Sequence: Synthetic peptide; note = XENP020339 vhCDR3
GGLLGPFDL

SEQ ID NO: 5914 - protein, 215 aa, synthetic construct; identical to SEQ ID NO: 4404
  source 1..215: note = Description of Artificial Sequence: Synthetic polypeptide; note = XENP020339 [CTLA-4]_H3.25_L0.12_Fab Light Chain

SEQ ID NO: 5915 - protein, 108 aa, synthetic construct; identical to SEQ ID NO: 1517
  source 1..108: note = Description of Artificial Sequence: Synthetic polypeptide; note = VL of XENP020339

SEQ ID NO: 5916 - protein, 12 aa, synthetic construct
  source 1..12: note = Description of Artificial Sequence: Synthetic peptide; note = XENP020339 vlCDR1
RASQSVGSSYLA

SEQ ID NO: 5917 - protein, 7 aa, synthetic construct
  source 1..7: note = Description of Artificial Sequence: Synthetic peptide; note = XENP020339 vlCDR2
GAFSRAT

SEQ ID NO: 5918 - protein, 9 aa, synthetic construct
  source 1..9: note = Description of Artificial Sequence: Synthetic peptide; note = XENP020339 vlCDR3
QQYGSSPWT

SEQ ID NO: 5919 - protein, 221 aa, synthetic construct
  source 1..221: note = Description of Artificial Sequence: Synthetic polypeptide; note = XENP020340 [CTLA-4]_H3.26_L0.12_Fab Heavy Chain
EVQLVESGGGLVKPGGSLRLSCAASGFTFSSYTMHWVRQAPGKGLEWVSFISYDGNYKYYADSVKGRFTISRDNAKNSLYLQMNSLRAEDTAVYYCARTSLLGPFDLWGQGTMVTVSSASTKGPSVFPLAPSSKSTSGGTAALGCLVKDYFPEPVTVSWNSGALTSGVHTFPAVLQSSGLYSLSSVVTVPSSSLGTQTYICNVNHKPSNTKVDKKVEPKSC

SEQ ID NO: 5920 - protein, 118 aa, synthetic construct; identical to SEQ ID NO: 2659
  source 1..118: note = Description of Artificial Sequence: Synthetic polypeptide; note = VH of XENP020340

SEQ ID NO: 5921 - protein, 5 aa, synthetic construct
  source 1..5: note = Description of Artificial Sequence: Synthetic peptide; note = XENP020340 vhCDR1
SYTMH

SEQ ID NO: 5922 - protein, 17 aa, synthetic construct
  source 1..17: note = Description of Artificial Sequence: Synthetic peptide; note = XENP020340 vhCDR2
FISYDGNYKYYADSVKG

SEQ ID NO: 5923 - protein, 9 aa, synthetic construct
  source 1..9: note = Description of Artificial Sequence: Synthetic peptide; note = XENP020340 vhCDR3
TSLLGPFDL

SEQ ID NO: 5924 - protein, 215 aa, synthetic construct; identical to SEQ ID NO: 4404
  source 1..215: note = Description of Artificial Sequence: Synthetic polypeptide; note = XENP020340 [CTLA-4]_H3.26_L0.12_Fab Light Chain

SEQ ID NO: 5925 - protein, 108 aa, synthetic construct; identical to SEQ ID NO: 1517
  source 1..108: note = Description of Artificial Sequence: Synthetic polypeptide; note = VL of XENP020340

SEQ ID NO: 5926 - protein, 12 aa, synthetic construct
  source 1..12: note = Description of Artificial Sequence: Synthetic peptide; note = XENP020340 vlCDR1
RASQSVGSSYLA

SEQ ID NO: 5927 - protein, 7 aa, synthetic construct
  source 1..7: note = Description of Artificial Sequence: Synthetic peptide; note = XENP020340 vlCDR2
GAFSRAT

SEQ ID NO: 5928 - protein, 9 aa, synthetic construct
  source 1..9: note = Description of Artificial Sequence: Synthetic peptide; note = XENP020340 vlCDR3
QQYGSSPWT

SEQ ID NO: 5929 - protein, 221 aa, synthetic construct; identical to SEQ ID NO: 5709
  source 1..221: note = Description of Artificial Sequence: Synthetic polypeptide; note = XENP020341 [CTLA-4]_H3.4_L0.118_Fab Heavy Chain

SEQ ID NO: 5930 - protein, 118 aa, synthetic construct; identical to SEQ ID NO: 2461
  source 1..118: note = Description of Artificial Sequence: Synthetic polypeptide; note = VH of XENP020341

SEQ ID NO: 5931 - protein, 5 aa, synthetic construct
  source 1..5: note = Description of Artificial Sequence: Synthetic peptide; note = XENP020341 vhCDR1
SYTMH

SEQ ID NO: 5932 - protein, 17 aa, synthetic construct
  source 1..17: note = Description of Artificial Sequence: Synthetic peptide; note = XENP020341 vhCDR2
FISYDGNHKYYADSVKG

SEQ ID NO: 5933 - protein, 9 aa, synthetic construct
  source 1..9: note = Description of Artificial Sequence: Synthetic peptide; note = XENP020341 vhCDR3
TGHLGPFDL

SEQ ID NO: 5934 - protein, 215 aa, synthetic construct
  source 1..215: note = Description of Artificial Sequence: Synthetic polypeptide; note = XENP020341 [CTLA-4]_H3.4_L0.118_Fab Light Chain
EIVLTQSPATLSVSPGERATLSCRASQSVGSSYLAWYQQKPGQAPRLLIYGAFSRATGIPDRFSGSGSGTDFTLTISRLEPEDFAVYYCQQYGSSPWTFGQGTKVEIKRTVAAPSVFIFPPSDEQLKSGTASVVCLLNNFYPREAKVQWKVDNALQSGNSQESVTEQDSKDSTYSLSSTLTLSKADYEKHKVYACEVTHQGLSSPVTKSFNRGEC

SEQ ID NO: 5935 - protein, 108 aa, synthetic construct; identical to SEQ ID NO: 2669
  source 1..108: note = Description of Artificial Sequence: Synthetic polypeptide; note = VL of XENP020341

SEQ ID NO: 5936 - protein, 12 aa, synthetic construct
  source 1..12: note = Description of Artificial Sequence: Synthetic peptide; note = XENP020341 vlCDR1
RASQSVGSSYLA

SEQ ID NO: 5937 - protein, 7 aa, synthetic construct
  source 1..7: note = Description of Artificial Sequence: Synthetic peptide; note = XENP020341 vlCDR2
GAFSRAT

SEQ ID NO: 5938 - protein, 9 aa, synthetic construct
  source 1..9: note = Description of Artificial Sequence: Synthetic peptide; note = XENP020341 vlCDR3
QQYGSSPWT

SEQ ID NO: 5939 - protein, 221 aa, synthetic construct; identical to SEQ ID NO: 5709
  source 1..221: note = Description of Artificial Sequence: Synthetic polypeptide; note = XENP020342 [CTLA-4]_H3.4_L0.119_Fab Heavy Chain

SEQ ID NO: 5940 - protein, 118 aa, synthetic construct; identical to SEQ ID NO: 2461
  source 1..118: note = Description of Artificial Sequence: Synthetic polypeptide; note = VH of XENP020342

SEQ ID NO: 5941 - protein, 5 aa, synthetic construct
  source 1..5: note = Description of Artificial Sequence: Synthetic peptide; note = XENP020342 vhCDR1
SYTMH

SEQ ID NO: 5942 - protein, 17 aa, synthetic construct
  source 1..17: note = Description of Artificial Sequence: Synthetic peptide; note = XENP020342 vhCDR2
FISYDGNHKYYADSVKG

SEQ ID NO: 5943 - protein, 9 aa, synthetic construct
  source 1..9: note = Description of Artificial Sequence: Synthetic peptide; note = XENP020342 vhCDR3
TGHLGPFDL

SEQ ID NO: 5944 - protein, 215 aa, synthetic construct; identical to SEQ ID NO: 2924
  source 1..215: note = Description of Artificial Sequence: Synthetic polypeptide; note = XENP020342 [CTLA-4]_H3.4_L0.119_Fab Light Chain

SEQ ID NO: 5945 - protein, 108 aa, synthetic construct; identical to SEQ ID NO: 23
  source 1..108: note = Description of Artificial Sequence: Synthetic polypeptide; note = VL of XENP020342

SEQ ID NO: 5946 - protein, 12 aa, synthetic construct
  source 1..12: note = Description of Artificial Sequence: Synthetic peptide; note = XENP020342 vlCDR1
RASQSVGSSYLA

SEQ ID NO: 5947 - protein, 7 aa, synthetic construct
  source 1..7: note = Description of Artificial Sequence: Synthetic peptide; note = XENP020342 vlCDR2
GAFSRAT

SEQ ID NO: 5948 - protein, 9 aa, synthetic construct
  source 1..9: note = Description of Artificial Sequence: Synthetic peptide; note = XENP020342 vlCDR3
QQYGSSPWT

SEQ ID NO: 5949 - protein, 221 aa, synthetic construct; identical to SEQ ID NO: 5709
  source 1..221: note = Description of Artificial Sequence: Synthetic polypeptide; note = XENP020343 [CTLA-4]_H3.4_L0.120_Fab Heavy Chain

SEQ ID NO: 5950 - protein, 118 aa, synthetic construct; identical to SEQ ID NO: 2461
  source 1..118: note = Description of Artificial Sequence: Synthetic polypeptide; note = VH of XENP020343

SEQ ID NO: 5951 - protein, 5 aa, synthetic construct
  source 1..5: note = Description of Artificial Sequence: Synthetic peptide; note = XENP020343 vhCDR1
SYTMH

SEQ ID NO: 5952 - protein, 17 aa, synthetic construct
  source 1..17: note = Description of Artificial Sequence: Synthetic peptide; note = XENP020343 vhCDR2
FISYDGNHKYYADSVKG

SEQ ID NO: 5953 - protein, 9 aa, synthetic construct
  source 1..9: note = Description of Artificial Sequence: Synthetic peptide; note = XENP020343 vhCDR3
TGHLGPFDL

SEQ ID NO: 5954 - protein, 215 aa, synthetic construct
  source 1..215: note = Description of Artificial Sequence: Synthetic polypeptide; note = XENP020343 [CTLA-4]_H3.4_L0.120_Fab Light Chain
EIVLTQSPGTLSVSPGERATLSCRASQSVSSSYLAWYQQKPGQAPRLLIYGAFSRATGIPDRFSGSGSGTDFTLTISRLEPEDFAVYYCQQYGSSPWTFGQGTKVEIKRTVAAPSVFIFPPSDEQLKSGTASVVCLLNNFYPREAKVQWKVDNALQSGNSQESVTEQDSKDSTYSLSSTLTLSKADYEKHKVYACEVTHQGLSSPVTKSFNRGEC

SEQ ID NO: 5955 - protein, 108 aa, synthetic construct; identical to SEQ ID NO: 2687
  source 1..108: note = Description of Artificial Sequence: Synthetic polypeptide; note = VL of XENP020343

SEQ ID NO: 5956 - protein, 12 aa, synthetic construct
  source 1..12: note = Description of Artificial Sequence: Synthetic peptide; note = XENP020343 vlCDR1
RASQSVSSSYLA

SEQ ID NO: 5957 - protein, 7 aa, synthetic construct
  source 1..7: note = Description of Artificial Sequence: Synthetic peptide; note = XENP020343 vlCDR2
GAFSRAT

SEQ ID NO: 5958 - protein, 9 aa, synthetic construct
  source 1..9: note = Description of Artificial Sequence: Synthetic peptide; note = XENP020343 vlCDR3
QQYGSSPWT

SEQ ID NO: 5959 - protein, 221 aa, synthetic construct; identical to SEQ ID NO: 5709
  source 1..221: note = Description of Artificial Sequence: Synthetic polypeptide; note = XENP020344 [CTLA-4]_H3.4_L0.121_Fab Heavy Chain

SEQ ID NO: 5960 - protein, 118 aa, synthetic construct; identical to SEQ ID NO: 2461
  source 1..118: note = Description of Artificial Sequence: Synthetic polypeptide; note = VH of XENP020344

SEQ ID NO: 5961 - protein, 5 aa, synthetic construct
  source 1..5: note = Description of Artificial Sequence: Synthetic peptide; note = XENP020344 vhCDR1
SYTMH

SEQ ID NO: 5962 - protein, 17 aa, synthetic construct
  source 1..17: note = Description of Artificial Sequence: Synthetic peptide; note = XENP020344 vhCDR2
FISYDGNHKYYADSVKG

SEQ ID NO: 5963 - protein, 9 aa, synthetic construct
  source 1..9: note = Description of Artificial Sequence: Synthetic peptide; note = XENP020344 vhCDR3
TGHLGPFDL

SEQ ID NO: 5964 - protein, 215 aa, synthetic construct
  source 1..215: note = Description of Artificial Sequence: Synthetic polypeptide; note = XENP020344 [CTLA-4]_H3.4_L0.121_Fab Light Chain
EIVLTQSPGTLSVSPGERATLSCRASQSVGSSYLAWYQQKPGQAPRLLIYGASSRATGIPDRFSGSGSGTDFTLTISRLEPEDFAVYYCQQYGSSPWTFGQGTKVEIKRTVAAPSVFIFPPSDEQLKSGTASVVCLLNNFYPREAKVQWKVDNALQSGNSQESVTEQDSKDSTYSLSSTLTLSKADYEKHKVYACEVTHQGLSSPVTKSFNRGEC

SEQ ID NO: 5965 - protein, 108 aa, synthetic construct; identical to SEQ ID NO: 2696
  source 1..108: note = Description of Artificial Sequence: Synthetic polypeptide; note = VL of XENP020344

SEQ ID NO: 5966 - protein, 12 aa, synthetic construct
  source 1..12: note = Description of Artificial Sequence: Synthetic peptide; note = XENP020344 vlCDR1
RASQSVGSSYLA

SEQ ID NO: 5967 - protein, 7 aa, synthetic construct
  source 1..7: note = Description of Artificial Sequence: Synthetic peptide; note = XENP020344 vlCDR2
GASSRAT

SEQ ID NO: 5968 - protein, 9 aa, synthetic construct
  source 1..9: note = Description of Artificial Sequence: Synthetic peptide; note = XENP020344 vlCDR3
QQYGSSPWT

SEQ ID NO: 5969 - protein, 221 aa, synthetic construct; identical to SEQ ID NO: 5709
  source 1..221: note = Description of Artificial Sequence: Synthetic polypeptide; note = XENP020345 [CTLA-4]_H3.4_L0.122_Fab Heavy Chain

SEQ ID NO: 5970 - protein, 118 aa, synthetic construct; identical to SEQ ID NO: 2461
  source 1..118: note = Description of Artificial Sequence: Synthetic polypeptide; note = VH of XENP020345

SEQ ID NO: 5971 - protein, 5 aa, synthetic construct
  source 1..5: note = Description of Artificial Sequence: Synthetic peptide; note = XENP020345 vhCDR1
SYTMH

SEQ ID NO: 5972 - protein, 17 aa, synthetic construct
  source 1..17: note = Description of Artificial Sequence: Synthetic peptide; note = XENP020345 vhCDR2
FISYDGNHKYYADSVKG

SEQ ID NO: 5973 - protein, 9 aa, synthetic construct
  source 1..9: note = Description of Artificial Sequence: Synthetic peptide; note = XENP020345 vhCDR3
TGHLGPFDL

SEQ ID NO: 5974 - protein, 215 aa, synthetic construct; identical to SEQ ID NO: 4364
  source 1..215: note = Description of Artificial Sequence: Synthetic polypeptide; note = XENP020345 [CTLA-4]_H3.4_L0.122_Fab Light Chain

SEQ ID NO: 5975 - protein, 108 aa, synthetic construct; identical to SEQ ID NO: 1481
  source 1..108: note = Description of Artificial Sequence: Synthetic polypeptide; note = VL of XENP020345

SEQ ID NO: 5976 - protein, 12 aa, synthetic construct
  source 1..12: note = Description of Artificial Sequence: Synthetic peptide; note = XENP020345 vlCDR1
RASQSVGSSYLA

SEQ ID NO: 5977 - protein, 7 aa, synthetic construct
  source 1..7: note = Description of Artificial Sequence: Synthetic peptide; note = XENP020345 vlCDR2
GAFSRAT

SEQ ID NO: 5978 - protein, 9 aa, synthetic construct
  source 1..9: note = Description of Artificial Sequence: Synthetic peptide; note = XENP020345 vlCDR3
QQYGSSPWT

SEQ ID NO: 5979 - protein, 221 aa, synthetic construct; identical to SEQ ID NO: 5709
  source 1..221: note = Description of Artificial Sequence: Synthetic polypeptide; note = XENP020346 [CTLA-4]_H3.4_L0.123_Fab Heavy Chain

SEQ ID NO: 5980 - protein, 118 aa, synthetic construct; identical to SEQ ID NO: 2461
  source 1..118: note = Description of Artificial Sequence: Synthetic polypeptide; note = VH of XENP020346

SEQ ID NO: 5981 - protein, 5 aa, synthetic construct
  source 1..5: note = Description of Artificial Sequence: Synthetic peptide; note = XENP020346 vhCDR1
SYTMH

SEQ ID NO: 5982 - protein, 17 aa, synthetic construct
  source 1..17: note = Description of Artificial Sequence: Synthetic peptide; note = XENP020346 vhCDR2
FISYDGNHKYYADSVKG

SEQ ID NO: 5983 - protein, 9 aa, synthetic construct
  source 1..9: note = Description of Artificial Sequence: Synthetic peptide; note = XENP020346 vhCDR3
TGHLGPFDL

SEQ ID NO: 5984 - protein, 215 aa, synthetic construct
  source 1..215: note = Description of Artificial Sequence: Synthetic polypeptide; note = XENP020346 [CTLA-4]_H3.4_L0.123_Fab Light Chain
EIVLTQSPATLSVSPGERATLSCRASQSVSSSYLAWYQQKPGQAPRLLIYGAFSRATGIPDRFSGSGSGTDFTLTISRLEPEDFAVYYCQQYGSSPWTFGQGTKVEIKRTVAAPSVFIFPPSDEQLKSGTASVVCLLNNFYPREAKVQWKVDNALQSGNSQESVTEQDSKDSTYSLSSTLTLSKADYEKHKVYACEVTHQGLSSPVTKSFNRGEC

SEQ ID NO: 5985 - protein, 108 aa, synthetic construct; identical to SEQ ID NO: 2714
  source 1..108: note = Description of Artificial Sequence: Synthetic polypeptide; note = VL of XENP020346

SEQ ID NO: 5986 - protein, 12 aa, synthetic construct
  source 1..12: note = Description of Artificial Sequence: Synthetic peptide; note = XENP020346 vlCDR1
RASQSVSSSYLA

SEQ ID NO: 5987 - protein, 7 aa, synthetic construct
  source 1..7: note = Description of Artificial Sequence: Synthetic peptide; note = XENP020346 vlCDR2
GAFSRAT

SEQ ID NO: 5988 - protein, 9 aa, synthetic construct
  source 1..9: note = Description of Artificial Sequence: Synthetic peptide; note = XENP020346 vlCDR3
QQYGSSPWT

SEQ ID NO: 5989 - protein, 221 aa, synthetic construct; identical to SEQ ID NO: 5709
  source 1..221: note = Description of Artificial Sequence: Synthetic polypeptide; note = XENP020347 [CTLA-4]_H3.4_L0.124_Fab Heavy Chain

SEQ ID NO: 5990 - protein, 118 aa, synthetic construct; identical to SEQ ID NO: 2461
  source 1..118: note = Description of Artificial Sequence: Synthetic polypeptide; note = VH of XENP020347

SEQ ID NO: 5991 - protein, 5 aa, synthetic construct
  source 1..5: note = Description of Artificial Sequence: Synthetic peptide; note = XENP020347 vhCDR1
SYTMH

SEQ ID NO: 5992 - protein, 17 aa, synthetic construct
  source 1..17: note = Description of Artificial Sequence: Synthetic peptide; note = XENP020347 vhCDR2
FISYDGNHKYYADSVKG

SEQ ID NO: 5993 - protein, 9 aa, synthetic construct
  source 1..9: note = Description of Artificial Sequence: Synthetic peptide; note = XENP020347 vhCDR3
TGHLGPFDL

SEQ ID NO: 5994 - protein, 215 aa, synthetic construct
  source 1..215: note = Description of Artificial Sequence: Synthetic polypeptide; note = XENP020347 [CTLA-4]_H3.4_L0.124_Fab Light Chain
EIVLTQSPATLSVSPGERATLSCRASQSVGSSYLAWYQQKPGQAPRLLIYGASSRATGIPDRFSGSGSGTDFTLTISRLEPEDFAVYYCQQYGSSPWTFGQGTKVEIKRTVAAPSVFIFPPSDEQLKSGTASVVCLLNNFYPREAKVQWKVDNALQSGNSQESVTEQDSKDSTYSLSSTLTLSKADYEKHKVYACEVTHQGLSSPVTKSFNRGEC

SEQ ID NO: 5995 - protein, 108 aa, synthetic construct; identical to SEQ ID NO: 2723
  source 1..108: note = Description of Artificial Sequence: Synthetic polypeptide; note = VL of XENP020347

SEQ ID NO: 5996 - protein, 12 aa, synthetic construct
  source 1..12: note = Description of Artificial Sequence: Synthetic peptide; note = XENP020347 vlCDR1
RASQSVGSSYLA

SEQ ID NO: 5997 - protein, 7 aa, synthetic construct
  source 1..7: note = Description of Artificial Sequence: Synthetic peptide; note = XENP020347 vlCDR2
GASSRAT

SEQ ID NO: 5998 - protein, 9 aa, synthetic construct
  source 1..9: note = Description of Artificial Sequence: Synthetic peptide; note = XENP020347 vlCDR3
QQYGSSPWT

SEQ ID NO: 5999 - protein, 221 aa, synthetic construct; identical to SEQ ID NO: 5709
  source 1..221: note = Description of Artificial Sequence: Synthetic polypeptide; note = XENP020348 [CTLA-4]_H3.4_L0.125_Fab Heavy Chain

SEQ ID NO: 6000 - protein, 118 aa, synthetic construct; identical to SEQ ID NO: 2461
  source 1..118: note = Description of Artificial Sequence: Synthetic polypeptide; note = VH of XENP020348

SEQ ID NO: 6001 - protein, 5 aa, synthetic construct
  source 1..5: note = Description of Artificial Sequence: Synthetic peptide; note = XENP020348 vhCDR1
SYTMH

SEQ ID NO: 6002 - protein, 17 aa, synthetic construct
  source 1..17: note = Description of Artificial Sequence: Synthetic peptide; note = XENP020348 vhCDR2
FISYDGNHKYYADSVKG

SEQ ID NO: 6003 - protein, 9 aa, synthetic construct
  source 1..9: note = Description of Artificial Sequence: Synthetic peptide; note = XENP020348 vhCDR3
TGHLGPFDL

SEQ ID NO: 6004 - protein, 215 aa, synthetic construct; identical to SEQ ID NO: 4504
  source 1..215: note = Description of Artificial Sequence: Synthetic polypeptide; note = XENP020348 [CTLA-4]_H3.4_L0.125_Fab Light Chain

SEQ ID NO: 6005 - protein, 108 aa, synthetic construct; identical to SEQ ID NO: 1607
  source 1..108: note = Description of Artificial Sequence: Synthetic polypeptide; note = VL of XENP020348

SEQ ID NO: 6006 - protein, 12 aa, synthetic construct
  source 1..12: note = Description of Artificial Sequence: Synthetic peptide; note = XENP020348 vlCDR1
RASQSVSSSYLA

SEQ ID NO: 6007 - protein, 7 aa, synthetic construct
  source 1..7: note = Description of Artificial Sequence: Synthetic peptide; note = XENP020348 vlCDR2
GAFSRAT

SEQ ID NO: 6008 - protein, 9 aa, synthetic construct
  source 1..9: note = Description of Artificial Sequence: Synthetic peptide; note = XENP020348 vlCDR3
QQYGSSPWT

SEQ ID NO: 6009 - protein, 221 aa, synthetic construct; identical to SEQ ID NO: 5709
  source 1..221: note = Description of Artificial Sequence: Synthetic polypeptide; note = XENP020349 [CTLA-4]_H3.4_L0.126_Fab Heavy Chain

SEQ ID NO: 6010 - protein, 118 aa, synthetic construct; identical to SEQ ID NO: 2461
  source 1..118: note = Description of Artificial Sequence: Synthetic polypeptide; note = VH of XENP020349

SEQ ID NO: 6011 - protein, 5 aa, synthetic construct
  source 1..5: note = Description of Artificial Sequence: Synthetic peptide; note = XENP020349 vhCDR1
SYTMH

SEQ ID NO: 6012 - protein, 17 aa, synthetic construct
  source 1..17: note = Description of Artificial Sequence: Synthetic peptide; note = XENP020349 vhCDR2
FISYDGNHKYYADSVKG

SEQ ID NO: 6013 - protein, 9 aa, synthetic construct
  source 1..9: note = Description of Artificial Sequence: Synthetic peptide; note = XENP020349 vhCDR3
TGHLGPFDL

SEQ ID NO: 6014 - protein, 215 aa, synthetic construct; identical to SEQ ID NO: 5014
  source 1..215: note = Description of Artificial Sequence: Synthetic polypeptide; note = XENP020349 [CTLA-4]_H3.4_L0.126_Fab Light Chain

SEQ ID NO: 6015 - protein, 108 aa, synthetic construct; identical to SEQ ID NO: 2066
  source 1..108: note = Description of Artificial Sequence: Synthetic polypeptide; note = VL of XENP020349

SEQ ID NO: 6016 - protein, 12 aa, synthetic construct
  source 1..12: note = Description of Artificial Sequence: Synthetic peptide; note = XENP020349 vlCDR1
RASQSVGSSYLA

SEQ ID NO: 6017 - protein, 7 aa, synthetic construct
  source 1..7: note = Description of Artificial Sequence: Synthetic peptide; note = XENP020349 vlCDR2
GASSRAT

SEQ ID NO: 6018 - protein, 9 aa, synthetic construct
  source 1..9: note = Description of Artificial Sequence: Synthetic peptide; note = XENP020349 vlCDR3
QQYGSSPWT

SEQ ID NO: 6019 - protein, 221 aa, synthetic construct; identical to SEQ ID NO: 5709
  source 1..221: note = Description of Artificial Sequence: Synthetic polypeptide; note = XENP020350 [CTLA-4]_H3.4_L0.127_Fab Heavy Chain

SEQ ID NO: 6020 - protein, 118 aa, synthetic construct; identical to SEQ ID NO: 2461
  source 1..118: note = Description of Artificial Sequence: Synthetic polypeptide; note = VH of XENP020350

SEQ ID NO: 6021 - protein, 5 aa, synthetic construct
  source 1..5: note = Description of Artificial Sequence: Synthetic peptide; note = XENP020350 vhCDR1
SYTMH

SEQ ID NO: 6022 - protein, 17 aa, synthetic construct
  source 1..17: note = Description of Artificial Sequence: Synthetic peptide; note = XENP020350 vhCDR2
FISYDGNHKYYADSVKG

SEQ ID NO: 6023 - protein, 9 aa, synthetic construct
  source 1..9: note = Description of Artificial Sequence: Synthetic peptide; note = XENP020350 vhCDR3
TGHLGPFDL

SEQ ID NO: 6024 - protein, 215 aa, synthetic construct
  source 1..215: note = Description of Artificial Sequence: Synthetic polypeptide; note = XENP020350 [CTLA-4]_H3.4_L0.127_Fab Light Chain
EIVLTQSPGTLSVSPGERATLSCRASQSVSSSYLAWYQQKPGQAPRLLIYGASSRATGIPDRFSGSGSGTDFTLTISRLEPEDFAVYYCQQYGSSPWTFGQGTKVEIKRTVAAPSVFIFPPSDEQLKSGTASVVCLLNNFYPREAKVQWKVDNALQSGNSQESVTEQDSKDSTYSLSSTLTLSKADYEKHKVYACEVTHQGLSSPVTKSFNRGEC

SEQ ID NO: 6025 - protein, 108 aa, synthetic construct; identical to SEQ ID NO: 2750
  source 1..108: note = Description of Artificial Sequence: Synthetic polypeptide; note = VL of XENP020350

SEQ ID NO: 6026 - protein, 12 aa, synthetic construct
  source 1..12: note = Description of Artificial Sequence: Synthetic peptide; note = XENP020350 vlCDR1
RASQSVSSSYLA

SEQ ID NO: 6027 - protein, 7 aa, synthetic construct
  source 1..7: note = Description of Artificial Sequence: Synthetic peptide; note = XENP020350 vlCDR2
GASSRAT

SEQ ID NO: 6028 - protein, 9 aa, synthetic construct
  source 1..9: note = Description of Artificial Sequence: Synthetic peptide; note = XENP020350 vlCDR3
QQYGSSPWT

SEQ ID NO: 6029 - protein, 221 aa, synthetic construct; identical to SEQ ID NO: 5709
  source 1..221: note = Description of Artificial Sequence: Synthetic polypeptide; note = XENP020351 [CTLA-4]_H3.4_L0.128_Fab Heavy Chain

SEQ ID NO: 6030 - protein, 118 aa, synthetic construct; identical to SEQ ID NO: 2461
  source 1..118: note = Description of Artificial Sequence: Synthetic polypeptide; note = VH of XENP020351

SEQ ID NO: 6031 - protein, 5 aa, synthetic construct
  source 1..5: note = Description of Artificial Sequence: Synthetic peptide; note = XENP020351 vhCDR1
SYTMH

SEQ ID NO: 6032 - protein, 17 aa, synthetic construct
  source 1..17: note = Description of Artificial Sequence: Synthetic peptide; note = XENP020351 vhCDR2
FISYDGNHKYYADSVKG

SEQ ID NO: 6033 - protein, 9 aa, synthetic construct
  source 1..9: note = Description of Artificial Sequence: Synthetic peptide; note = XENP020351 vhCDR3
TGHLGPFDL

SEQ ID NO: 6034 - protein, 215 aa, synthetic construct
  source 1..215: note = Description of Artificial Sequence: Synthetic polypeptide; note = XENP020351 [CTLA-4]_H3.4_L0.128_Fab Light Chain
EIVLTQSPATLSLSPGERATLSCRASQSVSSSYLAWYQQKPGQAPRLLIYGAFSRATGIPDRFSGSGSGTDFTLTISRLEPEDFAVYYCQQYGSSPWTFGQGTKVEIKRTVAAPSVFIFPPSDEQLKSGTASVVCLLNNFYPREAKVQWKVDNALQSGNSQESVTEQDSKDSTYSLSSTLTLSKADYEKHKVYACEVTHQGLSSPVTKSFNRGEC

SEQ ID NO: 6035 - protein, 108 aa, synthetic construct; identical to SEQ ID NO: 2759
  source 1..108: note = Description of Artificial Sequence: Synthetic polypeptide; note = VL of XENP020351

SEQ ID NO: 6036 - protein, 12 aa, synthetic construct
  source 1..12: note = Description of Artificial Sequence: Synthetic peptide; note = XENP020351 vlCDR1
RASQSVSSSYLA

SEQ ID NO: 6037 - protein, 7 aa, synthetic construct
  source 1..7: note = Description of Artificial Sequence: Synthetic peptide; note = XENP020351 vlCDR2
GAFSRAT

SEQ ID NO: 6038 - protein, 9 aa, synthetic construct
  source 1..9: note = Description of Artificial Sequence: Synthetic peptide; note = XENP020351 vlCDR3
QQYGSSPWT

SEQ ID NO: 6039 - protein, 221 aa, synthetic construct; identical to SEQ ID NO: 5709
  source 1..221: note = Description of Artificial Sequence: Synthetic polypeptide; note = XENP020352 [CTLA-4]_H3.4_L0.129_Fab Heavy Chain

SEQ ID NO: 6040 - protein, 118 aa, synthetic construct; identical to SEQ ID NO: 2461
  source 1..118: note = Description of Artificial Sequence: Synthetic polypeptide; note = VH of XENP020352

SEQ ID NO: 6041 - protein, 5 aa, synthetic construct
  source 1..5: note = Description of Artificial Sequence: Synthetic peptide; note = XENP020352 vhCDR1
SYTMH

SEQ ID NO: 6042 - protein, 17 aa, synthetic construct
  source 1..17: note = Description of Artificial Sequence: Synthetic peptide; note = XENP020352 vhCDR2
FISYDGNHKYYADSVKG

SEQ ID NO: 6043 - protein, 9 aa, synthetic construct
  source 1..9: note = Description of Artificial Sequence: Synthetic peptide; note = XENP020352 vhCDR3
TGHLGPFDL

SEQ ID NO: 6044 - protein, 215 aa, synthetic construct
  source 1..215: note = Description of Artificial Sequence: Synthetic polypeptide; note = XENP020352 [CTLA-4]_H3.4_L0.129_Fab Light Chain
EIVLTQSPATLSLSPGERATLSCRASQSVGSSYLAWYQQKPGQAPRLLIYGASSRATGIPDRFSGSGSGTDFTLTISRLEPEDFAVYYCQQYGSSPWTFGQGTKVEIKRTVAAPSVFIFPPSDEQLKSGTASVVCLLNNFYPREAKVQWKVDNALQSGNSQESVTEQDSKDSTYSLSSTLTLSKADYEKHKVYACEVTHQGLSSPVTKSFNRGEC

SEQ ID NO: 6045 - protein, 108 aa, synthetic construct; identical to SEQ ID NO: 2768
  source 1..108: note = Description of Artificial Sequence: Synthetic polypeptide; note = VL of XENP020352

SEQ ID NO: 6046 - protein, 12 aa, synthetic construct
  source 1..12: note = Description of Artificial Sequence: Synthetic peptide; note = XENP020352 vlCDR1
RASQSVGSSYLA

SEQ ID NO: 6047 - protein, 7 aa, synthetic construct
  source 1..7: note = Description of Artificial Sequence: Synthetic peptide; note = XENP020352 vlCDR2
GASSRAT

SEQ ID NO: 6048 - protein, 9 aa, synthetic construct
  source 1..9: note = Description of Artificial Sequence: Synthetic peptide; note = XENP020352 vlCDR3
QQYGSSPWT

SEQ ID NO: 6049 - protein, 221 aa, synthetic construct; identical to SEQ ID NO: 5709
  source 1..221: note = Description of Artificial Sequence: Synthetic polypeptide; note = XENP020353 [CTLA-4]_H3.4_L0.130_Fab Heavy Chain

SEQ ID NO: 6050 - protein, 118 aa, synthetic construct; identical to SEQ ID NO: 2461
  source 1..118: note = Description of Artificial Sequence: Synthetic polypeptide; note = VH of XENP020353

SEQ ID NO: 6051 - protein, 5 aa, synthetic construct
  source 1..5: note = Description of Artificial Sequence: Synthetic peptide; note = XENP020353 vhCDR1
SYTMH

SEQ ID NO: 6052 - protein, 17 aa, synthetic construct
  source 1..17: note = Description of Artificial Sequence: Synthetic peptide; note = XENP020353 vhCDR2
FISYDGNHKYYADSVKG

SEQ ID NO: 6053 - protein, 9 aa, synthetic construct
  source 1..9: note = Description of Artificial Sequence: Synthetic peptide; note = XENP020353 vhCDR3
TGHLGPFDL

SEQ ID NO: 6054 - protein, 215 aa, synthetic construct
  source 1..215: note = Description of Artificial Sequence: Synthetic polypeptide; note = XENP020353 [CTLA-4]_H3.4_L0.130_Fab Light Chain
EIVLTQSPATLSVSPGERATLSCRASQSVSSSYLAWYQQKPGQAPRLLIYGASSRATGIPDRFSGSGSGTDFTLTISRLEPEDFAVYYCQQYGSSPWTFGQGTKVEIKRTVAAPSVFIFPPSDEQLKSGTASVVCLLNNFYPREAKVQWKVDNALQSGNSQESVTEQDSKDSTYSLSSTLTLSKADYEKHKVYACEVTHQGLSSPVTKSFNRGEC

SEQ ID NO: 6055 - protein, 108 aa, synthetic construct; identical to SEQ ID NO: 2777
  source 1..108: note = Description of Artificial Sequence: Synthetic polypeptide; note = VL of XENP020353

SEQ ID NO: 6056 - protein, 12 aa, synthetic construct
  source 1..12: note = Description of Artificial Sequence: Synthetic peptide; note = XENP020353 vlCDR1
RASQSVSSSYLA

SEQ ID NO: 6057 - protein, 7 aa, synthetic construct
  source 1..7: note = Description of Artificial Sequence: Synthetic peptide; note = XENP020353 vlCDR2
GASSRAT

SEQ ID NO: 6058 - protein, 9 aa, synthetic construct
  source 1..9: note = Description of Artificial Sequence: Synthetic peptide; note = XENP020353 vlCDR3
QQYGSSPWT

SEQ ID NO: 6059 - protein, 221 aa, synthetic construct; identical to SEQ ID NO: 5709
  source 1..221: note = Description of Artificial Sequence: Synthetic polypeptide; note = XENP020354 [CTLA-4]_H3.4_L0.131_Fab Heavy Chain

SEQ ID NO: 6060 - protein, 118 aa, synthetic construct; identical to SEQ ID NO: 2461
  source 1..118: note = Description of Artificial Sequence: Synthetic polypeptide; note = VH of XENP020354

SEQ ID NO: 6061 - protein, 5 aa, synthetic construct
  source 1..5: note = Description of Artificial Sequence: Synthetic peptide; note = XENP020354 vhCDR1
SYTMH

SEQ ID NO: 6062 - protein, 17 aa, synthetic construct
  source 1..17: note = Description of Artificial Sequence: Synthetic peptide; note = XENP020354 vhCDR2
FISYDGNHKYYADSVKG

SEQ ID NO: 6063 - protein, 9 aa, synthetic construct
  source 1..9: note = Description of Artificial Sequence: Synthetic peptide; note = XENP020354 vhCDR3
TGHLGPFDL

SEQ ID NO: 6064 - protein, 215 aa, synthetic construct
  source 1..215: note = Description of Artificial Sequence: Synthetic polypeptide; note = XENP020354 [CTLA-4]_H3.4_L0.131_Fab Light Chain
EIVLTQSPGTLSLSPGERATLSCRASQSVSSSYLAWYQQKPGQAPRLLIYGASSRATGIPDRFSGSGSGTDFTLTISRLEPEDFAVYYCQQYGSSPWTFGQGTKVEIKRTVAAPSVFIFPPSDEQLKSGTASVVCLLNNFYPREAKVQWKVDNALQSGNSQESVTEQDSKDSTYSLSSTLTLSKADYEKHKVYACEVTHQGLSSPVTKSFNRGEC

SEQ ID NO: 6065 - protein, 108 aa, synthetic construct; identical to SEQ ID NO: 2786
  source 1..108: note = Description of Artificial Sequence: Synthetic polypeptide; note = VL of XENP020354

SEQ ID NO: 6066 - protein, 12 aa, synthetic construct
  source 1..12: note = Description of Artificial Sequence: Synthetic peptide; note = XENP020354 vlCDR1
RASQSVSSSYLA

SEQ ID NO: 6067 - protein, 7 aa, synthetic construct
  source 1..7: note = Description of Artificial Sequence: Synthetic peptide; note = XENP020354 vlCDR2
GASSRAT

SEQ ID NO: 6068 - protein, 9 aa, synthetic construct
  source 1..9: note = Description of Artificial Sequence: Synthetic peptide; note = XENP020354 vlCDR3
QQYGSSPWT

SEQ ID NO: 6069 - protein, 221 aa, synthetic construct; identical to SEQ ID NO: 5709
  source 1..221: note = Description of Artificial Sequence: Synthetic polypeptide; note = XENP020355 [CTLA-4]_H3.4_L0.132_Fab Heavy Chain

SEQ ID NO: 6070 - protein, 118 aa, synthetic construct; identical to SEQ ID NO: 2461
  source 1..118: note = Description of Artificial Sequence: Synthetic polypeptide; note = VH of XENP020355

SEQ ID NO: 6071 - protein, 5 aa, synthetic construct
  source 1..5: note = Description of Artificial Sequence: Synthetic peptide; note = XENP020355 vhCDR1
SYTMH

SEQ ID NO: 6072 - protein, 17 aa, synthetic construct
  source 1..17: note = Description of Artificial Sequence: Synthetic peptide; note = XENP020355 vhCDR2
FISYDGNHKYYADSVKG

SEQ ID NO: 6073 - protein, 9 aa, synthetic construct
  source 1..9: note = Description of Artificial Sequence: Synthetic peptide; note = XENP020355 vhCDR3
TGHLGPFDL

SEQ ID NO: 6074 - protein, 215 aa, synthetic construct
  source 1..215: note = Description of Artificial Sequence: Synthetic polypeptide; note = XENP020355 [CTLA-4]_H3.4_L0.132_Fab Light Chain
EIVLTQSPATLSLSPGERATLSCRASQSVSSSYLAWYQQKPGQAPRLLIYGASSRATGIPDRFSGSGSGTDFTLTISRLEPEDFAVYYCQQYGSSPWTFGQGTKVEIKRTVAAPSVFIFPPSDEQLKSGTASVVCLLNNFYPREAKVQWKVDNALQSGNSQESVTEQDSKDSTYSLSSTLTLSKADYEKHKVYACEVTHQGLSSPVTKSFNRGEC

SEQ ID NO: 6075 - protein, 108 aa, synthetic construct; identical to SEQ ID NO: 2795
  source 1..108: note = Description of Artificial Sequence: Synthetic polypeptide; note = VL of XENP020355

SEQ ID NO: 6076 - protein, 12 aa, synthetic construct
  source 1..12: note = Description of Artificial Sequence: Synthetic peptide; note = XENP020355 vlCDR1
RASQSVSSSYLA

SEQ ID NO: 6077 - protein, 7 aa, synthetic construct
  source 1..7: note = Description of Artificial Sequence: Synthetic peptide; note = XENP020355 vlCDR2
GASSRAT

SEQ ID NO: 6078 - protein, 9 aa, synthetic construct
  source 1..9: note = Description of Artificial Sequence: Synthetic peptide; note = XENP020355 vlCDR3
QQYGSSPWT

SEQ ID NO: 6079 - protein, 221 aa, synthetic construct; identical to SEQ ID NO: 5719
  source 1..221: note = Description of Artificial Sequence: Synthetic polypeptide; note = XENP020356 [CTLA-4]_H3.5_L2_Fab Heavy Chain

SEQ ID NO: 6080 - protein, 118 aa, synthetic construct; identical to SEQ ID NO: 2470
  source 1..118: note = Description of Artificial Sequence: Synthetic polypeptide; note = VH of XENP020356

SEQ ID NO: 6081 - protein, 5 aa, synthetic construct
  source 1..5: note = Description of Artificial Sequence: Synthetic peptide; note = XENP020356 vhCDR1
SYTMH

SEQ ID NO: 6082 - protein, 17 aa, synthetic construct
  source 1..17: note = Description of Artificial Sequence: Synthetic peptide; note = XENP020356 vhCDR2
FISYDGNTKYYADSVKG

SEQ ID NO: 6083 - protein, 9 aa, synthetic construct
  source 1..9: note = Description of Artificial Sequence: Synthetic peptide; note = XENP020356 vhCDR3
TGHLGPFDL

SEQ ID NO: 6084 - protein, 215 aa, synthetic construct; identical to SEQ ID NO: 5474
  source 1..215: note = Description of Artificial Sequence: Synthetic polypeptide; note = XENP020356 [CTLA-4]_H3.5_L2_Fab Light Chain

SEQ ID NO: 6085 - protein, 108 aa, synthetic construct; identical to SEQ ID NO: 167
  source 1..108: note = Description of Artificial Sequence: Synthetic polypeptide; note = VL of XENP020356

SEQ ID NO: 6086 - protein, 12 aa, synthetic construct
  source 1..12: note = Description of Artificial Sequence: Synthetic peptide; note = XENP020356 vlCDR1
RASQSVGSSYLA

SEQ ID NO: 6087 - protein, 7 aa, synthetic construct
  source 1..7: note = Description of Artificial Sequence: Synthetic peptide; note = XENP020356 vlCDR2
GAFSRAT

SEQ ID NO: 6088 - protein, 9 aa, synthetic construct
  source 1..9: note = Description of Artificial Sequence: Synthetic peptide; note = XENP020356 vlCDR3
QQYGSSPWT

SEQ ID NO: 6089 - protein, 221 aa, synthetic construct; identical to SEQ ID NO: 5719
  source 1..221: note = Description of Artificial Sequence: Synthetic polypeptide; note = XENP020357 [CTLA-4]_H3.5_L2.1_Fab Heavy Chain

SEQ ID NO: 6090 - protein, 118 aa, synthetic construct; identical to SEQ ID NO: 2470
  source 1..118: note = Description of Artificial Sequence: Synthetic polypeptide; note = VH of XENP020357

SEQ ID NO: 6091 - protein, 5 aa, synthetic construct
  source 1..5: note = Description of Artificial Sequence: Synthetic peptide; note = XENP020357 vhCDR1
SYTMH

SEQ ID NO: 6092 - protein, 17 aa, synthetic construct
  source 1..17: note = Description of Artificial Sequence: Synthetic peptide; note = XENP020357 vhCDR2
FISYDGNTKYYADSVKG

SEQ ID NO: 6093 - protein, 9 aa, synthetic construct
  source 1..9: note = Description of Artificial Sequence: Synthetic peptide; note = XENP020357 vhCDR3
TGHLGPFDL

SEQ ID NO: 6094 - protein, 215 aa, synthetic construct
  source 1..215: note = Description of Artificial Sequence: Synthetic polypeptide; note = XENP020357 [CTLA-4]_H3.5_L2.1_Fab Light Chain
EIVMTQSPATLSVSPGERATLSCRASQSVSSSYLAWYQQKPGQAPRLLIYGAFSRATGIPARFSGSGSGTEFTLTISSLQSEDFAVYYCQQYGSSPWTFGQGTKVEIKRTVAAPSVFIFPPSDEQLKSGTASVVCLLNNFYPREAKVQWKVDNALQSGNSQESVTEQDSKDSTYSLSSTLTLSKADYEKHKVYACEVTHQGLSSPVTKSFNRGEC

SEQ ID NO: 6095 - protein, 108 aa, synthetic construct; identical to SEQ ID NO: 2813
  source 1..108: note = Description of Artificial Sequence: Synthetic polypeptide; note = VL of XENP020357

SEQ ID NO: 6096 - protein, 12 aa, synthetic construct
  source 1..12: note = Description of Artificial Sequence: Synthetic peptide; note = XENP020357 vlCDR1
RASQSVSSSYLA

SEQ ID NO: 6097 - protein, 7 aa, synthetic construct
  source 1..7: note = Description of Artificial Sequence: Synthetic peptide; note = XENP020357 vlCDR2
GAFSRAT

SEQ ID NO: 6098 - protein, 9 aa, synthetic construct
  source 1..9: note = Description of Artificial Sequence: Synthetic peptide; note = XENP020357 vlCDR3
QQYGSSPWT

SEQ ID NO: 6099 - protein, 221 aa, synthetic construct; identical to SEQ ID NO: 5719
  source 1..221: note = Description of Artificial Sequence: Synthetic polypeptide; note = XENP020358 [CTLA-4]_H3.5_L2.2_Fab Heavy Chain

SEQ ID NO: 6100 - protein, 118 aa, synthetic construct; identical to SEQ ID NO: 2470
  source 1..118: note = Description of Artificial Sequence: Synthetic polypeptide; note = VH of XENP020358

SEQ ID NO: 6101 - protein, 5 aa, synthetic construct
  source 1..5: note = Description of Artificial Sequence: Synthetic peptide; note = XENP020358 vhCDR1
SYTMH

SEQ ID NO: 6102 - protein, 17 aa, synthetic construct
  source 1..17: note = Description of Artificial Sequence: Synthetic peptide; note = XENP020358 vhCDR2
FISYDGNTKYYADSVKG

SEQ ID NO: 6103 - protein, 9 aa, synthetic construct
  source 1..9: note = Description of Artificial Sequence: Synthetic peptide; note = XENP020358 vhCDR3
TGHLGPFDL

SEQ ID NO: 6104 - protein, 215 aa, synthetic construct
  source 1..215: note = Description of Artificial Sequence: Synthetic polypeptide; note = XENP020358 [CTLA-4]_H3.5_L2.2_Fab Light Chain
EIVMTQSPATLSVSPGERATLSCRASQSVGSSYLAWYQQKPGQAPRLLIYGASSRATGIPARFSGSGSGTEFTLTISSLQSEDFAVYYCQQYGSSPWTFGQGTKVEIKRTVAAPSVFIFPPSDEQLKSGTASVVCLLNNFYPREAKVQWKVDNALQSGNSQESVTEQDSKDSTYSLSSTLTLSKADYEKHKVYACEVTHQGLSSPVTKSFNRGEC

SEQ ID NO: 6105 - protein, 108 aa, synthetic construct; identical to SEQ ID NO: 2822
  source 1..108: note = Description of Artificial Sequence: Synthetic polypeptide; note = VL of XENP020358

SEQ ID NO: 6106 - protein, 12 aa, synthetic construct
  source 1..12: note = Description of Artificial Sequence: Synthetic peptide; note = XENP020358 vlCDR1
RASQSVGSSYLA

SEQ ID NO: 6107 - protein, 7 aa, synthetic construct
  source 1..7: note = Description of Artificial Sequence: Synthetic peptide; note = XENP020358 vlCDR2
GASSRAT

SEQ ID NO: 6108 - protein, 9 aa, synthetic construct
  source 1..9: note = Description of Artificial Sequence: Synthetic peptide; note = XENP020358 vlCDR3
QQYGSSPWT

SEQ ID NO: 6109 - protein, 221 aa, synthetic construct; identical to SEQ ID NO: 5719
  source 1..221: note = Description of Artificial Sequence: Synthetic polypeptide; note = XENP020359 [CTLA-4]_H3.5_L2.3_Fab Heavy Chain

SEQ ID NO: 6110 - protein, 118 aa, synthetic construct; identical to SEQ ID NO: 2470
  source 1..118: note = Description of Artificial Sequence: Synthetic polypeptide; note = VH of XENP020359

SEQ ID NO: 6111 - protein, 5 aa, synthetic construct
  source 1..5: note = Description of Artificial Sequence: Synthetic peptide; note = XENP020359 vhCDR1
SYTMH

SEQ ID NO: 6112 - protein, 17 aa, synthetic construct
  source 1..17: note = Description of Artificial Sequence: Synthetic peptide; note = XENP020359 vhCDR2
FISYDGNTKYYADSVKG

SEQ ID NO: 6113 - protein, 9 aa, synthetic construct
  source 1..9: note = Description of Artificial Sequence: Synthetic peptide; note = XENP020359 vhCDR3
TGHLGPFDL

SEQ ID NO: 6114 - protein, 215 aa, synthetic construct
  source 1..215: note = Description of Artificial Sequence: Synthetic polypeptide; note = XENP020359 [CTLA-4]_H3.5_L2.3_Fab Light Chain
EIVMTQSPATLSVSPGERATLSCRASQSVSSSYLAWYQQKPGQAPRLLIYGASSRATGIPARFSGSGSGTEFTLTISSLQSEDFAVYYCQQYGSSPWTFGQGTKVEIKRTVAAPSVFIFPPSDEQLKSGTASVVCLLNNFYPREAKVQWKVDNALQSGNSQESVTEQDSKDSTYSLSSTLTLSKADYEKHKVYACEVTHQGLSSPVTKSFNRGEC

SEQ ID NO: 6115 - protein, 108 aa, synthetic construct; identical to SEQ ID NO: 2831
  source 1..108: note = Description of Artificial Sequence: Synthetic polypeptide; note = VL of XENP020359

SEQ ID NO: 6116 - protein, 12 aa, synthetic construct
  source 1..12: note = Description of Artificial Sequence: Synthetic peptide; note = XENP020359 vlCDR1
RASQSVSSSYLA

SEQ ID NO: 6117 - protein, 7 aa, synthetic construct
  source 1..7: note = Description of Artificial Sequence: Synthetic peptide; note = XENP020359 vlCDR2
GASSRAT

SEQ ID NO: 6118 - protein, 9 aa, synthetic construct
  source 1..9: note = Description of Artificial Sequence: Synthetic peptide; note = XENP020359 vlCDR3
QQYGSSPWT

SEQ ID NO: 6119 - protein, 221 aa, synthetic construct; identical to SEQ ID NO: 5869
  source 1..221: note = Description of Artificial Sequence: Synthetic polypeptide; note = XENP020422 [CTLA-4]_H3.21_L0.124_Fab Heavy Chain

SEQ ID NO: 6120 - protein, 118 aa, synthetic construct; identical to SEQ ID NO: 2614
  source 1..118: note = Description of Artificial Sequence: Synthetic polypeptide; note = VH of XENP020422

SEQ ID NO: 6121 - protein, 5 aa, synthetic construct
  source 1..5: note = Description of Artificial Sequence: Synthetic peptide; note = XENP020422 vhCDR1
SYTMH

SEQ ID NO: 6122 - protein, 17 aa, synthetic construct
  source 1..17: note = Description of Artificial Sequence: Synthetic peptide; note = XENP020422 vhCDR2
FISYDGNTKYYADSVKG

SEQ ID NO: 6123 - protein, 9 aa, synthetic construct
  source 1..9: note = Description of Artificial Sequence: Synthetic peptide; note = XENP020422 vhCDR3
GGLLGPFDL

SEQ ID NO: 6124 - protein, 215 aa, synthetic construct; identical to SEQ ID NO: 5994
  source 1..215: note = Description of Artificial Sequence: Synthetic polypeptide; note = XENP020422 [CTLA-4]_H3.21_L0.124_Fab Light Chain

SEQ ID NO: 6125 - protein, 108 aa, synthetic construct; identical to SEQ ID NO: 2723
  source 1..108: note = Description of Artificial Sequence: Synthetic polypeptide; note = VL of XENP020422

SEQ ID NO: 6126 - protein, 12 aa, synthetic construct
  source 1..12: note = Description of Artificial Sequence: Synthetic peptide; note = XENP020422 vlCDR1
RASQSVGSSYLA

SEQ ID NO: 6127 - protein, 7 aa, synthetic construct
  source 1..7: note = Description of Artificial Sequence: Synthetic peptide; note = XENP020422 vlCDR2
GASSRAT

SEQ ID NO: 6128 - protein, 9 aa, synthetic construct
  source 1..9: note = Description of Artificial Sequence: Synthetic peptide; note = XENP020422 vlCDR3
QQYGSSPWT

SEQ ID NO: 6129 - protein, 221 aa, synthetic construct; identical to SEQ ID NO: 5869
  source 1..221: note = Description of Artificial Sequence: Synthetic polypeptide; note = XENP020423 [CTLA-4]_H3.21_L0.129_Fab Heavy Chain

SEQ ID NO: 6130 - protein, 118 aa, synthetic construct; identical to SEQ ID NO: 2614
  source 1..118: note = Description of Artificial Sequence: Synthetic polypeptide; note = VH of XENP020423

SEQ ID NO: 6131 - protein, 5 aa, synthetic construct
  source 1..5: note = Description of Artificial Sequence: Synthetic peptide; note = XENP020423 vhCDR1
SYTMH

SEQ ID NO: 6132 - protein, 17 aa, synthetic construct
  source 1..17: note = Description of Artificial Sequence: Synthetic peptide; note = XENP020423 vhCDR2
FISYDGNTKYYADSVKG

SEQ ID NO: 6133 - protein, 9 aa, synthetic construct
  source 1..9: note = Description of Artificial Sequence: Synthetic peptide; note = XENP020423 vhCDR3
GGLLGPFDL

SEQ ID NO: 6134 - protein, 215 aa, synthetic construct; identical to SEQ ID NO: 6044
  source 1..215: note = Description of Artificial Sequence: Synthetic polypeptide; note = XENP020423 [CTLA-4]_H3.21_L0.129_Fab Light Chain

SEQ ID NO: 6135 - protein, 108 aa, synthetic construct; identical to SEQ ID NO: 2768
  source 1..108: note = Description of Artificial Sequence: Synthetic polypeptide; note = VL of XENP020423

SEQ ID NO: 6136 - protein, 12 aa, synthetic construct
  source 1..12: note = Description of Artificial Sequence: Synthetic peptide; note = XENP020423 vlCDR1
RASQSVGSSYLA

SEQ ID NO: 6137 - protein, 7 aa, synthetic construct
  source 1..7: note = Description of Artificial Sequence: Synthetic peptide; note = XENP020423 vlCDR2
GASSRAT

SEQ ID NO: 6138 - protein, 9 aa, synthetic construct
  source 1..9: note = Description of Artificial Sequence: Synthetic peptide; note = XENP020423 vlCDR3
QQYGSSPWT

SEQ ID NO: 6139 - protein, 221 aa, synthetic construct; identical to SEQ ID NO: 5869
  source 1..221: note = Description of Artificial Sequence: Synthetic polypeptide; note = XENP020424 [CTLA-4]_H3.21_L0.132_Fab Heavy Chain

SEQ ID NO: 6140 - protein, 118 aa, synthetic construct; identical to SEQ ID NO: 2614
  source 1..118: note = Description of Artificial Sequence: Synthetic polypeptide; note = VH of XENP020424

SEQ ID NO: 6141 - protein, 5 aa, synthetic construct
  source 1..5: note = Description of Artificial Sequence: Synthetic peptide; note = XENP020424 vhCDR1
SYTMH

SEQ ID NO: 6142 - protein, 17 aa, synthetic construct
  source 1..17: note = Description of Artificial Sequence: Synthetic peptide; note = XENP020424 vhCDR2
FISYDGNTKYYADSVKG

SEQ ID NO: 6143 - protein, 9 aa, synthetic construct
  source 1..9: note = Description of Artificial Sequence: Synthetic peptide; note = XENP020424 vhCDR3
GGLLGPFDL

SEQ ID NO: 6144 - protein, 215 aa, synthetic construct; identical to SEQ ID NO: 6074
  source 1..215: note = Description of Artificial Sequence: Synthetic polypeptide; note = XENP020424 [CTLA-4]_H3.21_L0.132_Fab Light Chain

SEQ ID NO: 6145 - protein, 108 aa, synthetic construct; identical to SEQ ID NO: 2795
  source 1..108: note = Description of Artificial Sequence: Synthetic polypeptide; note = VL of XENP020424

SEQ ID NO: 6146 - protein, 12 aa, synthetic construct
  source 1..12: note = Description of Artificial Sequence: Synthetic peptide; note = XENP020424 vlCDR1
RASQSVSSSYLA

SEQ ID NO: 6147 - protein, 7 aa, synthetic construct
  source 1..7: note = Description of Artificial Sequence: Synthetic peptide; note = XENP020424 vlCDR2
GASSRAT

SEQ ID NO: 6148 - protein, 9 aa, synthetic construct
  source 1..9: note = Description of Artificial Sequence: Synthetic peptide; note = XENP020424 vlCDR3
QQYGSSPWT

SEQ ID NO: 6149 - protein, 221 aa, synthetic construct; identical to SEQ ID NO: 5889
  source 1..221: note = Description of Artificial Sequence: Synthetic polypeptide; note = XENP020425 [CTLA-4]_H3.23_L0.124_Fab Heavy Chain

SEQ ID NO: 6150 - protein, 118 aa, synthetic construct; identical to SEQ ID NO: 2632
  source 1..118: note = Description of Artificial Sequence: Synthetic polypeptide; note = VH of XENP020425

SEQ ID NO: 6151 - protein, 5 aa, synthetic construct
  source 1..5: note = Description of Artificial Sequence: Synthetic peptide; note = XENP020425 vhCDR1
SYTMH

SEQ ID NO: 6152 - protein, 17 aa, synthetic construct
  source 1..17: note = Description of Artificial Sequence: Synthetic peptide; note = XENP020425 vhCDR2
FISYDGNYKYYADSVKG

SEQ ID NO: 6153 - protein, 9 aa, synthetic construct
  source 1..9: note = Description of Artificial Sequence: Synthetic peptide; note = XENP020425 vhCDR3
GGHLGPFDL

SEQ ID NO: 6154 - protein, 215 aa, synthetic construct; identical to SEQ ID NO: 5994
  source 1..215: note = Description of Artificial Sequence: Synthetic polypeptide; note = XENP020425 [CTLA-4]_H3.23_L0.124_Fab Light Chain

SEQ ID NO: 6155 - protein, 108 aa, synthetic construct; identical to SEQ ID NO: 2723
  source 1..108: note = Description of Artificial Sequence: Synthetic polypeptide; note = VL of XENP020425

SEQ ID NO: 6156 - protein, 12 aa, synthetic construct
  source 1..12: note = Description of Artificial Sequence: Synthetic peptide; note = XENP020425 vlCDR1
RASQSVGSSYLA

SEQ ID NO: 6157 - protein, 7 aa, synthetic construct
  source 1..7: note = Description of Artificial Sequence: Synthetic peptide; note = XENP020425 vlCDR2
GASSRAT

SEQ ID NO: 6158 - protein, 9 aa, synthetic construct
  source 1..9: note = Description of Artificial Sequence: Synthetic peptide; note = XENP020425 vlCDR3
QQYGSSPWT

SEQ ID NO: 6159 - protein, 221 aa, synthetic construct; identical to SEQ ID NO: 5889
  source 1..221: note = Description of Artificial Sequence: Synthetic polypeptide; note = XENP020426 [CTLA-4]_H3.23_L0.129_Fab Heavy Chain

SEQ ID NO: 6160 - protein, 118 aa, synthetic construct; identical to SEQ ID NO: 2632
  source 1..118: note = Description of Artificial Sequence: Synthetic polypeptide; note = VH of XENP020426

SEQ ID NO: 6161 - protein, 5 aa, synthetic construct
  source 1..5: note = Description of Artificial Sequence: Synthetic peptide; note = XENP020426 vhCDR1
SYTMH

SEQ ID NO: 6162 - protein, 17 aa, synthetic construct
  source 1..17: note = Description of Artificial Sequence: Synthetic peptide; note = XENP020426 vhCDR2
FISYDGNYKYYADSVKG

SEQ ID NO: 6163 - protein, 9 aa, synthetic construct
  source 1..9: note = Description of Artificial Sequence: Synthetic peptide; note = XENP020426 vhCDR3
GGHLGPFDL

SEQ ID NO: 6164 - protein, 215 aa, synthetic construct; identical to SEQ ID NO: 6044
  source 1..215: note = Description of Artificial Sequence: Synthetic polypeptide; note = XENP020426 [CTLA-4]_H3.23_L0.129_Fab Light Chain

SEQ ID NO: 6165 - protein, 108 aa, synthetic construct; identical to SEQ ID NO: 2768
  source 1..108: note = Description of Artificial Sequence: Synthetic polypeptide; note = VL of XENP020426

SEQ ID NO: 6166 - protein, 12 aa, synthetic construct
  source 1..12: note = Description of Artificial Sequence: Synthetic peptide; note = XENP020426 vlCDR1
RASQSVGSSYLA

SEQ ID NO: 6167 - protein, 7 aa, synthetic construct
  source 1..7: note = Description of Artificial Sequence: Synthetic peptide; note = XENP020426 vlCDR2
GASSRAT

SEQ ID NO: 6168 - protein, 9 aa, synthetic construct
  source 1..9: note = Description of Artificial Sequence: Synthetic peptide; note = XENP020426 vlCDR3
QQYGSSPWT

SEQ ID NO: 6169 - protein, 221 aa, synthetic construct; identical to SEQ ID NO: 5889
  source 1..221: note = Description of Artificial Sequence: Synthetic polypeptide; note = XENP020427 [CTLA-4]_H3.23_L0.132_Fab Heavy Chain

SEQ ID NO: 6170 - protein, 118 aa, synthetic construct; identical to SEQ ID NO: 2632
  source 1..118: note = Description of Artificial Sequence: Synthetic polypeptide; note = VH of XENP020427

SEQ ID NO: 6171 - protein, 5 aa, synthetic construct
  source 1..5: note = Description of Artificial Sequence: Synthetic peptide; note = XENP020427 vhCDR1
SYTMH

SEQ ID NO: 6172 - protein, 17 aa, synthetic construct
  source 1..17: note = Description of Artificial Sequence: Synthetic peptide; note = XENP020427 vhCDR2
FISYDGNYKYYADSVKG

SEQ ID NO: 6173 - protein, 9 aa, synthetic construct
  source 1..9: note = Description of Artificial Sequence: Synthetic peptide; note = XENP020427 vhCDR3
GGHLGPFDL

SEQ ID NO: 6174 - protein, 215 aa, synthetic construct; identical to SEQ ID NO: 6074
  source 1..215: note = Description of Artificial Sequence: Synthetic polypeptide; note = XENP020427 [CTLA-4]_H3.23_L0.132_Fab Light Chain

SEQ ID NO: 6175 - protein, 108 aa, synthetic construct; identical to SEQ ID NO: 2795
  source 1..108: note = Description of Artificial Sequence: Synthetic polypeptide; note = VL of XENP020427

SEQ ID NO: 6176 - protein, 12 aa, synthetic construct
  source 1..12: note = Description of Artificial Sequence: Synthetic peptide; note = XENP020427 vlCDR1
RASQSVSSSYLA

SEQ ID NO: 6177 - protein, 7 aa, synthetic construct
  source 1..7: note = Description of Artificial Sequence: Synthetic peptide; note = XENP020427 vlCDR2
GASSRAT

SEQ ID NO: 6178 - protein, 9 aa, synthetic construct
  source 1..9: note = Description of Artificial Sequence: Synthetic peptide; note = XENP020427 vlCDR3
QQYGSSPWT

SEQ ID NO: 6179 - protein, 221 aa, synthetic construct; identical to SEQ ID NO: 5909
  source 1..221: note = Description of Artificial Sequence: Synthetic polypeptide; note = XENP020428 [CTLA-4]_H3.25_L0.124_Fab Heavy Chain

SEQ ID NO: 6180 - protein, 118 aa, synthetic construct; identical to SEQ ID NO: 2650
  source 1..118: note = Description of Artificial Sequence: Synthetic polypeptide; note = VH of XENP020428

SEQ ID NO: 6181 - protein, 5 aa, synthetic construct
  source 1..5: note = Description of Artificial Sequence: Synthetic peptide; note = XENP020428 vhCDR1
SYTMH

SEQ ID NO: 6182 - protein, 17 aa, synthetic construct
  source 1..17: note = Description of Artificial Sequence: Synthetic peptide; note = XENP020428 vhCDR2
FISYDGNYKYYADSVKG

SEQ ID NO: 6183 - protein, 9 aa, synthetic construct
  source 1..9: note = Description of Artificial Sequence: Synthetic peptide; note = XENP020428 vhCDR3
GGLLGPFDL

SEQ ID NO: 6184 - protein, 215 aa, synthetic construct; identical to SEQ ID NO: 5994
  source 1..215: note = Description of Artificial Sequence: Synthetic polypeptide; note = XENP020428 [CTLA-4]_H3.25_L0.124_Fab Light Chain

SEQ ID NO: 6185 - protein, 108 aa, synthetic construct; identical to SEQ ID NO: 2723
  source 1..108: note = Description of Artificial Sequence: Synthetic polypeptide; note = VL of XENP020428

SEQ ID NO: 6186 - protein, 12 aa, synthetic construct
  source 1..12: note = Description of Artificial Sequence: Synthetic peptide; note = XENP020428 vlCDR1
RASQSVGSSYLA

SEQ ID NO: 6187 - protein, 7 aa, synthetic construct
  source 1..7: note = Description of Artificial Sequence: Synthetic peptide; note = XENP020428 vlCDR2
GASSRAT

SEQ ID NO: 6188 - protein, 9 aa, synthetic construct
  source 1..9: note = Description of Artificial Sequence: Synthetic peptide; note = XENP020428 vlCDR3
QQYGSSPWT

SEQ ID NO: 6189 - protein, 221 aa, synthetic construct; identical to SEQ ID NO: 5909
  source 1..221: note = Description of Artificial Sequence: Synthetic polypeptide; note = XENP020429 [CTLA-4]_H3.25_L0.129_Fab Heavy Chain

SEQ ID NO: 6190 - protein, 118 aa, synthetic construct; identical to SEQ ID NO: 2650
  source 1..118: note = Description of Artificial Sequence: Synthetic polypeptide; note = VH of XENP020429

SEQ ID NO: 6191 - protein, 5 aa, synthetic construct
  source 1..5: note = Description of Artificial Sequence: Synthetic peptide; note = XENP020429 vhCDR1
SYTMH

SEQ ID NO: 6192 - protein, 17 aa, synthetic construct
  source 1..17: note = Description of Artificial Sequence: Synthetic peptide; note = XENP020429 vhCDR2
FISYDGNYKYYADSVKG

SEQ ID NO: 6193 - protein, 9 aa, synthetic construct
  source 1..9: note = Description of Artificial Sequence: Synthetic peptide; note = XENP020429 vhCDR3
GGLLGPFDL

SEQ ID NO: 6194 - protein, 215 aa, synthetic construct; identical to SEQ ID NO: 6044
  source 1..215: note = Description of Artificial Sequence: Synthetic polypeptide; note = XENP020429 [CTLA-4]_H3.25_L0.129_Fab Light Chain

SEQ ID NO: 6195 - protein, 108 aa, synthetic construct; identical to SEQ ID NO: 2768
  source 1..108: note = Description of Artificial Sequence: Synthetic polypeptide; note = VL of XENP020429

SEQ ID NO: 6196 - protein, 12 aa, synthetic construct
  source 1..12: note = Description of Artificial Sequence: Synthetic peptide; note = XENP020429 vlCDR1
RASQSVGSSYLA

SEQ ID NO: 6197 - protein, 7 aa, synthetic construct
  source 1..7: note = Description of Artificial Sequence: Synthetic peptide; note = XENP020429 vlCDR2
GASSRAT

SEQ ID NO: 6198 - protein, 9 aa, synthetic construct
  source 1..9: note = Description of Artificial Sequence: Synthetic peptide; note = XENP020429 vlCDR3
QQYGSSPWT

SEQ ID NO: 6199 - protein, 221 aa, synthetic construct; identical to SEQ ID NO: 5909
  source 1..221: note = Description of Artificial Sequence: Synthetic polypeptide; note = XENP020430 [CTLA-4]_H3.25_L0.132_Fab Heavy Chain

SEQ ID NO: 6200 - protein, 118 aa, synthetic construct; identical to SEQ ID NO: 2650
  source 1..118: note = Description of Artificial Sequence: Synthetic polypeptide; note = VH of XENP020430

SEQ ID NO: 6201 - protein, 5 aa, synthetic construct
  source 1..5: note = Description of Artificial Sequence: Synthetic peptide; note = XENP020430 vhCDR1
SYTMH

SEQ ID NO: 6202 - protein, 17 aa, synthetic construct
  source 1..17: note = Description of Artificial Sequence: Synthetic peptide; note = XENP020430 vhCDR2
FISYDGNYKYYADSVKG

SEQ ID NO: 6203 - protein, 9 aa, synthetic construct
  source 1..9: note = Description of Artificial Sequence: Synthetic peptide; note = XENP020430 vhCDR3
GGLLGPFDL

SEQ ID NO: 6204 - protein, 215 aa, synthetic construct; identical to SEQ ID NO: 6074
  source 1..215: note = Description of Artificial Sequence: Synthetic polypeptide; note = XENP020430 [CTLA-4]_H3.25_L0.132_Fab Light Chain

SEQ ID NO: 6205 - protein, 108 aa, synthetic construct; identical to SEQ ID NO: 2795
  source 1..108: note = Description of Artificial Sequence: Synthetic polypeptide; note = VL of XENP020430

SEQ ID NO: 6206 - protein, 12 aa, synthetic construct
  source 1..12: note = Description of Artificial Sequence: Synthetic peptide; note = XENP020430 vlCDR1
RASQSVSSSYLA

SEQ ID NO: 6207 - protein, 7 aa, synthetic construct
  source 1..7: note = Description of Artificial Sequence: Synthetic peptide; note = XENP020430 vlCDR2
GASSRAT

SEQ ID NO: 6208 - protein, 9 aa, synthetic construct
  source 1..9: note = Description of Artificial Sequence: Synthetic peptide; note = XENP020430 vlCDR3
QQYGSSPWT

SEQ ID NO: 6209 - protein, 240 aa, synthetic construct
  source 1..240: note = Description of Artificial Sequence: Synthetic polypeptide; note = XENP016402 nivolumab_H0.1_L0_scFv(GKPGS)4
QVQLVESGGGVVQPGRSLRLSCKASGITFSNSGMHWVRQAPGKGLEWVAVIWYDGSKRYYADSVKGRFTISRDNSKNTLFLQMNSLRAEDTAVYYCATNDDYWGQGTLVTVSSGKPGSGKPGSGKPGSGKPGSEIVLTQSPATLSLSPGERATLSCRASQSVSSYLAWYQQKPGQAPRLLIYDASNRATGIPARFSGSGSGTDFTLTISSLEPEDFAVYYCQQSSNWPRTFGQGTKVEIK

SEQ ID NO: 6210 - protein, 113 aa, synthetic construct
  source 1..113: note = Description of Artificial Sequence: Synthetic polypeptide; note = VH of XENP016402
QVQLVESGGGVVQPGRSLRLSCKASGITFSNSGMHWVRQAPGKGLEWVAVIWYDGSKRYYADSVKGRFTISRDNSKNTLFLQMNSLRAEDTAVYYCATNDDYWGQGTLVTVSS

SEQ ID NO: 6211 - protein, 107 aa, synthetic construct [sequence omitted]

SEQ ID NO: 6212 - protein, 5 aa, synthetic construct
  source 1..5: note = Description of Artificial Sequence: Synthetic peptide; note = XENP016402 vhCDR1
NSGMH

SEQ ID NO: 6213 - protein, 17 aa, synthetic construct
  source 1..17: note = Description of Artificial Sequence: Synthetic peptide; note = XENP016402 vhCDR2
VIWYDGSKRYYADSVKG

SEQ ID NO: 6214 - protein, 4 aa, synthetic construct
  source 1..4: note = Description of Artificial Sequence: Synthetic peptide; note = XENP016402 vhCDR3
NDDY

SEQ ID NO: 6215 - protein, 11 aa, synthetic construct
  source 1..11: note = Description of Artificial Sequence: Synthetic peptide; note = XENP016402 vlCDR1
RASQSVSSYLA

SEQ ID NO: 6216 - protein, 7 aa, synthetic construct
  source 1..7: note = Description of Artificial Sequence: Synthetic peptide; note = XENP016402 vlCDR2
DASNRAT

SEQ ID NO: 6217 - protein, 9 aa, synthetic construct
  source 1..9: note = Description of Artificial Sequence: Synthetic peptide; note = XENP016402 vlCDR3
QQSSNWPRT

SEQ ID NO: 6218 - protein, 246 aa, synthetic construct
  source 1..246: note = Description of Artificial Sequence: Synthetic polypeptide; note = XENP017919 1A2_H1L1_scFv(GKPGS)4
QIQLVQSGAEVKKPGASVKVSCKASGYTFTDYSMHWVRQAPGQGLEWMGWINTETGEPTYADKFQGRVTMTLDTSTSTAYMELSSLRSEDTAVYFCASSPLDYWGQGTLVTVSSGKPGSGKPGSGKPGSGKPGSDLLLTQSPLSLPVTPGEPASISCRSSQSIVHSNGNTYLEWFLQKPGQSPQLLIYKVFNRFSGVPDRFSGSGSGTDFTLKISRVEAEDVGVYYCFQGSHVPFTFGSGTKLEIK

SEQ ID NO: 6219 - protein, 114 aa, synthetic construct
  source 1..114: note = Description of Artificial Sequence: Synthetic polypeptide; note = VH of XENP017919
QIQLVQSGAEVKKPGASVKVSCKASGYTFTDYSMHWVRQAPGQGLEWMGWINTETGEPTYADKFQGRVTMTLDTSTSTAYMELSSLRSEDTAVYFCASSPLDYWGQGTLVTVSS

SEQ ID NO: 6220 - protein, 112 aa, synthetic construct
  source 1..112: note = Description of Artificial Sequence: Synthetic polypeptide; note = VL of XENP017919
DLLLTQSPLSLPVTPGEPASISCRSSQSIVHSNGNTYLEWFLQKPGQSPQLLIYKVFNRFSGVPDRFSGSGSGTDFTLKISRVEAEDVGVYYCFQGSHVPFTFGSGTKLEIK

SEQ ID NO: 6221 - protein, 5 aa, synthetic construct
  source 1..5: note = Description of Artificial Sequence: Synthetic peptide; note = XENP017919 vhCDR1
DYSMH

SEQ ID NO: 6222 - protein, 17 aa, synthetic construct
  source 1..17: note = Description of Artificial Sequence: Synthetic peptide; note = XENP017919 vhCDR2
WINTETGEPTYADKFQG

SEQ ID NO: 6223 - protein, 5 aa, synthetic construct
  source 1..5: note = Description of Artificial Sequence: Synthetic peptide; note = XENP017919 vhCDR3
SPLDY

SEQ ID NO: 6224 - protein, 16 aa, synthetic construct
  source 1..16: note = Description of Artificial Sequence: Synthetic peptide; note = XENP017919 vlCDR1
RSSQSIVHSNGNTYLE

SEQ ID NO: 6225 - protein, 7 aa, synthetic construct
  source 1..7: note = Description of Artificial Sequence: Synthetic peptide; note = XENP017919 vlCDR2
KVFNRFS

SEQ ID NO: 6226 - protein, 9 aa, synthetic construct
  source 1..9: note = Description of Artificial Sequence: Synthetic peptide; note = XENP017919 vlCDR3
FQGSHVPFT

SEQ ID NO: 6227 - protein, 251 aa, synthetic construct
  source 1..251: note = Description of Artificial Sequence: Synthetic polypeptide; note = XENP017920 1C7_H1L1_scFv(GKPGS)4
EVQLLESGGGLVQPGGSLRLSCAASGFAFSSYDMSWVRQAPGKRLEWVSYISSGGGSTYYPDSVKGRFTISRDNSKNTLYLQMNSLRAEDTAVYYCARPLDDYYAPFAYWGQGTLVTVSSGKPGSGKPGSGKPGSGKPGSDIVLTQSPSSLSASVGDRVTITCRASESVDNDGISFMNWFQQKPGKPPKLLIYAASNQGSGVPARFSGSGSGTDFTLTISSLQPEDFATYFCQQSKEVPWTFGGGTKVEIK

SEQ ID NO: 6228 - protein, 120 aa, synthetic construct
  source 1..120: note = Description of Artificial Sequence: Synthetic polypeptide; note = VH of XENP017920
EVQLLESGGGLVQPGGSLRLSCAASGFAFSSYDMSWVRQAPGKRLEWVSYISSGGGSTYYPDSVKGRFTISRDNSKNTLYLQMNSLRAEDTAVYYCARPLDDYYAPFAYWGQGTLVTVSS

SEQ ID NO: 6229 - protein, 111 aa, synthetic construct
  source 1..111: note = Description of Artificial Sequence: Synthetic polypeptide; note = VL of XENP017920
DIVLTQSPSSLSASVGDRVTITCRASESVDNDGISFMNWFQQKPGKPPKLLIYAASNQGSGVPARFSGSGSGTDFTLTISSLQPEDFATYFCQQSKEVPWTFGGGTKVEIK

SEQ ID NO: 6230 - protein, 5 aa, synthetic construct
  source 1..5: note = Description of Artificial Sequence: Synthetic peptide; note = XENP017920 vhCDR1
SYDMS

SEQ ID NO: 6231 - protein, 17 aa, synthetic construct
  source 1..17: note = Description of Artificial Sequence: Synthetic peptide; note = XENP017920 vhCDR2
YISSGGGSTYYPDSVKG

SEQ ID NO: 6232 - protein, 11 aa, synthetic construct
  source 1..11: note = Description of Artificial Sequence: Synthetic peptide; note = XENP017920 vhCDR3
PLDDYYAPFAY

SEQ ID NO: 6233 - protein, 15 aa, synthetic construct
  source 1..15: note = Description of Artificial Sequence: Synthetic peptide; note = XENP017920 vlCDR1
RASESVDNDGISFMN

SEQ ID NO: 6234 - protein, 7 aa, synthetic construct
  source 1..7: note = Description of Artificial Sequence: Synthetic peptide; note = XENP017920 vlCDR2
AASNQGS

SEQ ID NO: 6235 - protein, 9 aa, synthetic construct
  source 1..9: note = Description of Artificial Sequence: Synthetic peptide; note = XENP017920 vlCDR3
QQSKEVPWT

SEQ ID NO: 6236 - protein, 246 aa, synthetic construct
  source 1..246: note = Description of Artificial Sequence: Synthetic polypeptide; note = XENP017921 1G2_H1L1_scFv(GKPGS)4
QVQLVQSGAEVKKPGASVKVSCKVSGFSLTDYGVNWVRQAPGQGLEWMGMIWGDGSTDYNSKFQGRVTMTKDISTSTVYMELSSLRSEDTAVYYCAREYAMDYWGQGTLVTVSSGKPGSGKPGSGKPGSGKPGSDIVMTQSPDSLAVSLGERATINCKSSQSLLNSRTRKNYLAWYQQKPGQSPKLLIFWASTRESGVPDRFTGSGSGTDFTLTISSLQAEDVAVYYCKQSYNLRTFGGGTKVEIK

SEQ ID NO: 6237 - protein, 114 aa, synthetic construct
  source 1..114: note = Description of Artificial Sequence: Synthetic polypeptide; note = VH of XENP017921
QVQLVQSGAEVKKPGASVKVSCKVSGFSLTDYGVNWVRQAPGQGLEWMGMIWGDGSTDYNSKFQGRVTMTKDISTSTVYMELSSLRSEDTAVYYCAREYAMDYWGQGTLVTVSS

SEQ ID NO: 6238 - protein, 112 aa, synthetic construct
  source 1..112: note = Description of Artificial Sequence: Synthetic polypeptide; note = VL of XENP017921
DIVMTQSPDSLAVSLGERATINCKSSQSLLNSRTRKNYLAWYQQKPGQSPKLLIFWASTRESGVPDRFTGSGSGTDFTLTISSLQAEDVAVYYCKQSYNLRTFGGGTKVEIK

SEQ ID NO: 6239 - protein, 5 aa, synthetic construct
  source 1..5: note = Description of Artificial Sequence: Synthetic peptide; note = XENP017921 vhCDR1
DYGVN

SEQ ID NO: 6240 - protein, 16 aa, synthetic construct
  source 1..16: note = Description of Artificial Sequence: Synthetic peptide; note = XENP017921 vhCDR2
MIWGDGSTDYNSKFQG

SEQ ID NO: 6241 - protein, 6 aa, synthetic construct
  source 1..6: note = Description of Artificial Sequence: Synthetic peptide; note = XENP017921 vhCDR3
EYAMDY

SEQ ID NO: 6242 - protein, 17 aa, synthetic construct
  source 1..17: note = Description of Artificial Sequence: Synthetic peptide; note = XENP017921 vlCDR1
KSSQSLLNSRTRKNYLA

SEQ ID NO: 6243 - protein, 7 aa, synthetic construct
  source 1..7: note = Description of Artificial Sequence: Synthetic peptide; note = XENP017921 vlCDR2
WASTRES

SEQ ID NO: 6244 - protein, 8 aa, synthetic construct
  source 1..8: note = Description of Artificial Sequence: Synthetic peptide; note = XENP017921 vlCDR3
KQSYNLRT

SEQ ID NO: 6245 - protein, 249 aa, synthetic construct
  source 1..249: note = Description of Artificial Sequence: Synthetic polypeptide; note = XENP017922 1G6_H1L1_scFv(GKPGS)4
EVQLVESGGGLVKPGGSLRLSCAASGFTFSNYWMNWVRQAPGKGLEWVGEIRLKSNNYATHYAEPVKGRFTISRDDSKSTVYLQMNSLKTEDTAVYYCTRYYGNYGGYFDVWGAGTLVTVSSGKPGSGKPGSGKPGSGKPGSSIVMTQSPATLSVSPGERATLSCRASQSVSNDVAWYQQKPGQSPRLLINYASHRYTGVPDRFTGSGYGTEFTLTISSLQSEDFAVYFCQQDYSSPRTFGGGTKVEIK

SEQ ID NO: 6246 - protein, 122 aa, synthetic construct
  source 1..122: note = Description of Artificial Sequence: Synthetic polypeptide; note = VH of XENP017922
EVQLVESGGGLVKPGGSLRLSCAASGFTFSNYWMNWVRQAPGKGLEWVGEIRLKSNNYATHYAEPVKGRFTISRDDSKSTVYLQMNSLKTEDTAVYYCTRYYGNYGGYFDVWGAGTLVTVSS

SEQ ID NO: 6247 - protein, 107 aa, synthetic construct
  source 1..107: note = Description of Artificial Sequence: Synthetic polypeptide; note = VL of XENP017922
SIVMTQSPATLSVSPGERATLSCRASQSVSNDVAWYQQKPGQSPRLLINYASHRYTGVPDRFTGSGYGTEFTLTISSLQSEDFAVYFCQQDYSSPRTFGGGTKVEIK

SEQ ID NO: 6248 - protein, 5 aa, synthetic construct
  source 1..5: note = Description of Artificial Sequence: Synthetic peptide; note = XENP017922 vhCDR1
NYWMN

SEQ ID NO: 6249 - protein, 19 aa, synthetic construct
  source 1..19: note = Description of Artificial Sequence: Synthetic peptide; note = XENP017922 vhCDR2
EIRLKSNNYATHYAEPVKG

SEQ ID NO: 6250 - protein, 11 aa, synthetic construct
  source 1..11: note = Description of Artificial Sequence: Synthetic peptide; note = XENP017922 vhCDR3
YYGNYGGYFDV

SEQ ID NO: 6251 - protein, 11 aa, synthetic construct
  source 1..11: note = Description of Artificial Sequence: Synthetic peptide; note = XENP017922 vlCDR1
RASQSVSNDVA

SEQ ID NO: 6252 - protein, 7 aa, synthetic construct
  source 1..7: note = Description of Artificial Sequence: Synthetic peptide; note = XENP017922 vlCDR2
YASHRYT

SEQ ID NO: 6253 - protein, 9 aa, synthetic construct
  source 1..9: note = Description of Artificial Sequence: Synthetic peptide; note = XENP017922 vlCDR3
QQDYSSPRT

SEQ ID NO: 6254 - protein, 249 aa, synthetic construct
  source 1..249: note = Description of Artificial Sequence: Synthetic polypeptide; note = XENP017923 1G6_H1L2_scFv(GKPGS)4
EVQLVESGGGLVKPGGSLRLSCAASGFTFSNYWMNWVRQAPGKGLEWVGEIRLKSNNYATHYAEPVKGRFTISRDDSKSTVYLQMNSLKTEDTAVYYCTRYYGNYGGYFDVWGAGTLVTVSSGKPGSGKPGSGKPGSGKPGSSIVMTQSPSSLSASVGDRVTITCRASQSVSNDVAWYQQKPGKSPKLLINYASHRYTGVPDRFTGSGYGTDFTLTISSLQPEDFATYFCQQDYSSPRTFGGGTKVEIK

SEQ ID NO: 6255 - protein, 122 aa, synthetic construct; identical to SEQ ID NO: 6246
  source 1..122: note = Description of Artificial Sequence: Synthetic polypeptide; note = VH of XENP017923

SEQ ID NO: 6256 - protein, 107 aa, synthetic construct
  source 1..107: note = Description of Artificial Sequence: Synthetic polypeptide; note = VL of XENP017923
SIVMTQSPSSLSASVGDRVTITCRASQSVSNDVAWYQQKPGKSPKLLINYASHRYTGVPDRFTGSGYGTDFTLTISSLQPEDFATYFCQQDYSSPRTFGGGTKVEIK

SEQ ID NO: 6257 - protein, 5 aa, synthetic construct
  source 1..5: note = Description of Artificial Sequence: Synthetic peptide; note = XENP017923 vhCDR1
NYWMN

SEQ ID NO: 6258 - protein, 19 aa, synthetic construct
  source 1..19: note = Description of Artificial Sequence: Synthetic peptide; note = XENP017923 vhCDR2
EIRLKSNNYATHYAEPVKG

SEQ ID NO: 6259 - protein, 11 aa, synthetic construct
  source 1..11: note = Description of Artificial Sequence: Synthetic peptide; note = XENP017923 vhCDR3
YYGNYGGYFDV

SEQ ID NO: 6260 - protein, 11 aa, synthetic construct
  source 1..11: note = Description of Artificial Sequence: Synthetic peptide; note = XENP017923 vlCDR1
RASQSVSNDVA

SEQ ID NO: 6261 - protein, 7 aa, synthetic construct
  source 1..7: note = Description of Artificial Sequence: Synthetic peptide; note = XENP017923 vlCDR2
YASHRYT

SEQ ID NO: 6262 - protein, 9 aa, synthetic construct
  source 1..9: note = Description of Artificial Sequence: Synthetic peptide; note = XENP017923 vlCDR3
QQDYSSPRT

SEQ ID NO: 6263 - protein, 242 aa, synthetic construct
  source 1..242: note = Description of Artificial Sequence: Synthetic polypeptide; note = XENP017924 2A2_H1L1_scFv(GKPGS)4
QVQLVQSGAEVKKPGASVKVSCKASGYTFTNYWMHWVRQAPGQGLEWMGYINPSTGYTEYNQKFQGRVTMTADKSTSTAYMELSSLRSEDTAVYYCATGNYFAYWGQGTLVTVSSGKPGSGKPGSGKPGSGKPGSDIQMTQSPSSLSASVGDRVTITCRPSESLYSYLAWYQQKPGKSPKLLVYNAKTLVEGVPSRFSGSGSGTDFTLTISSLQPEDFATYYCQHHYGTPFTFGSGTKLEIK

SEQ ID NO: 6264 - protein, 115 aa, synthetic construct
  source 1..115: note = Description of Artificial Sequence: Synthetic polypeptide; note = VH of XENP017924
QVQLVQSGAEVKKPGASVKVSCKASGYTFTNYWMHWVRQAPGQGLEWMGYINPSTGYTEYNQKFQGRVTMTADKSTSTAYMELSSLRSEDTAVYYCATGNYFAYWGQGTLVTVSS

SEQ ID NO: 6265 - protein, 107 aa, synthetic construct
  source 1..107: note = Description of Artificial Sequence: Synthetic polypeptide; note = VL of XENP017924
DIQMTQSPSSLSASVGDRVTITCRPSESLYSYLAWYQQKPGKSPKLLVYNAKTLVEGVPSRFSGSGSGTDFTLTISSLQPEDFATYYCQHHYGTPFTFGSGTKLEIK

SEQ ID NO: 6266 - protein, 5 aa, synthetic construct
  source 1..5: note = Description of Artificial Sequence: Synthetic peptide; note = XENP017924 vhCDR1
NYWMH

SEQ ID NO: 6267 - protein, 17 aa, synthetic construct
  source 1..17: note = Description of Artificial Sequence: Synthetic peptide; note = XENP017924 vhCDR2
YINPSTGYTEYNQKFQG

SEQ ID NO: 6268 - protein, 6 aa, synthetic construct
  source 1..6: note = Description of Artificial Sequence: Synthetic peptide; note = XENP017924 vhCDR3
GNYFAY

SEQ ID NO: 6269 - protein, 11 aa, synthetic construct
  source 1..11: note = Description of Artificial Sequence: Synthetic peptide; note = XENP017924 vlCDR1
RPSESLYSYLA

SEQ ID NO: 6270 - protein, 7 aa, synthetic construct
  source 1..7: note = Description of Artificial Sequence: Synthetic peptide; note = XENP017924 vlCDR2
NAKTLVE

SEQ ID NO: 6271 - protein, 9 aa, synthetic construct
  source 1..9: note = Description of Artificial Sequence: Synthetic peptide; note = XENP017924 vlCDR3
QHHYGTPFT

SEQ ID NO: 6272 - protein, 252 aa, synthetic construct
  source 1..252: note = Description of Artificial Sequence: Synthetic polypeptide; note = XENP017925 2F11_H1L1_scFv(GKPGS)4
QVQLVQSGAEVKKPGASVKVSCKGSGYTFTDYVMHWVRQAPGQSLEWMGVISTYYGDASYNQKFQGRVTMTVDKSTSTAYMELSSLRSEDTAVYYCAREGYDGYLYFDVWGAGTLVTVSSGKPGSGKPGSGKPGSGKPGSDVLMTQTPLSSPVTLGQPASISCRSSQSIVHSNGNTYLEWYQQRPGQSPRLLIYKVSNRFSGVPDRFSGSGSGTDFTLKISRVEAEDVGVYYCFQGSHVPYTFGGGTKVEIK

SEQ ID NO: 6273 - protein, 120 aa, synthetic construct
  source 1..120: note = Description of Artificial Sequence: Synthetic polypeptide; note = VH of XENP017925
QVQLVQSGAEVKKPGASVKVSCKGSGYTFTDYVMHWVRQAPGQSLEWMGVISTYYGDASYNQKFQGRVTMTVDKSTSTAYMELSSLRSEDTAVYYCAREGYDGYLYFDVWGAGTLVTVSS

SEQ ID NO: 6274 - protein, 112 aa, synthetic construct
  source 1..112: note = Description of Artificial Sequence: Synthetic polypeptide; note = VL of XENP017925
DVLMTQTPLSSPVTLGQPASISCRSSQSIVHSNGNTYLEWYQQRPGQSPRLLIYKVSNRFSGVPDRFSGSGSGTDFTLKISRVEAEDVGVYYCFQGSHVPYTFGGGTKVEIK

SEQ ID NO: 6275 - protein, 5 aa, synthetic construct
  source 1..5: note = Description of Artificial Sequence: Synthetic peptide; note = XENP017925 vhCDR1
DYVMH

SEQ ID NO: 6276 - protein, 17 aa, synthetic construct
  source 1..17: note = Description of Artificial Sequence: Synthetic peptide; note = XENP017925 vhCDR2
VISTYYGDASYNQKFQG

SEQ ID NO: 6277 - protein, 11 aa, synthetic construct
  source 1..11: note = Description of Artificial Sequence: Synthetic peptide; note = XENP017925 vhCDR3
EGYDGYLYFDV

SEQ ID NO: 6278 - protein, 16 aa, synthetic construct
  source 1..16: note = Description of Artificial Sequence: Synthetic peptide; note = XENP017925 vlCDR1
RSSQSIVHSNGNTYLE

SEQ ID NO: 6279 - protein, 7 aa, synthetic construct
  source 1..7: note = Description of Artificial Sequence: Synthetic peptide; note = XENP017925 vlCDR2
KVSNRFS

SEQ ID NO: 6280 - protein, 9 aa, synthetic construct
  source 1..9: note = Description of Artificial Sequence: Synthetic peptide; note = XENP017925 vlCDR3
FQGSHVPYT

SEQ ID NO: 6281 - protein, 252 aa, synthetic construct
  source 1..252: note = Description of Artificial Sequence: Synthetic polypeptide; note = XENP017926 5H1_H1L1_scFv(GKPGS)4
QVQLVQSGAEVKKPGASVKVSCKGSGYTFTDYVMHWVRQAPGQSLEWMGVISIHYGDGRYNQKFQGRVTMTVDKSTSTAYMELSSLRSEDTAVYYCAREVYDGYLYFDVWGAGTLVTVSSGKPGSGKPGSGKPGSGKPGSDVLMTQSPLSLPVTPGEPASISCRSSQSIVHSNGNTYLEWYLQKPGQSPQLLIYKVSNRFSGVPDRFGGRGSGTDFTLKISRVEAEDVGVYYCFQGSHVPYTFGGGTKVEIK

SEQ ID NO: 6282 - protein, 120 aa, synthetic construct
  source 1..120: note = Description of Artificial Sequence: Synthetic polypeptide; note = VH of XENP017926
QVQLVQSGAEVKKPGASVKVSCKGSGYTFTDYVMHWVRQAPGQSLEWMGVISIHYGDGRYNQKFQGRVTMTVDKSTSTAYMELSSLRSEDTAVYYCAREVYDGYLYFDVWGAGTLVTVSS

SEQ ID NO: 6283 - protein, 112 aa, synthetic construct
  source 1..112: note = Description of Artificial Sequence: Synthetic polypeptide; note = VL of XENP017926
DVLMTQSPLSLPVTPGEPASISCRSSQSIVHSNGNTYLEWYLQKPGQSPQLLIYKVSNRFSGVPDRFGGRGSGTDFTLKISRVEAEDVGVYYCFQGSHVPYTFGGGTKVEIK

SEQ ID NO: 6284 - protein, 5 aa, synthetic construct
  source 1..5: note = Description of Artificial Sequence: Synthetic peptide; note = XENP017926 vhCDR1
DYVMH

SEQ ID NO: 6285 - protein, 17 aa, synthetic construct
  source 1..17: note = Description of Artificial Sequence: Synthetic peptide; note = XENP017926 vhCDR2
VISIHYGDGRYNQKFQG

SEQ ID NO: 6286 - protein, 11 aa, synthetic construct
  source 1..11: note = Description of Artificial Sequence: Synthetic peptide; note = XENP017926 vhCDR3
EVYDGYLYFDV

SEQ ID NO: 6287 - protein, 16 aa, synthetic construct
  source 1..16: note = Description of Artificial Sequence: Synthetic peptide; note = XENP017926 vlCDR1
RSSQSIVHSNGNTYLE

SEQ ID NO: 6288 - protein, 7 aa, synthetic construct
  source 1..7: note = Description of Artificial Sequence: Synthetic peptide; note = XENP017926 vlCDR2
KVSNRFS

SEQ ID NO: 6289 - protein, 9 aa, synthetic construct
  source 1..9: note = Description of Artificial Sequence: Synthetic peptide; note = XENP017926 vlCDR3
FQGSHVPYT

SEQ ID NO: 6290 - protein, 252 aa, synthetic construct
  source 1..252: note = Description of Artificial Sequence: Synthetic polypeptide; note = XENP017927 5H1_H1L2_scFv(GKPGS)4
QVQLVQSGAEVKKPGASVKVSCKGSGYTFTDYVMHWVRQAPGQSLEWMGVISIHYGDGRYNQKFQGRVTMTVDKSTSTAYMELSSLRSEDTAVYYCAREVYDGYLYFDVWGAGTLVTVSSGKPGSGKPGSGKPGSGKPGSDVLMTQSPLSLPVTLGQPASISCRSSQSIVHSNGNTYLEWYQQRPGQSPRLLIYKVSNRFSGVPDRFGGRGSGTDFTLKISRVEAEDVGVYYCFQGSHVPYTFGGGTKVEIK

SEQ ID NO: 6291 - protein, 120 aa, synthetic construct; identical to SEQ ID NO: 6282
  source 1..120: note = Description of Artificial Sequence: Synthetic polypeptide; note = VH of XENP017927

SEQ ID NO: 6292 - protein, 112 aa, synthetic construct
  source 1..112: note = Description of Artificial Sequence: Synthetic polypeptide; note = VL of XENP017927
DVLMTQSPLSLPVTLGQPASISCRSSQSIVHSNGNTYLEWYQQRPGQSPRLLIYKVSNRFSGVPDRFGGRGSGTDFTLKISRVEAEDVGVYYCFQGSHVPYTFGGGTKVEIK

SEQ ID NO: 6293 - protein, 5 aa, synthetic construct
  source 1..5: note = Description of Artificial Sequence: Synthetic peptide; note = XENP017927 vhCDR1
DYVMH

SEQ ID NO: 6294 - protein, 17 aa, synthetic construct
  source 1..17: note = Description of Artificial Sequence: Synthetic peptide; note = XENP017927 vhCDR2
VISIHYGDGRYNQKFQG

SEQ ID NO: 6295 - protein, 11 aa, synthetic construct
  source 1..11: note = Description of Artificial Sequence: Synthetic peptide; note = XENP017927 vhCDR3
EVYDGYLYFDV

SEQ ID NO: 6296 - protein, 16 aa, synthetic construct
  source 1..16: note = Description of Artificial Sequence: Synthetic peptide; note = XENP017927 vlCDR1
RSSQSIVHSNGNTYLE

SEQ ID NO: 6297 - protein, 7 aa, synthetic construct
  source 1..7: note = Description of Artificial Sequence: Synthetic peptide; note = XENP017927 vlCDR2
KVSNRFS

SEQ ID NO: 6298 - protein, 9 aa, synthetic construct
  source 1..9: note = Description of Artificial Sequence: Synthetic peptide; note = XENP017927 vlCDR3
FQGSHVPYT

SEQ ID NO: 6299 - protein, 247 aa, synthetic construct
  source 1..247: note = Description of Artificial Sequence: Synthetic polypeptide; note = XENP017928 10E4_H1L1_scFv(GKPGS)4
QVQLVQSGAEVKKPGASVKVSCKASGYSFTSYWMHWVRQAPGQGLEWMGAIYPGNSDTSYNQKFQGRVTMTADTSTSTAYMELSSLRSEDTAVYYCTRDGNYVRYYFDYWGQGTLVTVSSGKPGSGKPGSGKPGSGKPGSDIQMTQSPSSLSASVGDRVTITCRASQDIGSNLNWLQQKPGKTIKRLIYATSNLDSGVPKRFSGRRSGSDYTLTISSLQPEDFATYYCLQYASSPLTFGTGTKLEIK

SEQ ID NO: 6300 - protein, 120 aa, synthetic construct
  source 1..120: note = Description of Artificial Sequence: Synthetic polypeptide; note = VH of XENP017928
QVQLVQSGAEVKKPGASVKVSCKASGYSFTSYWMHWVRQAPGQGLEWMGAIYPGNSDTSYNQKFQGRVTMTADTSTSTAYMELSSLRSEDTAVYYCTRDGNYVRYYFDYWGQGTLVTVSS

SEQ ID NO: 6301 - protein, 107 aa, synthetic construct
  source 1..107: note = Description of Artificial Sequence: Synthetic polypeptide; note = VL of XENP017928
DIQMTQSPSSLSASVGDRVTITCRASQDIGSNLNWLQQKPGKTIKRLIYATSNLDSGVPKRFSGRRSGSDYTLTISSLQPEDFATYYCLQYASSPLTFGTGTKLEIK

SEQ ID NO: 6302 - protein, 5 aa, synthetic construct
  source 1..5: note = Description of Artificial Sequence: Synthetic peptide; note = XENP017928 vhCDR1
SYWMH

SEQ ID NO: 6303 - protein, 17 aa, synthetic construct
  source 1..17: note = Description of Artificial Sequence: Synthetic peptide; note = XENP017928 vhCDR2
AIYPGNSDTSYNQKFQG

SEQ ID NO: 6304 - protein, 11 aa, synthetic construct
  source 1..11: note = Description of Artificial Sequence: Synthetic peptide; note = XENP017928 vhCDR3
DGNYVRYYFDY

SEQ ID NO: 6305 - protein, 11 aa, synthetic construct
  source 1..11: note = Description of Artificial Sequence: Synthetic peptide; note = XENP017928 vlCDR1
RASQDIGSNLN

SEQ ID NO: 6306 - protein, 7 aa, synthetic construct
  source 1..7: note = Description of Artificial Sequence: Synthetic peptide; note = XENP017928 vlCDR2
ATSNLDS

SEQ ID NO: 6307 - protein, 9 aa, synthetic construct
  source 1..9: note = Description of Artificial Sequence: Synthetic peptide; note = XENP017928 vlCDR3
LQYASSPLT

SEQ ID NO: 6308 - protein, 247 aa, synthetic construct
  source 1..247: note = Description of Artificial Sequence: Synthetic polypeptide; note = XENP017929 4C11_H1L1_scFv(GKPGS)4
QIQLVQSGAEVKKPGASVKVSCKASGYTFTSYWMHWVRQAPGQGLEWMGAIYPGNSDTSYNQKFQGRVTMTADTSTSTAYMELSSLRSEDTAVYYCTNLYYGSSFAMDYWGQGTLVTVSSGKPGSGKPGSGKPGSGKPGSDIKMTQSPSSLSASVGDRVTITCRASQDINTYLSWFQQKPGKSPKTLIYRANRLVDGVPSRFSGSGSGQDYTLTISSLQPEDFATYYCLHYDDFPYTFGGGTKVEIK

SEQ ID NO: 6309 - protein, 120 aa, synthetic construct
  source 1..120: note = Description of Artificial Sequence: Synthetic polypeptide; note = VH of XENP017929
QIQLVQSGAEVKKPGASVKVSCKASGYTFTSYWMHWVRQAPGQGLEWMGAIYPGNSDTSYNQKFQGRVTMTADTSTSTAYMELSSLRSEDTAVYYCTNLYYGSSFAMDYWGQGTLVTVSS

SEQ ID NO: 6310 - protein, 107 aa, synthetic construct
  source 1..107: note = Description of Artificial Sequence: Synthetic polypeptide; note = VL of XENP017929
DIKMTQSPSSLSASVGDRVTITCRASQDINTYLSWFQQKPGKSPKTLIYRANRLVDGVPSRFSGSGSGQDYTLTISSLQPEDFATYYCLHYDDFPYTFGGGTKVEIK

SEQ ID NO: 6311 - protein, 5 aa, synthetic construct
  source 1..5: note = Description of Artificial Sequence: Synthetic peptide; note = XENP017929 vhCDR1
SYWMH

SEQ ID NO: 6312 - protein, 17 aa, synthetic construct
  source 1..17: note = Description of Artificial Sequence: Synthetic peptide; note = XENP017929 vhCDR2
AIYPGNSDTSYNQKFQG

SEQ ID NO: 6313 - protein, 11 aa, synthetic construct
  source 1..11: note = Description of Artificial Sequence: Synthetic peptide; note = XENP017929 vhCDR3
LYYGSSFAMDY

SEQ ID NO: 6314 - protein, 11 aa, synthetic construct
  source 1..11: note = Description of Artificial Sequence: Synthetic peptide; note = XENP017929 vlCDR1
RASQDINTYLS

SEQ ID NO: 6315 - protein, 7 aa, synthetic construct
  source 1..7: note = Description of Artificial Sequence: Synthetic peptide; note = XENP017929 vlCDR2
RANRLVD

SEQ ID NO: 6316 - protein, 9 aa, synthetic construct
  source 1..9: note = Description of Artificial Sequence: Synthetic peptide; note = XENP017929 vlCDR3
LHYDDFPYT

SEQ ID NO: 6317 - protein, 244 aa, synthetic construct
  source 1..244: note = Description of Artificial Sequence: Synthetic polypeptide; note = XENP017930 6A3_H1L1_scFv(GKPGS)4
EVQLLESGGGLVQPGGSLRLSCAASGFTFSSYGMSWVRQAPGKRLEWVSTISGGGRYTYYPDSVKGRFTISRDNSKNTLYLQMNSLRAEDTAVYYCASYYDSSFDYWGQGTLVTVSSGKPGSGKPGSGKPGSGKPGSDIVMTQSPDSLAVSLGERATINCKASQDVGTAVAWYQQKPGQSPKLLIYWASTRHTGVPDRFTGSGSGTDFTLTISSLQAEDVAVYFCQHYSIYPWTFGGGTKVEIK

SEQ ID NO: 6318 - protein, 117 aa, synthetic construct
  source 1..117: note = Description of Artificial Sequence: Synthetic polypeptide; note = VH of XENP017930
EVQLLESGGGLVQPGGSLRLSCAASGFTFSSYGMSWVRQAPGKRLEWVSTISGGGRYTYYPDSVKGRFTISRDNSKNTLYLQMNSLRAEDTAVYYCASYYDSSFDYWGQGTLVTVSS

SEQ ID NO: 6319 - protein, 107 aa, synthetic construct
  source 1..107: note = Description of Artificial Sequence: Synthetic polypeptide; note = VL of XENP017930
DIVMTQSPDSLAVSLGERATINCKASQDVGTAVAWYQQKPGQSPKLLIYWASTRHTGVPDRFTGSGSGTDFTLTISSLQAEDVAVYFCQHYSIYPWTFGGGTKVEIK

SEQ ID NO: 6320 - protein, 5 aa, synthetic construct
  source 1..5: note = Description of Artificial Sequence: Synthetic peptide; note = XENP017930 vhCDR1
SYGMS

SEQ ID NO: 6321 - protein, 17 aa, synthetic construct
  source 1..17: note = Description of Artificial Sequence: Synthetic peptide; note = XENP017930 vhCDR2
TISGGGRYTYYPDSVKG

SEQ ID NO: 6322 - protein, 8 aa, synthetic construct
  source 1..8: note = Description of Artificial Sequence: Synthetic peptide; note = XENP017930 vhCDR3
YYDSSFDY

SEQ ID NO: 6323 - protein, 11 aa, synthetic construct
  source 1..11: note = Description of Artificial Sequence: Synthetic peptide; note = XENP017930 vlCDR1
KASQDVGTAVA

SEQ ID NO: 6324 - protein, 7 aa, synthetic construct
  source 1..7: note = Description of Artificial Sequence: Synthetic peptide; note = XENP017930 vlCDR2
WASTRHT

SEQ ID NO: 6325 - protein, 9 aa, synthetic construct
  source 1..9: note = Description of Artificial Sequence: Synthetic peptide; note = XENP017930 vlCDR3
QHYSIYPWT

SEQ ID NO: 6326 - protein, 244 aa, synthetic construct
  source 1..244: note = Description of Artificial Sequence: Synthetic polypeptide; note = XENP017931 6A3_H1L2_scFv(GKPGS)4
EVQLLESGGGLVQPGGSLRLSCAASGFTFSSYGMSWVRQAPGKRLEWVSTISGGGRYTYYPDSVKGRFTISRDNSKNTLYLQMNSLRAEDTAVYYCASYYDSSFDYWGQGTLVTVSSGKPGSGKPGSGKPGSGKPGSDIVMTQSPATLSVSPGERATLSCRASQDVGTAVAWYQQKPGQSPRLLIYWASTRHTGVPDRFTGSGSGTEFTLTISSLQSEDFAVYFCQHYSIYPWTFGGGTKVEIK

SEQ ID NO: 6327 - protein, 117 aa, synthetic construct; identical to SEQ ID NO: 6318
  source 1..117: note = Description of Artificial Sequence: Synthetic polypeptide; note = VH of XENP017931

SEQ ID NO: 6328 - protein, 107 aa, synthetic construct
  source 1..107: note = Description of Artificial Sequence: Synthetic polypeptide; note = VL of XENP017931
DIVMTQSPATLSVSPGERATLSCRASQDVGTAVAWYQQKPGQSPRLLIYWASTRHTGVPDRFTGSGSGTEFTLTISSLQSEDFAVYFCQHYSIYPWTFGGGTKVEIK

SEQ ID NO: 6329 - protein, 5 aa, synthetic construct
  source 1..5: note = Description of Artificial Sequence: Synthetic peptide; note = XENP017931 vhCDR1
SYGMS

SEQ ID NO: 6330 - protein, 17 aa, synthetic construct
  source 1..17: note = Description of Artificial Sequence: Synthetic peptide; note = XENP017931 vhCDR2
TISGGGRYTYYPDSVKG

SEQ ID NO: 6331 - protein, 8 aa, synthetic construct
  source 1..8: note = Description of Artificial Sequence: Synthetic peptide; note = XENP017931 vhCDR3
YYDSSFDY

SEQ ID NO: 6332 - protein, 11 aa, synthetic construct
  source 1..11: note = Description of Artificial Sequence: Synthetic peptide; note = XENP017931 vlCDR1
RASQDVGTAVA

SEQ ID NO: 6333 - protein, 7 aa, synthetic construct
  source 1..7: note = Description of Artificial Sequence: Synthetic peptide; note = XENP017931 vlCDR2
WASTRHT

SEQ ID NO: 6334 - protein, 9 aa, synthetic construct
  source 1..9: note = Description of Artificial Sequence: Synthetic peptide; note = XENP017931 vlCDR3
QHYSIYPWT

SEQ ID NO: 6335 - protein, 244 aa, synthetic construct
  source 1..244: note = Description of Artificial Sequence: Synthetic polypeptide; note = XENP017932 6A3_H1L3_scFv(GKPGS)4
EVQLLESGGGLVQPGGSLRLSCAASGFTFSSYGMSWVRQAPGKRLEWVSTISGGGRYTYYPDSVKGRFTISRDNSKNTLYLQMNSLRAEDTAVYYCASYYDSSFDYWGQGTLVTVSSGKPGSGKPGSGKPGSGKPGSDIVMTQSPSSLSASVGDRVTITCRASQDVGTAVAWYQQKPGKSPKLLIYWASTRHTGVPDRFTGSGSGTDFTLTISSLQPEDFATYFCQHYSIYPWTFGGGTKVEIK

SEQ ID NO: 6336 - protein, 117 aa, synthetic construct; identical to SEQ ID NO: 6318
  source 1..117: note = Description of Artificial Sequence: Synthetic polypeptide; note = VH of XENP017932

SEQ ID NO: 6337 - protein, 107 aa, synthetic construct
  source 1..107: note = Description of Artificial Sequence: Synthetic polypeptide; note = VL of XENP017932
DIVMTQSPSSLSASVGDRVTITCRASQDVGTAVAWYQQKPGKSPKLLIYWASTRHTGVPDRFTGSGSGTDFTLTISSLQPEDFATYFCQHYSIYPWTFGGGTKVEIK

SEQ ID NO: 6338 - protein, 5 aa, synthetic construct
  source 1..5: note = Description of Artificial Sequence: Synthetic peptide; note = XENP017932 vhCDR1
SYGMS

SEQ ID NO: 6339 - protein, 17 aa, synthetic construct
  source 1..17: note = Description of Artificial Sequence: Synthetic peptide; note = XENP017932 vhCDR2
TISGGGRYTYYPDSVKG

SEQ ID NO: 6340 - protein, 8 aa, synthetic construct
  source 1..8: note = Description of Artificial Sequence: Synthetic peptide; note = XENP017932 vhCDR3
YYDSSFDY

SEQ ID NO: 6341 - protein, 11 aa, synthetic construct
  source 1..11: note = Description of Artificial Sequence: Synthetic peptide; note = XENP017932 vlCDR1
RASQDVGTAVA

SEQ ID NO: 6342 - protein, 7 aa, synthetic construct
  source 1..7: note = Description of Artificial Sequence: Synthetic peptide; note = XENP017932 vlCDR2
WASTRHT

SEQ ID NO: 6343 - protein, 9 aa, synthetic construct
  source 1..9: note = Description of Artificial Sequence: Synthetic peptide; note = XENP017932 vlCDR3
QHYSIYPWT

SEQ ID NO: 6344 - protein, 244 aa, synthetic construct
  source 1..244: note = Description of Artificial Sequence: Synthetic polypeptide; note = XENP017933 6A3_H2L3_scFv(GKPGS)4
QVQLVESGGGLVKPGGSLRLSCAASGFTFSSYGMSWVRQAPGKRLEWVSTISGGGRYTYYPDSVKGRFTISRDNAKNSLYLQMNSLRAEDTAVYYCASYYDSSFDYWGQGTLVTVSSGKPGSGKPGSGKPGSGKPGSDIVMTQSPSSLSASVGDRVTITCRASQDVGTAVAWYQQKPGKSPKLLIYWASTRHTGVPDRFTGSGSGTDFTLTISSLQPEDFATYFCQHYSIYPWTFGGGTKVEIK

SEQ ID NO: 6345 - protein, 117 aa, synthetic construct
  source 1..117: note = Description of Artificial Sequence: Synthetic polypeptide; note = VH of XENP017933
QVQLVESGGGLVKPGGSLRLSCAASGFTFSSYGMSWVRQAPGKRLEWVSTISGGGRYTYYPDSVKGRFTISRDNAKNSLYLQMNSLRAEDTAVYYCASYYDSSFDYWGQGTLVTVSS

SEQ ID NO: 6346 - protein, 107 aa, synthetic construct; identical to SEQ ID NO: 6337
  source 1..107: note = Description of Artificial Sequence: Synthetic polypeptide; note = VL of XENP017933

SEQ ID NO: 6347 - protein, 5 aa, synthetic construct
  source 1..5: note = Description of Artificial Sequence: Synthetic peptide; note = XENP017933 vhCDR1
SYGMS

SEQ ID NO: 6348 - protein, 17 aa, synthetic construct
  source 1..17: note = Description of Artificial Sequence: Synthetic peptide; note = XENP017933 vhCDR2
TISGGGRYTYYPDSVKG

SEQ ID NO: 6349 - protein, 8 aa, synthetic construct
  source 1..8: note = Description of Artificial Sequence: Synthetic peptide; note = XENP017933 vhCDR3
YYDSSFDY

SEQ ID NO: 6350 - protein, 11 aa, synthetic construct
  source 1..11: note = Description of Artificial Sequence: Synthetic peptide; note = XENP017933 vlCDR1
RASQDVGTAVA

SEQ ID NO: 6351 - protein, 7 aa, synthetic construct
  source 1..7: note = Description of Artificial Sequence: Synthetic peptide; note = XENP017933 vlCDR2
WASTRHT

SEQ ID NO: 6352 - protein, 9 aa, synthetic construct
  source 1..9: note = Description of Artificial Sequence: Synthetic peptide; note = XENP017933 vlCDR3
QHYSIYPWT

SEQ ID NO: 6353 - protein, 244 aa, synthetic construct
  source 1..244: note = Description of Artificial Sequence: Synthetic polypeptide; note = XENP017934 6A3_H1.1_L3_scFv(GKPGS)4
EVQLLESGGGLVQPGGSLRLSCAASGFTFSSYGMSWVRQAPGKGLEWVSTISGGGRYTYYPDSVKGRFTISRDNSKNTLYLQMNSLRAEDTAVYYCASYYDSSFDYWGQGTLVTVSSGKPGSGKPGSGKPGSGKPGSDIVMTQSPSSLSASVGDRVTITCRASQDVGTAVAWYQQKPGKSPKLLIYWASTRHTGVPDRFTGSGSGTDFTLTISSLQPEDFATYFCQHYSIYPWTFGGGTKVEIK

SEQ ID NO: 6354 - protein, 117 aa, synthetic construct
  source 1..117: note = Description of Artificial Sequence: Synthetic polypeptide; note = VH of XENP017934
EVQLLESGGGLVQPGGSLRLSCAASGFTFSSYGMSWVRQAPGKGLEWVSTISGGGRYTYYPDSVKGRFTISRDNSKNTLYLQMNSLRAEDTAVYYCASYYDSSFDYWGQGTLVTVSS

SEQ ID NO: 6355 - protein, 107 aa, synthetic construct; identical to SEQ ID NO: 6337
  source 1..107: note = Description of Artificial Sequence: Synthetic polypeptide; note = VL of XENP017934

SEQ ID NO: 6356 - protein, 5 aa, synthetic construct
  source 1..5: note = Description of Artificial Sequence: Synthetic peptide; note = XENP017934 vhCDR1
SYGMS

SEQ ID NO: 6357 - protein, 17 aa, synthetic construct
  source 1..17: note = Description of Artificial Sequence: Synthetic peptide; note = XENP017934 vhCDR2
TISGGGRYTYYPDSVKG

SEQ ID NO: 6358 - protein, 8 aa, synthetic construct
  source 1..8: note = Description of Artificial Sequence: Synthetic peptide; note = XENP017934 vhCDR3
YYDSSFDY

SEQ ID NO: 6359 - protein, 11 aa, synthetic construct
  source 1..11: note = Description of Artificial Sequence: Synthetic peptide; note = XENP017934 vlCDR1
RASQDVGTAVA

SEQ ID NO: 6360 - protein, 7 aa, synthetic construct
  source 1..7: note = Description of Artificial Sequence: Synthetic peptide; note = XENP017934 vlCDR2
WASTRHT

SEQ ID NO: 6361 - protein, 9 aa, synthetic construct
  source 1..9: note = Description of Artificial Sequence: Synthetic peptide; note = XENP017934 vlCDR3
QHYSIYPWT

SEQ ID NO: 6362 - protein, 249 aa, synthetic construct
  source 1..249: note = Description of Artificial Sequence: Synthetic polypeptide; note = XENP018493 1G6_H1.1_L1_scFv(GKPGS)4
QVQLVESGGGLVKPGGSLRLSCAASGFTFSNYWMNWVRQAPGKGLEWVGEIRLKSNNYATHYAEPVKGRFTISRDDSKSTVYLQMNSLKTEDTAVYYCTRYYGNYGGYFDVWGAGTLVTVSSGKPGSGKPGSGKPGSGKPGSSIVMTQSPATLSVSPGERATLSCRASQSVSNDVAWYQQKPGQSPRLLINYASHRYTGVPDRFTGSGYGTEFTLTISSLQSEDFAVYFCQQDYSSPRTFGGGTKVEIK

SEQ ID NO: 6363 - protein, 122 aa, synthetic construct
  source 1..122: note = Description of Artificial Sequence: Synthetic polypeptide; note = VH of XENP018493
QVQLVESGGGLVKPGGSLRLSCAASGFTFSNYWMNWVRQAPGKGLEWVGEIRLKSNNYATHYAEPVKGRFTISRDDSKSTVYLQMNSLKTEDTAVYYCTRYYGNYGGYFDVWGAGTLVTVSS

SEQ ID NO: 6364 - protein, 107 aa, synthetic construct; identical to SEQ ID NO: 6247
  source 1..107: note = Description of Artificial Sequence: Synthetic polypeptide; note = VL of XENP018493

SEQ ID NO: 6365 - protein, 5 aa, synthetic construct
  source 1..5: note = Description of Artificial Sequence: Synthetic peptide; note = XENP018493 vhCDR1
NYWMN

SEQ ID NO: 6366 - protein, 19 aa, synthetic construct
  source 1..19: note = Description of Artificial Sequence: Synthetic peptide; note = XENP018493 vhCDR2
EIRLKSNNYATHYAEPVKG

SEQ ID NO: 6367 - protein, 11 aa, synthetic construct
  source 1..11: note = Description of Artificial Sequence: Synthetic peptide; note = XENP018493 vhCDR3
YYGNYGGYFDV

SEQ ID NO: 6368 - protein, 11 aa, synthetic construct
  source 1..11: note = Description of Artificial Sequence: Synthetic peptide; note = XENP018493 vlCDR1
RASQSVSNDVA

SEQ ID NO: 6369 - protein, 7 aa, synthetic construct
  source 1..7: note = Description of Artificial Sequence: Synthetic peptide; note = XENP018493 vlCDR2
YASHRYT

SEQ ID NO: 6370 - protein, 9 aa, synthetic construct
  source 1..9: note = Description of Artificial Sequence: Synthetic peptide; note = XENP018493 vlCDR3
QQDYSSPRT

SEQ ID NO: 6371 - protein, 249 aa, synthetic construct
  source 1..249: note = Description of Artificial Sequence: Synthetic polypeptide; note = XENP018494 1G6_H1.2_L1_scFv(GKPGS)4
EVKLVESGGGLVKPGGSLRLSCAASGFTFSNYWMNWVRQAPGKGLEWVGEIRLKSNNYATHYAEPVKGRFTISRDDSKSTVYLQMNSLKTEDTAVYYCTRYYGNYGGYFDVWGAGTLVTVSSGKPGSGKPGSGKPGSGKPGSSIVMTQSPATLSVSPGERATLSCRASQSVSNDVAWYQQKPGQSPRLLINYASHRYTGVPDRFTGSGYGTEFTLTISSLQSEDFAVYFCQQDYSSPRTFGGGTKVEIK

SEQ ID NO: 6372 - protein, 122 aa, synthetic construct
  source 1..122: note = Description of Artificial Sequence: Synthetic polypeptide; note = VH of XENP018494
EVKLVESGGGLVKPGGSLRLSCAASGFTFSNYWMNWVRQAPGKGLEWVGEIRLKSNNYATHYAEPVKGRFTISRDDSKSTVYLQMNSLKTEDTAVYYCTRYYGNYGGYFDVWGAGTLVTVSS

SEQ ID NO: 6373 - protein, 107 aa, synthetic construct; identical to SEQ ID NO: 6247
  source 1..107: note = Description of Artificial Sequence: Synthetic polypeptide; note = VL of XENP018494

SEQ ID NO: 6374 - protein, 5 aa, synthetic construct
  source 1..5: note = Description of Artificial Sequence: Synthetic peptide; note = XENP018494 vhCDR1
NYWMN

SEQ ID NO: 6375 - protein, 19 aa, synthetic construct
  source 1..19: note = Description of Artificial Sequence: Synthetic peptide; note = XENP018494 vhCDR2
EIRLKSNNYATHYAEPVKG

SEQ ID NO: 6376 - protein, 11 aa, synthetic construct
  source 1..11: note = Description of Artificial Sequence: Synthetic peptide; note = XENP018494 vhCDR3
YYGNYGGYFDV

SEQ ID NO: 6377 - protein, 11 aa, synthetic construct
  source 1..11: note = Description of Artificial Sequence: Synthetic peptide; note = XENP018494 vlCDR1
RASQSVSNDVA

SEQ ID NO: 6378 - protein, 7 aa, synthetic construct
  source 1..7: note = Description of Artificial Sequence: Synthetic peptide; note = XENP018494 vlCDR2
YASHRYT

SEQ ID NO: 6379 - protein, 9 aa, synthetic construct
  source 1..9: note = Description of Artificial Sequence: Synthetic peptide; note = XENP018494 vlCDR3
QQDYSSPRT

SEQ ID NO: 6380 - protein, 249 aa, synthetic construct
  source 1..249: note = Description of Artificial Sequence: Synthetic polypeptide; note = XENP018495 1G6_H1.3_L1_scFv(GKPGS)4
EVQLEESGGGLVKPGGSLRLSCAASGFTFSNYWMNWVRQAPGKGLEWVGEIRLKSNNYATHYAEPVKGRFTISRDDSKSTVYLQMNSLKTEDTAVYYCTRYYGNYGGYFDVWGAGTLVTVSSGKPGSGKPGSGKPGSGKPGSSIVMTQSPATLSVSPGERATLSCRASQSVSNDVAWYQQKPGQSPRLLINYASHRYTGVPDRFTGSGYGTEFTLTISSLQSEDFAVYFCQQDYSSPRTFGGGTKVEIK

SEQ ID NO: 6381 - protein, 122 aa, synthetic construct
  source 1..122: note = Description of Artificial Sequence: Synthetic polypeptide; note = VH of XENP018495
EVQLEESGGGLVKPGGSLRLSCAASGFTFSNYWMNWVRQAPGKGLEWVGEIRLKSNNYATHYAEPVKGRFTISRDDSKSTVYLQMNSLKTEDTAVYYCTRYYGNYGGYFDVWGAGTLVTVSS

SEQ ID NO: 6382 - protein, 107 aa, synthetic construct; identical to SEQ ID NO: 6247
  source 1..107: note = Description of Artificial Sequence: Synthetic polypeptide; note = VL of XENP018495

SEQ ID NO: 6383 - protein, 5 aa, synthetic construct
  source 1..5: note = Description of Artificial Sequence: Synthetic peptide; note = XENP018495 vhCDR1
NYWMN

SEQ ID NO: 6384 - protein, 19 aa, synthetic construct
  source 1..19: note = Description of Artificial Sequence: Synthetic peptide; note = XENP018495 vhCDR2
EIRLKSNNYATHYAEPVKG

SEQ ID NO: 6385 - protein, 11 aa, synthetic construct
  source 1..11: note = Description of Artificial Sequence: Synthetic peptide; note = XENP018495 vhCDR3
YYGNYGGYFDV

SEQ ID NO: 6386 - protein, 11 aa, synthetic construct
  source 1..11: note = Description of Artificial Sequence: Synthetic peptide; note = XENP018495 vlCDR1
RASQSVSNDVA

SEQ ID NO: 6387 - protein, 7 aa, synthetic construct
  source 1..7: note = Description of Artificial Sequence: Synthetic peptide; note = XENP018495 vlCDR2
YASHRYT

SEQ ID NO: 6388 - protein, 9 aa, synthetic construct
  source 1..9: note = Description of Artificial Sequence: Synthetic peptide; note = XENP018495 vlCDR3
QQDYSSPRT

SEQ ID NO: 6389 - protein, 249 aa, synthetic construct
  source 1..249: note = Description of Artificial Sequence: Synthetic polypeptide; note = XENP018496 1G6_H1.4_L1_scFv(GKPGS)4
EVQLVESGGGLVQPGGSLRLSCAASGFTFSNYWMNWVRQAPGKGLEWVGEIRLKSNNYATHYAEPVKGRFTISRDDSKSTVYLQMNSLKTEDTAVYYCTRYYGNYGGYFDVWGAGTLVTVSSGKPGSGKPGSGKPGSGKPGSSIVMTQSPATLSVSPGERATLSCRASQSVSNDVAWYQQKPGQSPRLLINYASHRYTGVPDRFTGSGYGTEFTLTISSLQSEDFAVYFCQQDYSSPRTFGGGTKVEIK

SEQ ID NO: 6390 - protein, 122 aa, synthetic construct
  source 1..122: note = Description of Artificial Sequence: Synthetic polypeptide; note = VH of XENP018496
EVQLVESGGGLVQPGGSLRLSCAASGFTFSNYWMNWVRQAPGKGLEWVGEIRLKSNNYATHYAEPVKGRFTISRDDSKSTVYLQMNSLKTEDTAVYYCTRYYGNYGGYFDVWGAGTLVTVSS

SEQ ID NO: 6391 - protein, 107 aa, synthetic construct; identical to SEQ ID NO: 6247
  source 1..107: note = Description of Artificial Sequence: Synthetic polypeptide; note = VL of XENP018496

SEQ ID NO: 6392 - protein, 5 aa, synthetic construct
  source 1..5: note = Description of Artificial Sequence: Synthetic peptide; note = XENP018496 vhCDR1
NYWMN

SEQ ID NO: 6393 - protein, 19 aa, synthetic construct
  source 1..19: note = Description of Artificial Sequence: Synthetic peptide; note = XENP018496 vhCDR2
EIRLKSNNYATHYAEPVKG

SEQ ID NO: 6394 - protein, 11 aa, synthetic construct
  source 1..11: note = Description of Artificial Sequence: Synthetic peptide; note = XENP018496 vhCDR3
YYGNYGGYFDV

SEQ ID NO: 6395 - protein, 11 aa, synthetic construct
  source 1..11: note = Description of Artificial Sequence: Synthetic peptide; note = XENP018496 vlCDR1
RASQSVSNDVA

SEQ ID NO: 6396 - protein, 7 aa, synthetic construct
  source 1..7: note = Description of Artificial Sequence: Synthetic peptide; note = XENP018496 vlCDR2
YASHRYT

SEQ ID NO: 6397 - protein, 9 aa, synthetic construct
  source 1..9: note = Description of Artificial Sequence: Synthetic peptide; note = XENP018496 vlCDR3
QQDYSSPRT

SEQ ID NO: 6398 - protein, 249 aa, synthetic construct
  source 1..249: note = Description of Artificial Sequence: Synthetic polypeptide; note = XENP018501 1G6_H1.5_L1_scFv(GKPGS)4
EVQLVESGGGLVRPGGSLRLSCAASGFTFSNYWMNWVRQAPGKGLEWVGEIRLKSNNYATHYAEPVKGRFTISRDDSKSTVYLQMNSLKTEDTAVYYCTRYYGNYGGYFDVWGAGTLVTVSSGKPGSGKPGSGKPGSGKPGSSIVMTQSPATLSVSPGERATLSCRASQSVSNDVAWYQQKPGQSPRLLINYASHRYTGVPDRFTGSGYGTEFTLTISSLQSEDFAVYFCQQDYSSPRTFGGGTKVEIK

SEQ ID NO: 6399 - protein, 122 aa, synthetic construct
  source 1..122: note = Description of Artificial Sequence: Synthetic polypeptide; note = VH of XENP018501
EVQLVESGGGLVRPGGSLRLSCAASGFTFSNYWMNWVRQAPGKGLEWVGEIRLKSNNYATHYAEPVKGRFTISRDDSKSTVYLQMNSLKTEDTAVYYCTRYYGNYGGYFDVWGAGTLVTVSS

SEQ ID NO: 6400 - protein, 107 aa, synthetic construct; identical to SEQ ID NO: 6247
  source 1..107: note = Description of Artificial Sequence: Synthetic polypeptide; note = VL of XENP018501

SEQ ID NO: 6401 - protein, 5 aa, synthetic construct
  source 1..5: note = Description of Artificial Sequence: Synthetic peptide; note = XENP018501 vhCDR1
NYWMN

SEQ ID NO: 6402 - protein, 19 aa, synthetic construct
  source 1..19: note = Description of Artificial Sequence: Synthetic peptide; note = XENP018501 vhCDR2
EIRLKSNNYATHYAEPVKG

SEQ ID NO: 6403 - protein, 11 aa, synthetic construct
  source 1..11: note = Description of Artificial Sequence: Synthetic peptide; note = XENP018501 vhCDR3
YYGNYGGYFDV

SEQ ID NO: 6404 - protein, 11 aa, synthetic construct
  source 1..11: note = Description of Artificial Sequence: Synthetic peptide; note = XENP018501 vlCDR1
RASQSVSNDVA

SEQ ID NO: 6405 - protein, 7 aa, synthetic construct
  source 1..7: note = Description of Artificial Sequence: Synthetic peptide; note = XENP018501 vlCDR2
YASHRYT

SEQ ID NO: 6406 - protein, 9 aa, synthetic construct
  source 1..9: note = Description of Artificial Sequence: Synthetic peptide; note = XENP018501 vlCDR3
QQDYSSPRT

SEQ ID NO: 6407 - protein, 249 aa, synthetic construct
  source 1..249: note = Description of Artificial Sequence: Synthetic polypeptide; note = XENP018502 1G6_H1.6_L1_scFv(GKPGS)4
EVQLVESGGGLVKPGGSMRLSCAASGFTFSNYWMNWVRQAPGKGLEWVGEIRLKSNNYATHYAEPVKGRFTISRDDSKSTVYLQMNSLKTEDTAVYYCTRYYGNYGGYFDVWGAGTLVTVSSGKPGSGKPGSGKPGSGKPGSSIVMTQSPATLSVSPGERATLSCRASQSVSNDVAWYQQKPGQSPRLLINYASHRYTGVPDRFTGSGYGTEFTLTISSLQSEDFAVYFCQQDYSSPRTFGGGTKVEIK

SEQ ID NO: 6408 - protein, 122 aa, synthetic construct
  source 1..122: note = Description of Artificial Sequence: Synthetic polypeptide; note = VH of XENP018502
EVQLVESGGGLVKPGGSMRLSCAASGFTFSNYWMNWVRQAPGKGLEWVGEIRLKSNNYATHYAEPVKGRFTISRDDSKSTVYLQMNSLKTEDTAVYYCTRYYGNYGGYFDVWGAGTLVTVSS

SEQ ID NO: 6409 - protein, 107 aa, synthetic construct; identical to SEQ ID NO: 6247
  source 1..107: note = Description of Artificial Sequence: Synthetic polypeptide; note = VL of XENP018502

SEQ ID NO: 6410 - protein, 5 aa, synthetic construct
  source 1..5: note = Description of Artificial Sequence: Synthetic peptide; note = XENP018502 vhCDR1
NYWMN

SEQ ID NO: 6411 - protein, 19 aa, synthetic construct
  source 1..19: note = Description of Artificial Sequence: Synthetic peptide; note = XENP018502 vhCDR2
EIRLKSNNYATHYAEPVKG

SEQ ID NO: 6412 - protein, 11 aa, synthetic construct
  source 1..11: note = Description of Artificial Sequence: Synthetic peptide; note = XENP018502 vhCDR3
YYGNYGGYFDV

SEQ ID NO: 6413 - protein, 11 aa, synthetic construct
  source 1..11: note = Description of Artificial Sequence: Synthetic peptide; note = XENP018502 vlCDR1
RASQSVSNDVA

SEQ ID NO: 6414 - protein, 7 aa, synthetic construct
  source 1..7: note = Description of Artificial Sequence: Synthetic peptide; note = XENP018502 vlCDR2
YASHRYT

SEQ ID NO: 6415 - protein, 9 aa, synthetic construct
  source 1..9: note = Description of Artificial Sequence: Synthetic peptide; note = XENP018502 vlCDR3
QQDYSSPRT

SEQ ID NO: 6416 - protein, 249 aa, synthetic construct
  source 1..249: note = Description of Artificial Sequence: Synthetic polypeptide; note = XENP018503 1G6_H1.7_L1_scFv(GKPGS)4
EVQLVESGGGLVKPGGSLKLSCAASGFTFSNYWMNWVRQAPGKGLEWVGEIRLKSNNYATHYAEPVKGRFTISRDDSKSTVYLQMNSLKTEDTAVYYCTRYYGNYGGYFDVWGAGTLVTVSSGKPGSGKPGSGKPGSGKPGSSIVMTQSPATLSVSPGERATLSCRASQSVSNDVAWYQQKPGQSPRLLINYASHRYTGVPDRFTGSGYGTEFTLTISSLQSEDFAVYFCQQDYSSPRTFGGGTKVEIK

SEQ ID NO: 6417 - protein, 122 aa, synthetic construct
  source 1..122: note = Description of Artificial Sequence: Synthetic polypeptide; note = VH of XENP018503
EVQLVESGGGLVKPGGSLKLSCAASGFTFSNYWMNWVRQAPGKGLEWVGEIRLKSNNYATHYAEPVKGRFTISRDDSKSTVYLQMNSLKTEDTAVYYCTRYYGNYGGYFDVWGAGTLVTVSS

SEQ ID NO: 6418 - protein, 107 aa, synthetic construct; identical to SEQ ID NO: 6247
  source 1..107: note = Description of Artificial Sequence: Synthetic polypeptide; note = VL of XENP018503

SEQ ID NO: 6419 - protein, 5 aa, synthetic construct
  source 1..5: note = Description of Artificial Sequence: Synthetic peptide; note = XENP018503 vhCDR1
NYWMN

SEQ ID NO: 6420 - protein, 19 aa, synthetic construct
  source 1..19: note = Description of Artificial Sequence: Synthetic peptide; note = XENP018503 vhCDR2
EIRLKSNNYATHYAEPVKG

SEQ ID NO: 6421 - protein, 11 aa, synthetic construct
  source 1..11: note = Description of Artificial Sequence: Synthetic peptide; note = XENP018503 vhCDR3
YYGNYGGYFDV

SEQ ID NO: 6422 - protein, 11 aa, synthetic construct
  source 1..11: note = Description of Artificial Sequence: Synthetic peptide; note = XENP018503 vlCDR1
RASQSVSNDVA

SEQ ID NO: 6423 - protein, 7 aa, synthetic construct
  source 1..7: note = Description of Artificial Sequence: Synthetic peptide; note = XENP018503 vlCDR2
YASHRYT

SEQ ID NO: 6424 - protein, 9 aa, synthetic construct
  source 1..9: note = Description of Artificial Sequence: Synthetic peptide; note = XENP018503 vlCDR3
QQDYSSPRT

SEQ ID NO: 6425 - protein, 249 aa, synthetic construct
  source 1..249: note = Description of Artificial Sequence: Synthetic polypeptide; note = XENP018504 1G6_H1.8_L1_scFv(GKPGS)4
EVQLVESGGGLVKPGGSLRLSCVASGFTFSNYWMNWVRQAPGKGLEWVGEIRLKSNNYATHYAEPVKGRFTISRDDSKSTVYLQMNSLKTEDTAVYYCTRYYGNYGGYFDVWGAGTLVTVSSGKPGSGKPGSGKPGSGKPGSSIVMTQSPATLSVSPGERATLSCRASQSVSNDVAWYQQKPGQSPRLLINYASHRYTGVPDRFTGSGYGTEFTLTISSLQSEDFAVYFCQQDYSSPRTFGGGTKVEIK

SEQ ID NO: 6426 - protein, 122 aa, synthetic construct
  source 1..122: note = Description of Artificial Sequence: Synthetic polypeptide; note = VH of XENP018504
EVQLVESGGGLVKPGGSLRLSCVASGFTFSNYWMNWVRQAPGKGLEWVGEIRLKSNNYATHYAEPVKGRFTISRDDSKSTVYLQMNSLKTEDTAVYYCTRYYGNYGGYFDVWGAGTLVTVSS

SEQ ID NO: 6427 - protein, 107 aa, synthetic construct; identical to SEQ ID NO: 6247
  source 1..107: note = Description of Artificial Sequence: Synthetic polypeptide; note = VL of XENP018504

SEQ ID NO: 6428 - protein, 5 aa, synthetic construct
  source 1..5: note = Description of Artificial Sequence: Synthetic peptide; note = XENP018504 vhCDR1
NYWMN

SEQ ID NO: 6429 - protein, 19 aa, synthetic construct
  source 1..19: note = Description of Artificial Sequence: Synthetic peptide; note = XENP018504 vhCDR2
EIRLKSNNYATHYAEPVKG

SEQ ID NO: 6430 - protein, 11 aa, synthetic construct
  source 1..11: note = Description of Artificial Sequence: Synthetic peptide; note = XENP018504 vhCDR3
YYGNYGGYFDV

SEQ ID NO: 6431 - protein, 11 aa, synthetic construct
  source 1..11: note = Description of Artificial Sequence: Synthetic peptide; note = XENP018504 vlCDR1
RASQSVSNDVA

SEQ ID NO: 6432 - protein, 7 aa, synthetic construct
  source 1..7: note = Description of Artificial Sequence: Synthetic peptide; note = XENP018504 vlCDR2
YASHRYT

SEQ ID NO: 6433 - protein, 9 aa, synthetic construct
  source 1..9: note = Description of Artificial Sequence: Synthetic peptide; note = XENP018504 vlCDR3
QQDYSSPRT

SEQ ID NO: 6434 - protein, 249 aa, synthetic construct
  source 1..249: note = Description of Artificial Sequence: Synthetic polypeptide; note = XENP018505 1G6_H1.9_L1_scFv(GKPGS)4
EVQLVESGGGLVKPGGSLRLSCAASGFTVSNYWMNWVRQAPGKGLEWVGEIRLKSNNYATHYAEPVKGRFTISRDDSKSTVYLQMNSLKTEDTAVYYCTRYYGNYGGYFDVWGAGTLVTVSSGKPGSGKPGSGKPGSGKPGSSIVMTQSPATLSVSPGERATLSCRASQSVSNDVAWYQQKPGQSPRLLINYASHRYTGVPDRFTGSGYGTEFTLTISSLQSEDFAVYFCQQDYSSPRTFGGGTKVEIK

SEQ ID NO: 6435 - protein, 122 aa, synthetic construct
  source 1..122: note = Description of Artificial Sequence: Synthetic polypeptide; note = VH of XENP018505
EVQLVESGGGLVKPGGSLRLSCAASGFTVSNYWMNWVRQAPGKGLEWVGEIRLKSNNYATHYAEPVKGRFTISRDDSKSTVYLQMNSLKTEDTAVYYCTRYYGNYGGYFDVWGAGTLVTVSS

SEQ ID NO: 6436 - protein, 107 aa, synthetic construct; identical to SEQ ID NO: 6247
  source 1..107: note = Description of Artificial Sequence: Synthetic polypeptide; note = VL of XENP018505

SEQ ID NO: 6437 - protein, 5 aa, synthetic construct
  source 1..5: note = Description of Artificial Sequence: Synthetic peptide; note = XENP018505 vhCDR1
NYWMN

SEQ ID NO: 6438 - protein, 19 aa, synthetic construct
  source 1..19: note = Description of Artificial Sequence: Synthetic peptide; note = XENP018505 vhCDR2
EIRLKSNNYATHYAEPVKG

SEQ ID NO: 6439 - protein, 11 aa, synthetic construct
  source 1..11: note = Description of Artificial Sequence: Synthetic peptide; note = XENP018505 vhCDR3
YYGNYGGYFDV

SEQ ID NO: 6440 - protein, 11 aa, synthetic construct
  source 1..11: note = Description of Artificial Sequence: Synthetic peptide; note = XENP018505 vlCDR1
RASQSVSNDVA

SEQ ID NO: 6441 - protein, 7 aa, synthetic construct
  source 1..7: note = Description of Artificial Sequence: Synthetic peptide; note = XENP018505 vlCDR2
YASHRYT

SEQ ID NO: 6442 - protein, 9 aa, synthetic construct
  source 1..9: note = Description of Artificial Sequence: Synthetic peptide; note = XENP018505 vlCDR3
QQDYSSPRT

SEQ ID NO: 6443 - protein, 249 aa, synthetic construct
  source 1..249: note = Description of Artificial Sequence: Synthetic polypeptide; note = XENP018506 1G6_H1.10_L1_scFv(GKPGS)4
EVQLVESGGGLVKPGGSLRLSCAASGFTFTNYWMNWVRQAPGKGLEWVGEIRLKSNNYATHYAEPVKGRFTISRDDSKSTVYLQMNSLKTEDTAVYYCTRYYGNYGGYFDVWGAGTLVTVSSGKPGSGKPGSGKPGSGKPGSSIVMTQSPATLSVSPGERATLSCRASQSVSNDVAWYQQKPGQSPRLLINYASHRYTGVPDRFTGSGYGTEFTLTISSLQSEDFAVYFCQQDYSSPRTFGGGTKVEIK

SEQ ID NO: 6444 - protein, 122 aa, synthetic construct
  source 1..122: note = Description of Artificial Sequence: Synthetic polypeptide; note = VH of XENP018506
EVQLVESGGGLVKPGGSLRLSCAASGFTFTNYWMNWVRQAPGKGLEWVGEIRLKSNNYATHYAEPVKGRFTISRDDSKSTVYLQMNSLKTEDTAVYYCTRYYGNYGGYFDVWGAGTLVTVSS

SEQ ID NO: 6445 - protein, 107 aa, synthetic construct; identical to SEQ ID NO: 6247
  source 1..107: note = Description of Artificial Sequence: Synthetic polypeptide; note = VL of XENP018506

SEQ ID NO: 6446 - protein, 5 aa, synthetic construct
  source 1..5: note = Description of Artificial Sequence: Synthetic peptide; note = XENP018506 vhCDR1
NYWMN

SEQ ID NO: 6447 - protein, 19 aa, synthetic construct
  source 1..19: note = Description of Artificial Sequence: Synthetic peptide; note = XENP018506 vhCDR2
EIRLKSNNYATHYAEPVKG

SEQ ID NO: 6448 - protein, 11 aa, synthetic construct
  source 1..11: note = Description of Artificial Sequence: Synthetic peptide; note = XENP018506 vhCDR3
YYGNYGGYFDV

SEQ ID NO: 6449 - protein, 11 aa, synthetic construct
  source 1..11: note = Description of Artificial Sequence: Synthetic peptide; note = XENP018506 vlCDR1
RASQSVSNDVA

SEQ ID NO: 6450 - protein, 7 aa, synthetic construct
  source 1..7: note = Description of Artificial Sequence: Synthetic peptide; note = XENP018506 vlCDR2
YASHRYT

SEQ ID NO: 6451 - protein, 9 aa, synthetic construct
  source 1..9: note = Description of Artificial Sequence: Synthetic peptide; note = XENP018506 vlCDR3
QQDYSSPRT

SEQ ID NO: 6452 - protein, 249 aa, synthetic construct
  source 1..249: note = Description of Artificial Sequence: Synthetic polypeptide; note = XENP018507 1G6_H1.11_L1_scFv(GKPGS)4
EVQLVESGGGLVKPGGSLRLSCAASGFTFANYWMNWVRQAPGKGLEWVGEIRLKSNNYATHYAEPVKGRFTISRDDSKSTVYLQMNSLKTEDTAVYYCTRYYGNYGGYFDVWGAGTLVTVSSGKPGSGKPGSGKPGSGKPGSSIVMTQSPATLSVSPGERATLSCRASQSVSNDVAWYQQKPGQSPRLLINYASHRYTGVPDRFTGSGYGTEFTLTISSLQSEDFAVYFCQQDYSSPRTFGGGTKVEIK

SEQ ID NO: 6453 - protein, 122 aa, synthetic construct
  source 1..122: note = Description of Artificial Sequence: Synthetic polypeptide; note = VH of XENP018507
EVQLVESGGGLVKPGGSLRLSCAASGFTFANYWMNWVRQAPGKGLEWVGEIRLKSNNYATHYAEPVKGRFTISRDDSKSTVYLQMNSLKTEDTAVYYCTRYYGNYGGYFDVWGAGTLVTVSS

SEQ ID NO: 6454 - protein, 107 aa, synthetic construct; identical to SEQ ID NO: 6247
  source 1..107: note = Description of Artificial Sequence: Synthetic polypeptide; note = VL of XENP018507

SEQ ID NO: 6455 - protein, 5 aa, synthetic construct
  source 1..5: note = Description of Artificial Sequence: Synthetic peptide; note = XENP018507 vhCDR1
NYWMN

SEQ ID NO: 6456 - protein, 19 aa, synthetic construct
  source 1..19: note = Description of Artificial Sequence: Synthetic peptide; note = XENP018507 vhCDR2
EIRLKSNNYATHYAEPVKG

SEQ ID NO: 6457 - protein, 11 aa, synthetic construct
  source 1..11: note = Description of Artificial Sequence: Synthetic peptide; note = XENP018507 vhCDR3
YYGNYGGYFDV

SEQ ID NO: 6458 - protein, 11 aa, synthetic construct
  source 1..11: note = Description of Artificial Sequence: Synthetic peptide; note = XENP018507 vlCDR1
RASQSVSNDVA

SEQ ID NO: 6459 - protein, 7 aa, synthetic construct
  source 1..7: note = Description of Artificial Sequence: Synthetic peptide; note = XENP018507 vlCDR2
YASHRYT

SEQ ID NO: 6460 - protein, 9 aa, synthetic construct
  source 1..9: note = Description of Artificial Sequence: Synthetic peptide; note = XENP018507 vlCDR3
QQDYSSPRT

SEQ ID NO: 6461 - protein, 249 aa, synthetic construct
  source 1..249: note = Description of Artificial Sequence: Synthetic polypeptide; note = XENP018508 1G6_H1.12_L1_scFv(GKPGS)4
EVQLVESGGGLVKPGGSLRLSCAASGFTFQNYWMNWVRQAPGKGLEWVGEIRLKSNNYATHYAEPVKGRFTISRDDSKSTVYLQMNSLKTEDTAVYYCTRYYGNYGGYFDVWGAGTLVTVSSGKPGSGKPGSGKPGSGKPGSSIVMTQSPATLSVSPGERATLSCRASQSVSNDVAWYQQKPGQSPRLLINYASHRYTGVPDRFTGSGYGTEFTLTISSLQSEDFAVYFCQQDYSSPRTFGGGTKVEIK

SEQ ID NO: 6462 - protein, 122 aa, synthetic construct
  source 1..122: note = Description of Artificial Sequence: Synthetic polypeptide; note = VH of XENP018508
EVQLVESGGGLVKPGGSLRLSCAASGFTFQNYWMNWVRQAPGKGLEWVGEIRLKSNNYATHYAEPVKGRFTISRDDSKSTVYLQMNSLKTEDTAVYYCTRYYGNYGGYFDVWGAGTLVTVSS

SEQ ID NO: 6463 - protein, 107 aa, synthetic construct; identical to SEQ ID NO: 6247
  source 1..107: note = Description of Artificial Sequence: Synthetic polypeptide; note = VL of XENP018508

SEQ ID NO: 6464 - protein, 5 aa, synthetic construct
  source 1..5: note = Description of Artificial Sequence: Synthetic peptide; note = XENP018508 vhCDR1
NYWMN

SEQ ID NO: 6465 - protein, 19 aa, synthetic construct
  source 1..19: note = Description of Artificial Sequence: Synthetic peptide; note = XENP018508 vhCDR2
EIRLKSNNYATHYAEPVKG

SEQ ID NO: 6466 - protein, 11 aa, synthetic construct
  source 1..11: note = Description of Artificial Sequence: Synthetic peptide; note = XENP018508 vhCDR3
YYGNYGGYFDV

SEQ ID NO: 6467 - protein, 11 aa, synthetic construct
  source 1..11: note = Description of Artificial Sequence: Synthetic peptide; note = XENP018508 vlCDR1
RASQSVSNDVA

SEQ ID NO: 6468 - protein, 7 aa, synthetic construct
  source 1..7: note = Description of Artificial Sequence: Synthetic peptide; note = XENP018508 vlCDR2
YASHRYT

SEQ ID NO: 6469 - protein, 9 aa, synthetic construct
  source 1..9: note = Description of Artificial Sequence: Synthetic peptide; note = XENP018508 vlCDR3
QQDYSSPRT

SEQ ID NO: 6470 - protein, 249 aa, synthetic construct
  source 1..249: note = Description of Artificial Sequence: Synthetic polypeptide; note = XENP018509 1G6_H1.13_L1_scFv(GKPGS)4
EVQLVESGGGLVKPGGSLRLSCAASGFTFGNYWMNWVRQAPGKGLEWVGEIRLKSNNYATHYAEPVKGRFTISRDDSKSTVYLQMNSLKTEDTAVYYCTRYYGNYGGYFDVWGAGTLVTVSSGKPGSGKPGSGKPGSGKPGSSIVMTQSPATLSVSPGERATLSCRASQSVSNDVAWYQQKPGQSPRLLINYASHRYTGVPDRFTGSGYGTEFTLTISSLQSEDFAVYFCQQDYSSPRTFGGGTKVEIK

SEQ ID NO: 6471 - protein, 122 aa, synthetic construct
  source 1..122: note = Description of Artificial Sequence: Synthetic polypeptide; note = VH of XENP018509
EVQLVESGGGLVKPGGSLRLSCAASGFTFGNYWMNWVRQAPGKGLEWVGEIRLKSNNYATHYAEPVKGRFTISRDDSKSTVYLQMNSLKTEDTAVYYCTRYYGNYGGYFDVWGAGTLVTVSS

SEQ ID NO: 6472 - protein, 107 aa, synthetic construct; identical to SEQ ID NO: 6247
  source 1..107: note = Description of Artificial Sequence: Synthetic polypeptide; note = VL of XENP018509

SEQ ID NO: 6473 - protein, 5 aa, synthetic construct
  source 1..5: note = Description of Artificial Sequence: Synthetic peptide; note = XENP018509 vhCDR1
NYWMN

SEQ ID NO: 6474 - protein, 19 aa, synthetic construct
  source 1..19: note = Description of Artificial Sequence: Synthetic peptide; note = XENP018509 vhCDR2
EIRLKSNNYATHYAEPVKG

SEQ ID NO: 6475 - protein, 11 aa, synthetic construct
  source 1..11: note = Description of Artificial Sequence: Synthetic peptide; note = XENP018509 vhCDR3
YYGNYGGYFDV

SEQ ID NO: 6476 - protein, 11 aa, synthetic construct
  source 1..11: note = Description of Artificial Sequence: Synthetic peptide; note = XENP018509 vlCDR1
RASQSVSNDVA

SEQ ID NO: 6477 - protein, 7 aa, synthetic construct
  source 1..7: note = Description of Artificial Sequence: Synthetic peptide; note = XENP018509 vlCDR2
YASHRYT

SEQ ID NO: 6478 - protein, 9 aa, synthetic construct
  source 1..9: note = Description of Artificial Sequence: Synthetic peptide; note = XENP018509 vlCDR3
QQDYSSPRT

SEQ ID NO: 6479 - protein, 249 aa, synthetic construct
  source 1..249: note = Description of Artificial Sequence: Synthetic polypeptide; note = XENP018510 1G6_H1.14_L1_scFv(GKPGS)4
EVQLVESGGGLVKPGGSLRLSCAASGFTFVNYWMNWVRQAPGKGLEWVGEIRLKSNNYATHYAEPVKGRFTISRDDSKSTVYLQMNSLKTEDTAVYYCTRYYGNYGGYFDVWGAGTLVTVSSGKPGSGKPGSGKPGSGKPGSSIVMTQSPATLSVSPGERATLSCRASQSVSNDVAWYQQKPGQSPRLLINYASHRYTGVPDRFTGSGYGTEFTLTISSLQSEDFAVYFCQQDYSSPRTFGGGTKVEIK

SEQ ID NO: 6480 - protein, 122 aa, synthetic construct
  source 1..122: note = Description of Artificial Sequence: Synthetic polypeptide; note = VH of XENP018510
EVQLVESGGGLVKPGGSLRLSCAASGFTFVNYWMNWVRQAPGKGLEWVGEIRLKSNNYATHYAEPVKGRFTISRDDSKSTVYLQMNSLKTEDTAVYYCTRYYGNYGGYFDVWGAGTLVTVSS

SEQ ID NO: 6481 - protein, 107 aa, synthetic construct; identical to SEQ ID NO: 6247
  source 1..107: note = Description of Artificial Sequence: Synthetic polypeptide; note = VL of XENP018510

SEQ ID NO: 6482 - protein, 5 aa, synthetic construct
  source 1..5: note = Description of Artificial Sequence: Synthetic peptide; note = XENP018510 vhCDR1
NYWMN

SEQ ID NO: 6483 - protein, 19 aa, synthetic construct
  source 1..19: note = Description of Artificial Sequence: Synthetic peptide; note = XENP018510 vhCDR2
EIRLKSNNYATHYAEPVKG

SEQ ID NO: 6484 - protein, 11 aa, synthetic construct
  source 1..11: note = Description of Artificial Sequence: Synthetic peptide; note = XENP018510 vhCDR3
YYGNYGGYFDV

SEQ ID NO: 6485 - protein, 11 aa, synthetic construct
  source 1..11: note = Description of Artificial Sequence: Synthetic peptide; note = XENP018510 vlCDR1
RASQSVSNDVA

SEQ ID NO: 6486 - protein, 7 aa, synthetic construct
  source 1..7: note = Description of Artificial Sequence: Synthetic peptide; note = XENP018510 vlCDR2
YASHRYT

SEQ ID NO: 6487 - protein, 9 aa, synthetic construct
  source 1..9: note = Description of Artificial Sequence: Synthetic peptide; note = XENP018510 vlCDR3
QQDYSSPRT

SEQ ID NO: 6488 - protein, 249 aa, synthetic construct
  source 1..249: note = Description of Artificial Sequence: Synthetic polypeptide; note = XENP018511 1G6_H1.15_L1_scFv(GKPGS)4
EVQLVESGGGLVKPGGSLRLSCAASGFTFHNYWMNWVRQAPGKGLEWVGEIRLKSNNYATHYAEPVKGRFTISRDDSKSTVYLQMNSLKTEDTAVYYCTRYYGNYGGYFDVWGAGTLVTVSSGKPGSGKPGSGKPGSGKPGSSIVMTQSPATLSVSPGERATLSCRASQSVSNDVAWYQQKPGQSPRLLINYASHRYTGVPDRFTGSGYGTEFTLTISSLQSEDFAVYFCQQDYSSPRTFGGGTKVEIK

SEQ ID NO: 6489 - protein, 122 aa, synthetic construct
  source 1..122: note = Description of Artificial Sequence: Synthetic polypeptide; note = VH of XENP018511
EVQLVESGGGLVKPGGSLRLSCAASGFTFHNYWMNWVRQAPGKGLEWVGEIRLKSNNYATHYAEPVKGRFTISRDDSKSTVYLQMNSLKTEDTAVYYCTRYYGNYGGYFDVWGAGTLVTVSS

SEQ ID NO: 6490 - protein, 107 aa, synthetic construct; identical to SEQ ID NO: 6247
  source 1..107: note = Description of Artificial Sequence: Synthetic polypeptide; note = VL of XENP018511

SEQ ID NO: 6491 - protein, 5 aa, synthetic construct
  source 1..5: note = Description of Artificial Sequence: Synthetic peptide; note = XENP018511 vhCDR1
NYWMN

SEQ ID NO: 6492 - protein, 19 aa, synthetic construct
  source 1..19: note = Description of Artificial Sequence: Synthetic peptide; note = XENP018511 vhCDR2
EIRLKSNNYATHYAEPVKG

SEQ ID NO: 6493 - protein, 11 aa, synthetic construct
  source 1..11: note = Description of Artificial Sequence: Synthetic peptide; note = XENP018511 vhCDR3
YYGNYGGYFDV

SEQ ID NO: 6494 - protein, 11 aa, synthetic construct
  source 1..11: note = Description of Artificial Sequence: Synthetic peptide; note = XENP018511 vlCDR1
RASQSVSNDVA

SEQ ID NO: 6495 - protein, 7 aa, synthetic construct
  source 1..7: note = Description of Artificial Sequence: Synthetic peptide; note = XENP018511 vlCDR2
YASHRYT

SEQ ID NO: 6496 - protein, 9 aa, synthetic construct
  source 1..9: note = Description of Artificial Sequence: Synthetic peptide; note = XENP018511 vlCDR3
QQDYSSPRT

SEQ ID NO: 6497 - protein, 249 aa, synthetic construct
  source 1..249: note = Description of Artificial Sequence: Synthetic polypeptide; note = XENP018512 1G6_H1.16_L1_scFv(GKPGS)4
EVQLVESGGGLVKPGGSLRLSCAASGFTFDNYWMNWVRQAPGKGLEWVGEIRLKSNNYATHYAEPVKGRFTISRDDSKSTVYLQMNSLKTEDTAVYYCTRYYGNYGGYFDVWGAGTLVTVSSGKPGSGKPGSGKPGSGKPGSSIVMTQSPATLSVSPGERATLSCRASQSVSNDVAWYQQKPGQSPRLLINYASHRYTGVPDRFTGSGYGTEFTLTISSLQSEDFAVYFCQQDYSSPRTFGGGTKVEIK

SEQ ID NO: 6498 - protein, 122 aa, synthetic construct
  source 1..122: note = Description of Artificial Sequence: Synthetic polypeptide; note = VH of XENP018512
EVQLVESGGGLVKPGGSLRLSCAASGFTFDNYWMNWVRQAPGKGLEWVGEIRLKSNNYATHYAEPVKGRFTISRDDSKSTVYLQMNSLKTEDTAVYYCTRYYGNYGGYFDVWGAGTLVTVSS

SEQ ID NO: 6499 - protein, 107 aa, synthetic construct; identical to SEQ ID NO: 6247
  source 1..107: note = Description of Artificial Sequence: Synthetic polypeptide; note = VL of XENP018512

SEQ ID NO: 6500 - protein, 5 aa, synthetic construct
  source 1..5: note = Description of Artificial Sequence: Synthetic peptide; note = XENP018512 vhCDR1
NYWMN

SEQ ID NO: 6501 - protein, 19 aa, synthetic construct
  source 1..19: note = Description of Artificial Sequence: Synthetic peptide; note = XENP018512 vhCDR2
EIRLKSNNYATHYAEPVKG

SEQ ID NO: 6502 - protein, 11 aa, synthetic construct
  source 1..11: note = Description of Artificial Sequence: Synthetic peptide; note = XENP018512 vhCDR3
YYGNYGGYFDV

SEQ ID NO: 6503 - protein, 11 aa, synthetic construct
  source 1..11: note = Description of Artificial Sequence: Synthetic peptide; note = XENP018512 vlCDR1
RASQSVSNDVA

SEQ ID NO: 6504 - protein, 7 aa, synthetic construct
  source 1..7: note = Description of Artificial Sequence: Synthetic peptide; note = XENP018512 vlCDR2
YASHRYT

SEQ ID NO: 6505 - protein, 9 aa, synthetic construct
  source 1..9: note = Description of Artificial Sequence: Synthetic peptide; note = XENP018512 vlCDR3
QQDYSSPRT

SEQ ID NO: 6506 - protein, 249 aa, synthetic construct
  source 1..249: note = Description of Artificial Sequence: Synthetic polypeptide; note = XENP018513 1G6_H1.17_L1_scFv(GKPGS)4
EVQLVESGGGLVKPGGSLRLSCAASGFTFKNYWMNWVRQAPGKGLEWVGEIRLKSNNYATHYAEPVKGRFTISRDDSKSTVYLQMNSLKTEDTAVYYCTRYYGNYGGYFDVWGAGTLVTVSSGKPGSGKPGSGKPGSGKPGSSIVMTQSPATLSVSPGERATLSCRASQSVSNDVAWYQQKPGQSPRLLINYASHRYTGVPDRFTGSGYGTEFTLTISSLQSEDFAVYFCQQDYSSPRTFGGGTKVEIK

SEQ ID NO: 6507 - protein, 122 aa, synthetic construct
  source 1..122: note = Description of Artificial Sequence: Synthetic polypeptide; note = VH of XENP018513
EVQLVESGGGLVKPGGSLRLSCAASGFTFKNYWMNWVRQAPGKGLEWVGEIRLKSNNYATHYAEPVKGRFTISRDDSKSTVYLQMNSLKTEDTAVYYCTRYYGNYGGYFDVWGAGTLVTVSS

SEQ ID NO: 6508 - protein, 107 aa, synthetic construct; identical to SEQ ID NO: 6247
  source 1..107: note = Description of Artificial Sequence: Synthetic polypeptide; note = VL of XENP018513

SEQ ID NO: 6509 - protein, 5 aa, synthetic construct
  source 1..5: note = Description of Artificial Sequence: Synthetic peptide; note = XENP018513 vhCDR1
NYWMN

SEQ ID NO: 6510 - protein, 19 aa, synthetic construct
  source 1..19: note = Description of Artificial Sequence: Synthetic peptide; note = XENP018513 vhCDR2
EIRLKSNNYATHYAEPVKG

SEQ ID NO: 6511 - protein, 11 aa, synthetic construct
  source 1..11: note = Description of Artificial Sequence: Synthetic peptide; note = XENP018513 vhCDR3
YYGNYGGYFDV

SEQ ID NO: 6512 - protein, 11 aa, synthetic construct
  source 1..11: note = Description of Artificial Sequence: Synthetic peptide; note = XENP018513 vlCDR1
RASQSVSNDVA

SEQ ID NO: 6513 - protein, 7 aa, synthetic construct
  source 1..7: note = Description of Artificial Sequence: Synthetic peptide; note = XENP018513 vlCDR2
YASHRYT

SEQ ID NO: 6514 - protein, 9 aa, synthetic construct
  source 1..9: note = Description of Artificial Sequence: Synthetic peptide; note = XENP018513 vlCDR3
QQDYSSPRT

SEQ ID NO: 6515 - protein, 249 aa, synthetic construct
  source 1..249: note = Description of Artificial Sequence: Synthetic polypeptide; note = XENP018514 1G6_H1.18_L1_scFv(GKPGS)4
EVQLVESGGGLVKPGGSLRLSCAASGFTFYNYWMNWVRQAPGKGLEWVGEIRLKSNNYATHYAEPVKGRFTISRDDSKSTVYLQMNSLKTEDTAVYYCTRYYGNYGGYFDVWGAGTLVTVSSGKPGSGKPGSGKPGSGKPGSSIVMTQSPATLSVSPGERATLSCRASQSVSNDVAWYQQKPGQSPRLLINYASHRYTGVPDRFTGSGYGTEFTLTISSLQSEDFAVYFCQQDYSSPRTFGGGTKVEIK

SEQ ID NO: 6516 - protein, 122 aa, synthetic construct
  source 1..122: note = Description of Artificial Sequence: Synthetic polypeptide; note = VH of XENP018514
EVQLVESGGGLVKPGGSLRLSCAASGFTFYNYWMNWVRQAPGKGLEWVGEIRLKSNNYATHYAEPVKGRFTISRDDSKSTVYLQMNSLKTEDTAVYYCTRYYGNYGGYFDVWGAGTLVTVSS

SEQ ID NO: 6517 - protein, 107 aa, synthetic construct; identical to SEQ ID NO: 6247
  source 1..107: note = Description of Artificial Sequence: Synthetic polypeptide; note = VL of XENP018514

SEQ ID NO: 6518 - protein, 5 aa, synthetic construct
  source 1..5: note = Description of Artificial Sequence: Synthetic peptide; note = XENP018514 vhCDR1
NYWMN

SEQ ID NO: 6519 - protein, 19 aa, synthetic construct
  source 1..19: note = Description of Artificial Sequence: Synthetic peptide; note = XENP018514 vhCDR2
EIRLKSNNYATHYAEPVKG

SEQ ID NO: 6520 - protein, 11 aa, synthetic construct
  source 1..11: note = Description of Artificial Sequence: Synthetic peptide; note = XENP018514 vhCDR3
YYGNYGGYFDV

SEQ ID NO: 6521 - protein, 11 aa, synthetic construct
  source 1..11: note = Description of Artificial Sequence: Synthetic peptide; note = XENP018514 vlCDR1
RASQSVSNDVA

SEQ ID NO: 6522 - protein, 7 aa, synthetic construct
  source 1..7: note = Description of Artificial Sequence: Synthetic peptide; note = XENP018514 vlCDR2
YASHRYT

SEQ ID NO: 6523 - protein, 9 aa, synthetic construct
  source 1..9: note = Description of Artificial Sequence: Synthetic peptide; note = XENP018514 vlCDR3
QQDYSSPRT

SEQ ID NO: 6524 - protein, 249 aa, synthetic construct
  source 1..249: note = Description of Artificial Sequence: Synthetic polypeptide; note = XENP018515 1G6_H1.19_L1_scFv(GKPGS)4
EVQLVESGGGLVKPGGSLRLSCAASGFTFSDYWMNWVRQAPGKGLEWVGEIRLKSNNYATHYAEPVKGRFTISRDDSKSTVYLQMNSLKTEDTAVYYCTRYYGNYGGYFDVWGAGTLVTVSSGKPGSGKPGSGKPGSGKPGSSIVMTQSPATLSVSPGERATLSCRASQSVSNDVAWYQQKPGQSPRLLINYASHRYTGVPDRFTGSGYGTEFTLTISSLQSEDFAVYFCQQDYSSPRTFGGGTKVEIK

SEQ ID NO: 6525 - protein, 122 aa, synthetic construct
  source 1..122: note = Description of Artificial Sequence: Synthetic polypeptide; note = VH of XENP018515
EVQLVESGGGLVKPGGSLRLSCAASGFTFSDYWMNWVRQAPGKGLEWVGEIRLKSNNYATHYAEPVKGRFTISRDDSKSTVYLQMNSLKTEDTAVYYCTRYYGNYGGYFDVWGAGTLVTVSS

SEQ ID NO: 6526 - protein, 107 aa, synthetic construct; identical to SEQ ID NO: 6247
  source 1..107: note = Description of Artificial Sequence: Synthetic polypeptide; note = VL of XENP018515

SEQ ID NO: 6527 - protein, 5 aa, synthetic construct
  source 1..5: note = Description of Artificial Sequence: Synthetic peptide; note = XENP018515 vhCDR1
DYWMN

SEQ ID NO: 6528 - protein, 19 aa, synthetic construct
  source 1..19: note = Description of Artificial Sequence: Synthetic peptide; note = XENP018515 vhCDR2
EIRLKSNNYATHYAEPVKG

SEQ ID NO: 6529 - protein, 11 aa, synthetic construct
  source 1..11: note = Description of Artificial Sequence: Synthetic peptide; note = XENP018515 vhCDR3
YYGNYGGYFDV

SEQ ID NO: 6530 - protein, 11 aa, synthetic construct
  source 1..11: note = Description of Artificial Sequence: Synthetic peptide; note = XENP018515 vlCDR1
RASQSVSNDVA

SEQ ID NO: 6531 - protein, 7 aa, synthetic construct
  source 1..7: note = Description of Artificial Sequence: Synthetic peptide; note = XENP018515 vlCDR2
YASHRYT

SEQ ID NO: 6532 - protein, 9 aa, synthetic construct
  source 1..9: note = Description of Artificial Sequence: Synthetic peptide; note = XENP018515 vlCDR3
QQDYSSPRT

SEQ ID NO: 6533 - protein, 249 aa, synthetic construct
  source 1..249: note = Description of Artificial Sequence: Synthetic polypeptide; note = XENP018516 1G6_H1.20_L1_scFv(GKPGS)4
EVQLVESGGGLVKPGGSLRLSCAASGFTFSHYWMNWVRQAPGKGLEWVGEIRLKSNNYATHYAEPVKGRFTISRDDSKSTVYLQMNSLKTEDTAVYYCTRYYGNYGGYFDVWGAGTLVTVSSGKPGSGKPGSGKPGSGKPGSSIVMTQSPATLSVSPGERATLSCRASQSVSNDVAWYQQKPGQSPRLLINYASHRYTGVPDRFTGSGYGTEFTLTISSLQSEDFAVYFCQQDYSSPRTFGGGTKVEIK

SEQ ID NO: 6534 - protein, 122 aa, synthetic construct
  source 1..122: note = Description of Artificial Sequence: Synthetic polypeptide; note = VH of XENP018516
EVQLVESGGGLVKPGGSLRLSCAASGFTFSHYWMNWVRQAPGKGLEWVGEIRLKSNNYATHYAEPVKGRFTISRDDSKSTVYLQMNSLKTEDTAVYYCTRYYGNYGGYFDVWGAGTLVTVSS

SEQ ID NO: 6535 - protein, 107 aa, synthetic construct; identical to SEQ ID NO: 6247
  source 1..107: note = Description of Artificial Sequence: Synthetic polypeptide; note = VL of XENP018516

SEQ ID NO: 6536 - protein, 5 aa, synthetic construct
  source 1..5: note = Description of Artificial Sequence: Synthetic peptide; note = XENP018516 vhCDR1
HYWMN

SEQ ID NO: 6537 - protein, 19 aa, synthetic construct
  source 1..19: note = Description of Artificial Sequence: Synthetic peptide; note = XENP018516 vhCDR2
EIRLKSNNYATHYAEPVKG

SEQ ID NO: 6538 - protein, 11 aa, synthetic construct
  source 1..11: note = Description of Artificial Sequence: Synthetic peptide; note = XENP018516 vhCDR3
YYGNYGGYFDV

SEQ ID NO: 6539 - protein, 11 aa, synthetic construct
  source 1..11: note = Description of Artificial Sequence: Synthetic peptide; note = XENP018516 vlCDR1
RASQSVSNDVA

SEQ ID NO: 6540 - protein, 7 aa, synthetic construct
  source 1..7: note = Description of Artificial Sequence: Synthetic peptide; note = XENP018516 vlCDR2
YASHRYT

SEQ ID NO: 6541 - protein, 9 aa, synthetic construct
  source 1..9: note = Description of Artificial Sequence: Synthetic peptide; note = XENP018516 vlCDR3
QQDYSSPRT

SEQ ID NO: 6542 - protein, 249 aa, synthetic construct
  source 1..249: note = Description of Artificial Sequence: Synthetic polypeptide; note = XENP018517 1G6_H1.21_L1_scFv(GKPGS)4
EVQLVESGGGLVKPGGSLRLSCAASGFTFSEYWMNWVRQAPGKGLEWVGEIRLKSNNYATHYAEPVKGRFTISRDDSKSTVYLQMNSLKTEDTAVYYCTRYYGNYGGYFDVWGAGTLVTVSSGKPGSGKPGSGKPGSGKPGSSIVMTQSPATLSVSPGERATLSCRASQSVSNDVAWYQQKPGQSPRLLINYASHRYTGVPDRFTGSGYGTEFTLTISSLQSEDFAVYFCQQDYSSPRTFGGGTKVEIK

SEQ ID NO: 6543 - protein, 122 aa, synthetic construct
  source 1..122: note = Description of Artificial Sequence: Synthetic polypeptide; note = VH of XENP018517
EVQLVESGGGLVKPGGSLRLSCAASGFTFSEYWMNWVRQAPGKGLEWVGEIRLKSNNYATHYAEPVKGRFTISRDDSKSTVYLQMNSLKTEDTAVYYCTRYYGNYGGYFDVWGAGTLVTVSS

SEQ ID NO: 6544 - protein, 107 aa, synthetic construct; identical to SEQ ID NO: 6247
  source 1..107: note = Description of Artificial Sequence: Synthetic polypeptide; note = VL of XENP018517

SEQ ID NO: 6545 - protein, 5 aa, synthetic construct
  source 1..5: note = Description of Artificial Sequence: Synthetic peptide; note = XENP018517 vhCDR1
EYWMN

SEQ ID NO: 6546 - protein, 19 aa, synthetic construct
  source 1..19: note = Description of Artificial Sequence: Synthetic peptide; note = XENP018517 vhCDR2
EIRLKSNNYATHYAEPVKG

SEQ ID NO: 6547 - protein, 11 aa, synthetic construct
  source 1..11: note = Description of Artificial Sequence: Synthetic peptide; note = XENP018517 vhCDR3
YYGNYGGYFDV

SEQ ID NO: 6548 - protein, 11 aa, synthetic construct
  source 1..11: note = Description of Artificial Sequence: Synthetic peptide; note = XENP018517 vlCDR1
RASQSVSNDVA

SEQ ID NO: 6549 - protein, 7 aa, synthetic construct
  source 1..7: note = Description of Artificial Sequence: Synthetic peptide; note = XENP018517 vlCDR2
YASHRYT

SEQ ID NO: 6550 - protein, 9 aa, synthetic construct
  source 1..9: note = Description of Artificial Sequence: Synthetic peptide; note = XENP018517 vlCDR3
QQDYSSPRT

SEQ ID NO: 6551 - protein, 249 aa, synthetic construct
  source 1..249: note = Description of Artificial Sequence: Synthetic polypeptide; note = XENP018518 1G6_H1.22_L1_scFv(GKPGS)4
EVQLVESGGGLVKPGGSLRLSCAASGFTFSSYWMNWVRQAPGKGLEWVGEIRLKSNNYATHYAEPVKGRFTISRDDSKSTVYLQMNSLKTEDTAVYYCTRYYGNYGGYFDVWGAGTLVTVSSGKPGSGKPGSGKPGSGKPGSSIVMTQSPATLSVSPGERATLSCRASQSVSNDVAWYQQKPGQSPRLLINYASHRYTGVPDRFTGSGYGTEFTLTISSLQSEDFAVYFCQQDYSSPRTFGGGTKVEIK

SEQ ID NO: 6552 - protein, 122 aa, synthetic construct
  source 1..122: note = Description of Artificial Sequence: Synthetic polypeptide; note = VH of XENP018518
EVQLVESGGGLVKPGGSLRLSCAASGFTFSSYWMNWVRQAPGKGLEWVGEIRLKSNNYATHYAEPVKGRFTISRDDSKSTVYLQMNSLKTEDTAVYYCTRYYGNYGGYFDVWGAGTLVTVSS

SEQ ID NO: 6553 - protein, 107 aa, synthetic construct; identical to SEQ ID NO: 6247
  source 1..107: note = Description of Artificial Sequence: Synthetic polypeptide; note = VL of XENP018518

SEQ ID NO: 6554 - protein, 5 aa, synthetic construct
  source 1..5: note = Description of Artificial Sequence: Synthetic peptide; note = XENP018518 vhCDR1
SYWMN

SEQ ID NO: 6555 - protein, 19 aa, synthetic construct
  source 1..19: note = Description of Artificial Sequence: Synthetic peptide; note = XENP018518 vhCDR2
EIRLKSNNYATHYAEPVKG

SEQ ID NO: 6556 - protein, 11 aa, synthetic construct
  source 1..11: note = Description of Artificial Sequence: Synthetic peptide; note = XENP018518 vhCDR3
YYGNYGGYFDV

SEQ ID NO: 6557 - protein, 11 aa, synthetic construct
  source 1..11: note = Description of Artificial Sequence: Synthetic peptide; note = XENP018518 vlCDR1
RASQSVSNDVA

SEQ ID NO: 6558 - protein, 7 aa, synthetic construct
  source 1..7: note = Description of Artificial Sequence: Synthetic peptide; note = XENP018518 vlCDR2
YASHRYT

SEQ ID NO: 6559 - protein, 9 aa, synthetic construct
  source 1..9: note = Description of Artificial Sequence: Synthetic peptide; note = XENP018518 vlCDR3
QQDYSSPRT

SEQ ID NO: 6560 - protein, 249 aa, synthetic construct
  source 1..249: note = Description of Artificial Sequence: Synthetic polypeptide; note = XENP018519 1G6_H1.23_L1_scFv(GKPGS)4
EVQLVESGGGLVKPGGSLRLSCAASGFTFSRYWMNWVRQAPGKGLEWVGEIRLKSNNYATHYAEPVKGRFTISRDDSKSTVYLQMNSLKTEDTAVYYCTRYYGNYGGYFDVWGAGTLVTVSSGKPGSGKPGSGKPGSGKPGSSIVMTQSPATLSVSPGERATLSCRASQSVSNDVAWYQQKPGQSPRLLINYASHRYTGVPDRFTGSGYGTEFTLTISSLQSEDFAVYFCQQDYSSPRTFGGGTKVEIK

SEQ ID NO: 6561 - protein, 122 aa, synthetic construct
  source 1..122: note = Description of Artificial Sequence: Synthetic polypeptide; note = VH of XENP018519
EVQLVESGGGLVKPGGSLRLSCAASGFTFSRYWMNWVRQAPGKGLEWVGEIRLKSNNYATHYAEPVKGRFTISRDDSKSTVYLQMNSLKTEDTAVYYCTRYYGNYGGYFDVWGAGTLVTVSS

SEQ ID NO: 6562 - protein, 107 aa, synthetic construct; identical to SEQ ID NO: 6247
  source 1..107: note = Description of Artificial Sequence: Synthetic polypeptide; note = VL of XENP018519

SEQ ID NO: 6563 - protein, 5 aa, synthetic construct
  source 1..5: note = Description of Artificial Sequence: Synthetic peptide; note = XENP018519 vhCDR1
RYWMN

SEQ ID NO: 6564 - protein, 19 aa, synthetic construct
  source 1..19: note = Description of Artificial Sequence: Synthetic peptide; note = XENP018519 vhCDR2
EIRLKSNNYATHYAEPVKG

SEQ ID NO: 6565 - protein, 11 aa, synthetic construct
  source 1..11: note = Description of Artificial Sequence: Synthetic peptide; note = XENP018519 vhCDR3
YYGNYGGYFDV

SEQ ID NO: 6566 - protein, 11 aa, synthetic construct
  source 1..11: note = Description of Artificial Sequence: Synthetic peptide; note = XENP018519 vlCDR1
RASQSVSNDVA

SEQ ID NO: 6567 - protein, 7 aa, synthetic construct
  source 1..7: note = Description of Artificial Sequence: Synthetic peptide; note = XENP018519 vlCDR2
YASHRYT

SEQ ID NO: 6568 - protein, 9 aa, synthetic construct
  source 1..9: note = Description of Artificial Sequence: Synthetic peptide; note = XENP018519 vlCDR3
QQDYSSPRT

SEQ ID NO: 6569 - protein, 249 aa, synthetic construct
  source 1..249: note = Description of Artificial Sequence: Synthetic polypeptide; note = XENP018520 1G6_H1.24_L1_scFv(GKPGS)4
EVQLVESGGGLVKPGGSLRLSCAASGFTFSLYWMNWVRQAPGKGLEWVGEIRLKSNNYATHYAEPVKGRFTISRDDSKSTVYLQMNSLKTEDTAVYYCTRYYGNYGGYFDVWGAGTLVTVSSGKPGSGKPGSGKPGSGKPGSSIVMTQSPATLSVSPGERATLSCRASQSVSNDVAWYQQKPGQSPRLLINYASHRYTGVPDRFTGSGYGTEFTLTISSLQSEDFAVYFCQQDYSSPRTFGGGTKVEIK

SEQ ID NO: 6570 - protein, 122 aa, synthetic construct
  source 1..122: note = Description of Artificial Sequence: Synthetic polypeptide; note = VH of XENP018520
EVQLVESGGGLVKPGGSLRLSCAASGFTFSLYWMNWVRQAPGKGLEWVGEIRLKSNNYATHYAEPVKGRFTISRDDSKSTVYLQMNSLKTEDTAVYYCTRYYGNYGGYFDVWGAGTLVTVSS

SEQ ID NO: 6571 - protein, 107 aa, synthetic construct; identical to SEQ ID NO: 6247
  source 1..107: note = Description of Artificial Sequence: Synthetic polypeptide; note = VL of XENP018520

SEQ ID NO: 6572 - protein, 5 aa, synthetic construct
  source 1..5: note = Description of Artificial Sequence: Synthetic peptide; note = XENP018520 vhCDR1
LYWMN

SEQ ID NO: 6573 - protein, 19 aa, synthetic construct
  source 1..19: note = Description of Artificial Sequence: Synthetic peptide; note = XENP018520 vhCDR2
EIRLKSNNYATHYAEPVKG

SEQ ID NO: 6574 - protein, 11 aa, synthetic construct
  source 1..11: note = Description of Artificial Sequence: Synthetic peptide; note = XENP018520 vhCDR3
YYGNYGGYFDV

SEQ ID NO: 6575 - protein, 11 aa, synthetic construct
  source 1..11: note = Description of Artificial Sequence: Synthetic peptide; note = XENP018520 vlCDR1
RASQSVSNDVA

SEQ ID NO: 6576 - protein, 7 aa, synthetic construct
  source 1..7: note = Description of Artificial Sequence: Synthetic peptide; note = XENP018520 vlCDR2
YASHRYT

SEQ ID NO: 6577 - protein, 9 aa, synthetic construct
  source 1..9: note = Description of Artificial Sequence: Synthetic peptide; note = XENP018520 vlCDR3
QQDYSSPRT

SEQ ID NO: 6578 - protein, 249 aa, synthetic construct
  source 1..249: note = Description of Artificial Sequence: Synthetic polypeptide; note = XENP018521 1G6_H1.25_L1_scFv(GKPGS)4
EVQLVESGGGLVKPGGSLRLSCAASGFTFSTYWMNWVRQAPGKGLEWVGEIRLKSNNYATHYAEPVKGRFTISRDDSKSTVYLQMNSLKTEDTAVYYCTRYYGNYGGYFDVWGAGTLVTVSSGKPGSGKPGSGKPGSGKPGSSIVMTQSPATLSVSPGERATLSCRASQSVSNDVAWYQQKPGQSPRLLINYASHRYTGVPDRFTGSGYGTEFTLTISSLQSEDFAVYFCQQDYSSPRTFGGGTKVEIK

SEQ ID NO: 6579 - protein, 122 aa, synthetic construct
  source 1..122: note = Description of Artificial Sequence: Synthetic polypeptide; note = VH of XENP018521
EVQLVESGGGLVKPGGSLRLSCAASGFTFSTYWMNWVRQAPGKGLEWVGEIRLKSNNYATHYAEPVKGRFTISRDDSKSTVYLQMNSLKTEDTAVYYCTRYYGNYGGYFDVWGAGTLVTVSS

SEQ ID NO: 6580 - protein, 107 aa, synthetic construct; identical to SEQ ID NO: 6247
  source 1..107: note = Description of Artificial Sequence: Synthetic polypeptide; note = VL of XENP018521

SEQ ID NO: 6581 - protein, 5 aa, synthetic construct
  source 1..5: note = Description of Artificial Sequence: Synthetic peptide; note = XENP018521 vhCDR1
TYWMN

SEQ ID NO: 6582 - protein, 19 aa, synthetic construct
  source 1..19: note = Description of Artificial Sequence: Synthetic peptide; note = XENP018521 vhCDR2
EIRLKSNNYATHYAEPVKG

SEQ ID NO: 6583 - protein, 11 aa, synthetic construct
  source 1..11: note = Description of Artificial Sequence: Synthetic peptide; note = XENP018521 vhCDR3
YYGNYGGYFDV

SEQ ID NO: 6584 - protein, 11 aa, synthetic construct
  source 1..11: note = Description of Artificial Sequence: Synthetic peptide; note = XENP018521 vlCDR1
RASQSVSNDVA

SEQ ID NO: 6585 - protein, 7 aa, synthetic construct
  source 1..7: note = Description of Artificial Sequence: Synthetic peptide; note = XENP018521 vlCDR2
YASHRYT

SEQ ID NO: 6586 - protein, 9 aa, synthetic construct
  source 1..9: note = Description of Artificial Sequence: Synthetic peptide; note = XENP018521 vlCDR3
QQDYSSPRT

SEQ ID NO: 6587 - protein, 249 aa, synthetic construct
  source 1..249: note = Description of Artificial Sequence: Synthetic polypeptide; note = XENP018522 1G6_H1.26_L1_scFv(GKPGS)4
EVQLVESGGGLVKPGGSLRLSCAASGFTFSGYWMNWVRQAPGKGLEWVGEIRLKSNNYATHYAEPVKGRFTISRDDSKSTVYLQMNSLKTEDTAVYYCTRYYGNYGGYFDVWGAGTLVTVSSGKPGSGKPGSGKPGSGKPGSSIVMTQSPATLSVSPGERATLSCRASQSVSNDVAWYQQKPGQSPRLLINYASHRYTGVPDRFTGSGYGTEFTLTISSLQSEDFAVYFCQQDYSSPRTFGGGTKVEIK

SEQ ID NO: 6588 - protein, 122 aa, synthetic construct
  source 1..122: note = Description of Artificial Sequence: Synthetic polypeptide; note = VH of XENP018522
EVQLVESGGGLVKPGGSLRLSCAASGFTFSGYWMNWVRQAPGKGLEWVGEIRLKSNNYATHYAEPVKGRFTISRDDSKSTVYLQMNSLKTEDTAVYYCTRYYGNYGGYFDVWGAGTLVTVSS

SEQ ID NO: 6589 - protein, 107 aa, synthetic construct; identical to SEQ ID NO: 6247
  source 1..107: note = Description of Artificial Sequence: Synthetic polypeptide; note = VL of XENP018522

SEQ ID NO: 6590 - protein, 5 aa, synthetic construct
  source 1..5: note = Description of Artificial Sequence: Synthetic peptide; note = XENP018522 vhCDR1
GYWMN

SEQ ID NO: 6591 - protein, 19 aa, synthetic construct
  source 1..19: note = Description of Artificial Sequence: Synthetic peptide; note = XENP018522 vhCDR2
EIRLKSNNYATHYAEPVKG

SEQ ID NO: 6592 - protein, 11 aa, synthetic construct
  source 1..11: note = Description of Artificial Sequence: Synthetic peptide; note = XENP018522 vhCDR3
YYGNYGGYFDV

SEQ ID NO: 6593 - protein, 11 aa, synthetic construct
  source 1..11: note = Description of Artificial Sequence: Synthetic peptide; note = XENP018522 vlCDR1
RASQSVSNDVA

SEQ ID NO: 6594 - protein, 7 aa, synthetic construct
  source 1..7: note = Description of Artificial Sequence: Synthetic peptide; note = XENP018522 vlCDR2
YASHRYT

SEQ ID NO: 6595 - protein, 9 aa, synthetic construct
  source 1..9: note = Description of Artificial Sequence: Synthetic peptide; note = XENP018522 vlCDR3
QQDYSSPRT

SEQ ID NO: 6596 - protein, 249 aa, synthetic construct
  source 1..249: note = Description of Artificial Sequence: Synthetic polypeptide; note = XENP018523 1G6_H1.27_L1_scFv(GKPGS)4
EVQLVESGGGLVKPGGSLRLSCAASGFTFSYYWMNWVRQAPGKGLEWVGEIRLKSNNYATHYAEPVKGRFTISRDDSKSTVYLQMNSLKTEDTAVYYCTRYYGNYGGYFDVWGAGTLVTVSSGKPGSGKPGSGKPGSGKPGSSIVMTQSPATLSVSPGERATLSCRASQSVSNDVAWYQQKPGQSPRLLINYASHRYTGVPDRFTGSGYGTEFTLTISSLQSEDFAVYFCQQDYSSPRTFGGGTKVEIK

SEQ ID NO: 6597 - protein, 122 aa, synthetic construct
  source 1..122: note = Description of Artificial Sequence: Synthetic polypeptide; note = VH of XENP018523
EVQLVESGGGLVKPGGSLRLSCAASGFTFSYYWMNWVRQAPGKGLEWVGEIRLKSNNYATHYAEPVKGRFTISRDDSKSTVYLQMNSLKTEDTAVYYCTRYYGNYGGYFDVWGAGTLVTVSS

SEQ ID NO: 6598 - protein, 107 aa, synthetic construct; identical to SEQ ID NO: 6247
  source 1..107: note = Description of Artificial Sequence: Synthetic polypeptide; note = VL of XENP018523

SEQ ID NO: 6599 - protein, 5 aa, synthetic construct
  source 1..5: note = Description of Artificial Sequence: Synthetic peptide; note = XENP018523 vhCDR1
YYWMN

SEQ ID NO: 6600 - protein, 19 aa, synthetic construct
  source 1..19: note = Description of Artificial Sequence: Synthetic peptide; note = XENP018523 vhCDR2
EIRLKSNNYATHYAEPVKG

SEQ ID NO: 6601 - protein, 11 aa, synthetic construct
  source 1..11: note = Description of Artificial Sequence: Synthetic peptide; note = XENP018523 vhCDR3
YYGNYGGYFDV

SEQ ID NO: 6602 - protein, 11 aa, synthetic construct
  source 1..11: note = Description of Artificial Sequence: Synthetic peptide; note = XENP018523 vlCDR1
RASQSVSNDVA

SEQ ID NO: 6603 - protein, 7 aa, synthetic construct
  source 1..7: note = Description of Artificial Sequence: Synthetic peptide; note = XENP018523 vlCDR2
YASHRYT

SEQ ID NO: 6604 - protein, 9 aa, synthetic construct
  source 1..9: note = Description of Artificial Sequence: Synthetic peptide; note = XENP018523 vlCDR3
QQDYSSPRT

SEQ ID NO: 6605 - protein, 249 aa, synthetic construct
  source 1..249: note = Description of Artificial Sequence: Synthetic polypeptide; note = XENP018524 1G6_H1.28_L1_scFv(GKPGS)4
EVQLVESGGGLVKPGGSLRLSCAASGFTFSNFWMNWVRQAPGKGLEWVGEIRLKSNNYATHYAEPVKGRFTISRDDSKSTVYLQMNSLKTEDTAVYYCTRYYGNYGGYFDVWGAGTLVTVSSGKPGSGKPGSGKPGSGKPGSSIVMTQSPATLSVSPGERATLSCRASQSVSNDVAWYQQKPGQSPRLLINYASHRYTGVPDRFTGSGYGTEFTLTISSLQSEDFAVYFCQQDYSSPRTFGGGTKVEIK

SEQ ID NO: 6606 - protein, 122 aa, synthetic construct
  source 1..122: note = Description of Artificial Sequence: Synthetic polypeptide; note = VH of XENP018524
EVQLVESGGGLVKPGGSLRLSCAASGFTFSNFWMNWVRQAPGKGLEWVGEIRLKSNNYATHYAEPVKGRFTISRDDSKSTVYLQMNSLKTEDTAVYYCTRYYGNYGGYFDVWGAGTLVTVSS

SEQ ID NO: 6607 - protein, 107 aa, synthetic construct; identical to SEQ ID NO: 6247
  source 1..107: note = Description of Artificial Sequence: Synthetic polypeptide; note = VL of XENP018524

SEQ ID NO: 6608 - protein, 5 aa, synthetic construct
  source 1..5: note = Description of Artificial Sequence: Synthetic peptide; note = XENP018524 vhCDR1
NFWMN

SEQ ID NO: 6609 - protein, 19 aa, synthetic construct
  source 1..19: note = Description of Artificial Sequence: Synthetic peptide; note = XENP018524 vhCDR2
EIRLKSNNYATHYAEPVKG

SEQ ID NO: 6610 - protein, 11 aa, synthetic construct
  source 1..11: note = Description of Artificial Sequence: Synthetic peptide; note = XENP018524 vhCDR3
YYGNYGGYFDV

SEQ ID NO: 6611 - protein, 11 aa, synthetic construct
  source 1..11: note = Description of Artificial Sequence: Synthetic peptide; note = XENP018524 vlCDR1
RASQSVSNDVA

SEQ ID NO: 6612 - protein, 7 aa, synthetic construct
  source 1..7: note = Description of Artificial Sequence: Synthetic peptide; note = XENP018524 vlCDR2
YASHRYT

SEQ ID NO: 6613 - protein, 9 aa, synthetic construct
  source 1..9: note = Description of Artificial Sequence: Synthetic peptide; note = XENP018524 vlCDR3
QQDYSSPRT

SEQ ID NO: 6614 - protein, 249 aa, synthetic construct
  source 1..249: note = Description of Artificial Sequence: Synthetic polypeptide; note = XENP018525 1G6_H1.29_L1_scFv(GKPGS)4
EVQLVESGGGLVKPGGSLRLSCAASGFTFSNHWMNWVRQAPGKGLEWVGEIRLKSNNYATHYAEPVKGRFTISRDDSKSTVYLQMNSLKTEDTAVYYCTRYYGNYGGYFDVWGAGTLVTVSSGKPGSGKPGSGKPGSGKPGSSIVMTQSPATLSVSPGERATLSCRASQSVSNDVAWYQQKPGQSPRLLINYASHRYTGVPDRFTGSGYGTEFTLTISSLQSEDFAVYFCQQDYSSPRTFGGGTKVEIK

SEQ ID NO: 6615 - protein, 122 aa, synthetic construct
  source 1..122: note = Description of Artificial Sequence: Synthetic polypeptide; note = VH of XENP018525
EVQLVESGGGLVKPGGSLRLSCAASGFTFSNHWMNWVRQAPGKGLEWVGEIRLKSNNYATHYAEPVKGRFTISRDDSKSTVYLQMNSLKTEDTAVYYCTRYYGNYGGYFDVWGAGTLVTVSS

SEQ ID NO: 6616 - protein, 107 aa, synthetic construct; identical to SEQ ID NO: 6247
  source 1..107: note = Description of Artificial Sequence: Synthetic polypeptide; note = VL of XENP018525

SEQ ID NO: 6617 - protein, 5 aa, synthetic construct
  source 1..5: note = Description of Artificial Sequence: Synthetic peptide; note = XENP018525 vhCDR1
NHWMN

SEQ ID NO: 6618 - protein, 19 aa, synthetic construct
  source 1..19: note = Description of Artificial Sequence: Synthetic peptide; note = XENP018525 vhCDR2
EIRLKSNNYATHYAEPVKG

SEQ ID NO: 6619 - protein, 11 aa, synthetic construct
  source 1..11: note = Description of Artificial Sequence: Synthetic peptide; note = XENP018525 vhCDR3
YYGNYGGYFDV

SEQ ID NO: 6620 - protein, 11 aa, synthetic construct
  source 1..11: note = Description of Artificial Sequence: Synthetic peptide; note = XENP018525 vlCDR1
RASQSVSNDVA

SEQ ID NO: 6621 - protein, 7 aa, synthetic construct
  source 1..7: note = Description of Artificial Sequence: Synthetic peptide; note = XENP018525 vlCDR2
YASHRYT

SEQ ID NO: 6622 - protein, 9 aa, synthetic construct
  source 1..9: note = Description of Artificial Sequence: Synthetic peptide; note = XENP018525 vlCDR3
QQDYSSPRT

SEQ ID NO: 6623 - protein, 249 aa, synthetic construct
  source 1..249: note = Description of Artificial Sequence: Synthetic polypeptide; note = XENP018526 1G6_H1.30_L1_scFv(GKPGS)4
EVQLVESGGGLVKPGGSLRLSCAASGFTFSNLWMNWVRQAPGKGLEWVGEIRLKSNNYATHYAEPVKGRFTISRDDSKSTVYLQMNSLKTEDTAVYYCTRYYGNYGGYFDVWGAGTLVTVSSGKPGSGKPGSGKPGSGKPGSSIVMTQSPATLSVSPGERATLSCRASQSVSNDVAWYQQKPGQSPRLLINYASHRYTGVPDRFTGSGYGTEFTLTISSLQSEDFAVYFCQQDYSSPRTFGGGTKVEIK

SEQ ID NO: 6624 - protein, 122 aa, synthetic construct
  source 1..122: note = Description of Artificial Sequence: Synthetic polypeptide; note = VH of XENP018526
EVQLVESGGGLVKPGGSLRLSCAASGFTFSNLWMNWVRQAPGKGLEWVGEIRLKSNNYATHYAEPVKGRFTISRDDSKSTVYLQMNSLKTEDTAVYYCTRYYGNYGGYFDVWGAGTLVTVSS

SEQ ID NO: 6625 - protein, 107 aa, synthetic construct; identical to SEQ ID NO: 6247
  source 1..107: note = Description of Artificial Sequence: Synthetic polypeptide; note = VL of XENP018526

SEQ ID NO: 6626 - protein, 5 aa, synthetic construct
  source 1..5: note = Description of Artificial Sequence: Synthetic peptide; note = XENP018526 vhCDR1
NLWMN

SEQ ID NO: 6627 - protein, 19 aa, synthetic construct
  source 1..19: note = Description of Artificial Sequence: Synthetic peptide; note = XENP018526 vhCDR2
EIRLKSNNYATHYAEPVKG

SEQ ID NO: 6628 - protein, 11 aa, synthetic construct
  source 1..11: note = Description of Artificial Sequence: Synthetic peptide; note = XENP018526 vhCDR3
YYGNYGGYFDV

SEQ ID NO: 6629 - protein, 11 aa, synthetic construct
  source 1..11: note = Description of Artificial Sequence: Synthetic peptide; note = XENP018526 vlCDR1
RASQSVSNDVA

SEQ ID NO: 6630 - protein, 7 aa, synthetic construct
  source 1..7: note = Description of Artificial Sequence: Synthetic peptide; note = XENP018526 vlCDR2
YASHRYT

SEQ ID NO: 6631 - protein, 9 aa, synthetic construct
  source 1..9: note = Description of Artificial Sequence: Synthetic peptide; note = XENP018526 vlCDR3
QQDYSSPRT

SEQ ID NO: 6632 - protein, 249 aa, synthetic construct
  source 1..249: note = Description of Artificial Sequence: Synthetic polypeptide; note = XENP018527 1G6_H1.31_L1_scFv(GKPGS)4
EVQLVESGGGLVKPGGSLRLSCAASGFTFSNWWMNWVRQAPGKGLEWVGEIRLKSNNYATHYAEPVKGRFTISRDDSKSTVYLQMNSLKTEDTAVYYCTRYYGNYGGYFDVWGAGTLVTVSSGKPGSGKPGSGKPGSGKPGSSIVMTQSPATLSVSPGERATLSCRASQSVSNDVAWYQQKPGQSPRLLINYASHRYTGVPDRFTGSGYGTEFTLTISSLQSEDFAVYFCQQDYSSPRTFGGGTKVEIK

SEQ ID NO: 6633 - protein, 122 aa, synthetic construct
  source 1..122: note = Description of Artificial Sequence: Synthetic polypeptide; note = VH of XENP018527
EVQLVESGGGLVKPGGSLRLSCAASGFTFSNWWMNWVRQAPGKGLEWVGEIRLKSNNYATHYAEPVKGRFTISRDDSKSTVYLQMNSLKTEDTAVYYCTRYYGNYGGYFDVWGAGTLVTVSS

SEQ ID NO: 6634 - protein, 107 aa, synthetic construct; identical to SEQ ID NO: 6247
  source 1..107: note = Description of Artificial Sequence: Synthetic polypeptide; note = VL of XENP018527

SEQ ID NO: 6635 - protein, 5 aa, synthetic construct
  source 1..5: note = Description of Artificial Sequence: Synthetic peptide; note = XENP018527 vhCDR1
NWWMN

SEQ ID NO: 6636 - protein, 19 aa, synthetic construct
  source 1..19: note = Description of Artificial Sequence: Synthetic peptide; note = XENP018527 vhCDR2
EIRLKSNNYATHYAEPVKG

SEQ ID NO: 6637 - protein, 11 aa, synthetic construct
  source 1..11: note = Description of Artificial Sequence: Synthetic peptide; note = XENP018527 vhCDR3
YYGNYGGYFDV

SEQ ID NO: 6638 - protein, 11 aa, synthetic construct
  source 1..11: note = Description of Artificial Sequence: Synthetic peptide; note = XENP018527 vlCDR1
RASQSVSNDVA

SEQ ID NO: 6639 - protein, 7 aa, synthetic construct
  source 1..7: note = Description of Artificial Sequence: Synthetic peptide; note = XENP018527 vlCDR2
YASHRYT

SEQ ID NO: 6640 - protein, 9 aa, synthetic construct
  source 1..9: note = Description of Artificial Sequence: Synthetic peptide; note = XENP018527 vlCDR3
QQDYSSPRT

SEQ ID NO: 6641 - protein, 249 aa, synthetic construct
  source 1..249: note = Description of Artificial Sequence: Synthetic polypeptide; note = XENP018528 1G6_H1.32_L1_scFv(GKPGS)4
EVQLVESGGGLVKPGGSLRLSCAASGFTFSNVWMNWVRQAPGKGLEWVGEIRLKSNNYATHYAEPVKGRFTISRDDSKSTVYLQMNSLKTEDTAVYYCTRYYGNYGGYFDVWGAGTLVTVSSGKPGSGKPGSGKPGSGKPGSSIVMTQSPATLSVSPGERATLSCRASQSVSNDVAWYQQKPGQSPRLLINYASHRYTGVPDRFTGSGYGTEFTLTISSLQSEDFAVYFCQQDYSSPRTFGGGTKVEIK

SEQ ID NO: 6642 - protein, 122 aa, synthetic construct
  source 1..122: note = Description of Artificial Sequence: Synthetic polypeptide; note = VH of XENP018528
EVQLVESGGGLVKPGGSLRLSCAASGFTFSNVWMNWVRQAPGKGLEWVGEIRLKSNNYATHYAEPVKGRFTISRDDSKSTVYLQMNSLKTEDTAVYYCTRYYGNYGGYFDVWGAGTLVTVSS

SEQ ID NO: 6643 - protein, 107 aa, synthetic construct; identical to SEQ ID NO: 6247
  source 1..107: note = Description of Artificial Sequence: Synthetic polypeptide; note = VL of XENP018528

SEQ ID NO: 6644 - protein, 5 aa, synthetic construct
  source 1..5: note = Description of Artificial Sequence: Synthetic peptide; note = XENP018528 vhCDR1
NVWMN

SEQ ID NO: 6645 - protein, 19 aa, synthetic construct
  source 1..19: note = Description of Artificial Sequence: Synthetic peptide; note = XENP018528 vhCDR2
EIRLKSNNYATHYAEPVKG

SEQ ID NO: 6646 - protein, 11 aa, synthetic construct
  source 1..11: note = Description of Artificial Sequence: Synthetic peptide; note = XENP018528 vhCDR3
YYGNYGGYFDV

SEQ ID NO: 6647 - protein, 11 aa, synthetic construct
  source 1..11: note = Description of Artificial Sequence: Synthetic peptide; note = XENP018528 vlCDR1
RASQSVSNDVA

SEQ ID NO: 6648 - protein, 7 aa, synthetic construct
  source 1..7: note = Description of Artificial Sequence: Synthetic peptide; note = XENP018528 vlCDR2
YASHRYT

SEQ ID NO: 6649 - protein, 9 aa, synthetic construct
  source 1..9: note = Description of Artificial Sequence: Synthetic peptide; note = XENP018528 vlCDR3
QQDYSSPRT

SEQ ID NO: 6650 - protein, 249 aa, synthetic construct
  source 1..249: note = Description of Artificial Sequence: Synthetic polypeptide; note = XENP018529 1G6_H1.33_L1_scFv(GKPGS)4
EVQLVESGGGLVKPGGSLRLSCAASGFTFSNAWMNWVRQAPGKGLEWVGEIRLKSNNYATHYAEPVKGRFTISRDDSKSTVYLQMNSLKTEDTAVYYCTRYYGNYGGYFDVWGAGTLVTVSSGKPGSGKPGSGKPGSGKPGSSIVMTQSPATLSVSPGERATLSCRASQSVSNDVAWYQQKPGQSPRLLINYASHRYTGVPDRFTGSGYGTEFTLTISSLQSEDFAVYFCQQDYSSPRTFGGGTKVEIK

SEQ ID NO: 6651 - protein, 122 aa, synthetic construct
  source 1..122: note = Description of Artificial Sequence: Synthetic polypeptide; note = VH of XENP018529
EVQLVESGGGLVKPGGSLRLSCAASGFTFSNAWMNWVRQAPGKGLEWVGEIRLKSNNYATHYAEPVKGRFTISRDDSKSTVYLQMNSLKTEDTAVYYCTRYYGNYGGYFDVWGAGTLVTVSS

SEQ ID NO: 6652 - protein, 107 aa, synthetic construct; identical to SEQ ID NO: 6247
  source 1..107: note = Description of Artificial Sequence: Synthetic polypeptide; note = VL of XENP018529

SEQ ID NO: 6653 - protein, 5 aa, synthetic construct
  source 1..5: note = Description of Artificial Sequence: Synthetic peptide; note = XENP018529 vhCDR1
NAWMN

SEQ ID NO: 6654 - protein, 19 aa, synthetic construct
  source 1..19: note = Description of Artificial Sequence: Synthetic peptide; note = XENP018529 vhCDR2
EIRLKSNNYATHYAEPVKG

SEQ ID NO: 6655 - protein, 11 aa, synthetic construct
  source 1..11: note = Description of Artificial Sequence: Synthetic peptide; note = XENP018529 vhCDR3
YYGNYGGYFDV

SEQ ID NO: 6656 - protein, 11 aa, synthetic construct
  source 1..11: note = Description of Artificial Sequence: Synthetic peptide; note = XENP018529 vlCDR1
RASQSVSNDVA

SEQ ID NO: 6657 - protein, 7 aa, synthetic construct
  source 1..7: note = Description of Artificial Sequence: Synthetic peptide; note = XENP018529 vlCDR2
YASHRYT

SEQ ID NO: 6658 - protein, 9 aa, synthetic construct
  source 1..9: note = Description of Artificial Sequence: Synthetic peptide; note = XENP018529 vlCDR3
QQDYSSPRT

SEQ ID NO: 6659 - protein, 249 aa, synthetic construct
  source 1..249: note = Description of Artificial Sequence: Synthetic polypeptide; note = XENP018530 1G6_H1.34_L1_scFv(GKPGS)4
EVQLVESGGGLVKPGGSLRLSCAASGFTFSNQWMNWVRQAPGKGLEWVGEIRLKSNNYATHYAEPVKGRFTISRDDSKSTVYLQMNSLKTEDTAVYYCTRYYGNYGGYFDVWGAGTLVTVSSGKPGSGKPGSGKPGSGKPGSSIVMTQSPATLSVSPGERATLSCRASQSVSNDVAWYQQKPGQSPRLLINYASHRYTGVPDRFTGSGYGTEFTLTISSLQSEDFAVYFCQQDYSSPRTFGGGTKVEIK

SEQ ID NO: 6660 - protein, 122 aa, synthetic construct
  source 1..122: note = Description of Artificial Sequence: Synthetic polypeptide; note = VH of XENP018530
EVQLVESGGGLVKPGGSLRLSCAASGFTFSNQWMNWVRQAPGKGLEWVGEIRLKSNNYATHYAEPVKGRFTISRDDSKSTVYLQMNSLKTEDTAVYYCTRYYGNYGGYFDVWGAGTLVTVSS

SEQ ID NO: 6661 - protein, 107 aa, synthetic construct; identical to SEQ ID NO: 6247
  source 1..107: note = Description of Artificial Sequence: Synthetic polypeptide; note = VL of XENP018530

SEQ ID NO: 6662 - protein, 5 aa, synthetic construct
  source 1..5: note = Description of Artificial Sequence: Synthetic peptide; note = XENP018530 vhCDR1
NQWMN

SEQ ID NO: 6663 - protein, 19 aa, synthetic construct
  source 1..19: note = Description of Artificial Sequence: Synthetic peptide; note = XENP018530 vhCDR2
EIRLKSNNYATHYAEPVKG

SEQ ID NO: 6664 - protein, 11 aa, synthetic construct
  source 1..11: note = Description of Artificial Sequence: Synthetic peptide; note = XENP018530 vhCDR3
YYGNYGGYFDV

SEQ ID NO: 6665 - protein, 11 aa, synthetic construct
  source 1..11: note = Description of Artificial Sequence: Synthetic peptide; note = XENP018530 vlCDR1
RASQSVSNDVA

SEQ ID NO: 6666 - protein, 7 aa, synthetic construct
  source 1..7: note = Description of Artificial Sequence: Synthetic peptide; note = XENP018530 vlCDR2
YASHRYT

SEQ ID NO: 6667 - protein, 9 aa, synthetic construct
  source 1..9: note = Description of Artificial Sequence: Synthetic peptide; note = XENP018530 vlCDR3
QQDYSSPRT

SEQ ID NO: 6668 - protein, 249 aa, synthetic construct
  source 1..249: note = Description of Artificial Sequence: Synthetic polypeptide; note = XENP018531 1G6_H1.35_L1_scFv(GKPGS)4
EVQLVESGGGLVKPGGSLRLSCAASGFTFSNDWMNWVRQAPGKGLEWVGEIRLKSNNYATHYAEPVKGRFTISRDDSKSTVYLQMNSLKTEDTAVYYCTRYYGNYGGYFDVWGAGTLVTVSSGKPGSGKPGSGKPGSGKPGSSIVMTQSPATLSVSPGERATLSCRASQSVSNDVAWYQQKPGQSPRLLINYASHRYTGVPDRFTGSGYGTEFTLTISSLQSEDFAVYFCQQDYSSPRTFGGGTKVEIK

SEQ ID NO: 6669 - protein, 122 aa, synthetic construct
  source 1..122: note = Description of Artificial Sequence: Synthetic polypeptide; note = VH of XENP018531
EVQLVESGGGLVKPGGSLRLSCAASGFTFSNDWMNWVRQAPGKGLEWVGEIRLKSNNYATHYAEPVKGRFTISRDDSKSTVYLQMNSLKTEDTAVYYCTRYYGNYGGYFDVWGAGTLVTVSS

SEQ ID NO: 6670 - protein, 107 aa, synthetic construct; identical to SEQ ID NO: 6247
  source 1..107: note = Description of Artificial Sequence: Synthetic polypeptide; note = VL of XENP018531

SEQ ID NO: 6671 - protein, 5 aa, synthetic construct
  source 1..5: note = Description of Artificial Sequence: Synthetic peptide; note = XENP018531 vhCDR1
NDWMN

SEQ ID NO: 6672 - protein, 19 aa, synthetic construct
  source 1..19: note = Description of Artificial Sequence: Synthetic peptide; note = XENP018531 vhCDR2
EIRLKSNNYATHYAEPVKG

SEQ ID NO: 6673 - protein, 11 aa, synthetic construct
  source 1..11: note = Description of Artificial Sequence: Synthetic peptide; note = XENP018531 vhCDR3
YYGNYGGYFDV

SEQ ID NO: 6674 - protein, 11 aa, synthetic construct
  source 1..11: note = Description of Artificial Sequence: Synthetic peptide; note = XENP018531 vlCDR1
RASQSVSNDVA

SEQ ID NO: 6675 - protein, 7 aa, synthetic construct
  source 1..7: note = Description of Artificial Sequence: Synthetic peptide; note = XENP018531 vlCDR2
YASHRYT

SEQ ID NO: 6676 - protein, 9 aa, synthetic construct
  source 1..9: note = Description of Artificial Sequence: Synthetic peptide; note = XENP018531 vlCDR3
QQDYSSPRT

SEQ ID NO: 6677 - protein, 249 aa, synthetic construct
  source 1..249: note = Description of Artificial Sequence: Synthetic polypeptide; note = XENP018532 1G6_H1.36_L1_scFv(GKPGS)4
EVQLVESGGGLVKPGGSLRLSCAASGFTFSNKWMNWVRQAPGKGLEWVGEIRLKSNNYATHYAEPVKGRFTISRDDSKSTVYLQMNSLKTEDTAVYYCTRYYGNYGGYFDVWGAGTLVTVSSGKPGSGKPGSGKPGSGKPGSSIVMTQSPATLSVSPGERATLSCRASQSVSNDVAWYQQKPGQSPRLLINYASHRYTGVPDRFTGSGYGTEFTLTISSLQSEDFAVYFCQQDYSSPRTFGGGTKVEIK

SEQ ID NO: 6678 - protein, 122 aa, synthetic construct
  source 1..122: note = Description of Artificial Sequence: Synthetic polypeptide; note = VH of XENP018532
EVQLVESGGGLVKPGGSLRLSCAASGFTFSNKWMNWVRQAPGKGLEWVGEIRLKSNNYATHYAEPVKGRFTISRDDSKSTVYLQMNSLKTEDTAVYYCTRYYGNYGGYFDVWGAGTLVTVSS

SEQ ID NO: 6679 - protein, 107 aa, synthetic construct; identical to SEQ ID NO: 6247
  source 1..107: note = Description of Artificial Sequence: Synthetic polypeptide; note = VL of XENP018532

SEQ ID NO: 6680 - protein, 5 aa, synthetic construct
  source 1..5: note = Description of Artificial Sequence: Synthetic peptide; note = XENP018532 vhCDR1
NKWMN

SEQ ID NO: 6681 - protein, 19 aa, synthetic construct
  source 1..19: note = Description of Artificial Sequence: Synthetic peptide; note = XENP018532 vhCDR2
EIRLKSNNYATHYAEPVKG

SEQ ID NO: 6682 - protein, 11 aa, synthetic construct
  source 1..11: note = Description of Artificial Sequence: Synthetic peptide; note = XENP018532 vhCDR3
YYGNYGGYFDV

SEQ ID NO: 6683 - protein, 11 aa, synthetic construct
  source 1..11: note = Description of Artificial Sequence: Synthetic peptide; note = XENP018532 vlCDR1
RASQSVSNDVA

SEQ ID NO: 6684 - protein, 7 aa, synthetic construct
  source 1..7: note = Description of Artificial Sequence: Synthetic peptide; note = XENP018532 vlCDR2
YASHRYT

SEQ ID NO: 6685 - protein, 9 aa, synthetic construct
  source 1..9: note = Description of Artificial Sequence: Synthetic peptide; note = XENP018532 vlCDR3
QQDYSSPRT

SEQ ID NO: 6686 - protein, 249 aa, synthetic construct
  source 1..249: note = Description of Artificial Sequence: Synthetic polypeptide; note = XENP018533 1G6_H1.37_L1_scFv(GKPGS)4
EVQLVESGGGLVKPGGSLRLSCAASGFTFSNYGMNWVRQAPGKGLEWVGEIRLKSNNYATHYAEPVKGRFTISRDDSKSTVYLQMNSLKTEDTAVYYCTRYYGNYGGYFDVWGAGTLVTVSSGKPGSGKPGSGKPGSGKPGSSIVMTQSPATLSVSPGERATLSCRASQSVSNDVAWYQQKPGQSPRLLINYASHRYTGVPDRFTGSGYGTEFTLTISSLQSEDFAVYFCQQDYSSPRTFGGGTKVEIK

SEQ ID NO: 6687 - protein, 122 aa, synthetic construct
  source 1..122: note = Description of Artificial Sequence: Synthetic polypeptide; note = VH of XENP018533
EVQLVESGGGLVKPGGSLRLSCAASGFTFSNYGMNWVRQAPGKGLEWVGEIRLKSNNYATHYAEPVKGRFTISRDDSKSTVYLQMNSLKTEDTAVYYCTRYYGNYGGYFDVWGAGTLVTVSS

SEQ ID NO: 6688 - protein, 107 aa, synthetic construct; identical to SEQ ID NO: 6247
  source 1..107: note = Description of Artificial Sequence: Synthetic polypeptide; note = VL of XENP018533

SEQ ID NO: 6689 - protein, 5 aa, synthetic construct
  source 1..5: note = Description of Artificial Sequence: Synthetic peptide; note = XENP018533 vhCDR1
NYGMN

SEQ ID NO: 6690 - protein, 19 aa, synthetic construct
  source 1..19: note = Description of Artificial Sequence: Synthetic peptide; note = XENP018533 vhCDR2
EIRLKSNNYATHYAEPVKG

SEQ ID NO: 6691 - protein, 11 aa, synthetic construct
  source 1..11: note = Description of Artificial Sequence: Synthetic peptide; note = XENP018533 vhCDR3
YYGNYGGYFDV

SEQ ID NO: 6692 - protein, 11 aa, synthetic construct
  source 1..11: note = Description of Artificial Sequence: Synthetic peptide; note = XENP018533 vlCDR1
RASQSVSNDVA

SEQ ID NO: 6693 - protein, 7 aa, synthetic construct
  source 1..7: note = Description of Artificial Sequence: Synthetic peptide; note = XENP018533 vlCDR2
YASHRYT

SEQ ID NO: 6694 - protein, 9 aa, synthetic construct
  source 1..9: note = Description of Artificial Sequence: Synthetic peptide; note = XENP018533 vlCDR3
QQDYSSPRT

SEQ ID NO: 6695 - protein, 249 aa, synthetic construct
  source 1..249: note = Description of Artificial Sequence: Synthetic polypeptide; note = XENP018534 1G6_H1.38_L1_scFv(GKPGS)4
EVQLVESGGGLVKPGGSLRLSCAASGFTFSNYAMNWVRQAPGKGLEWVGEIRLKSNNYATHYAEPVKGRFTISRDDSKSTVYLQMNSLKTEDTAVYYCTRYYGNYGGYFDVWGAGTLVTVSSGKPGSGKPGSGKPGSGKPGSSIVMTQSPATLSVSPGERATLSCRASQSVSNDVAWYQQKPGQSPRLLINYASHRYTGVPDRFTGSGYGTEFTLTISSLQSEDFAVYFCQQDYSSPRTFGGGTKVEIK

SEQ ID NO: 6696 - protein, 122 aa, synthetic construct
  source 1..122: note = Description of Artificial Sequence: Synthetic polypeptide; note = VH of XENP018534
EVQLVESGGGLVKPGGSLRLSCAASGFTFSNYAMNWVRQAPGKGLEWVGEIRLKSNNYATHYAEPVKGRFTISRDDSKSTVYLQMNSLKTEDTAVYYCTRYYGNYGGYFDVWGAGTLVTVSS

SEQ ID NO: 6697 - protein, 107 aa, synthetic construct; identical to SEQ ID NO: 6247
  source 1..107: note = Description of Artificial Sequence: Synthetic polypeptide; note = VL of XENP018534

SEQ ID NO: 6698 - protein, 5 aa, synthetic construct
  source 1..5: note = Description of Artificial Sequence: Synthetic peptide; note = XENP018534 vhCDR1
NYAMN

SEQ ID NO: 6699 - protein, 19 aa, synthetic construct
  source 1..19: note = Description of Artificial Sequence: Synthetic peptide; note = XENP018534 vhCDR2
EIRLKSNNYATHYAEPVKG

SEQ ID NO: 6700 - protein, 11 aa, synthetic construct
  source 1..11: note = Description of Artificial Sequence: Synthetic peptide; note = XENP018534 vhCDR3
YYGNYGGYFDV

SEQ ID NO: 6701 - protein, 11 aa, synthetic construct
  source 1..11: note = Description of Artificial Sequence: Synthetic peptide; note = XENP018534 vlCDR1
RASQSVSNDVA

SEQ ID NO: 6702 - protein, 7 aa, synthetic construct
  source 1..7: note = Description of Artificial Sequence: Synthetic peptide; note = XENP018534 vlCDR2
YASHRYT

SEQ ID NO: 6703 - protein, 9 aa, synthetic construct
  source 1..9: note = Description of Artificial Sequence: Synthetic peptide; note = XENP018534 vlCDR3
QQDYSSPRT

SEQ ID NO: 6704 - protein, 249 aa, synthetic construct
  source 1..249: note = Description of Artificial Sequence: Synthetic polypeptide; note = XENP018535 1G6_H1.39_L1_scFv(GKPGS)4
EVQLVESGGGLVKPGGSLRLSCAASGFTFSNYYMNWVRQAPGKGLEWVGEIRLKSNNYATHYAEPVKGRFTISRDDSKSTVYLQMNSLKTEDTAVYYCTRYYGNYGGYFDVWGAGTLVTVSSGKPGSGKPGSGKPGSGKPGSSIVMTQSPATLSVSPGERATLSCRASQSVSNDVAWYQQKPGQSPRLLINYASHRYTGVPDRFTGSGYGTEFTLTISSLQSEDFAVYFCQQDYSSPRTFGGGTKVEIK

SEQ ID NO: 6705 - protein, 122 aa, synthetic construct
  source 1..122: note = Description of Artificial Sequence: Synthetic polypeptide; note = VH of XENP018535
EVQLVESGGGLVKPGGSLRLSCAASGFTFSNYYMNWVRQAPGKGLEWVGEIRLKSNNYATHYAEPVKGRFTISRDDSKSTVYLQMNSLKTEDTAVYYCTRYYGNYGGYFDVWGAGTLVTVSS

SEQ ID NO: 6706 - protein, 107 aa, synthetic construct; identical to SEQ ID NO: 6247
  source 1..107: note = Description of Artificial Sequence: Synthetic polypeptide; note = VL of XENP018535

SEQ ID NO: 6707 - protein, 5 aa, synthetic construct
  source 1..5: note = Description of Artificial Sequence: Synthetic peptide; note = XENP018535 vhCDR1
NYYMN

SEQ ID NO: 6708 - protein, 19 aa, synthetic construct
  source 1..19: note = Description of Artificial Sequence: Synthetic peptide; note = XENP018535 vhCDR2
EIRLKSNNYATHYAEPVKG

SEQ ID NO: 6709 - protein, 11 aa, synthetic construct
  source 1..11: note = Description of Artificial Sequence: Synthetic peptide; note = XENP018535 vhCDR3
YYGNYGGYFDV

SEQ ID NO: 6710 - protein, 11 aa, synthetic construct
  source 1..11: note = Description of Artificial Sequence: Synthetic peptide; note = XENP018535 vlCDR1
RASQSVSNDVA

SEQ ID NO: 6711 - protein, 7 aa, synthetic construct
  source 1..7: note = Description of Artificial Sequence: Synthetic peptide; note = XENP018535 vlCDR2
YASHRYT

SEQ ID NO: 6712 - protein, 9 aa, synthetic construct
  source 1..9: note = Description of Artificial Sequence: Synthetic peptide; note = XENP018535 vlCDR3
QQDYSSPRT

SEQ ID NO: 6713 - protein, 249 aa, synthetic construct
  source 1..249: note = Description of Artificial Sequence: Synthetic polypeptide; note = XENP018536 1G6_H1.40_L1_scFv(GKPGS)4
EVQLVESGGGLVKPGGSLRLSCAASGFTFSNYDMNWVRQAPGKGLEWVGEIRLKSNNYATHYAEPVKGRFTISRDDSKSTVYLQMNSLKTEDTAVYYCTRYYGNYGGYFDVWGAGTLVTVSSGKPGSGKPGSGKPGSGKPGSSIVMTQSPATLSVSPGERATLSCRASQSVSNDVAWYQQKPGQSPRLLINYASHRYTGVPDRFTGSGYGTEFTLTISSLQSEDFAVYFCQQDYSSPRTFGGGTKVEIK

SEQ ID NO: 6714 - protein, 122 aa, synthetic construct
  source 1..122: note = Description of Artificial Sequence: Synthetic polypeptide; note = VH of XENP018536
EVQLVESGGGLVKPGGSLRLSCAASGFTFSNYDMNWVRQAPGKGLEWVGEIRLKSNNYATHYAEPVKGRFTISRDDSKSTVYLQMNSLKTEDTAVYYCTRYYGNYGGYFDVWGAGTLVTVSS

SEQ ID NO: 6715 - protein, 107 aa, synthetic construct; identical to SEQ ID NO: 6247
  source 1..107: note = Description of Artificial Sequence: Synthetic polypeptide; note = VL of XENP018536

SEQ ID NO: 6716 - protein, 5 aa, synthetic construct
  source 1..5: note = Description of Artificial Sequence: Synthetic peptide; note = XENP018536 vhCDR1
NYDMN

SEQ ID NO: 6717 - protein, 19 aa, synthetic construct
  source 1..19: note = Description of Artificial Sequence: Synthetic peptide; note = XENP018536 vhCDR2
EIRLKSNNYATHYAEPVKG

SEQ ID NO: 6718 - protein, 11 aa, synthetic construct
  source 1..11: note = Description of Artificial Sequence: Synthetic peptide; note = XENP018536 vhCDR3
YYGNYGGYFDV

SEQ ID NO: 6719 - protein, 11 aa, synthetic construct
  source 1..11: note = Description of Artificial Sequence: Synthetic peptide; note = XENP018536 vlCDR1
RASQSVSNDVA

SEQ ID NO: 6720 - protein, 7 aa, synthetic construct
  source 1..7: note = Description of Artificial Sequence: Synthetic peptide; note = XENP018536 vlCDR2
YASHRYT

SEQ ID NO: 6721 - protein, 9 aa, synthetic construct
  source 1..9: note = Description of Artificial Sequence: Synthetic peptide; note = XENP018536 vlCDR3
QQDYSSPRT

SEQ ID NO: 6722 - protein, 249 aa, synthetic construct
  source 1..249: note = Description of Artificial Sequence: Synthetic polypeptide; note = XENP018537 1G6_H1.41_L1_scFv(GKPGS)4
EVQLVESGGGLVKPGGSLRLSCAASGFTFSNYWMSWVRQAPGKGLEWVGEIRLKSNNYATHYAEPVKGRFTISRDDSKSTVYLQMNSLKTEDTAVYYCTRYYGNYGGYFDVWGAGTLVTVSSGKPGSGKPGSGKPGSGKPGSSIVMTQSPATLSVSPGERATLSCRASQSVSNDVAWYQQKPGQSPRLLINYASHRYTGVPDRFTGSGYGTEFTLTISSLQSEDFAVYFCQQDYSSPRTFGGGTKVEIK

SEQ ID NO: 6723 - protein, 122 aa, synthetic construct
  source 1..122: note = Description of Artificial Sequence: Synthetic polypeptide; note = VH of XENP018537
EVQLVESGGGLVKPGGSLRLSCAASGFTFSNYWMSWVRQAPGKGLEWVGEIRLKSNNYATHYAEPVKGRFTISRDDSKSTVYLQMNSLKTEDTAVYYCTRYYGNYGGYFDVWGAGTLVTVSS

SEQ ID NO: 6724 - protein, 107 aa, synthetic construct; identical to SEQ ID NO: 6247
  source 1..107: note = Description of Artificial Sequence: Synthetic polypeptide; note = VL of XENP018537

SEQ ID NO: 6725 - protein, 5 aa, synthetic construct
  source 1..5: note = Description of Artificial Sequence: Synthetic peptide; note = XENP018537 vhCDR1
NYWMS

SEQ ID NO: 6726 - protein, 19 aa, synthetic construct
  source 1..19: note = Description of Artificial Sequence: Synthetic peptide; note = XENP018537 vhCDR2
EIRLKSNNYATHYAEPVKG

SEQ ID NO: 6727 - protein, 11 aa, synthetic construct
  source 1..11: note = Description of Artificial Sequence: Synthetic peptide; note = XENP018537 vhCDR3
YYGNYGGYFDV

SEQ ID NO: 6728 - protein, 11 aa, synthetic construct
  source 1..11: note = Description of Artificial Sequence: Synthetic peptide; note = XENP018537 vlCDR1
RASQSVSNDVA

SEQ ID NO: 6729 - protein, 7 aa, synthetic construct
  source 1..7: note = Description of Artificial Sequence: Synthetic peptide; note = XENP018537 vlCDR2
YASHRYT

SEQ ID NO: 6730 - protein, 9 aa, synthetic construct
  source 1..9: note = Description of Artificial Sequence: Synthetic peptide; note = XENP018537 vlCDR3
QQDYSSPRT

SEQ ID NO: 6731 - protein, 249 aa, synthetic construct
  source 1..249: note = Description of Artificial Sequence: Synthetic polypeptide; note = XENP018538 1G6_H1.42_L1_scFv(GKPGS)4
EVQLVESGGGLVKPGGSLRLSCAASGFTFSNYWMHWVRQAPGKGLEWVGEIRLKSNNYATHYAEPVKGRFTISRDDSKSTVYLQMNSLKTEDTAVYYCTRYYGNYGGYFDVWGAGTLVTVSSGKPGSGKPGSGKPGSGKPGSSIVMTQSPATLSVSPGERATLSCRASQSVSNDVAWYQQKPGQSPRLLINYASHRYTGVPDRFTGSGYGTEFTLTISSLQSEDFAVYFCQQDYSSPRTFGGGTKVEIK

SEQ ID NO: 6732 - protein, 122 aa, synthetic construct
  source 1..122: note = Description of Artificial Sequence: Synthetic polypeptide; note = VH of XENP018538
EVQLVESGGGLVKPGGSLRLSCAASGFTFSNYWMHWVRQAPGKGLEWVGEIRLKSNNYATHYAEPVKGRFTISRDDSKSTVYLQMNSLKTEDTAVYYCTRYYGNYGGYFDVWGAGTLVTVSS

SEQ ID NO: 6733 - protein, 107 aa, synthetic construct; identical to SEQ ID NO: 6247
  source 1..107: note = Description of Artificial Sequence: Synthetic polypeptide; note = VL of XENP018538

SEQ ID NO: 6734 - protein, 5 aa, synthetic construct
  source 1..5: note = Description of Artificial Sequence: Synthetic peptide; note = XENP018538 vhCDR1
NYWMH

SEQ ID NO: 6735 - protein, 19 aa, synthetic construct
  source 1..19: note = Description of Artificial Sequence: Synthetic peptide; note = XENP018538 vhCDR2
EIRLKSNNYATHYAEPVKG

SEQ ID NO: 6736 - protein, 11 aa, synthetic construct
  source 1..11: note = Description of Artificial Sequence: Synthetic peptide; note = XENP018538 vhCDR3
YYGNYGGYFDV

SEQ ID NO: 6737 - protein, 11 aa, synthetic construct
  source 1..11: note = Description of Artificial Sequence: Synthetic peptide; note = XENP018538 vlCDR1
RASQSVSNDVA

SEQ ID NO: 6738 - protein, 7 aa, synthetic construct
  source 1..7: note = Description of Artificial Sequence: Synthetic peptide; note = XENP018538 vlCDR2
YASHRYT

SEQ ID NO: 6739 - protein, 9 aa, synthetic construct
  source 1..9: note = Description of Artificial Sequence: Synthetic peptide; note = XENP018538 vlCDR3
QQDYSSPRT

SEQ ID NO: 6740 - protein, 249 aa, synthetic construct
  source 1..249: note = Description of Artificial Sequence: Synthetic polypeptide; note = XENP018539 1G6_H1.43_L1_scFv(GKPGS)4
EVQLVESGGGLVKPGGSLRLSCAASGFTFSNYWMDWVRQAPGKGLEWVGEIRLKSNNYATHYAEPVKGRFTISRDDSKSTVYLQMNSLKTEDTAVYYCTRYYGNYGGYFDVWGAGTLVTVSSGKPGSGKPGSGKPGSGKPGSSIVMTQSPATLSVSPGERATLSCRASQSVSNDVAWYQQKPGQSPRLLINYASHRYTGVPDRFTGSGYGTEFTLTISSLQSEDFAVYFCQQDYSSPRTFGGGTKVEIK

SEQ ID NO: 6741 - protein, 122 aa, synthetic construct
  source 1..122: note = Description of Artificial Sequence: Synthetic polypeptide; note = VH of XENP018539
EVQLVESGGGLVKPGGSLRLSCAASGFTFSNYWMDWVRQAPGKGLEWVGEIRLKSNNYATHYAEPVKGRFTISRDDSKSTVYLQMNSLKTEDTAVYYCTRYYGNYGGYFDVWGAGTLVTVSS

SEQ ID NO: 6742 - protein, 107 aa, synthetic construct; identical to SEQ ID NO: 6247
  source 1..107: note = Description of Artificial Sequence: Synthetic polypeptide; note = VL of XENP018539

SEQ ID NO: 6743 - protein, 5 aa, synthetic construct
  source 1..5: note = Description of Artificial Sequence: Synthetic peptide; note = XENP018539 vhCDR1
NYWMD

SEQ ID NO: 6744 - protein, 19 aa, synthetic construct
  source 1..19: note = Description of Artificial Sequence: Synthetic peptide; note = XENP018539 vhCDR2
EIRLKSNNYATHYAEPVKG

SEQ ID NO: 6745 - protein, 11 aa, synthetic construct
  source 1..11: note = Description of Artificial Sequence: Synthetic peptide; note = XENP018539 vhCDR3
YYGNYGGYFDV

SEQ ID NO: 6746 - protein, 11 aa, synthetic construct
  source 1..11: note = Description of Artificial Sequence: Synthetic peptide; note = XENP018539 vlCDR1
RASQSVSNDVA

SEQ ID NO: 6747 - protein, 7 aa, synthetic construct
  source 1..7: note = Description of Artificial Sequence: Synthetic peptide; note = XENP018539 vlCDR2
YASHRYT

SEQ ID NO: 6748 - protein, 9 aa, synthetic construct
  source 1..9: note = Description of Artificial Sequence: Synthetic peptide; note = XENP018539 vlCDR3
QQDYSSPRT

SEQ ID NO: 6749 - protein, 249 aa, synthetic construct
  source 1..249: note = Description of Artificial Sequence: Synthetic polypeptide; note = XENP018540 1G6_H1.44_L1_scFv(GKPGS)4
EVQLVESGGGLVKPGGSLRLSCAASGFTFSNYWMGWVRQAPGKGLEWVGEIRLKSNNYATHYAEPVKGRFTISRDDSKSTVYLQMNSLKTEDTAVYYCTRYYGNYGGYFDVWGAGTLVTVSSGKPGSGKPGSGKPGSGKPGSSIVMTQSPATLSVSPGERATLSCRASQSVSNDVAWYQQKPGQSPRLLINYASHRYTGVPDRFTGSGYGTEFTLTISSLQSEDFAVYFCQQDYSSPRTFGGGTKVEIK

SEQ ID NO: 6750 - protein, 122 aa, synthetic construct
  source 1..122: note = Description of Artificial Sequence: Synthetic polypeptide; note = VH of XENP018540
EVQLVESGGGLVKPGGSLRLSCAASGFTFSNYWMGWVRQAPGKGLEWVGEIRLKSNNYATHYAEPVKGRFTISRDDSKSTVYLQMNSLKTEDTAVYYCTRYYGNYGGYFDVWGAGTLVTVSS

SEQ ID NO: 6751 - protein, 107 aa, synthetic construct; identical to SEQ ID NO: 6247
  source 1..107: note = Description of Artificial Sequence: Synthetic polypeptide; note = VL of XENP018540

SEQ ID NO: 6752 - protein, 5 aa, synthetic construct
  source 1..5: note = Description of Artificial Sequence: Synthetic peptide; note = XENP018540 vhCDR1
NYWMG

SEQ ID NO: 6753 - protein, 19 aa, synthetic construct
  source 1..19: note = Description of Artificial Sequence: Synthetic peptide; note = XENP018540 vhCDR2
EIRLKSNNYATHYAEPVKG

SEQ ID NO: 6754 - protein, 11 aa, synthetic construct
  source 1..11: note = Description of Artificial Sequence: Synthetic peptide; note = XENP018540 vhCDR3
YYGNYGGYFDV

SEQ ID NO: 6755 - protein, 11 aa, synthetic construct
  source 1..11: note = Description of Artificial Sequence: Synthetic peptide; note = XENP018540 vlCDR1
RASQSVSNDVA

SEQ ID NO: 6756 - protein, 7 aa, synthetic construct
  source 1..7: note = Description of Artificial Sequence: Synthetic peptide; note = XENP018540 vlCDR2
YASHRYT

SEQ ID NO: 6757 - protein, 9 aa, synthetic construct
  source 1..9: note = Description of Artificial Sequence: Synthetic peptide; note = XENP018540 vlCDR3
QQDYSSPRT

SEQ ID NO: 6758 - protein, 249 aa, synthetic construct
  source 1..249: note = Description of Artificial Sequence: Synthetic polypeptide; note = XENP018541 1G6_H1.45_L1_scFv(GKPGS)4
EVQLVESGGGLVKPGGSLRLSCAASGFTFSNYWMNWARQAPGKGLEWVGEIRLKSNNYATHYAEPVKGRFTISRDDSKSTVYLQMNSLKTEDTAVYYCTRYYGNYGGYFDVWGAGTLVTVSSGKPGSGKPGSGKPGSGKPGSSIVMTQSPATLSVSPGERATLSCRASQSVSNDVAWYQQKPGQSPRLLINYASHRYTGVPDRFTGSGYGTEFTLTISSLQSEDFAVYFCQQDYSSPRTFGGGTKVEIK

SEQ ID NO: 6759 - protein, 122 aa, synthetic construct
  source 1..122: note = Description of Artificial Sequence: Synthetic polypeptide; note = VH of XENP018541
EVQLVESGGGLVKPGGSLRLSCAASGFTFSNYWMNWARQAPGKGLEWVGEIRLKSNNYATHYAEPVKGRFTISRDDSKSTVYLQMNSLKTEDTAVYYCTRYYGNYGGYFDVWGAGTLVTVSS

SEQ ID NO: 6760 - protein, 107 aa, synthetic construct; identical to SEQ ID NO: 6247
  source 1..107: note = Description of Artificial Sequence: Synthetic polypeptide; note = VL of XENP018541

SEQ ID NO: 6761 - protein, 5 aa, synthetic construct
  source 1..5: note = Description of Artificial Sequence: Synthetic peptide; note = XENP018541 vhCDR1
NYWMN

SEQ ID NO: 6762 - protein, 19 aa, synthetic construct
  source 1..19: note = Description of Artificial Sequence: Synthetic peptide; note = XENP018541 vhCDR2
EIRLKSNNYATHYAEPVKG

SEQ ID NO: 6763 - protein, 11 aa, synthetic construct
  source 1..11: note = Description of Artificial Sequence: Synthetic peptide; note = XENP018541 vhCDR3
YYGNYGGYFDV

SEQ ID NO: 6764 - protein, 11 aa, synthetic construct
  source 1..11: note = Description of Artificial Sequence: Synthetic peptide; note = XENP018541 vlCDR1
RASQSVSNDVA

SEQ ID NO: 6765 - protein, 7 aa, synthetic construct
  source 1..7: note = Description of Artificial Sequence: Synthetic peptide; note = XENP018541 vlCDR2
YASHRYT

SEQ ID NO: 6766 - protein, 9 aa, synthetic construct
  source 1..9: note = Description of Artificial Sequence: Synthetic peptide; note = XENP018541 vlCDR3
QQDYSSPRT

SEQ ID NO: 6767 - protein, 249 aa, synthetic construct
  source 1..249: note = Description of Artificial Sequence: Synthetic polypeptide; note = XENP018542 1G6_H1.46_L1_scFv(GKPGS)4
EVQLVESGGGLVKPGGSLRLSCAASGFTFSNYWMNWIRQAPGKGLEWVGEIRLKSNNYATHYAEPVKGRFTISRDDSKSTVYLQMNSLKTEDTAVYYCTRYYGNYGGYFDVWGAGTLVTVSSGKPGSGKPGSGKPGSGKPGSSIVMTQSPATLSVSPGERATLSCRASQSVSNDVAWYQQKPGQSPRLLINYASHRYTGVPDRFTGSGYGTEFTLTISSLQSEDFAVYFCQQDYSSPRTFGGGTKVEIK

SEQ ID NO: 6768 - protein, 122 aa, synthetic construct
  source 1..122: note = Description of Artificial Sequence: Synthetic polypeptide; note = VH of XENP018542
EVQLVESGGGLVKPGGSLRLSCAASGFTFSNYWMNWIRQAPGKGLEWVGEIRLKSNNYATHYAEPVKGRFTISRDDSKSTVYLQMNSLKTEDTAVYYCTRYYGNYGGYFDVWGAGTLVTVSS

SEQ ID NO: 6769 - protein, 107 aa, synthetic construct; identical to SEQ ID NO: 6247
  source 1..107: note = Description of Artificial Sequence: Synthetic polypeptide; note = VL of XENP018542

SEQ ID NO: 6770 - protein, 5 aa, synthetic construct
  source 1..5: note = Description of Artificial Sequence: Synthetic peptide; note = XENP018542 vhCDR1
NYWMN

SEQ ID NO: 6771 - protein, 19 aa, synthetic construct
  source 1..19: note = Description of Artificial Sequence: Synthetic peptide; note = XENP018542 vhCDR2
EIRLKSNNYATHYAEPVKG

SEQ ID NO: 6772 - protein, 11 aa, synthetic construct
  source 1..11: note = Description of Artificial Sequence: Synthetic peptide; note = XENP018542 vhCDR3
YYGNYGGYFDV

SEQ ID NO: 6773 - protein, 11 aa, synthetic construct
  source 1..11: note = Description of Artificial Sequence: Synthetic peptide; note = XENP018542 vlCDR1
RASQSVSNDVA

SEQ ID NO: 6774 - protein, 7 aa, synthetic construct
  source 1..7: note = Description of Artificial Sequence: Synthetic peptide; note = XENP018542 vlCDR2
YASHRYT

SEQ ID NO: 6775 - protein, 9 aa, synthetic construct
  source 1..9: note = Description of Artificial Sequence: Synthetic peptide; note = XENP018542 vlCDR3
QQDYSSPRT

SEQ ID NO: 6776 - protein, 249 aa, synthetic construct
  source 1..249: note = Description of Artificial Sequence: Synthetic polypeptide; note = XENP018543 1G6_H1.47_L1_scFv(GKPGS)4
EVQLVESGGGLVKPGGSLRLSCAASGFTFSNYWMNWFRQAPGKGLEWVGEIRLKSNNYATHYAEPVKGRFTISRDDSKSTVYLQMNSLKTEDTAVYYCTRYYGNYGGYFDVWGAGTLVTVSSGKPGSGKPGSGKPGSGKPGSSIVMTQSPATLSVSPGERATLSCRASQSVSNDVAWYQQKPGQSPRLLINYASHRYTGVPDRFTGSGYGTEFTLTISSLQSEDFAVYFCQQDYSSPRTFGGGTKVEIK

SEQ ID NO: 6777 - protein, 122 aa, synthetic construct
  source 1..122: note = Description of Artificial Sequence: Synthetic polypeptide; note = VH of XENP018543
EVQLVESGGGLVKPGGSLRLSCAASGFTFSNYWMNWFRQAPGKGLEWVGEIRLKSNNYATHYAEPVKGRFTISRDDSKSTVYLQMNSLKTEDTAVYYCTRYYGNYGGYFDVWGAGTLVTVSS

SEQ ID NO: 6778 - protein, 107 aa, synthetic construct; identical to SEQ ID NO: 6247
  source 1..107: note = Description of Artificial Sequence: Synthetic polypeptide; note = VL of XENP018543

SEQ ID NO: 6779 - protein, 5 aa, synthetic construct
  source 1..5: note = Description of Artificial Sequence: Synthetic peptide; note = XENP018543 vhCDR1
NYWMN

SEQ ID NO: 6780 - protein, 19 aa, synthetic construct
  source 1..19: note = Description of Artificial Sequence: Synthetic peptide; note = XENP018543 vhCDR2
EIRLKSNNYATHYAEPVKG

SEQ ID NO: 6781 - protein, 11 aa, synthetic construct
  source 1..11: note = Description of Artificial Sequence: Synthetic peptide; note = XENP018543 vhCDR3
YYGNYGGYFDV

SEQ ID NO: 6782 - protein, 11 aa, synthetic construct
  source 1..11: note = Description of Artificial Sequence: Synthetic peptide; note = XENP018543 vlCDR1
RASQSVSNDVA

SEQ ID NO: 6783 - protein, 7 aa, synthetic construct
  source 1..7: note = Description of Artificial Sequence: Synthetic peptide; note = XENP018543 vlCDR2
YASHRYT

SEQ ID NO: 6784 - protein, 9 aa, synthetic construct
  source 1..9: note = Description of Artificial Sequence: Synthetic peptide; note = XENP018543 vlCDR3
QQDYSSPRT

SEQ ID NO: 6785 - protein, 249 aa, synthetic construct
  source 1..249: note = Description of Artificial Sequence: Synthetic polypeptide; note = XENP018544 1G6_H1.48_L1_scFv(GKPGS)4
EVQLVESGGGLVKPGGSLRLSCAASGFTFSNYWMNWVRKAPGKGLEWVGEIRLKSNNYATHYAEPVKGRFTISRDDSKSTVYLQMNSLKTEDTAVYYCTRYYGNYGGYFDVWGAGTLVTVSSGKPGSGKPGSGKPGSGKPGSSIVMTQSPATLSVSPGERATLSCRASQSVSNDVAWYQQKPGQSPRLLINYASHRYTGVPDRFTGSGYGTEFTLTISSLQSEDFAVYFCQQDYSSPRTFGGGTKVEIK

SEQ ID NO: 6786 - protein, 122 aa, synthetic construct
  source 1..122: note = Description of Artificial Sequence: Synthetic polypeptide; note = VH of XENP018544
EVQLVESGGGLVKPGGSLRLSCAASGFTFSNYWMNWVRKAPGKGLEWVGEIRLKSNNYATHYAEPVKGRFTISRDDSKSTVYLQMNSLKTEDTAVYYCTRYYGNYGGYFDVWGAGTLVTVSS

SEQ ID NO: 6787 - protein, 107 aa, synthetic construct; identical to SEQ ID NO: 6247
  source 1..107: note = Description of Artificial Sequence: Synthetic polypeptide; note = VL of XENP018544

SEQ ID NO: 6788 - protein, 11 aa, synthetic construct
  source 1..11: note = Description of Artificial Sequence: Synthetic peptide; note = XENP018544 vlCDR1
RASQSVSNDVA

SEQ ID NO: 6789 - protein, 7 aa, synthetic construct
  source 1..7: note = Description of Artificial Sequence: Synthetic peptide; note = XENP018544 vlCDR2
YASHRYT

SEQ ID NO: 6790 - protein, 9 aa, synthetic construct
  source 1..9: note = Description of Artificial Sequence: Synthetic peptide; note = XENP018544 vlCDR3
QQDYSSPRT

SEQ ID NO: 6791 - protein, 249 aa, synthetic construct
  source 1..249: note = Description of Artificial Sequence: Synthetic polypeptide; note = XENP018545 1G6_H1.49_L1_scFv(GKPGS)4
EVQLVESGGGLVKPGGSLRLSCAASGFTFSNYWMNWVRQSPGKGLEWVGEIRLKSNNYATHYAEPVKGRFTISRDDSKSTVYLQMNSLKTEDTAVYYCTRYYGNYGGYFDVWGAGTLVTVSSGKPGSGKPGSGKPGSGKPGSSIVMTQSPATLSVSPGERATLSCRASQSVSNDVAWYQQKPGQSPRLLINYASHRYTGVPDRFTGSGYGTEFTLTISSLQSEDFAVYFCQQDYSSPRTFGGGTKVEIK

SEQ ID NO: 6792 - protein, 122 aa, synthetic construct
  source 1..122: note = Description of Artificial Sequence: Synthetic polypeptide; note = VH of XENP018545
EVQLVESGGGLVKPGGSLRLSCAASGFTFSNYWMNWVRQSPGKGLEWVGEIRLKSNNYATHYAEPVKGRFTISRDDSKSTVYLQMNSLKTEDTAVYYCTRYYGNYGGYFDVWGAGTLVTVSS

SEQ ID NO: 6793 - protein, 107 aa, synthetic construct; identical to SEQ ID NO: 6247
  source 1..107: note = Description of Artificial Sequence: Synthetic polypeptide; note = VL of XENP018545

SEQ ID NO: 6794 - protein, 5 aa, synthetic construct
  source 1..5: note = Description of Artificial Sequence: Synthetic peptide; note = XENP018545 vhCDR1
NYWMN

SEQ ID NO: 6795 - protein, 19 aa, synthetic construct
  source 1..19: note = Description of Artificial Sequence: Synthetic peptide; note = XENP018545 vhCDR2
EIRLKSNNYATHYAEPVKG

SEQ ID NO: 6796 - protein, 11 aa, synthetic construct
  source 1..11: note = Description of Artificial Sequence: Synthetic peptide; note = XENP018545 vhCDR3
YYGNYGGYFDV

SEQ ID NO: 6797 - protein, 11 aa, synthetic construct
  source 1..11: note = Description of Artificial Sequence: Synthetic peptide; note = XENP018545 vlCDR1
RASQSVSNDVA

SEQ ID NO: 6798 - protein, 7 aa, synthetic construct
  source 1..7: note = Description of Artificial Sequence: Synthetic peptide; note = XENP018545 vlCDR2
YASHRYT

SEQ ID NO: 6799 - protein, 9 aa, synthetic construct
  source 1..9: note = Description of Artificial Sequence: Synthetic peptide; note = XENP018545 vlCDR3
QQDYSSPRT

SEQ ID NO: 6800 - protein, 249 aa, synthetic construct
  source 1..249: note = Description of Artificial Sequence: Synthetic polypeptide; note = XENP018546 1G6_H1.50_L1_scFv(GKPGS)4
EVQLVESGGGLVKPGGSLRLSCAASGFTFSNYWMNWVRQAPEKGLEWVGEIRLKSNNYATHYAEPVKGRFTISRDDSKSTVYLQMNSLKTEDTAVYYCTRYYGNYGGYFDVWGAGTLVTVSSGKPGSGKPGSGKPGSGKPGSSIVMTQSPATLSVSPGERATLSCRASQSVSNDVAWYQQKPGQSPRLLINYASHRYTGVPDRFTGSGYGTEFTLTISSLQSEDFAVYFCQQDYSSPRTFGGGTKVEIK

SEQ ID NO: 6801 - protein, 122 aa, synthetic construct
  source 1..122: note = Description of Artificial Sequence: Synthetic polypeptide; note = VH of XENP018546
EVQLVESGGGLVKPGGSLRLSCAASGFTFSNYWMNWVRQAPEKGLEWVGEIRLKSNNYATHYAEPVKGRFTISRDDSKSTVYLQMNSLKTEDTAVYYCTRYYGNYGGYFDVWGAGTLVTVSS

SEQ ID NO: 6802 - protein, 107 aa, synthetic construct; identical to SEQ ID NO: 6247
  source 1..107: note = Description of Artificial Sequence: Synthetic polypeptide; note = VL of XENP018546

SEQ ID NO: 6803 - protein, 5 aa, synthetic construct
  source 1..5: note = Description of Artificial Sequence: Synthetic peptide; note = XENP018546 vhCDR1
NYWMN

SEQ ID NO: 6804 - protein, 19 aa, synthetic construct
  source 1..19: note = Description of Artificial Sequence: Synthetic peptide; note = XENP018546 vhCDR2
EIRLKSNNYATHYAEPVKG

SEQ ID NO: 6805 - protein, 11 aa, synthetic construct
  source 1..11: note = Description of Artificial Sequence: Synthetic peptide; note = XENP018546 vhCDR3
YYGNYGGYFDV

SEQ ID NO: 6806 - protein, 11 aa, synthetic construct
  source 1..11: note = Description of Artificial Sequence: Synthetic peptide; note = XENP018546 vlCDR1
RASQSVSNDVA

SEQ ID NO: 6807 - protein, 7 aa, synthetic construct
  source 1..7: note = Description of Artificial Sequence: Synthetic peptide; note = XENP018546 vlCDR2
YASHRYT

SEQ ID NO: 6808 - protein, 9 aa, synthetic construct
  source 1..9: note = Description of Artificial Sequence: Synthetic peptide; note = XENP018546 vlCDR3
QQDYSSPRT

SEQ ID NO: 6809 - protein, 249 aa, synthetic construct
  source 1..249: note = Description of Artificial Sequence: Synthetic polypeptide; note = XENP018547 1G6_H1.51_L1_scFv(GKPGS)4
EVQLVESGGGLVKPGGSLRLSCAASGFTFSNYWMNWVRQAPGKGLEYVGEIRLKSNNYATHYAEPVKGRFTISRDDSKSTVYLQMNSLKTEDTAVYYCTRYYGNYGGYFDVWGAGTLVTVSSGKPGSGKPGSGKPGSGKPGSSIVMTQSPATLSVSPGERATLSCRASQSVSNDVAWYQQKPGQSPRLLINYASHRYTGVPDRFTGSGYGTEFTLTISSLQSEDFAVYFCQQDYSSPRTFGGGTKVEIK

SEQ ID NO: 6810 - protein, 122 aa, synthetic construct
  source 1..122: note = Description of Artificial Sequence: Synthetic polypeptide; note = VH of XENP018547
EVQLVESGGGLVKPGGSLRLSCAASGFTFSNYWMNWVRQAPGKGLEYVGEIRLKSNNYATHYAEPVKGRFTISRDDSKSTVYLQMNSLKTEDTAVYYCTRYYGNYGGYFDVWGAGTLVTVSS

SEQ ID NO: 6811 - protein, 107 aa, synthetic construct; identical to SEQ ID NO: 6247
  source 1..107: note = Description of Artificial Sequence: Synthetic polypeptide; note = VL of XENP018547

SEQ ID NO: 6812 - protein, 5 aa, synthetic construct
  source 1..5: note = Description of Artificial Sequence: Synthetic peptide; note = XENP018547 vhCDR1
NYWMN

SEQ ID NO: 6813 - protein, 19 aa, synthetic construct
  source 1..19: note = Description of Artificial Sequence: Synthetic peptide; note = XENP018547 vhCDR2
EIRLKSNNYATHYAEPVKG

SEQ ID NO: 6814 - protein, 11 aa, synthetic construct
  source 1..11: note = Description of Artificial Sequence: Synthetic peptide; note = XENP018547 vhCDR3
YYGNYGGYFDV

SEQ ID NO: 6815 - protein, 11 aa, synthetic construct
  source 1..11: note = Description of Artificial Sequence: Synthetic peptide; note = XENP018547 vlCDR1
RASQSVSNDVA

SEQ ID NO: 6816 - protein, 7 aa, synthetic construct
  source 1..7: note = Description of Artificial Sequence: Synthetic peptide; note = XENP018547 vlCDR2
YASHRYT

SEQ ID NO: 6817 - protein, 9 aa, synthetic construct
  source 1..9: note = Description of Artificial Sequence: Synthetic peptide; note = XENP018547 vlCDR3
QQDYSSPRT

SEQ ID NO: 6818 - protein, 249 aa, synthetic construct
  source 1..249: note = Description of Artificial Sequence: Synthetic polypeptide; note = XENP018548 1G6_H1.52_L1_scFv(GKPGS)4
EVQLVESGGGLVKPGGSLRLSCAASGFTFSNYWMNWVRQAPGKGLEWVAEIRLKSNNYATHYAEPVKGRFTISRDDSKSTVYLQMNSLKTEDTAVYYCTRYYGNYGGYFDVWGAGTLVTVSSGKPGSGKPGSGKPGSGKPGSSIVMTQSPATLSVSPGERATLSCRASQSVSNDVAWYQQKPGQSPRLLINYASHRYTGVPDRFTGSGYGTEFTLTISSLQSEDFAVYFCQQDYSSPRTFGGGTKVEIK

SEQ ID NO: 6819 - protein, 122 aa, synthetic construct
  source 1..122: note = Description of Artificial Sequence: Synthetic polypeptide; note = VH of XENP018548
EVQLVESGGGLVKPGGSLRLSCAASGFTFSNYWMNWVRQAPGKGLEWVAEIRLKSNNYATHYAEPVKGRFTISRDDSKSTVYLQMNSLKTEDTAVYYCTRYYGNYGGYFDVWGAGTLVTVSS

SEQ ID NO: 6820 - protein, 107 aa, synthetic construct; identical to SEQ ID NO: 6247
  source 1..107: note = Description of Artificial Sequence: Synthetic polypeptide; note = VL of XENP018548

SEQ ID NO: 6821 - protein, 5 aa, synthetic construct
  source 1..5: note = Description of Artificial Sequence: Synthetic peptide; note = XENP018548 vhCDR1
NYWMN

SEQ ID NO: 6822 - protein, 19 aa, synthetic construct
  source 1..19: note = Description of Artificial Sequence: Synthetic peptide; note = XENP018548 vhCDR2
EIRLKSNNYATHYAEPVKG

SEQ ID NO: 6823 - protein, 11 aa, synthetic construct
  source 1..11: note = Description of Artificial Sequence: Synthetic peptide; note = XENP018548 vhCDR3
YYGNYGGYFDV

SEQ ID NO: 6824 - protein, 11 aa, synthetic construct
  source 1..11: note = Description of Artificial Sequence: Synthetic peptide; note = XENP018548 vlCDR1
RASQSVSNDVA

SEQ ID NO: 6825 - protein, 7 aa, synthetic construct
  source 1..7: note = Description of Artificial Sequence: Synthetic peptide; note = XENP018548 vlCDR2
YASHRYT

SEQ ID NO: 6826 - protein, 9 aa, synthetic construct
  source 1..9: note = Description of Artificial Sequence: Synthetic peptide; note = XENP018548 vlCDR3
QQDYSSPRT

SEQ ID NO: 6827 - protein, 249 aa, synthetic construct
  source 1..249: note = Description of Artificial Sequence: Synthetic polypeptide; note = XENP018549 1G6_H1.53_L1_scFv(GKPGS)4
EVQLVESGGGLVKPGGSLRLSCAASGFTFSNYWMNWVRQAPGKGLEWVSEIRLKSNNYATHYAEPVKGRFTISRDDSKSTVYLQMNSLKTEDTAVYYCTRYYGNYGGYFDVWGAGTLVTVSSGKPGSGKPGSGKPGSGKPGSSIVMTQSPATLSVSPGERATLSCRASQSVSNDVAWYQQKPGQSPRLLINYASHRYTGVPDRFTGSGYGTEFTLTISSLQSEDFAVYFCQQDYSSPRTFGGGTKVEIK

SEQ ID NO: 6828 - protein, 122 aa, synthetic construct
  source 1..122: note = Description of Artificial Sequence: Synthetic polypeptide; note = VH of XENP018549
EVQLVESGGGLVKPGGSLRLSCAASGFTFSNYWMNWVRQAPGKGLEWVSEIRLKSNNYATHYAEPVKGRFTISRDDSKSTVYLQMNSLKTEDTAVYYCTRYYGNYGGYFDVWGAGTLVTVSS

SEQ ID NO: 6829 - protein, 107 aa, synthetic construct; identical to SEQ ID NO: 6247
  source 1..107: note = Description of Artificial Sequence: Synthetic polypeptide; note = VL of XENP018549

SEQ ID NO: 6830 - protein, 5 aa, synthetic construct
  source 1..5: note = Description of Artificial Sequence: Synthetic peptide; note = XENP018549 vhCDR1
NYWMN

SEQ ID NO: 6831 - protein, 19 aa, synthetic construct
  source 1..19: note = Description of Artificial Sequence: Synthetic peptide; note = XENP018549 vhCDR2
EIRLKSNNYATHYAEPVKG

SEQ ID NO: 6832 - protein, 11 aa, synthetic construct
  source 1..11: note = Description of Artificial Sequence: Synthetic peptide; note = XENP018549 vhCDR3
YYGNYGGYFDV

SEQ ID NO: 6833 - protein, 11 aa, synthetic construct
  source 1..11: note = Description of Artificial Sequence: Synthetic peptide; note = XENP018549 vlCDR1
RASQSVSNDVA

SEQ ID NO: 6834 - protein, 7 aa, synthetic construct
  source 1..7: note = Description of Artificial Sequence: Synthetic peptide; note = XENP018549 vlCDR2
YASHRYT

SEQ ID NO: 6835 - protein, 9 aa, synthetic construct
  source 1..9: note = Description of Artificial Sequence: Synthetic peptide; note = XENP018549 vlCDR3
QQDYSSPRT

SEQ ID NO: 6836 - protein, 249 aa, synthetic construct
  source 1..249: note = Description of Artificial Sequence: Synthetic polypeptide; note = XENP018550 1G6_H1.54_L1_scFv(GKPGS)4
EVQLVESGGGLVKPGGSLRLSCAASGFTFSNYWMNWVRQAPGKGLEWVGQIRLKSNNYATHYAEPVKGRFTISRDDSKSTVYLQMNSLKTEDTAVYYCTRYYGNYGGYFDVWGAGTLVTVSSGKPGSGKPGSGKPGSGKPGSSIVMTQSPATLSVSPGERATLSCRASQSVSNDVAWYQQKPGQSPRLLINYASHRYTGVPDRFTGSGYGTEFTLTISSLQSEDFAVYFCQQDYSSPRTFGGGTKVEIK

SEQ ID NO: 6837 - protein, 122 aa, synthetic construct
  source 1..122: note = Description of Artificial Sequence: Synthetic polypeptide; note = VH of XENP018550
EVQLVESGGGLVKPGGSLRLSCAASGFTFSNYWMNWVRQAPGKGLEWVGQIRLKSNNYATHYAEPVKGRFTISRDDSKSTVYLQMNSLKTEDTAVYYCTRYYGNYGGYFDVWGAGTLVTVSS

SEQ ID NO: 6838 - protein, 107 aa, synthetic construct; identical to SEQ ID NO: 6247
  source 1..107: note = Description of Artificial Sequence: Synthetic polypeptide; note = VL of XENP018550

SEQ ID NO: 6839 - protein, 5 aa, synthetic construct
  source 1..5: note = Description of Artificial Sequence: Synthetic peptide; note = XENP018550 vhCDR1
NYWMN

SEQ ID NO: 6840 - protein, 19 aa, synthetic construct
  source 1..19: note = Description of Artificial Sequence: Synthetic peptide; note = XENP018550 vhCDR2
QIRLKSNNYATHYAEPVKG

SEQ ID NO: 6841 - protein, 11 aa, synthetic construct
  source 1..11: note = Description of Artificial Sequence: Synthetic peptide; note = XENP018550 vhCDR3
YYGNYGGYFDV

SEQ ID NO: 6842 - protein, 11 aa, synthetic construct
  source 1..11: note = Description of Artificial Sequence: Synthetic peptide; note = XENP018550 vlCDR1
RASQSVSNDVA

SEQ ID NO: 6843 - protein, 7 aa, synthetic construct
  source 1..7: note = Description of Artificial Sequence: Synthetic peptide; note = XENP018550 vlCDR2
YASHRYT

SEQ ID NO: 6844 - protein, 9 aa, synthetic construct
  source 1..9: note = Description of Artificial Sequence: Synthetic peptide; note = XENP018550 vlCDR3
QQDYSSPRT

SEQ ID NO: 6845 - protein, 249 aa, synthetic construct
  source 1..249: note = Description of Artificial Sequence: Synthetic polypeptide; note = XENP018551 1G6_H1.55_L1_scFv(GKPGS)4
EVQLVESGGGLVKPGGSLRLSCAASGFTFSNYWMNWVRQAPGKGLEWVGDIRLKSNNYATHYAEPVKGRFTISRDDSKSTVYLQMNSLKTEDTAVYYCTRYYGNYGGYFDVWGAGTLVTVSSGKPGSGKPGSGKPGSGKPGSSIVMTQSPATLSVSPGERATLSCRASQSVSNDVAWYQQKPGQSPRLLINYASHRYTGVPDRFTGSGYGTEFTLTISSLQSEDFAVYFCQQDYSSPRTFGGGTKVEIK

SEQ ID NO: 6846 - protein, 122 aa, synthetic construct
  source 1..122: note = Description of Artificial Sequence: Synthetic polypeptide; note = VH of XENP018551
EVQLVESGGGLVKPGGSLRLSCAASGFTFSNYWMNWVRQAPGKGLEWVGDIRLKSNNYATHYAEPVKGRFTISRDDSKSTVYLQMNSLKTEDTAVYYCTRYYGNYGGYFDVWGAGTLVTVSS

SEQ ID NO: 6847 - protein, 107 aa, synthetic construct; identical to SEQ ID NO: 6247
  source 1..107: note = Description of Artificial Sequence: Synthetic polypeptide; note = VL of XENP018551

SEQ ID NO: 6848 - protein, 5 aa, synthetic construct
  source 1..5: note = Description of Artificial Sequence: Synthetic peptide; note = XENP018551 vhCDR1
NYWMN

SEQ ID NO: 6849 - protein, 19 aa, synthetic construct
  source 1..19: note = Description of Artificial Sequence: Synthetic peptide; note = XENP018551 vhCDR2
DIRLKSNNYATHYAEPVKG

SEQ ID NO: 6850 - protein, 11 aa, synthetic construct
  source 1..11: note = Description of Artificial Sequence: Synthetic peptide; note = XENP018551 vhCDR3
YYGNYGGYFDV

SEQ ID NO: 6851 - protein, 11 aa, synthetic construct
  source 1..11: note = Description of Artificial Sequence: Synthetic peptide; note = XENP018551 vlCDR1
RASQSVSNDVA

SEQ ID NO: 6852 - protein, 7 aa, synthetic construct
  source 1..7: note = Description of Artificial Sequence: Synthetic peptide; note = XENP018551 vlCDR2
YASHRYT

SEQ ID NO: 6853 - protein, 9 aa, synthetic construct
  source 1..9: note = Description of Artificial Sequence: Synthetic peptide; note = XENP018551 vlCDR3
QQDYSSPRT

SEQ ID NO: 6854 - protein, 249 aa, synthetic construct
  source 1..249: note = Description of Artificial Sequence: Synthetic polypeptide; note = XENP018552 1G6_H1.56_L1_scFv(GKPGS)4
EVQLVESGGGLVKPGGSLRLSCAASGFTFSNYWMNWVRQAPGKGLEWVGKIRLKSNNYATHYAEPVKGRFTISRDDSKSTVYLQMNSLKTEDTAVYYCTRYYGNYGGYFDVWGAGTLVTVSSGKPGSGKPGSGKPGSGKPGSSIVMTQSPATLSVSPGERATLSCRASQSVSNDVAWYQQKPGQSPRLLINYASHRYTGVPDRFTGSGYGTEFTLTISSLQSEDFAVYFCQQDYSSPRTFGGGTKVEIK

SEQ ID NO: 6855 - protein, 122 aa, synthetic construct
  source 1..122: note = Description of Artificial Sequence: Synthetic polypeptide; note = VH of XENP018552
EVQLVESGGGLVKPGGSLRLSCAASGFTFSNYWMNWVRQAPGKGLEWVGKIRLKSNNYATHYAEPVKGRFTISRDDSKSTVYLQMNSLKTEDTAVYYCTRYYGNYGGYFDVWGAGTLVTVSS

SEQ ID NO: 6856 - protein, 107 aa, synthetic construct; identical to SEQ ID NO: 6247
  source 1..107: note = Description of Artificial Sequence: Synthetic polypeptide; note = VL of XENP018552

SEQ ID NO: 6857 - protein, 5 aa, synthetic construct
  source 1..5: note = Description of Artificial Sequence: Synthetic peptide; note = XENP018552 vhCDR1
NYWMN

SEQ ID NO: 6858 - protein, 19 aa, synthetic construct
  source 1..19: note = Description of Artificial Sequence: Synthetic peptide; note = XENP018552 vhCDR2
KIRLKSNNYATHYAEPVKG

SEQ ID NO: 6859 - protein, 11 aa, synthetic construct
  source 1..11: note = Description of Artificial Sequence: Synthetic peptide; note = XENP018552 vhCDR3
YYGNYGGYFDV

SEQ ID NO: 6860 - protein, 11 aa, synthetic construct
  source 1..11: note = Description of Artificial Sequence: Synthetic peptide; note = XENP018552 vlCDR1
RASQSVSNDVA

SEQ ID NO: 6861 - protein, 7 aa, synthetic construct
  source 1..7: note = Description of Artificial Sequence: Synthetic peptide; note = XENP018552 vlCDR2
YASHRYT

SEQ ID NO: 6862 - protein, 9 aa, synthetic construct
  source 1..9: note = Description of Artificial Sequence: Synthetic peptide; note = XENP018552 vlCDR3
QQDYSSPRT

SEQ ID NO: 6863 - protein, 249 aa, synthetic construct
  source 1..249: note = Description of Artificial Sequence: Synthetic polypeptide; note = XENP018553 1G6_H1.57_L1_scFv(GKPGS)4
EVQLVESGGGLVKPGGSLRLSCAASGFTFSNYWMNWVRQAPGKGLEWVGSIRLKSNNYATHYAEPVKGRFTISRDDSKSTVYLQMNSLKTEDTAVYYCTRYYGNYGGYFDVWGAGTLVTVSSGKPGSGKPGSGKPGSGKPGSSIVMTQSPATLSVSPGERATLSCRASQSVSNDVAWYQQKPGQSPRLLINYASHRYTGVPDRFTGSGYGTEFTLTISSLQSEDFAVYFCQQDYSSPRTFGGGTKVEIK

SEQ ID NO: 6864 - protein, 122 aa, synthetic construct
  source 1..122: note = Description of Artificial Sequence: Synthetic polypeptide; note = VH of XENP018553
EVQLVESGGGLVKPGGSLRLSCAASGFTFSNYWMNWVRQAPGKGLEWVGSIRLKSNNYATHYAEPVKGRFTISRDDSKSTVYLQMNSLKTEDTAVYYCTRYYGNYGGYFDVWGAGTLVTVSS

SEQ ID NO: 6865 - protein, 107 aa, synthetic construct; identical to SEQ ID NO: 6247
  source 1..107: note = Description of Artificial Sequence: Synthetic polypeptide; note = VL of XENP018553

SEQ ID NO: 6866 - protein, 5 aa, synthetic construct
  source 1..5: note = Description of Artificial Sequence: Synthetic peptide; note = XENP018553 vhCDR1
NYWMN

SEQ ID NO: 6867 - protein, 19 aa, synthetic construct
  source 1..19: note = Description of Artificial Sequence: Synthetic peptide; note = XENP018553 vhCDR2
SIRLKSNNYATHYAEPVKG

SEQ ID NO: 6868 - protein, 11 aa, synthetic construct
  source 1..11: note = Description of Artificial Sequence: Synthetic peptide; note = XENP018553 vhCDR3
YYGNYGGYFDV

SEQ ID NO: 6869 - protein, 11 aa, synthetic construct
  source 1..11: note = Description of Artificial Sequence: Synthetic peptide; note = XENP018553 vlCDR1
RASQSVSNDVA

SEQ ID NO: 6870 - protein, 7 aa, synthetic construct
  source 1..7: note = Description of Artificial Sequence: Synthetic peptide; note = XENP018553 vlCDR2
YASHRYT

SEQ ID NO: 6871 - protein, 9 aa, synthetic construct
  source 1..9: note = Description of Artificial Sequence: Synthetic peptide; note = XENP018553 vlCDR3
QQDYSSPRT

SEQ ID NO: 6872 - protein, 249 aa, synthetic construct
  source 1..249: note = Description of Artificial Sequence: Synthetic polypeptide; note = XENP018554 1G6_H1.58_L1_scFv(GKPGS)4
EVQLVESGGGLVKPGGSLRLSCAASGFTFSNYWMNWVRQAPGKGLEWVGHIRLKSNNYATHYAEPVKGRFTISRDDSKSTVYLQMNSLKTEDTAVYYCTRYYGNYGGYFDVWGAGTLVTVSSGKPGSGKPGSGKPGSGKPGSSIVMTQSPATLSVSPGERATLSCRASQSVSNDVAWYQQKPGQSPRLLINYASHRYTGVPDRFTGSGYGTEFTLTISSLQSEDFAVYFCQQDYSSPRTFGGGTKVEIK

SEQ ID NO: 6873 - protein, 122 aa, synthetic construct
  source 1..122: note = Description of Artificial Sequence: Synthetic polypeptide; note = VH of XENP018554
EVQLVESGGGLVKPGGSLRLSCAASGFTFSNYWMNWVRQAPGKGLEWVGHIRLKSNNYATHYAEPVKGRFTISRDDSKSTVYLQMNSLKTEDTAVYYCTRYYGNYGGYFDVWGAGTLVTVSS

SEQ ID NO: 6874 - protein, 107 aa, synthetic construct; identical to SEQ ID NO: 6247
  source 1..107: note = Description of Artificial Sequence: Synthetic polypeptide; note = VL of XENP018554

SEQ ID NO: 6875 - protein, 5 aa, synthetic construct
  source 1..5: note = Description of Artificial Sequence: Synthetic peptide; note = XENP018554 vhCDR1
NYWMN

SEQ ID NO: 6876 - protein, 19 aa, synthetic construct
  source 1..19: note = Description of Artificial Sequence: Synthetic peptide; note = XENP018554 vhCDR2
HIRLKSNNYATHYAEPVKG

SEQ ID NO: 6877 - protein, 11 aa, synthetic construct
  source 1..11: note = Description of Artificial Sequence: Synthetic peptide; note = XENP018554 vhCDR3
YYGNYGGYFDV

SEQ ID NO: 6878 - protein, 11 aa, synthetic construct
  source 1..11: note = Description of Artificial Sequence: Synthetic peptide; note = XENP018554 vlCDR1
RASQSVSNDVA

SEQ ID NO: 6879 - protein, 7 aa, synthetic construct
  source 1..7: note = Description of Artificial Sequence: Synthetic peptide; note = XENP018554 vlCDR2
YASHRYT

SEQ ID NO: 6880 - protein, 9 aa, synthetic construct
  source 1..9: note = Description of Artificial Sequence: Synthetic peptide; note = XENP018554 vlCDR3
QQDYSSPRT

SEQ ID NO: 6881 - protein, 249 aa, synthetic construct
  source 1..249: note = Description of Artificial Sequence: Synthetic polypeptide; note = XENP018555 1G6_H1.59_L1_scFv(GKPGS)4
EVQLVESGGGLVKPGGSLRLSCAASGFTFSNYWMNWVRQAPGKGLEWVGAIRLKSNNYATHYAEPVKGRFTISRDDSKSTVYLQMNSLKTEDTAVYYCTRYYGNYGGYFDVWGAGTLVTVSSGKPGSGKPGSGKPGSGKPGSSIVMTQSPATLSVSPGERATLSCRASQSVSNDVAWYQQKPGQSPRLLINYASHRYTGVPDRFTGSGYGTEFTLTISSLQSEDFAVYFCQQDYSSPRTFGGGTKVEIK

SEQ ID NO: 6882 - protein, 122 aa, synthetic construct
  source 1..122: note = Description of Artificial Sequence: Synthetic polypeptide; note = VH of XENP018555
EVQLVESGGGLVKPGGSLRLSCAASGFTFSNYWMNWVRQAPGKGLEWVGAIRLKSNNYATHYAEPVKGRFTISRDDSKSTVYLQMNSLKTEDTAVYYCTRYYGNYGGYFDVWGAGTLVTVSS

SEQ ID NO: 6883 - protein, 107 aa, synthetic construct; identical to SEQ ID NO: 6247
  source 1..107: note = Description of Artificial Sequence: Synthetic polypeptide; note = VL of XENP018555

SEQ ID NO: 6884 - protein, 5 aa, synthetic construct
  source 1..5: note = Description of Artificial Sequence: Synthetic peptide; note = XENP018555 vhCDR1
NYWMN

SEQ ID NO: 6885 - protein, 19 aa, synthetic construct
  source 1..19: note = Description of Artificial Sequence: Synthetic peptide; note = XENP018555 vhCDR2
AIRLKSNNYATHYAEPVKG

SEQ ID NO: 6886 - protein, 11 aa, synthetic construct
  source 1..11: note = Description of Artificial Sequence: Synthetic peptide; note = XENP018555 vhCDR3
YYGNYGGYFDV

SEQ ID NO: 6887 - protein, 11 aa, synthetic construct
  source 1..11: note = Description of Artificial Sequence: Synthetic peptide; note = XENP018555 vlCDR1
RASQSVSNDVA

SEQ ID NO: 6888 - protein, 7 aa, synthetic construct
  source 1..7: note = Description of Artificial Sequence: Synthetic peptide; note = XENP018555 vlCDR2
YASHRYT

SEQ ID NO: 6889 - protein, 9 aa, synthetic construct
  source 1..9: note = Description of Artificial Sequence: Synthetic peptide; note = XENP018555 vlCDR3
QQDYSSPRT

SEQ ID NO: 6890 - protein, 249 aa, synthetic construct
  source 1..249: note = Description of Artificial Sequence: Synthetic polypeptide; note = XENP018556 1G6_H1.60_L1_scFv(GKPGS)4
EVQLVESGGGLVKPGGSLRLSCAASGFTFSNYWMNWVRQAPGKGLEWVGGIRLKSNNYATHYAEPVKGRFTISRDDSKSTVYLQMNSLKTEDTAVYYCTRYYGNYGGYFDVWGAGTLVTVSSGKPGSGKPGSGKPGSGKPGSSIVMTQSPATLSVSPGERATLSCRASQSVSNDVAWYQQKPGQSPRLLINYASHRYTGVPDRFTGSGYGTEFTLTISSLQSEDFAVYFCQQDYSSPRTFGGGTKVEIK

SEQ ID NO: 6891 - protein, 122 aa, synthetic construct
  source 1..122: note = Description of Artificial Sequence: Synthetic polypeptide; note = VH of XENP018556
EVQLVESGGGLVKPGGSLRLSCAASGFTFSNYWMNWVRQAPGKGLEWVGGIRLKSNNYATHYAEPVKGRFTISRDDSKSTVYLQMNSLKTEDTAVYYCTRYYGNYGGYFDVWGAGTLVTVSS

SEQ ID NO: 6892 - protein, 107 aa, synthetic construct; identical to SEQ ID NO: 6247
  source 1..107: note = Description of Artificial Sequence: Synthetic polypeptide; note = VL of XENP018556

SEQ ID NO: 6893 - protein, 5 aa, synthetic construct
  source 1..5: note = Description of Artificial Sequence: Synthetic peptide; note = XENP018556 vhCDR1
NYWMN

SEQ ID NO: 6894 - protein, 19 aa, synthetic construct
  source 1..19: note = Description of Artificial Sequence: Synthetic peptide; note = XENP018556 vhCDR2
GIRLKSNNYATHYAEPVKG

SEQ ID NO: 6895 - protein, 11 aa, synthetic construct
  source 1..11: note = Description of Artificial Sequence: Synthetic peptide; note = XENP018556 vhCDR3
YYGNYGGYFDV

SEQ ID NO: 6896 - protein, 11 aa, synthetic construct
  source 1..11: note = Description of Artificial Sequence: Synthetic peptide; note = XENP018556 vlCDR1
RASQSVSNDVA

SEQ ID NO: 6897 - protein, 7 aa, synthetic construct
  source 1..7: note = Description of Artificial Sequence: Synthetic peptide; note = XENP018556 vlCDR2
YASHRYT

SEQ ID NO: 6898 - protein, 9 aa, synthetic construct
  source 1..9: note = Description of Artificial Sequence: Synthetic peptide; note = XENP018556 vlCDR3
QQDYSSPRT

SEQ ID NO: 6899 - protein, 249 aa, synthetic construct
  source 1..249: note = Description of Artificial Sequence: Synthetic polypeptide; note = XENP018557 1G6_H1.61_L1_scFv(GKPGS)4
EVQLVESGGGLVKPGGSLRLSCAASGFTFSNYWMNWVRQAPGKGLEWVGYIRLKSNNYATHYAEPVKGRFTISRDDSKSTVYLQMNSLKTEDTAVYYCTRYYGNYGGYFDVWGAGTLVTVSSGKPGSGKPGSGKPGSGKPGSSIVMTQSPATLSVSPGERATLSCRASQSVSNDVAWYQQKPGQSPRLLINYASHRYTGVPDRFTGSGYGTEFTLTISSLQSEDFAVYFCQQDYSSPRTFGGGTKVEIK

SEQ ID NO: 6900 - protein, 122 aa, synthetic construct
  source 1..122: note = Description of Artificial Sequence: Synthetic polypeptide; note = VH of XENP018557
EVQLVESGGGLVKPGGSLRLSCAASGFTFSNYWMNWVRQAPGKGLEWVGYIRLKSNNYATHYAEPVKGRFTISRDDSKSTVYLQMNSLKTEDTAVYYCTRYYGNYGGYFDVWGAGTLVTVSS

SEQ ID NO: 6901 - protein, 107 aa, synthetic construct; identical to SEQ ID NO: 6247
  source 1..107: note = Description of Artificial Sequence: Synthetic polypeptide; note = VL of XENP018557

SEQ ID NO: 6902 - protein, 5 aa, synthetic construct
  source 1..5: note = Description of Artificial Sequence: Synthetic peptide; note = XENP018557 vhCDR1
NYWMN

SEQ ID NO: 6903 - protein, 19 aa, synthetic construct
  source 1..19: note = Description of Artificial Sequence: Synthetic peptide; note = XENP018557 vhCDR2
YIRLKSNNYATHYAEPVKG

SEQ ID NO: 6904 - protein, 11 aa, synthetic construct
  source 1..11: note = Description of Artificial Sequence: Synthetic peptide; note = XENP018557 vhCDR3
YYGNYGGYFDV

SEQ ID NO: 6905 - protein, 11 aa, synthetic construct
  source 1..11: note = Description of Artificial Sequence: Synthetic peptide; note = XENP018557 vlCDR1
RASQSVSNDVA

SEQ ID NO: 6906 - protein, 7 aa, synthetic construct
  source 1..7: note = Description of Artificial Sequence: Synthetic peptide; note = XENP018557 vlCDR2
YASHRYT

SEQ ID NO: 6907 - protein, 9 aa, synthetic construct
  source 1..9: note = Description of Artificial Sequence: Synthetic peptide; note = XENP018557 vlCDR3
QQDYSSPRT

SEQ ID NO: 6908 - protein, 249 aa, synthetic construct
  source 1..249: note = Description of Artificial Sequence: Synthetic polypeptide; note = XENP018558 1G6_H1.62_L1_scFv(GKPGS)4
EVQLVESGGGLVKPGGSLRLSCAASGFTFSNYWMNWVRQAPGKGLEWVGIIRLKSNNYATHYAEPVKGRFTISRDDSKSTVYLQMNSLKTEDTAVYYCTRYYGNYGGYFDVWGAGTLVTVSSGKPGSGKPGSGKPGSGKPGSSIVMTQSPATLSVSPGERATLSCRASQSVSNDVAWYQQKPGQSPRLLINYASHRYTGVPDRFTGSGYGTEFTLTISSLQSEDFAVYFCQQDYSSPRTFGGGTKVEIK

SEQ ID NO: 6909 - protein, 122 aa, synthetic construct
  source 1..122: note = Description of Artificial Sequence: Synthetic polypeptide; note = VH of XENP018558
EVQLVESGGGLVKPGGSLRLSCAASGFTFSNYWMNWVRQAPGKGLEWVGIIRLKSNNYATHYAEPVKGRFTISRDDSKSTVYLQMNSLKTEDTAVYYCTRYYGNYGGYFDVWGAGTLVTVSS

SEQ ID NO: 6910 - protein, 107 aa, synthetic construct; identical to SEQ ID NO: 6247
  source 1..107: note = Description of Artificial Sequence: Synthetic polypeptide; note = VL of XENP018558

SEQ ID NO: 6911 - protein, 5 aa, synthetic construct
  source 1..5: note = Description of Artificial Sequence: Synthetic peptide; note = XENP018558 vhCDR1
NYWMN

SEQ ID NO: 6912 - protein, 19 aa, synthetic construct
  source 1..19: note = Description of Artificial Sequence: Synthetic peptide; note = XENP018558 vhCDR2
IIRLKSNNYATHYAEPVKG

SEQ ID NO: 6913 - protein, 11 aa, synthetic construct
  source 1..11: note = Description of Artificial Sequence: Synthetic peptide; note = XENP018558 vhCDR3
YYGNYGGYFDV

SEQ ID NO: 6914 - protein, 11 aa, synthetic construct
  source 1..11: note = Description of Artificial Sequence: Synthetic peptide; note = XENP018558 vlCDR1
RASQSVSNDVA

SEQ ID NO: 6915 - protein, 7 aa, synthetic construct
  source 1..7: note = Description of Artificial Sequence: Synthetic peptide; note = XENP018558 vlCDR2
YASHRYT

SEQ ID NO: 6916 - protein, 9 aa, synthetic construct
  source 1..9: note = Description of Artificial Sequence: Synthetic peptide; note = XENP018558 vlCDR3
QQDYSSPRT

SEQ ID NO: 6917 - protein, 249 aa, synthetic construct
  source 1..249: note = Description of Artificial Sequence: Synthetic polypeptide; note = XENP018559 1G6_H1.63_L1_scFv(GKPGS)4
EVQLVESGGGLVKPGGSLRLSCAASGFTFSNYWMNWVRQAPGKGLEWVGEVRLKSNNYATHYAEPVKGRFTISRDDSKSTVYLQMNSLKTEDTAVYYCTRYYGNYGGYFDVWGAGTLVTVSSGKPGSGKPGSGKPGSGKPGSSIVMTQSPATLSVSPGERATLSCRASQSVSNDVAWYQQKPGQSPRLLINYASHRYTGVPDRFTGSGYGTEFTLTISSLQSEDFAVYFCQQDYSSPRTFGGGTKVEIK

SEQ ID NO: 6918 - protein, 122 aa, synthetic construct
  source 1..122: note = Description of Artificial Sequence: Synthetic polypeptide; note = VH of XENP018559
EVQLVESGGGLVKPGGSLRLSCAASGFTFSNYWMNWVRQAPGKGLEWVGEVRLKSNNYATHYAEPVKGRFTISRDDSKSTVYLQMNSLKTEDTAVYYCTRYYGNYGGYFDVWGAGTLVTVSS

SEQ ID NO: 6919 - protein, 107 aa, synthetic construct; identical to SEQ ID NO: 6247
  source 1..107: note = Description of Artificial Sequence: Synthetic polypeptide; note = VL of XENP018559

SEQ ID NO: 6920 - protein, 5 aa, synthetic construct
  source 1..5: note = Description of Artificial Sequence: Synthetic peptide; note = XENP018559 vhCDR1
NYWMN

SEQ ID NO: 6921 - protein, 19 aa, synthetic construct
  source 1..19: note = Description of Artificial Sequence: Synthetic peptide; note = XENP018559 vhCDR2
EVRLKSNNYATHYAEPVKG

SEQ ID NO: 6922 - protein, 11 aa, synthetic construct
  source 1..11: note = Description of Artificial Sequence: Synthetic peptide; note = XENP018559 vhCDR3
YYGNYGGYFDV

SEQ ID NO: 6923 - protein, 11 aa, synthetic construct
  source 1..11: note = Description of Artificial Sequence: Synthetic peptide; note = XENP018559 vlCDR1
RASQSVSNDVA

SEQ ID NO: 6924 - protein, 7 aa, synthetic construct
  source 1..7: note = Description of Artificial Sequence: Synthetic peptide; note = XENP018559 vlCDR2
YASHRYT

SEQ ID NO: 6925 - protein, 9 aa, synthetic construct
  source 1..9: note = Description of Artificial Sequence: Synthetic peptide; note = XENP018559 vlCDR3
QQDYSSPRT

SEQ ID NO: 6926 - protein, 249 aa, synthetic construct
  source 1..249: note = Description of Artificial Sequence: Synthetic polypeptide; note = XENP018560 1G6_H1.64_L1_scFv(GKPGS)4
EVQLVESGGGLVKPGGSLRLSCAASGFTFSNYWMNWVRQAPGKGLEWVGEITLKSNNYATHYAEPVKGRFTISRDDSKSTVYLQMNSLKTEDTAVYYCTRYYGNYGGYFDVWGAGTLVTVSSGKPGSGKPGSGKPGSGKPGSSIVMTQSPATLSVSPGERATLSCRASQSVSNDVAWYQQKPGQSPRLLINYASHRYTGVPDRFTGSGYGTEFTLTISSLQSEDFAVYFCQQDYSSPRTFGGGTKVEIK

SEQ ID NO: 6927 - protein, 122 aa, synthetic construct
  source 1..122: note = Description of Artificial Sequence: Synthetic polypeptide; note = VH of XENP018560
EVQLVESGGGLVKPGGSLRLSCAASGFTFSNYWMNWVRQAPGKGLEWVGEITLKSNNYATHYAEPVKGRFTISRDDSKSTVYLQMNSLKTEDTAVYYCTRYYGNYGGYFDVWGAGTLVTVSS

SEQ ID NO: 6928 - protein, 107 aa, synthetic construct; identical to SEQ ID NO: 6247
  source 1..107: note = Description of Artificial Sequence: Synthetic polypeptide; note = VL of XENP018560

SEQ ID NO: 6929 - protein, 5 aa, synthetic construct
  source 1..5: note = Description of Artificial Sequence: Synthetic peptide; note = XENP018560 vhCDR1
NYWMN

SEQ ID NO: 6930 - protein, 19 aa, synthetic construct
  source 1..19: note = Description of Artificial Sequence: Synthetic peptide; note = XENP018560 vhCDR2
EITLKSNNYATHYAEPVKG

SEQ ID NO: 6931 - protein, 11 aa, synthetic construct
  source 1..11: note = Description of Artificial Sequence: Synthetic peptide; note = XENP018560 vhCDR3
YYGNYGGYFDV

SEQ ID NO: 6932 - protein, 11 aa, synthetic construct
  source 1..11: note = Description of Artificial Sequence: Synthetic peptide; note = XENP018560 vlCDR1
RASQSVSNDVA

SEQ ID NO: 6933 - protein, 7 aa, synthetic construct
  source 1..7: note = Description of Artificial Sequence: Synthetic peptide; note = XENP018560 vlCDR2
YASHRYT

SEQ ID NO: 6934 - protein, 9 aa, synthetic construct
  source 1..9: note = Description of Artificial Sequence: Synthetic peptide; note = XENP018560 vlCDR3
QQDYSSPRT

SEQ ID NO: 6935 - protein, 249 aa, synthetic construct
  source 1..249: note = Description of Artificial Sequence: Synthetic polypeptide; note = XENP018561 1G6_H1.65_L1_scFv(GKPGS)4
EVQLVESGGGLVKPGGSLRLSCAASGFTFSNYWMNWVRQAPGKGLEWVGEIKLKSNNYATHYAEPVKGRFTISRDDSKSTVYLQMNSLKTEDTAVYYCTRYYGNYGGYFDVWGAGTLVTVSSGKPGSGKPGSGKPGSGKPGSSIVMTQSPATLSVSPGERATLSCRASQSVSNDVAWYQQKPGQSPRLLINYASHRYTGVPDRFTGSGYGTEFTLTISSLQSEDFAVYFCQQDYSSPRTFGGGTKVEIK

SEQ ID NO: 6936 - protein, 122 aa, synthetic construct
  source 1..122: note = Description of Artificial Sequence: Synthetic polypeptide; note = VH of XENP018561
EVQLVESGGGLVKPGGSLRLSCAASGFTFSNYWMNWVRQAPGKGLEWVGEIKLKSNNYATHYAEPVKGRFTISRDDSKSTVYLQMNSLKTEDTAVYYCTRYYGNYGGYFDVWGAGTLVTVSS

SEQ ID NO: 6937 - protein, 107 aa, synthetic construct; identical to SEQ ID NO: 6247
  source 1..107: note = Description of Artificial Sequence: Synthetic polypeptide; note = VL of XENP018561

SEQ ID NO: 6938 - protein, 5 aa, synthetic construct
  source 1..5: note = Description of Artificial Sequence: Synthetic peptide; note = XENP018561 vhCDR1
NYWMN

SEQ ID NO: 6939 - protein, 19 aa, synthetic construct
  source 1..19: note = Description of Artificial Sequence: Synthetic peptide; note = XENP018561 vhCDR2
EIKLKSNNYATHYAEPVKG

SEQ ID NO: 6940 - protein, 11 aa, synthetic construct
  source 1..11: note = Description of Artificial Sequence: Synthetic peptide; note = XENP018561 vhCDR3
YYGNYGGYFDV

SEQ ID NO: 6941 - protein, 11 aa, synthetic construct
  source 1..11: note = Description of Artificial Sequence: Synthetic peptide; note = XENP018561 vlCDR1
RASQSVSNDVA

SEQ ID NO: 6942 - protein, 7 aa, synthetic construct
  source 1..7: note = Description of Artificial Sequence: Synthetic peptide; note = XENP018561 vlCDR2
YASHRYT

SEQ ID NO: 6943 - protein, 9 aa, synthetic construct
  source 1..9: note = Description of Artificial Sequence: Synthetic peptide; note = XENP018561 vlCDR3
QQDYSSPRT

SEQ ID NO: 6944 - protein, 249 aa, synthetic construct
  source 1..249: note = Description of Artificial Sequence: Synthetic polypeptide; note = XENP018562 1G6_H1.66_L1_scFv(GKPGS)4
EVQLVESGGGLVKPGGSLRLSCAASGFTFSNYWMNWVRQAPGKGLEWVGEIELKSNNYATHYAEPVKGRFTISRDDSKSTVYLQMNSLKTEDTAVYYCTRYYGNYGGYFDVWGAGTLVTVSSGKPGSGKPGSGKPGSGKPGSSIVMTQSPATLSVSPGERATLSCRASQSVSNDVAWYQQKPGQSPRLLINYASHRYTGVPDRFTGSGYGTEFTLTISSLQSEDFAVYFCQQDYSSPRTFGGGTKVEIK

SEQ ID NO: 6945 - protein, 122 aa, synthetic construct
  source 1..122: note = Description of Artificial Sequence: Synthetic polypeptide; note = VH of XENP018562
EVQLVESGGGLVKPGGSLRLSCAASGFTFSNYWMNWVRQAPGKGLEWVGEIELKSNNYATHYAEPVKGRFTISRDDSKSTVYLQMNSLKTEDTAVYYCTRYYGNYGGYFDVWGAGTLVTVSS

SEQ ID NO: 6946 - protein, 107 aa, synthetic construct; identical to SEQ ID NO: 6247
  source 1..107: note = Description of Artificial Sequence: Synthetic polypeptide; note = VL of XENP018562

SEQ ID NO: 6947 - protein, 5 aa, synthetic construct
  source 1..5: note = Description of Artificial Sequence: Synthetic peptide; note = XENP018562 vhCDR1
NYWMN

SEQ ID NO: 6948 - protein, 19 aa, synthetic construct
  source 1..19: note = Description of Artificial Sequence: Synthetic peptide; note = XENP018562 vhCDR2
EIELKSNNYATHYAEPVKG

SEQ ID NO: 6949 - protein, 11 aa, synthetic construct
  source 1..11: note = Description of Artificial Sequence: Synthetic peptide; note = XENP018562 vhCDR3
YYGNYGGYFDV

SEQ ID NO: 6950 - protein, 11 aa, synthetic construct
  source 1..11: note = Description of Artificial Sequence: Synthetic peptide; note = XENP018562 vlCDR1
RASQSVSNDVA

SEQ ID NO: 6951 - protein, 7 aa, synthetic construct
  source 1..7: note = Description of Artificial Sequence: Synthetic peptide; note = XENP018562 vlCDR2
YASHRYT

SEQ ID NO: 6952 - protein, 9 aa, synthetic construct
  source 1..9: note = Description of Artificial Sequence: Synthetic peptide; note = XENP018562 vlCDR3
QQDYSSPRT

SEQ ID NO: 6953 - protein, 249 aa, synthetic construct
  source 1..249: note = Description of Artificial Sequence: Synthetic polypeptide; note = XENP018563 1G6_H1.67_L1_scFv(GKPGS)4
EVQLVESGGGLVKPGGSLRLSCAASGFTFSNYWMNWVRQAPGKGLEWVGEIDLKSNNYATHYAEPVKGRFTISRDDSKSTVYLQMNSLKTEDTAVYYCTRYYGNYGGYFDVWGAGTLVTVSSGKPGSGKPGSGKPGSGKPGSSIVMTQSPATLSVSPGERATLSCRASQSVSNDVAWYQQKPGQSPRLLINYASHRYTGVPDRFTGSGYGTEFTLTISSLQSEDFAVYFCQQDYSSPRTFGGGTKVEIK

SEQ ID NO: 6954 - protein, 122 aa, synthetic construct
  source 1..122: note = Description of Artificial Sequence: Synthetic polypeptide; note = VH of XENP018563
EVQLVESGGGLVKPGGSLRLSCAASGFTFSNYWMNWVRQAPGKGLEWVGEIDLKSNNYATHYAEPVKGRFTISRDDSKSTVYLQMNSLKTEDTAVYYCTRYYGNYGGYFDVWGAGTLVTVSS

SEQ ID NO: 6955 - protein, 107 aa, synthetic construct; identical to SEQ ID NO: 6247
  source 1..107: note = Description of Artificial Sequence: Synthetic polypeptide; note = VL of XENP018563

SEQ ID NO: 6956 - protein, 5 aa, synthetic construct
  source 1..5: note = Description of Artificial Sequence: Synthetic peptide; note = XENP018563 vhCDR1
NYWMN

SEQ ID NO: 6957 - protein, 19 aa, synthetic construct
  source 1..19: note = Description of Artificial Sequence: Synthetic peptide; note = XENP018563 vhCDR2
EIDLKSNNYATHYAEPVKG

SEQ ID NO: 6958 - protein, 11 aa, synthetic construct
  source 1..11: note = Description of Artificial Sequence: Synthetic peptide; note = XENP018563 vhCDR3
YYGNYGGYFDV

SEQ ID NO: 6959 - protein, 11 aa, synthetic construct
  source 1..11: note = Description of Artificial Sequence: Synthetic peptide; note = XENP018563 vlCDR1
RASQSVSNDVA

SEQ ID NO: 6960 - protein, 7 aa, synthetic construct
  source 1..7: note = Description of Artificial Sequence: Synthetic peptide; note = XENP018563 vlCDR2
YASHRYT

SEQ ID NO: 6961 - protein, 9 aa, synthetic construct
  source 1..9: note = Description of Artificial Sequence: Synthetic peptide; note = XENP018563 vlCDR3
QQDYSSPRT

SEQ ID NO: 6962 - protein, 249 aa, synthetic construct
  source 1..249: note = Description of Artificial Sequence: Synthetic polypeptide; note = XENP018564 1G6_H1.68_L1_scFv(GKPGS)4
EVQLVESGGGLVKPGGSLRLSCAASGFTFSNYWMNWVRQAPGKGLEWVGEIHLKSNNYATHYAEPVKGRFTISRDDSKSTVYLQMNSLKTEDTAVYYCTRYYGNYGGYFDVWGAGTLVTVSSGKPGSGKPGSGKPGSGKPGSSIVMTQSPATLSVSPGERATLSCRASQSVSNDVAWYQQKPGQSPRLLINYASHRYTGVPDRFTGSGYGTEFTLTISSLQSEDFAVYFCQQDYSSPRTFGGGTKVEIK

SEQ ID NO: 6963 - protein, 122 aa, synthetic construct
  source 1..122: note = Description of Artificial Sequence: Synthetic polypeptide; note = VH of XENP018564
EVQLVESGGGLVKPGGSLRLSCAASGFTFSNYWMNWVRQAPGKGLEWVGEIHLKSNNYATHYAEPVKGRFTISRDDSKSTVYLQMNSLKTEDTAVYYCTRYYGNYGGYFDVWGAGTLVTVSS

SEQ ID NO: 6964 - protein, 107 aa, synthetic construct; identical to SEQ ID NO: 6247
  source 1..107: note = Description of Artificial Sequence: Synthetic polypeptide; note = VL of XENP018564

SEQ ID NO: 6965 - protein, 5 aa, synthetic construct
  source 1..5: note = Description of Artificial Sequence: Synthetic peptide; note = XENP018564 vhCDR1
NYWMN

SEQ ID NO: 6966 - protein, 19 aa, synthetic construct
  source 1..19: note = Description of Artificial Sequence: Synthetic peptide; note = XENP018564 vhCDR2
EIHLKSNNYATHYAEPVKG

SEQ ID NO: 6967 - protein, 11 aa, synthetic construct
  source 1..11: note = Description of Artificial Sequence: Synthetic peptide; note = XENP018564 vhCDR3
YYGNYGGYFDV

SEQ ID NO: 6968 - protein, 11 aa, synthetic construct
  source 1..11: note = Description of Artificial Sequence: Synthetic peptide; note = XENP018564 vlCDR1
RASQSVSNDVA

SEQ ID NO: 6969 - protein, 7 aa, synthetic construct
  source 1..7: note = Description of Artificial Sequence: Synthetic peptide; note = XENP018564 vlCDR2
YASHRYT

SEQ ID NO: 6970 - protein, 9 aa, synthetic construct
  source 1..9: note = Description of Artificial Sequence: Synthetic peptide; note = XENP018564 vlCDR3
QQDYSSPRT

SEQ ID NO: 6971 - protein, 249 aa, synthetic construct
  source 1..249: note = Description of Artificial Sequence: Synthetic polypeptide; note = XENP018565 1G6_H1.69_L1_scFv(GKPGS)4
EVQLVESGGGLVKPGGSLRLSCAASGFTFSNYWMNWVRQAPGKGLEWVGEISLKSNNYATHYAEPVKGRFTISRDDSKSTVYLQMNSLKTEDTAVYYCTRYYGNYGGYFDVWGAGTLVTVSSGKPGSGKPGSGKPGSGKPGSSIVMTQSPATLSVSPGERATLSCRASQSVSNDVAWYQQKPGQSPRLLINYASHRYTGVPDRFTGSGYGTEFTLTISSLQSEDFAVYFCQQDYSSPRTFGGGTKVEIK

SEQ ID NO: 6972 - protein, 122 aa, synthetic construct
  source 1..122: note = Description of Artificial Sequence: Synthetic polypeptide; note = VH of XENP018565
EVQLVESGGGLVKPGGSLRLSCAASGFTFSNYWMNWVRQAPGKGLEWVGEISLKSNNYATHYAEPVKGRFTISRDDSKSTVYLQMNSLKTEDTAVYYCTRYYGNYGGYFDVWGAGTLVTVSS

SEQ ID NO: 6973 - protein, 107 aa, synthetic construct; identical to SEQ ID NO: 6247
  source 1..107: note = Description of Artificial Sequence: Synthetic polypeptide; note = VL of XENP018565

SEQ ID NO: 6974 - protein, 5 aa, synthetic construct
  source 1..5: note = Description of Artificial Sequence: Synthetic peptide; note = XENP018565 vhCDR1
NYWMN

SEQ ID NO: 6975 - protein, 19 aa, synthetic construct
  source 1..19: note = Description of Artificial Sequence: Synthetic peptide; note = XENP018565 vhCDR2
EISLKSNNYATHYAEPVKG

SEQ ID NO: 6976 - protein, 11 aa, synthetic construct
  source 1..11: note = Description of Artificial Sequence: Synthetic peptide; note = XENP018565 vhCDR3
YYGNYGGYFDV

SEQ ID NO: 6977 - protein, 11 aa, synthetic construct
  source 1..11: note = Description of Artificial Sequence: Synthetic peptide; note = XENP018565 vlCDR1
RASQSVSNDVA

SEQ ID NO: 6978 - protein, 7 aa, synthetic construct
  source 1..7: note = Description of Artificial Sequence: Synthetic peptide; note = XENP018565 vlCDR2
YASHRYT

SEQ ID NO: 6979 - protein, 9 aa, synthetic construct
  source 1..9: note = Description of Artificial Sequence: Synthetic peptide; note = XENP018565 vlCDR3
QQDYSSPRT

SEQ ID NO: 6980 - protein, 249 aa, synthetic construct
  source 1..249: note = Description of Artificial Sequence: Synthetic polypeptide; note = XENP018566 1G6_H1.70_L1_scFv(GKPGS)4
EVQLVESGGGLVKPGGSLRLSCAASGFTFSNYWMNWVRQAPGKGLEWVGEIGLKSNNYATHYAEPVKGRFTISRDDSKSTVYLQMNSLKTEDTAVYYCTRYYGNYGGYFDVWGAGTLVTVSSGKPGSGKPGSGKPGSGKPGSSIVMTQSPATLSVSPGERATLSCRASQSVSNDVAWYQQKPGQSPRLLINYASHRYTGVPDRFTGSGYGTEFTLTISSLQSEDFAVYFCQQDYSSPRTFGGGTKVEIK

SEQ ID NO: 6981 - protein, 122 aa, synthetic construct
  source 1..122: note = Description of Artificial Sequence: Synthetic polypeptide; note = VH of XENP018566
EVQLVESGGGLVKPGGSLRLSCAASGFTFSNYWMNWVRQAPGKGLEWVGEIGLKSNNYATHYAEPVKGRFTISRDDSKSTVYLQMNSLKTEDTAVYYCTRYYGNYGGYFDVWGAGTLVTVSS

SEQ ID NO: 6982 - protein, 107 aa, synthetic construct; identical to SEQ ID NO: 6247
  source 1..107: note = Description of Artificial Sequence: Synthetic polypeptide; note = VL of XENP018566

SEQ ID NO: 6983 - protein, 5 aa, synthetic construct
  source 1..5: note = Description of Artificial Sequence: Synthetic peptide; note = XENP018566 vhCDR1
NYWMN

SEQ ID NO: 6984 - protein, 19 aa, synthetic construct
  source 1..19: note = Description of Artificial Sequence: Synthetic peptide; note = XENP018566 vhCDR2
EIGLKSNNYATHYAEPVKG

SEQ ID NO: 6985 - protein, 11 aa, synthetic construct
  source 1..11: note = Description of Artificial Sequence: Synthetic peptide; note = XENP018566 vhCDR3
YYGNYGGYFDV

SEQ ID NO: 6986 - protein, 11 aa, synthetic construct
  source 1..11: note = Description of Artificial Sequence: Synthetic peptide; note = XENP018566 vlCDR1
RASQSVSNDVA

SEQ ID NO: 6987 - protein, 7 aa, synthetic construct
  source 1..7: note = Description of Artificial Sequence: Synthetic peptide; note = XENP018566 vlCDR2
YASHRYT

SEQ ID NO: 6988 - protein, 9 aa, synthetic construct
  source 1..9: note = Description of Artificial Sequence: Synthetic peptide; note = XENP018566 vlCDR3
QQDYSSPRT

SEQ ID NO: 6989 - protein, 249 aa, synthetic construct
  source 1..249: note = Description of Artificial Sequence: Synthetic polypeptide; note = XENP018567 1G6_H1.71_L1_scFv(GKPGS)4
EVQLVESGGGLVKPGGSLRLSCAASGFTFSNYWMNWVRQAPGKGLEWVGEIYLKSNNYATHYAEPVKGRFTISRDDSKSTVYLQMNSLKTEDTAVYYCTRYYGNYGGYFDVWGAGTLVTVSSGKPGSGKPGSGKPGSGKPGSSIVMTQSPATLSVSPGERATLSCRASQSVSNDVAWYQQKPGQSPRLLINYASHRYTGVPDRFTGSGYGTEFTLTISSLQSEDFAVYFCQQDYSSPRTFGGGTKVEIK

SEQ ID NO: 6990 - protein, 122 aa, synthetic construct
  source 1..122: note = Description of Artificial Sequence: Synthetic polypeptide; note = VH of XENP018567
EVQLVESGGGLVKPGGSLRLSCAASGFTFSNYWMNWVRQAPGKGLEWVGEIYLKSNNYATHYAEPVKGRFTISRDDSKSTVYLQMNSLKTEDTAVYYCTRYYGNYGGYFDVWGAGTLVTVSS

SEQ ID NO: 6991 - protein, 107 aa, synthetic construct; identical to SEQ ID NO: 6247
  source 1..107: note = Description of Artificial Sequence: Synthetic polypeptide; note = VL of XENP018567

SEQ ID NO: 6992 - protein, 5 aa, synthetic construct
  source 1..5: note = Description of Artificial Sequence: Synthetic peptide; note = XENP018567 vhCDR1
NYWMN

SEQ ID NO: 6993 - protein, 19 aa, synthetic construct
  source 1..19: note = Description of Artificial Sequence: Synthetic peptide; note = XENP018567 vhCDR2
EIYLKSNNYATHYAEPVKG

SEQ ID NO: 6994 - protein, 11 aa, synthetic construct
  source 1..11: note = Description of Artificial Sequence: Synthetic peptide; note = XENP018567 vhCDR3
YYGNYGGYFDV

SEQ ID NO: 6995 - protein, 11 aa, synthetic construct
  source 1..11: note = Description of Artificial Sequence: Synthetic peptide; note = XENP018567 vlCDR1
RASQSVSNDVA

SEQ ID NO: 6996 - protein, 7 aa, synthetic construct
  source 1..7: note = Description of Artificial Sequence: Synthetic peptide; note = XENP018567 vlCDR2
YASHRYT

SEQ ID NO: 6997 - protein, 9 aa, synthetic construct
  source 1..9: note = Description of Artificial Sequence: Synthetic peptide; note = XENP018567 vlCDR3
QQDYSSPRT

SEQ ID NO: 6998 - protein, 249 aa, synthetic construct
  source 1..249: note = Description of Artificial Sequence: Synthetic polypeptide; note = XENP018568 1G6_H1.72_L1_scFv(GKPGS)4
EVQLVESGGGLVKPGGSLRLSCAASGFTFSNYWMNWVRQAPGKGLEWVGEIILKSNNYATHYAEPVKGRFTISRDDSKSTVYLQMNSLKTEDTAVYYCTRYYGNYGGYFDVWGAGTLVTVSSGKPGSGKPGSGKPGSGKPGSSIVMTQSPATLSVSPGERATLSCRASQSVSNDVAWYQQKPGQSPRLLINYASHRYTGVPDRFTGSGYGTEFTLTISSLQSEDFAVYFCQQDYSSPRTFGGGTKVEIK

SEQ ID NO: 6999 - protein, 122 aa, synthetic construct
  source 1..122: note = Description of Artificial Sequence: Synthetic polypeptide; note = VH of XENP018568
EVQLVESGGGLVKPGGSLRLSCAASGFTFSNYWMNWVRQAPGKGLEWVGEIILKSNNYATHYAEPVKGRFTISRDDSKSTVYLQMNSLKTEDTAVYYCTRYYGNYGGYFDVWGAGTLVTVSS

SEQ ID NO: 7000 - protein, 107 aa, synthetic construct; identical to SEQ ID NO: 6247
  source 1..107: note = Description of Artificial Sequence: Synthetic polypeptide; note = VL of XENP018568

SEQ ID NO: 7001 - protein, 5 aa, synthetic construct
  source 1..5: note = Description of Artificial Sequence: Synthetic peptide; note = XENP018568 vhCDR1
NYWMN

SEQ ID NO: 7002 - protein, 19 aa, synthetic construct
  source 1..19: note = Description of Artificial Sequence: Synthetic peptide; note = XENP018568 vhCDR2
EIILKSNNYATHYAEPVKG

SEQ ID NO: 7003 - protein, 11 aa, synthetic construct
  source 1..11: note = Description of Artificial Sequence: Synthetic peptide; note = XENP018568 vhCDR3
YYGNYGGYFDV

SEQ ID NO: 7004 - protein, 11 aa, synthetic construct
  source 1..11: note = Description of Artificial Sequence: Synthetic peptide; note = XENP018568 vlCDR1
RASQSVSNDVA

SEQ ID NO: 7005 - protein, 7 aa, synthetic construct
  source 1..7: note = Description of Artificial Sequence: Synthetic peptide; note = XENP018568 vlCDR2
YASHRYT

SEQ ID NO: 7006 - protein, 9 aa, synthetic construct
  source 1..9: note = Description of Artificial Sequence: Synthetic peptide; note = XENP018568 vlCDR3
QQDYSSPRT

SEQ ID NO: 7007 - protein, 249 aa, synthetic construct
  source 1..249: note = Description of Artificial Sequence: Synthetic polypeptide; note = XENP018569 1G6_H1.73_L1_scFv(GKPGS)4
EVQLVESGGGLVKPGGSLRLSCAASGFTFSNYWMNWVRQAPGKGLEWVGEIWLKSNNYATHYAEPVKGRFTISRDDSKSTVYLQMNSLKTEDTAVYYCTRYYGNYGGYFDVWGAGTLVTVSSGKPGSGKPGSGKPGSGKPGSSIVMTQSPATLSVSPGERATLSCRASQSVSNDVAWYQQKPGQSPRLLINYASHRYTGVPDRFTGSGYGTEFTLTISSLQSEDFAVYFCQQDYSSPRTFGGGTKVEIK

SEQ ID NO: 7008 - protein, 122 aa, synthetic construct
  source 1..122: note = Description of Artificial Sequence: Synthetic polypeptide; note = VH of XENP018569
EVQLVESGGGLVKPGGSLRLSCAASGFTFSNYWMNWVRQAPGKGLEWVGEIWLKSNNYATHYAEPVKGRFTISRDDSKSTVYLQMNSLKTEDTAVYYCTRYYGNYGGYFDVWGAGTLVTVSS

SEQ ID NO: 7009 - protein, 107 aa, synthetic construct; identical to SEQ ID NO: 6247
  source 1..107: note = Description of Artificial Sequence: Synthetic polypeptide; note = VL of XENP018569

SEQ ID NO: 7010 - protein, 5 aa, synthetic construct
  source 1..5: note = Description of Artificial Sequence: Synthetic peptide; note = XENP018569 vhCDR1
NYWMN

SEQ ID NO: 7011 - protein, 19 aa, synthetic construct
  source 1..19: note = Description of Artificial Sequence: Synthetic peptide; note = XENP018569 vhCDR2
EIWLKSNNYATHYAEPVKG

SEQ ID NO: 7012 - protein, 11 aa, synthetic construct
  source 1..11: note = Description of Artificial Sequence: Synthetic peptide; note = XENP018569 vhCDR3
YYGNYGGYFDV

SEQ ID NO: 7013 - protein, 11 aa, synthetic construct
  source 1..11: note = Description of Artificial Sequence: Synthetic peptide; note = XENP018569 vlCDR1
RASQSVSNDVA

SEQ ID NO: 7014 - protein, 7 aa, synthetic construct
  source 1..7: note = Description of Artificial Sequence: Synthetic peptide; note = XENP018569 vlCDR2
YASHRYT

SEQ ID NO: 7015 - protein, 9 aa, synthetic construct
  source 1..9: note = Description of Artificial Sequence: Synthetic peptide; note = XENP018569 vlCDR3
QQDYSSPRT

SEQ ID NO: 7016 - protein, 249 aa, synthetic construct
  source 1..249: note = Description of Artificial Sequence: Synthetic polypeptide; note = XENP018570 1G6_H1.74_L1_scFv(GKPGS)4
EVQLVESGGGLVKPGGSLRLSCAASGFTFSNYWMNWVRQAPGKGLEWVGEIRIKSNNYATHYAEPVKGRFTISRDDSKSTVYLQMNSLKTEDTAVYYCTRYYGNYGGYFDVWGAGTLVTVSSGKPGSGKPGSGKPGSGKPGSSIVMTQSPATLSVSPGERATLSCRASQSVSNDVAWYQQKPGQSPRLLINYASHRYTGVPDRFTGSGYGTEFTLTISSLQSEDFAVYFCQQDYSSPRTFGGGTKVEIK

SEQ ID NO: 7017 - protein, 122 aa, synthetic construct
  source 1..122: note = Description of Artificial Sequence: Synthetic polypeptide; note = VH of XENP018570
EVQLVESGGGLVKPGGSLRLSCAASGFTFSNYWMNWVRQAPGKGLEWVGEIRIKSNNYATHYAEPVKGRFTISRDDSKSTVYLQMNSLKTEDTAVYYCTRYYGNYGGYFDVWGAGTLVTVSS

SEQ ID NO: 7018 - protein, 107 aa, synthetic construct; identical to SEQ ID NO: 6247
  source 1..107: note = Description of Artificial Sequence: Synthetic polypeptide; note = VL of XENP018570

SEQ ID NO: 7019 - protein, 5 aa, synthetic construct
  source 1..5: note = Description of Artificial Sequence: Synthetic peptide; note = XENP018570 vhCDR1
NYWMN

SEQ ID NO: 7020 - protein, 19 aa, synthetic construct
  source 1..19: note = Description of Artificial Sequence: Synthetic peptide; note = XENP018570 vhCDR2
EIRIKSNNYATHYAEPVKG

SEQ ID NO: 7021 - protein, 11 aa, synthetic construct
  source 1..11: note = Description of Artificial Sequence: Synthetic peptide; note = XENP018570 vhCDR3
YYGNYGGYFDV

SEQ ID NO: 7022 - protein, 11 aa, synthetic construct
  source 1..11: note = Description of Artificial Sequence: Synthetic peptide; note = XENP018570 vlCDR1
RASQSVSNDVA

SEQ ID NO: 7023 - protein, 7 aa, synthetic construct
  source 1..7: note = Description of Artificial Sequence: Synthetic peptide; note = XENP018570 vlCDR2
YASHRYT

SEQ ID NO: 7024 - protein, 9 aa, synthetic construct
  source 1..9: note = Description of Artificial Sequence: Synthetic peptide; note = XENP018570 vlCDR3
QQDYSSPRT

SEQ ID NO: 7025 - protein, 249 aa, synthetic construct
  source 1..249: note = Description of Artificial Sequence: Synthetic polypeptide; note = XENP018571 1G6_H1.75_L1_scFv(GKPGS)4
EVQLVESGGGLVKPGGSLRLSCAASGFTFSNYWMNWVRQAPGKGLEWVGEIRFKSNNYATHYAEPVKGRFTISRDDSKSTVYLQMNSLKTEDTAVYYCTRYYGNYGGYFDVWGAGTLVTVSSGKPGSGKPGSGKPGSGKPGSSIVMTQSPATLSVSPGERATLSCRASQSVSNDVAWYQQKPGQSPRLLINYASHRYTGVPDRFTGSGYGTEFTLTISSLQSEDFAVYFCQQDYSSPRTFGGGTKVEIK

SEQ ID NO: 7026 - protein, 122 aa, synthetic construct
  source 1..122: note = Description of Artificial Sequence: Synthetic polypeptide; note = VH of XENP018571
EVQLVESGGGLVKPGGSLRLSCAASGFTFSNYWMNWVRQAPGKGLEWVGEIRFKSNNYATHYAEPVKGRFTISRDDSKSTVYLQMNSLKTEDTAVYYCTRYYGNYGGYFDVWGAGTLVTVSS

SEQ ID NO: 7027 - protein, 107 aa, synthetic construct; identical to SEQ ID NO: 6247
  source 1..107: note = Description of Artificial Sequence: Synthetic polypeptide; note = VL of XENP018571

SEQ ID NO: 7028 - protein, 5 aa, synthetic construct
  source 1..5: note = Description of Artificial Sequence: Synthetic peptide; note = XENP018571 vhCDR1
NYWMN

SEQ ID NO: 7029 - protein, 19 aa, synthetic construct
  source 1..19: note = Description of Artificial Sequence: Synthetic peptide; note = XENP018571 vhCDR2
EIRFKSNNYATHYAEPVKG

SEQ ID NO: 7030 - protein, 11 aa, synthetic construct
  source 1..11: note = Description of Artificial Sequence: Synthetic peptide; note = XENP018571 vhCDR3
YYGNYGGYFDV

SEQ ID NO: 7031 - protein, 11 aa, synthetic construct
  source 1..11: note = Description of Artificial Sequence: Synthetic peptide; note = XENP018571 vlCDR1
RASQSVSNDVA

SEQ ID NO: 7032 - protein, 7 aa, synthetic construct
  source 1..7: note = Description of Artificial Sequence: Synthetic peptide; note = XENP018571 vlCDR2
YASHRYT

SEQ ID NO: 7033 - protein, 9 aa, synthetic construct
  source 1..9: note = Description of Artificial Sequence: Synthetic peptide; note = XENP018571 vlCDR3
QQDYSSPRT

SEQ ID NO: 7034 - protein, 249 aa, synthetic construct
  source 1..249: note = Description of Artificial Sequence: Synthetic polypeptide; note = XENP018572 1G6_H1.76_L1_scFv(GKPGS)4
EVQLVESGGGLVKPGGSLRLSCAASGFTFSNYWMNWVRQAPGKGLEWVGEIRVKSNNYATHYAEPVKGRFTISRDDSKSTVYLQMNSLKTEDTAVYYCTRYYGNYGGYFDVWGAGTLVTVSSGKPGSGKPGSGKPGSGKPGSSIVMTQSPATLSVSPGERATLSCRASQSVSNDVAWYQQKPGQSPRLLINYASHRYTGVPDRFTGSGYGTEFTLTISSLQSEDFAVYFCQQDYSSPRTFGGGTKVEIK

SEQ ID NO: 7035 - protein, 122 aa, synthetic construct
  source 1..122: note = Description of Artificial Sequence: Synthetic polypeptide; note = VH of XENP018572
EVQLVESGGGLVKPGGSLRLSCAASGFTFSNYWMNWVRQAPGKGLEWVGEIRVKSNNYATHYAEPVKGRFTISRDDSKSTVYLQMNSLKTEDTAVYYCTRYYGNYGGYFDVWGAGTLVTVSS

SEQ ID NO: 7036 - protein, 107 aa, synthetic construct; identical to SEQ ID NO: 6247
  source 1..107: note = Description of Artificial Sequence: Synthetic polypeptide; note = VL of XENP018572

SEQ ID NO: 7037 - protein, 5 aa, synthetic construct
  source 1..5: note = Description of Artificial Sequence: Synthetic peptide; note = XENP018572 vhCDR1
NYWMN

SEQ ID NO: 7038 - protein, 19 aa, synthetic construct
  source 1..19: note = Description of Artificial Sequence: Synthetic peptide; note = XENP018572 vhCDR2
EIRVKSNNYATHYAEPVKG

SEQ ID NO: 7039 - protein, 11 aa, synthetic construct
  source 1..11: note = Description of Artificial Sequence: Synthetic peptide; note = XENP018572 vhCDR3
YYGNYGGYFDV

SEQ ID NO: 7040 - protein, 11 aa, synthetic construct
  source 1..11: note = Description of Artificial Sequence: Synthetic peptide; note = XENP018572 vlCDR1
RASQSVSNDVA

SEQ ID NO: 7041 - protein, 7 aa, synthetic construct
  source 1..7: note = Description of Artificial Sequence: Synthetic peptide; note = XENP018572 vlCDR2
YASHRYT

SEQ ID NO: 7042 - protein, 9 aa, synthetic construct
  source 1..9: note = Description of Artificial Sequence: Synthetic peptide; note = XENP018572 vlCDR3
QQDYSSPRT

SEQ ID NO: 7043 - protein, 249 aa, synthetic construct
  source 1..249: note = Description of Artificial Sequence: Synthetic polypeptide; note = XENP018573 1G6_H1.77_L1_scFv(GKPGS)4
EVQLVESGGGLVKPGGSLRLSCAASGFTFSNYWMNWVRQAPGKGLEWVGEIRYKSNNYATHYAEPVKGRFTISRDDSKSTVYLQMNSLKTEDTAVYYCTRYYGNYGGYFDVWGAGTLVTVSSGKPGSGKPGSGKPGSGKPGSSIVMTQSPATLSVSPGERATLSCRASQSVSNDVAWYQQKPGQSPRLLINYASHRYTGVPDRFTGSGYGTEFTLTISSLQSEDFAVYFCQQDYSSPRTFGGGTKVEIK

SEQ ID NO: 7044 - protein, 122 aa, synthetic construct
  source 1..122: note = Description of Artificial Sequence: Synthetic polypeptide; note = VH of XENP018573
EVQLVESGGGLVKPGGSLRLSCAASGFTFSNYWMNWVRQAPGKGLEWVGEIRYKSNNYATHYAEPVKGRFTISRDDSKSTVYLQMNSLKTEDTAVYYCTRYYGNYGGYFDVWGAGTLVTVSS

SEQ ID NO: 7045 - protein, 107 aa, synthetic construct; identical to SEQ ID NO: 6247
  source 1..107: note = Description of Artificial Sequence: Synthetic polypeptide; note = VL of XENP018573

SEQ ID NO: 7046 - protein, 5 aa, synthetic construct
  source 1..5: note = Description of Artificial Sequence: Synthetic peptide; note = XENP018573 vhCDR1
NYWMN

SEQ ID NO: 7047 - protein, 19 aa, synthetic construct
  source 1..19: note = Description of Artificial Sequence: Synthetic peptide; note = XENP018573 vhCDR2
EIRYKSNNYATHYAEPVKG

SEQ ID NO: 7048 - protein, 11 aa, synthetic construct
  source 1..11: note = Description of Artificial Sequence: Synthetic peptide; note = XENP018573 vhCDR3
YYGNYGGYFDV

SEQ ID NO: 7049 - protein, 11 aa, synthetic construct
  source 1..11: note = Description of Artificial Sequence: Synthetic peptide; note = XENP018573 vlCDR1
RASQSVSNDVA

SEQ ID NO: 7050 - protein, 7 aa, synthetic construct
  source 1..7: note = Description of Artificial Sequence: Synthetic peptide; note = XENP018573 vlCDR2
YASHRYT

SEQ ID NO: 7051 - protein, 9 aa, synthetic construct
  source 1..9: note = Description of Artificial Sequence: Synthetic peptide; note = XENP018573 vlCDR3
QQDYSSPRT

SEQ ID NO: 7052 - protein, 249 aa, synthetic construct
  source 1..249: note = Description of Artificial Sequence: Synthetic polypeptide; note = XENP018574 1G6_H1.78_L1_scFv(GKPGS)4
EVQLVESGGGLVKPGGSLRLSCAASGFTFSNYWMNWVRQAPGKGLEWVGEIRWKSNNYATHYAEPVKGRFTISRDDSKSTVYLQMNSLKTEDTAVYYCTRYYGNYGGYFDVWGAGTLVTVSSGKPGSGKPGSGKPGSGKPGSSIVMTQSPATLSVSPGERATLSCRASQSVSNDVAWYQQKPGQSPRLLINYASHRYTGVPDRFTGSGYGTEFTLTISSLQSEDFAVYFCQQDYSSPRTFGGGTKVEIK

SEQ ID NO: 7053 - protein, 122 aa, synthetic construct
  source 1..122: note = Description of Artificial Sequence: Synthetic polypeptide; note = VH of XENP018574
EVQLVESGGGLVKPGGSLRLSCAASGFTFSNYWMNWVRQAPGKGLEWVGEIRWKSNNYATHYAEPVKGRFTISRDDSKSTVYLQMNSLKTEDTAVYYCTRYYGNYGGYFDVWGAGTLVTVSS

SEQ ID NO: 7054 - protein, 107 aa, synthetic construct; identical to SEQ ID NO: 6247
  source 1..107: note = Description of Artificial Sequence: Synthetic polypeptide; note = VL of XENP018574

SEQ ID NO: 7055 - protein, 5 aa, synthetic construct
  source 1..5: note = Description of Artificial Sequence: Synthetic peptide; note = XENP018574 vhCDR1
NYWMN

SEQ ID NO: 7056 - protein, 19 aa, synthetic construct
  source 1..19: note = Description of Artificial Sequence: Synthetic peptide; note = XENP018574 vhCDR2
EIRWKSNNYATHYAEPVKG

SEQ ID NO: 7057 - protein, 11 aa, synthetic construct
  source 1..11: note = Description of Artificial Sequence: Synthetic peptide; note = XENP018574 vhCDR3
YYGNYGGYFDV

SEQ ID NO: 7058 - protein, 11 aa, synthetic construct
  source 1..11: note = Description of Artificial Sequence: Synthetic peptide; note = XENP018574 vlCDR1
RASQSVSNDVA

SEQ ID NO: 7059 - protein, 7 aa, synthetic construct
  source 1..7: note = Description of Artificial Sequence: Synthetic peptide; note = XENP018574 vlCDR2
YASHRYT

SEQ ID NO: 7060 - protein, 9 aa, synthetic construct
  source 1..9: note = Description of Artificial Sequence: Synthetic peptide; note = XENP018574 vlCDR3
QQDYSSPRT

SEQ ID NO: 7061 - protein, 249 aa, synthetic construct
  source 1..249: note = Description of Artificial Sequence: Synthetic polypeptide; note = XENP018575 1G6_H1.79_L1_scFv(GKPGS)4
EVQLVESGGGLVKPGGSLRLSCAASGFTFSNYWMNWVRQAPGKGLEWVGEIRDKSNNYATHYAEPVKGRFTISRDDSKSTVYLQMNSLKTEDTAVYYCTRYYGNYGGYFDVWGAGTLVTVSSGKPGSGKPGSGKPGSGKPGSSIVMTQSPATLSVSPGERATLSCRASQSVSNDVAWYQQKPGQSPRLLINYASHRYTGVPDRFTGSGYGTEFTLTISSLQSEDFAVYFCQQDYSSPRTFGGGTKVEIK

SEQ ID NO: 7062 - protein, 122 aa, synthetic construct
  source 1..122: note = Description of Artificial Sequence: Synthetic polypeptide; note = VH of XENP018575
EVQLVESGGGLVKPGGSLRLSCAASGFTFSNYWMNWVRQAPGKGLEWVGEIRDKSNNYATHYAEPVKGRFTISRDDSKSTVYLQMNSLKTEDTAVYYCTRYYGNYGGYFDVWGAGTLVTVSS

SEQ ID NO: 7063 - protein, 107 aa, synthetic construct; identical to SEQ ID NO: 6247
  source 1..107: note = Description of Artificial Sequence: Synthetic polypeptide; note = VL of XENP018575

SEQ ID NO: 7064 - protein, 5 aa, synthetic construct
  source 1..5: note = Description of Artificial Sequence: Synthetic peptide; note = XENP018575 vhCDR1
NYWMN

SEQ ID NO: 7065 - protein, 19 aa, synthetic construct
  source 1..19: note = Description of Artificial Sequence: Synthetic peptide; note = XENP018575 vhCDR2
EIRDKSNNYATHYAEPVKG

SEQ ID NO: 7066 - protein, 11 aa, synthetic construct
  source 1..11: note = Description of Artificial Sequence: Synthetic peptide; note = XENP018575 vhCDR3
YYGNYGGYFDV

SEQ ID NO: 7067 - protein, 11 aa, synthetic construct
  source 1..11: note = Description of Artificial Sequence: Synthetic peptide; note = XENP018575 vlCDR1
RASQSVSNDVA

SEQ ID NO: 7068 - protein, 7 aa, synthetic construct
  source 1..7: note = Description of Artificial Sequence: Synthetic peptide; note = XENP018575 vlCDR2
YASHRYT

SEQ ID NO: 7069 - protein, 9 aa, synthetic construct
  source 1..9: note = Description of Artificial Sequence: Synthetic peptide; note = XENP018575 vlCDR3
QQDYSSPRT

SEQ ID NO: 7070 - protein, 249 aa, synthetic construct
  source 1..249: note = Description of Artificial Sequence: Synthetic polypeptide; note = XENP018576 1G6_H1.80_L1_scFv(GKPGS)4
EVQLVESGGGLVKPGGSLRLSCAASGFTFSNYWMNWVRQAPGKGLEWVGEIRAKSNNYATHYAEPVKGRFTISRDDSKSTVYLQMNSLKTEDTAVYYCTRYYGNYGGYFDVWGAGTLVTVSSGKPGSGKPGSGKPGSGKPGSSIVMTQSPATLSVSPGERATLSCRASQSVSNDVAWYQQKPGQSPRLLINYASHRYTGVPDRFTGSGYGTEFTLTISSLQSEDFAVYFCQQDYSSPRTFGGGTKVEIK

SEQ ID NO: 7071 - protein, 122 aa, synthetic construct
  source 1..122: note = Description of Artificial Sequence: Synthetic polypeptide; note = VH of XENP018576
EVQLVESGGGLVKPGGSLRLSCAASGFTFSNYWMNWVRQAPGKGLEWVGEIRAKSNNYATHYAEPVKGRFTISRDDSKSTVYLQMNSLKTEDTAVYYCTRYYGNYGGYFDVWGAGTLVTVSS

SEQ ID NO: 7072 - protein, 107 aa, synthetic construct; identical to SEQ ID NO: 6247
  source 1..107: note = Description of Artificial Sequence: Synthetic polypeptide; note = VL of XENP018576

SEQ ID NO: 7073 - protein, 5 aa, synthetic construct
  source 1..5: note = Description of Artificial Sequence: Synthetic peptide; note = XENP018576 vhCDR1
NYWMN

SEQ ID NO: 7074 - protein, 19 aa, synthetic construct
  source 1..19: note = Description of Artificial Sequence: Synthetic peptide; note = XENP018576 vhCDR2
EIRAKSNNYATHYAEPVKG

SEQ ID NO: 7075 - protein, 11 aa, synthetic construct
  source 1..11: note = Description of Artificial Sequence: Synthetic peptide; note = XENP018576 vhCDR3
YYGNYGGYFDV

SEQ ID NO: 7076 - protein, 11 aa, synthetic construct
  source 1..11: note = Description of Artificial Sequence: Synthetic peptide; note = XENP018576 vlCDR1
RASQSVSNDVA

SEQ ID NO: 7077 - protein, 7 aa, synthetic construct
  source 1..7: note = Description of Artificial Sequence: Synthetic peptide; note = XENP018576 vlCDR2
YASHRYT

SEQ ID NO: 7078 - protein, 9 aa, synthetic construct
  source 1..9: note = Description of Artificial Sequence: Synthetic peptide; note = XENP018576 vlCDR3
QQDYSSPRT

SEQ ID NO: 7079 - protein, 249 aa, synthetic construct
  source 1..249: note = Description of Artificial Sequence: Synthetic polypeptide; note = XENP018577 1G6_H1.81_L1_scFv(GKPGS)4
EVQLVESGGGLVKPGGSLRLSCAASGFTFSNYWMNWVRQAPGKGLEWVGEIRQKSNNYATHYAEPVKGRFTISRDDSKSTVYLQMNSLKTEDTAVYYCTRYYGNYGGYFDVWGAGTLVTVSSGKPGSGKPGSGKPGSGKPGSSIVMTQSPATLSVSPGERATLSCRASQSVSNDVAWYQQKPGQSPRLLINYASHRYTGVPDRFTGSGYGTEFTLTISSLQSEDFAVYFCQQDYSSPRTFGGGTKVEIK

SEQ ID NO: 7080 - protein, 122 aa, synthetic construct
  source 1..122: note = Description of Artificial Sequence: Synthetic polypeptide; note = VH of XENP018577
EVQLVESGGGLVKPGGSLRLSCAASGFTFSNYWMNWVRQAPGKGLEWVGEIRQKSNNYATHYAEPVKGRFTISRDDSKSTVYLQMNSLKTEDTAVYYCTRYYGNYGGYFDVWGAGTLVTVSS

SEQ ID NO: 7081 - protein, 107 aa, synthetic construct; identical to SEQ ID NO: 6247
  source 1..107: note = Description of Artificial Sequence: Synthetic polypeptide; note = VL of XENP018577

SEQ ID NO: 7082 - protein, 5 aa, synthetic construct
  source 1..5: note = Description of Artificial Sequence: Synthetic peptide; note = XENP018577 vhCDR1
NYWMN

SEQ ID NO: 7083 - protein, 19 aa, synthetic construct
  source 1..19: note = Description of Artificial Sequence: Synthetic peptide; note = XENP018577 vhCDR2
EIRQKSNNYATHYAEPVKG

SEQ ID NO: 7084 - protein, 11 aa, synthetic construct
  source 1..11: note = Description of Artificial Sequence: Synthetic peptide; note = XENP018577 vhCDR3
YYGNYGGYFDV

SEQ ID NO: 7085 - protein, 11 aa, synthetic construct
  source 1..11: note = Description of Artificial Sequence: Synthetic peptide; note = XENP018577 vlCDR1
RASQSVSNDVA

SEQ ID NO: 7086 - protein, 7 aa, synthetic construct
  source 1..7: note = Description of Artificial Sequence: Synthetic peptide; note = XENP018577 vlCDR2
YASHRYT

SEQ ID NO: 7087 - protein, 9 aa, synthetic construct
  source 1..9: note = Description of Artificial Sequence: Synthetic peptide; note = XENP018577 vlCDR3
QQDYSSPRT

SEQ ID NO: 7088 - protein, 249 aa, synthetic construct
  source 1..249: note = Description of Artificial Sequence: Synthetic polypeptide; note = XENP018578 1G6_H1.82_L1_scFv(GKPGS)4
EVQLVESGGGLVKPGGSLRLSCAASGFTFSNYWMNWVRQAPGKGLEWVGEIRKKSNNYATHYAEPVKGRFTISRDDSKSTVYLQMNSLKTEDTAVYYCTRYYGNYGGYFDVWGAGTLVTVSSGKPGSGKPGSGKPGSGKPGSSIVMTQSPATLSVSPGERATLSCRASQSVSNDVAWYQQKPGQSPRLLINYASHRYTGVPDRFTGSGYGTEFTLTISSLQSEDFAVYFCQQDYSSPRTFGGGTKVEIK

SEQ ID NO: 7089 - protein, 122 aa, synthetic construct
  source 1..122: note = Description of Artificial Sequence: Synthetic polypeptide; note = VH of XENP018578
EVQLVESGGGLVKPGGSLRLSCAASGFTFSNYWMNWVRQAPGKGLEWVGEIRKKSNNYATHYAEPVKGRFTISRDDSKSTVYLQMNSLKTEDTAVYYCTRYYGNYGGYFDVWGAGTLVTVSS

SEQ ID NO: 7090 - protein, 107 aa, synthetic construct; identical to SEQ ID NO: 6247
  source 1..107: note = Description of Artificial Sequence: Synthetic polypeptide; note = VL of XENP018578

SEQ ID NO: 7091 - protein, 5 aa, synthetic construct
  source 1..5: note = Description of Artificial Sequence: Synthetic peptide; note = XENP018578 vhCDR1
NYWMN

SEQ ID NO: 7092 - protein, 19 aa, synthetic construct
  source 1..19: note = Description of Artificial Sequence: Synthetic peptide; note = XENP018578 vhCDR2
EIRKKSNNYATHYAEPVKG

SEQ ID NO: 7093 - protein, 11 aa, synthetic construct
  source 1..11: note = Description of Artificial Sequence: Synthetic peptide; note = XENP018578 vhCDR3
YYGNYGGYFDV

SEQ ID NO: 7094 - protein, 11 aa, synthetic construct
  source 1..11: note = Description of Artificial Sequence: Synthetic peptide; note = XENP018578 vlCDR1
RASQSVSNDVA

SEQ ID NO: 7095 - protein, 7 aa, synthetic construct
  source 1..7: note = Description of Artificial Sequence: Synthetic peptide; note = XENP018578 vlCDR2
YASHRYT

SEQ ID NO: 7096 - protein, 9 aa, synthetic construct
  source 1..9: note = Description of Artificial Sequence: Synthetic peptide; note = XENP018578 vlCDR3
QQDYSSPRT

SEQ ID NO: 7097 - protein, 249 aa, synthetic construct
  source 1..249: note = Description of Artificial Sequence: Synthetic polypeptide; note = XENP018579 1G6_H1.83_L1_scFv(GKPGS)4
EVQLVESGGGLVKPGGSLRLSCAASGFTFSNYWMNWVRQAPGKGLEWVGEIRLRSNNYATHYAEPVKGRFTISRDDSKSTVYLQMNSLKTEDTAVYYCTRYYGNYGGYFDVWGAGTLVTVSSGKPGSGKPGSGKPGSGKPGSSIVMTQSPATLSVSPGERATLSCRASQSVSNDVAWYQQKPGQSPRLLINYASHRYTGVPDRFTGSGYGTEFTLTISSLQSEDFAVYFCQQDYSSPRTFGGGTKVEIK

SEQ ID NO: 7098 - protein, 122 aa, synthetic construct
  source 1..122: note = Description of Artificial Sequence: Synthetic polypeptide; note = VH of XENP018579
EVQLVESGGGLVKPGGSLRLSCAASGFTFSNYWMNWVRQAPGKGLEWVGEIRLRSNNYATHYAEPVKGRFTISRDDSKSTVYLQMNSLKTEDTAVYYCTRYYGNYGGYFDVWGAGTLVTVSS

SEQ ID NO: 7099 - protein, 107 aa, synthetic construct; identical to SEQ ID NO: 6247
  source 1..107: note = Description of Artificial Sequence: Synthetic polypeptide; note = VL of XENP018579

SEQ ID NO: 7100 - protein, 5 aa, synthetic construct
  source 1..5: note = Description of Artificial Sequence: Synthetic peptide; note = XENP018579 vhCDR1
NYWMN

SEQ ID NO: 7101 - protein, 19 aa, synthetic construct
  source 1..19: note = Description of Artificial Sequence: Synthetic peptide; note = XENP018579 vhCDR2
EIRLRSNNYATHYAEPVKG

SEQ ID NO: 7102 - protein, 11 aa, synthetic construct
  source 1..11: note = Description of Artificial Sequence: Synthetic peptide; note = XENP018579 vhCDR3
YYGNYGGYFDV

SEQ ID NO: 7103 - protein, 11 aa, synthetic construct
  source 1..11: note = Description of Artificial Sequence: Synthetic peptide; note = XENP018579 vlCDR1
RASQSVSNDVA

SEQ ID NO: 7104 - protein, 7 aa, synthetic construct
  source 1..7: note = Description of Artificial Sequence: Synthetic peptide; note = XENP018579 vlCDR2
YASHRYT

SEQ ID NO: 7105 - protein, 9 aa, synthetic construct
  source 1..9: note = Description of Artificial Sequence: Synthetic peptide; note = XENP018579 vlCDR3
QQDYSSPRT

SEQ ID NO: 7106 - protein, 249 aa, synthetic construct
  source 1..249: note = Description of Artificial Sequence: Synthetic polypeptide; note = XENP018580 1G6_H1.84_L1_scFv(GKPGS)4
EVQLVESGGGLVKPGGSLRLSCAASGFTFSNYWMNWVRQAPGKGLEWVGEIRLESNNYATHYAEPVKGRFTISRDDSKSTVYLQMNSLKTEDTAVYYCTRYYGNYGGYFDVWGAGTLVTVSSGKPGSGKPGSGKPGSGKPGSSIVMTQSPATLSVSPGERATLSCRASQSVSNDVAWYQQKPGQSPRLLINYASHRYTGVPDRFTGSGYGTEFTLTISSLQSEDFAVYFCQQDYSSPRTFGGGTKVEIK

SEQ ID NO: 7107 - protein, 122 aa, synthetic construct
  source 1..122: note = Description of Artificial Sequence: Synthetic polypeptide; note = VH of XENP018580
EVQLVESGGGLVKPGGSLRLSCAASGFTFSNYWMNWVRQAPGKGLEWVGEIRLESNNYATHYAEPVKGRFTISRDDSKSTVYLQMNSLKTEDTAVYYCTRYYGNYGGYFDVWGAGTLVTVSS

SEQ ID NO: 7108 - protein, 107 aa, synthetic construct; identical to SEQ ID NO: 6247
  source 1..107: note = Description of Artificial Sequence: Synthetic polypeptide; note = VL of XENP018580

SEQ ID NO: 7109 - protein, 5 aa, synthetic construct
  source 1..5: note = Description of Artificial Sequence: Synthetic peptide; note = XENP018580 vhCDR1
NYWMN

SEQ ID NO: 7110 - protein, 19 aa, synthetic construct
  source 1..19: note = Description of Artificial Sequence: Synthetic peptide; note = XENP018580 vhCDR2
EIRLESNNYATHYAEPVKG

SEQ ID NO: 7111 - protein, 11 aa, synthetic construct
  source 1..11: note = Description of Artificial Sequence: Synthetic peptide; note = XENP018580 vhCDR3
YYGNYGGYFDV

SEQ ID NO: 7112 - protein, 11 aa, synthetic construct
  source 1..11: note = Description of Artificial Sequence: Synthetic peptide; note = XENP018580 vlCDR1
RASQSVSNDVA

SEQ ID NO: 7113 - protein, 7 aa, synthetic construct
  source 1..7: note = Description of Artificial Sequence: Synthetic peptide; note = XENP018580 vlCDR2
YASHRYT

SEQ ID NO: 7114 - protein, 9 aa, synthetic construct
  source 1..9: note = Description of Artificial Sequence: Synthetic peptide; note = XENP018580 vlCDR3
QQDYSSPRT

SEQ ID NO: 7115 - protein, 249 aa, synthetic construct
  source 1..249: note = Description of Artificial Sequence: Synthetic polypeptide; note = XENP018581 1G6_H1.85_L1_scFv(GKPGS)4
EVQLVESGGGLVKPGGSLRLSCAASGFTFSNYWMNWVRQAPGKGLEWVGEIRLHSNNYATHYAEPVKGRFTISRDDSKSTVYLQMNSLKTEDTAVYYCTRYYGNYGGYFDVWGAGTLVTVSSGKPGSGKPGSGKPGSGKPGSSIVMTQSPATLSVSPGERATLSCRASQSVSNDVAWYQQKPGQSPRLLINYASHRYTGVPDRFTGSGYGTEFTLTISSLQSEDFAVYFCQQDYSSPRTFGGGTKVEIK

SEQ ID NO: 7116 - protein, 122 aa, synthetic construct
  source 1..122: note = Description of Artificial Sequence: Synthetic polypeptide; note = VH of XENP018581
EVQLVESGGGLVKPGGSLRLSCAASGFTFSNYWMNWVRQAPGKGLEWVGEIRLHSNNYATHYAEPVKGRFTISRDDSKSTVYLQMNSLKTEDTAVYYCTRYYGNYGGYFDVWGAGTLVTVSS

SEQ ID NO: 7117 - protein, 107 aa, synthetic construct; identical to SEQ ID NO: 6247
  source 1..107: note = Description of Artificial Sequence: Synthetic polypeptide; note = VL of XENP018581

SEQ ID NO: 7118 - protein, 5 aa, synthetic construct
  source 1..5: note = Description of Artificial Sequence: Synthetic peptide; note = XENP018581 vhCDR1
NYWMN

SEQ ID NO: 7119 - protein, 19 aa, synthetic construct
  source 1..19: note = Description of Artificial Sequence: Synthetic peptide; note = XENP018581 vhCDR2
EIRLHSNNYATHYAEPVKG

SEQ ID NO: 7120 - protein, 11 aa, synthetic construct
  source 1..11: note = Description of Artificial Sequence: Synthetic peptide; note = XENP018581 vhCDR3
YYGNYGGYFDV

SEQ ID NO: 7121 - protein, 11 aa, synthetic construct
  source 1..11: note = Description of Artificial Sequence: Synthetic peptide; note = XENP018581 vlCDR1
RASQSVSNDVA

SEQ ID NO: 7122 - protein, 7 aa, synthetic construct
  source 1..7: note = Description of Artificial Sequence: Synthetic peptide; note = XENP018581 vlCDR2
YASHRYT

SEQ ID NO: 7123 - protein, 9 aa, synthetic construct
  source 1..9: note = Description of Artificial Sequence: Synthetic peptide; note = XENP018581 vlCDR3
QQDYSSPRT

SEQ ID NO: 7124 - protein, 249 aa, synthetic construct
  source 1..249: note = Description of Artificial Sequence: Synthetic polypeptide; note = XENP018582 1G6_H1.86_L1_scFv(GKPGS)4
EVQLVESGGGLVKPGGSLRLSCAASGFTFSNYWMNWVRQAPGKGLEWVGEIRLSSNNYATHYAEPVKGRFTISRDDSKSTVYLQMNSLKTEDTAVYYCTRYYGNYGGYFDVWGAGTLVTVSSGKPGSGKPGSGKPGSGKPGSSIVMTQSPATLSVSPGERATLSCRASQSVSNDVAWYQQKPGQSPRLLINYASHRYTGVPDRFTGSGYGTEFTLTISSLQSEDFAVYFCQQDYSSPRTFGGGTKVEIK

SEQ ID NO: 7125 - protein, 122 aa, synthetic construct
  source 1..122: note = Description of Artificial Sequence: Synthetic polypeptide; note = VH of XENP018582
EVQLVESGGGLVKPGGSLRLSCAASGFTFSNYWMNWVRQAPGKGLEWVGEIRLSSNNYATHYAEPVKGRFTISRDDSKSTVYLQMNSLKTEDTAVYYCTRYYGNYGGYFDVWGAGTLVTVSS

SEQ ID NO: 7126 - protein, 107 aa, synthetic construct; identical to SEQ ID NO: 6247
  source 1..107: note = Description of Artificial Sequence: Synthetic polypeptide; note = VL of XENP018582

SEQ ID NO: 7127 - protein, 5 aa, synthetic construct
  source 1..5: note = Description of Artificial Sequence: Synthetic peptide; note = XENP018582 vhCDR1
NYWMN

SEQ ID NO: 7128 - protein, 19 aa, synthetic construct
  source 1..19: note = Description of Artificial Sequence: Synthetic peptide; note = XENP018582 vhCDR2
EIRLSSNNYATHYAEPVKG

SEQ ID NO: 7129 - protein, 11 aa, synthetic construct
  source 1..11: note = Description of Artificial Sequence: Synthetic peptide; note = XENP018582 vhCDR3
YYGNYGGYFDV

SEQ ID NO: 7130 - protein, 11 aa, synthetic construct
  source 1..11: note = Description of Artificial Sequence: Synthetic peptide; note = XENP018582 vlCDR1
RASQSVSNDVA

SEQ ID NO: 7131 - protein, 7 aa, synthetic construct
  source 1..7: note = Description of Artificial Sequence: Synthetic peptide; note = XENP018582 vlCDR2
YASHRYT

SEQ ID NO: 7132 - protein, 9 aa, synthetic construct
  source 1..9: note = Description of Artificial Sequence: Synthetic peptide; note = XENP018582 vlCDR3
QQDYSSPRT

SEQ ID NO: 7133 - protein, 249 aa, synthetic construct
  source 1..249: note = Description of Artificial Sequence: Synthetic polypeptide; note = XENP018583 1G6_H1.87_L1_scFv(GKPGS)4
EVQLVESGGGLVKPGGSLRLSCAASGFTFSNYWMNWVRQAPGKGLEWVGEIRLDSNNYATHYAEPVKGRFTISRDDSKSTVYLQMNSLKTEDTAVYYCTRYYGNYGGYFDVWGAGTLVTVSSGKPGSGKPGSGKPGSGKPGSSIVMTQSPATLSVSPGERATLSCRASQSVSNDVAWYQQKPGQSPRLLINYASHRYTGVPDRFTGSGYGTEFTLTISSLQSEDFAVYFCQQDYSSPRTFGGGTKVEIK

SEQ ID NO: 7134 - protein, 122 aa, synthetic construct
  source 1..122: note = Description of Artificial Sequence: Synthetic polypeptide; note = VH of XENP018583
EVQLVESGGGLVKPGGSLRLSCAASGFTFSNYWMNWVRQAPGKGLEWVGEIRLDSNNYATHYAEPVKGRFTISRDDSKSTVYLQMNSLKTEDTAVYYCTRYYGNYGGYFDVWGAGTLVTVSS

SEQ ID NO: 7135 - protein, 107 aa, synthetic construct; identical to SEQ ID NO: 6247
  source 1..107: note = Description of Artificial Sequence: Synthetic polypeptide; note = VL of XENP018583

SEQ ID NO: 7136 - protein, 5 aa, synthetic construct
  source 1..5: note = Description of Artificial Sequence: Synthetic peptide; note = XENP018583 vhCDR1
NYWMN

SEQ ID NO: 7137 - protein, 19 aa, synthetic construct
  source 1..19: note = Description of Artificial Sequence: Synthetic peptide; note = XENP018583 vhCDR2
EIRLDSNNYATHYAEPVKG

SEQ ID NO: 7138 - protein, 11 aa, synthetic construct
  source 1..11: note = Description of Artificial Sequence: Synthetic peptide; note = XENP018583 vhCDR3
YYGNYGGYFDV

SEQ ID NO: 7139 - protein, 11 aa, synthetic construct
  source 1..11: note = Description of Artificial Sequence: Synthetic peptide; note = XENP018583 vlCDR1
RASQSVSNDVA

SEQ ID NO: 7140 - protein, 7 aa, synthetic construct
  source 1..7: note = Description of Artificial Sequence: Synthetic peptide; note = XENP018583 vlCDR2
YASHRYT

SEQ ID NO: 7141 - protein, 9 aa, synthetic construct
  source 1..9: note = Description of Artificial Sequence: Synthetic peptide; note = XENP018583 vlCDR3
QQDYSSPRT

SEQ ID NO: 7142 - protein, 249 aa, synthetic construct
  source 1..249: note = Description of Artificial Sequence: Synthetic polypeptide; note = XENP018584 1G6_H1.88_L1_scFv(GKPGS)4
EVQLVESGGGLVKPGGSLRLSCAASGFTFSNYWMNWVRQAPGKGLEWVGEIRLASNNYATHYAEPVKGRFTISRDDSKSTVYLQMNSLKTEDTAVYYCTRYYGNYGGYFDVWGAGTLVTVSSGKPGSGKPGSGKPGSGKPGSSIVMTQSPATLSVSPGERATLSCRASQSVSNDVAWYQQKPGQSPRLLINYASHRYTGVPDRFTGSGYGTEFTLTISSLQSEDFAVYFCQQDYSSPRTFGGGTKVEIK

SEQ ID NO: 7143 - protein, 122 aa, synthetic construct
  source 1..122: note = Description of Artificial Sequence: Synthetic polypeptide; note = VH of XENP018584
EVQLVESGGGLVKPGGSLRLSCAASGFTFSNYWMNWVRQAPGKGLEWVGEIRLASNNYATHYAEPVKGRFTISRDDSKSTVYLQMNSLKTEDTAVYYCTRYYGNYGGYFDVWGAGTLVTVSS

SEQ ID NO: 7144 - protein, 107 aa, synthetic construct; identical to SEQ ID NO: 6247
  source 1..107: note = Description of Artificial Sequence: Synthetic polypeptide; note = VL of XENP018584

SEQ ID NO: 7145 - protein, 5 aa, synthetic construct
  source 1..5: note = Description of Artificial Sequence: Synthetic peptide; note = XENP018584 vhCDR1
NYWMN

SEQ ID NO: 7146 - protein, 19 aa, synthetic construct
  source 1..19: note = Description of Artificial Sequence: Synthetic peptide; note = XENP018584 vhCDR2
EIRLASNNYATHYAEPVKG

SEQ ID NO: 7147 - protein, 11 aa, synthetic construct
  source 1..11: note = Description of Artificial Sequence: Synthetic peptide; note = XENP018584 vhCDR3
YYGNYGGYFDV

SEQ ID NO: 7148 - protein, 11 aa, synthetic construct
  source 1..11: note = Description of Artificial Sequence: Synthetic peptide; note = XENP018584 vlCDR1
RASQSVSNDVA

SEQ ID NO: 7149 - protein, 7 aa, synthetic construct
  source 1..7: note = Description of Artificial Sequence: Synthetic peptide; note = XENP018584 vlCDR2
YASHRYT

SEQ ID NO: 7150 - protein, 9 aa, synthetic construct
  source 1..9: note = Description of Artificial Sequence: Synthetic peptide; note = XENP018584 vlCDR3
QQDYSSPRT

SEQ ID NO: 7151 - protein, 249 aa, synthetic construct
  source 1..249: note = Description of Artificial Sequence: Synthetic polypeptide; note = XENP018585 1G6_H1.89_L1_scFv(GKPGS)4
EVQLVESGGGLVKPGGSLRLSCAASGFTFSNYWMNWVRQAPGKGLEWVGEIRLGSNNYATHYAEPVKGRFTISRDDSKSTVYLQMNSLKTEDTAVYYCTRYYGNYGGYFDVWGAGTLVTVSSGKPGSGKPGSGKPGSGKPGSSIVMTQSPATLSVSPGERATLSCRASQSVSNDVAWYQQKPGQSPRLLINYASHRYTGVPDRFTGSGYGTEFTLTISSLQSEDFAVYFCQQDYSSPRTFGGGTKVEIK

SEQ ID NO: 7152 - protein, 122 aa, synthetic construct
  source 1..122: note = Description of Artificial Sequence: Synthetic polypeptide; note = VH of XENP018585
EVQLVESGGGLVKPGGSLRLSCAASGFTFSNYWMNWVRQAPGKGLEWVGEIRLGSNNYATHYAEPVKGRFTISRDDSKSTVYLQMNSLKTEDTAVYYCTRYYGNYGGYFDVWGAGTLVTVSS

SEQ ID NO: 7153 - protein, 107 aa, synthetic construct; identical to SEQ ID NO: 6247
  source 1..107: note = Description of Artificial Sequence: Synthetic polypeptide; note = VL of XENP018585

SEQ ID NO: 7154 - protein, 5 aa, synthetic construct
  source 1..5: note = Description of Artificial Sequence: Synthetic peptide; note = XENP018585 vhCDR1
NYWMN

SEQ ID NO: 7155 - protein, 19 aa, synthetic construct
  source 1..19: note = Description of Artificial Sequence: Synthetic peptide; note = XENP018585 vhCDR2
EIRLGSNNYATHYAEPVKG

SEQ ID NO: 7156 - protein, 11 aa, synthetic construct
  source 1..11: note = Description of Artificial Sequence: Synthetic peptide; note = XENP018585 vhCDR3
YYGNYGGYFDV

SEQ ID NO: 7157 - protein, 11 aa, synthetic construct
  source 1..11: note = Description of Artificial Sequence: Synthetic peptide; note = XENP018585 vlCDR1
RASQSVSNDVA

SEQ ID NO: 7158 - protein, 7 aa, synthetic construct
  source 1..7: note = Description of Artificial Sequence: Synthetic peptide; note = XENP018585 vlCDR2
YASHRYT

SEQ ID NO: 7159 - protein, 9 aa, synthetic construct
  source 1..9: note = Description of Artificial Sequence: Synthetic peptide; note = XENP018585 vlCDR3
QQDYSSPRT

SEQ ID NO: 7160 - protein, 249 aa, synthetic construct
  source 1..249: note = Description of Artificial Sequence: Synthetic polypeptide; note = XENP018586 1G6_H1.90_L1_scFv(GKPGS)4
EVQLVESGGGLVKPGGSLRLSCAASGFTFSNYWMNWVRQAPGKGLEWVGEIRLYSNNYATHYAEPVKGRFTISRDDSKSTVYLQMNSLKTEDTAVYYCTRYYGNYGGYFDVWGAGTLVTVSSGKPGSGKPGSGKPGSGKPGSSIVMTQSPATLSVSPGERATLSCRASQSVSNDVAWYQQKPGQSPRLLINYASHRYTGVPDRFTGSGYGTEFTLTISSLQSEDFAVYFCQQDYSSPRTFGGGTKVEIK

SEQ ID NO: 7161 - protein, 122 aa, synthetic construct
  source 1..122: note = Description of Artificial Sequence: Synthetic polypeptide; note = VH of XENP018586
EVQLVESGGGLVKPGGSLRLSCAASGFTFSNYWMNWVRQAPGKGLEWVGEIRLYSNNYATHYAEPVKGRFTISRDDSKSTVYLQMNSLKTEDTAVYYCTRYYGNYGGYFDVWGAGTLVTVSS

SEQ ID NO: 7162 - protein, 107 aa, synthetic construct; identical to SEQ ID NO: 6247
  source 1..107: note = Description of Artificial Sequence: Synthetic polypeptide; note = VL of XENP018586

SEQ ID NO: 7163 - protein, 5 aa, synthetic construct
  source 1..5: note = Description of Artificial Sequence: Synthetic peptide; note = XENP018586 vhCDR1
NYWMN

SEQ ID NO: 7164 - protein, 19 aa, synthetic construct
  source 1..19: note = Description of Artificial Sequence: Synthetic peptide; note = XENP018586 vhCDR2
EIRLYSNNYATHYAEPVKG

SEQ ID NO: 7165 - protein, 11 aa, synthetic construct
  source 1..11: note = Description of Artificial Sequence: Synthetic peptide; note = XENP018586 vhCDR3
YYGNYGGYFDV

SEQ ID NO: 7166 - protein, 11 aa, synthetic construct
  source 1..11: note = Description of Artificial Sequence: Synthetic peptide; note = XENP018586 vlCDR1
RASQSVSNDVA

SEQ ID NO: 7167 - protein, 7 aa, synthetic construct
  source 1..7: note = Description of Artificial Sequence: Synthetic peptide; note = XENP018586 vlCDR2
YASHRYT

SEQ ID NO: 7168 - protein, 9 aa, synthetic construct
  source 1..9: note = Description of Artificial Sequence: Synthetic peptide; note = XENP018586 vlCDR3
QQDYSSPRT

SEQ ID NO: 7169 - protein, 249 aa, synthetic construct
  source 1..249: note = Description of Artificial Sequence: Synthetic polypeptide; note = XENP018587 1G6_H1.91_L1_scFv(GKPGS)4
EVQLVESGGGLVKPGGSLRLSCAASGFTFSNYWMNWVRQAPGKGLEWVGEIRLISNNYATHYAEPVKGRFTISRDDSKSTVYLQMNSLKTEDTAVYYCTRYYGNYGGYFDVWGAGTLVTVSSGKPGSGKPGSGKPGSGKPGSSIVMTQSPATLSVSPGERATLSCRASQSVSNDVAWYQQKPGQSPRLLINYASHRYTGVPDRFTGSGYGTEFTLTISSLQSEDFAVYFCQQDYSSPRTFGGGTKVEIK

SEQ ID NO: 7170 - protein, 122 aa, synthetic construct
  source 1..122: note = Description of Artificial Sequence: Synthetic polypeptide; note = VH of XENP018587
EVQLVESGGGLVKPGGSLRLSCAASGFTFSNYWMNWVRQAPGKGLEWVGEIRLISNNYATHYAEPVKGRFTISRDDSKSTVYLQMNSLKTEDTAVYYCTRYYGNYGGYFDVWGAGTLVTVSS

SEQ ID NO: 7171 - protein, 107 aa, synthetic construct; identical to SEQ ID NO: 6247
  source 1..107: note = Description of Artificial Sequence: Synthetic polypeptide; note = VL of XENP018587

SEQ ID NO: 7172 - protein, 5 aa, synthetic construct
  source 1..5: note = Description of Artificial Sequence: Synthetic peptide; note = XENP018587 vhCDR1
NYWMN

SEQ ID NO: 7173 - protein, 19 aa, synthetic construct
  source 1..19: note = Description of Artificial Sequence: Synthetic peptide; note = XENP018587 vhCDR2
EIRLISNNYATHYAEPVKG

SEQ ID NO: 7174 - protein, 11 aa, synthetic construct
  source 1..11: note = Description of Artificial Sequence: Synthetic peptide; note = XENP018587 vhCDR3
YYGNYGGYFDV

SEQ ID NO: 7175 - protein, 11 aa, synthetic construct
  source 1..11: note = Description of Artificial Sequence: Synthetic peptide; note = XENP018587 vlCDR1
RASQSVSNDVA

SEQ ID NO: 7176 - protein, 7 aa, synthetic construct
  source 1..7: note = Description of Artificial Sequence: Synthetic peptide; note = XENP018587 vlCDR2
YASHRYT

SEQ ID NO: 7177 - protein, 9 aa, synthetic construct
  source 1..9: note = Description of Artificial Sequence: Synthetic peptide; note = XENP018587 vlCDR3
QQDYSSPRT

SEQ ID NO: 7178 - protein, 249 aa, synthetic construct
  source 1..249: note = Description of Artificial Sequence: Synthetic polypeptide; note = XENP018588 1G6_H1.92_L1_scFv(GKPGS)4
EVQLVESGGGLVKPGGSLRLSCAASGFTFSNYWMNWVRQAPGKGLEWVGEIRLKTNNYATHYAEPVKGRFTISRDDSKSTVYLQMNSLKTEDTAVYYCTRYYGNYGGYFDVWGAGTLVTVSSGKPGSGKPGSGKPGSGKPGSSIVMTQSPATLSVSPGERATLSCRASQSVSNDVAWYQQKPGQSPRLLINYASHRYTGVPDRFTGSGYGTEFTLTISSLQSEDFAVYFCQQDYSSPRTFGGGTKVEIK

SEQ ID NO: 7179 - protein, 122 aa, synthetic construct
  source 1..122: note = Description of Artificial Sequence: Synthetic polypeptide; note = VH of XENP018588
EVQLVESGGGLVKPGGSLRLSCAASGFTFSNYWMNWVRQAPGKGLEWVGEIRLKTNNYATHYAEPVKGRFTISRDDSKSTVYLQMNSLKTEDTAVYYCTRYYGNYGGYFDVWGAGTLVTVSS

SEQ ID NO: 7180 - protein, 107 aa, synthetic construct; identical to SEQ ID NO: 6247
  source 1..107: note = Description of Artificial Sequence: Synthetic polypeptide; note = VL of XENP018588

SEQ ID NO: 7181 - protein, 5 aa, synthetic construct
  source 1..5: note = Description of Artificial Sequence: Synthetic peptide; note = XENP018588 vhCDR1
NYWMN

SEQ ID NO: 7182 - protein, 19 aa, synthetic construct
  source 1..19: note = Description of Artificial Sequence: Synthetic peptide; note = XENP018588 vhCDR2
EIRLKTNNYATHYAEPVKG

SEQ ID NO: 7183 - protein, 11 aa, synthetic construct
  source 1..11: note = Description of Artificial Sequence: Synthetic peptide; note = XENP018588 vhCDR3
YYGNYGGYFDV

SEQ ID NO: 7184 - protein, 11 aa, synthetic construct
  source 1..11: note = Description of Artificial Sequence: Synthetic peptide; note = XENP018588 vlCDR1
RASQSVSNDVA

SEQ ID NO: 7185 - protein, 7 aa, synthetic construct
  source 1..7: note = Description of Artificial Sequence: Synthetic peptide; note = XENP018588 vlCDR2
YASHRYT

SEQ ID NO: 7186 - protein, 9 aa, synthetic construct
  source 1..9: note = Description of Artificial Sequence: Synthetic peptide; note = XENP018588 vlCDR3
QQDYSSPRT

SEQ ID NO: 7187 - protein, 249 aa, synthetic construct
  source 1..249: note = Description of Artificial Sequence: Synthetic polypeptide; note = XENP018589 1G6_H1.93_L1_scFv(GKPGS)4
EVQLVESGGGLVKPGGSLRLSCAASGFTFSNYWMNWVRQAPGKGLEWVGEIRLKANNYATHYAEPVKGRFTISRDDSKSTVYLQMNSLKTEDTAVYYCTRYYGNYGGYFDVWGAGTLVTVSSGKPGSGKPGSGKPGSGKPGSSIVMTQSPATLSVSPGERATLSCRASQSVSNDVAWYQQKPGQSPRLLINYASHRYTGVPDRFTGSGYGTEFTLTISSLQSEDFAVYFCQQDYSSPRTFGGGTKVEIK

SEQ ID NO: 7188 - protein, 122 aa, synthetic construct
  source 1..122: note = Description of Artificial Sequence: Synthetic polypeptide; note = VH of XENP018589
EVQLVESGGGLVKPGGSLRLSCAASGFTFSNYWMNWVRQAPGKGLEWVGEIRLKANNYATHYAEPVKGRFTISRDDSKSTVYLQMNSLKTEDTAVYYCTRYYGNYGGYFDVWGAGTLVTVSS

SEQ ID NO: 7189 - protein, 107 aa, synthetic construct; identical to SEQ ID NO: 6247
  source 1..107: note = Description of Artificial Sequence: Synthetic polypeptide; note = VL of XENP018589

SEQ ID NO: 7190 - protein, 5 aa, synthetic construct
  source 1..5: note = Description of Artificial Sequence: Synthetic peptide; note = XENP018589 vhCDR1
NYWMN

SEQ ID NO: 7191 - protein, 19 aa, synthetic construct
  source 1..19: note = Description of Artificial Sequence: Synthetic peptide; note = XENP018589 vhCDR2
EIRLKANNYATHYAEPVKG

SEQ ID NO: 7192 - protein, 11 aa, synthetic construct
  source 1..11: note = Description of Artificial Sequence: Synthetic peptide; note = XENP018589 vhCDR3
YYGNYGGYFDV

SEQ ID NO: 7193 - protein, 11 aa, synthetic construct
  source 1..11: note = Description of Artificial Sequence: Synthetic peptide; note = XENP018589 vlCDR1
RASQSVSNDVA

SEQ ID NO: 7194 - protein, 7 aa, synthetic construct
  source 1..7: note = Description of Artificial Sequence: Synthetic peptide; note = XENP018589 vlCDR2
YASHRYT

SEQ ID NO: 7195 - protein, 9 aa, synthetic construct
  source 1..9: note = Description of Artificial Sequence: Synthetic peptide; note = XENP018589 vlCDR3
QQDYSSPRT

SEQ ID NO: 7196 - protein, 249 aa, synthetic construct
  source 1..249: note = Description of Artificial Sequence: Synthetic polypeptide; note = XENP018590 1G6_H1.94_L1_scFv(GKPGS)4
EVQLVESGGGLVKPGGSLRLSCAASGFTFSNYWMNWVRQAPGKGLEWVGEIRLKQNNYATHYAEPVKGRFTISRDDSKSTVYLQMNSLKTEDTAVYYCTRYYGNYGGYFDVWGAGTLVTVSSGKPGSGKPGSGKPGSGKPGSSIVMTQSPATLSVSPGERATLSCRASQSVSNDVAWYQQKPGQSPRLLINYASHRYTGVPDRFTGSGYGTEFTLTISSLQSEDFAVYFCQQDYSSPRTFGGGTKVEIK

SEQ ID NO: 7197 - protein, 122 aa, synthetic construct
  source 1..122: note = Description of Artificial Sequence: Synthetic polypeptide; note = VH of XENP018590
EVQLVESGGGLVKPGGSLRLSCAASGFTFSNYWMNWVRQAPGKGLEWVGEIRLKQNNYATHYAEPVKGRFTISRDDSKSTVYLQMNSLKTEDTAVYYCTRYYGNYGGYFDVWGAGTLVTVSS

SEQ ID NO: 7198 - protein, 107 aa, synthetic construct; identical to SEQ ID NO: 6247
  source 1..107: note = Description of Artificial Sequence: Synthetic polypeptide; note = VL of XENP018590

SEQ ID NO: 7199 - protein, 5 aa, synthetic construct
  source 1..5: note = Description of Artificial Sequence: Synthetic peptide; note = XENP018590 vhCDR1
NYWMN

SEQ ID NO: 7200 - protein, 19 aa, synthetic construct
  source 1..19: note = Description of Artificial Sequence: Synthetic peptide; note = XENP018590 vhCDR2
EIRLKQNNYATHYAEPVKG

SEQ ID NO: 7201 - protein, 11 aa, synthetic construct
  source 1..11: note = Description of Artificial Sequence: Synthetic peptide; note = XENP018590 vhCDR3
YYGNYGGYFDV

SEQ ID NO: 7202 - protein, 11 aa, synthetic construct
  source 1..11: note = Description of Artificial Sequence: Synthetic peptide; note = XENP018590 vlCDR1
RASQSVSNDVA

SEQ ID NO: 7203 - protein, 7 aa, synthetic construct
  source 1..7: note = Description of Artificial Sequence: Synthetic peptide; note = XENP018590 vlCDR2
YASHRYT

SEQ ID NO: 7204 - protein, 9 aa, synthetic construct
  source 1..9: note = Description of Artificial Sequence: Synthetic peptide; note = XENP018590 vlCDR3
QQDYSSPRT

SEQ ID NO: 7205 - protein, 249 aa, synthetic construct
  source 1..249: note = Description of Artificial Sequence: Synthetic polypeptide; note = XENP018591 1G6_H1.95_L1_scFv(GKPGS)4
EVQLVESGGGLVKPGGSLRLSCAASGFTFSNYWMNWVRQAPGKGLEWVGEIRLKGNNYATHYAEPVKGRFTISRDDSKSTVYLQMNSLKTEDTAVYYCTRYYGNYGGYFDVWGAGTLVTVSSGKPGSGKPGSGKPGSGKPGSSIVMTQSPATLSVSPGERATLSCRASQSVSNDVAWYQQKPGQSPRLLINYASHRYTGVPDRFTGSGYGTEFTLTISSLQSEDFAVYFCQQDYSSPRTFGGGTKVEIK

SEQ ID NO: 7206 - protein, 122 aa, synthetic construct
  source 1..122: note = Description of Artificial Sequence: Synthetic polypeptide; note = VH of XENP018591
EVQLVESGGGLVKPGGSLRLSCAASGFTFSNYWMNWVRQAPGKGLEWVGEIRLKGNNYATHYAEPVKGRFTISRDDSKSTVYLQMNSLKTEDTAVYYCTRYYGNYGGYFDVWGAGTLVTVSS

SEQ ID NO: 7207 - protein, 107 aa, synthetic construct; identical to SEQ ID NO: 6247
  source 1..107: note = Description of Artificial Sequence: Synthetic polypeptide; note = VL of XENP018591

SEQ ID NO: 7208 - protein, 5 aa, synthetic construct
  source 1..5: note = Description of Artificial Sequence: Synthetic peptide; note = XENP018591 vhCDR1
NYWMN

SEQ ID NO: 7209 - protein, 19 aa, synthetic construct
  source 1..19: note = Description of Artificial Sequence: Synthetic peptide; note = XENP018591 vhCDR2
EIRLKGNNYATHYAEPVKG

SEQ ID NO: 7210 - protein, 11 aa, synthetic construct
  source 1..11: note = Description of Artificial Sequence: Synthetic peptide; note = XENP018591 vhCDR3
YYGNYGGYFDV

SEQ ID NO: 7211 - protein, 11 aa, synthetic construct
  source 1..11: note = Description of Artificial Sequence: Synthetic peptide; note = XENP018591 vlCDR1
RASQSVSNDVA

SEQ ID NO: 7212 - protein, 7 aa, synthetic construct
  source 1..7: note = Description of Artificial Sequence: Synthetic peptide; note = XENP018591 vlCDR2
YASHRYT

SEQ ID NO: 7213 - protein, 9 aa, synthetic construct
  source 1..9: note = Description of Artificial Sequence: Synthetic peptide; note = XENP018591 vlCDR3
QQDYSSPRT

SEQ ID NO: 7214 - protein, 249 aa, synthetic construct
  source 1..249: note = Description of Artificial Sequence: Synthetic polypeptide; note = XENP018592 1G6_H1.96_L1_scFv(GKPGS)4
EVQLVESGGGLVKPGGSLRLSCAASGFTFSNYWMNWVRQAPGKGLEWVGEIRLKVNNYATHYAEPVKGRFTISRDDSKSTVYLQMNSLKTEDTAVYYCTRYYGNYGGYFDVWGAGTLVTVSSGKPGSGKPGSGKPGSGKPGSSIVMTQSPATLSVSPGERATLSCRASQSVSNDVAWYQQKPGQSPRLLINYASHRYTGVPDRFTGSGYGTEFTLTISSLQSEDFAVYFCQQDYSSPRTFGGGTKVEIK

SEQ ID NO: 7215 - protein, 122 aa, synthetic construct
  source 1..122: note = Description of Artificial Sequence: Synthetic polypeptide; note = VH of XENP018592
EVQLVESGGGLVKPGGSLRLSCAASGFTFSNYWMNWVRQAPGKGLEWVGEIRLKVNNYATHYAEPVKGRFTISRDDSKSTVYLQMNSLKTEDTAVYYCTRYYGNYGGYFDVWGAGTLVTVSS

SEQ ID NO: 7216 - protein, 107 aa, synthetic construct; identical to SEQ ID NO: 6247
  source 1..107: note = Description of Artificial Sequence: Synthetic polypeptide; note = VL of XENP018592

SEQ ID NO: 7217 - protein, 5 aa, synthetic construct
  source 1..5: note = Description of Artificial Sequence: Synthetic peptide; note = XENP018592 vhCDR1
NYWMN

SEQ ID NO: 7218 - protein, 19 aa, synthetic construct
  source 1..19: note = Description of Artificial Sequence: Synthetic peptide; note = XENP018592 vhCDR2
EIRLKVNNYATHYAEPVKG

SEQ ID NO: 7219 - protein, 11 aa, synthetic construct
  source 1..11: note = Description of Artificial Sequence: Synthetic peptide; note = XENP018592 vhCDR3
YYGNYGGYFDV

SEQ ID NO: 7220 - protein, 11 aa, synthetic construct
  source 1..11: note = Description of Artificial Sequence: Synthetic peptide; note = XENP018592 vlCDR1
RASQSVSNDVA

SEQ ID NO: 7221 - protein, 7 aa, synthetic construct
  source 1..7: note = Description of Artificial Sequence: Synthetic peptide; note = XENP018592 vlCDR2
YASHRYT

SEQ ID NO: 7222 - protein, 9 aa, synthetic construct
  source 1..9: note = Description of Artificial Sequence: Synthetic peptide; note = XENP018592 vlCDR3
QQDYSSPRT

SEQ ID NO: 7223 - protein, 249 aa, synthetic construct
  source 1..249: note = Description of Artificial Sequence: Synthetic polypeptide; note = XENP018593 1G6_H1.97_L1_scFv(GKPGS)4
EVQLVESGGGLVKPGGSLRLSCAASGFTFSNYWMNWVRQAPGKGLEWVGEIRLKHNNYATHYAEPVKGRFTISRDDSKSTVYLQMNSLKTEDTAVYYCTRYYGNYGGYFDVWGAGTLVTVSSGKPGSGKPGSGKPGSGKPGSSIVMTQSPATLSVSPGERATLSCRASQSVSNDVAWYQQKPGQSPRLLINYASHRYTGVPDRFTGSGYGTEFTLTISSLQSEDFAVYFCQQDYSSPRTFGGGTKVEIK

SEQ ID NO: 7224 - protein, 122 aa, synthetic construct
  source 1..122: note = Description of Artificial Sequence: Synthetic polypeptide; note = VH of XENP018593
EVQLVESGGGLVKPGGSLRLSCAASGFTFSNYWMNWVRQAPGKGLEWVGEIRLKHNNYATHYAEPVKGRFTISRDDSKSTVYLQMNSLKTEDTAVYYCTRYYGNYGGYFDVWGAGTLVTVSS

SEQ ID NO: 7225 - protein, 107 aa, synthetic construct; identical to SEQ ID NO: 6247
  source 1..107: note = Description of Artificial Sequence: Synthetic polypeptide; note = VL of XENP018593

SEQ ID NO: 7226 - protein, 5 aa, synthetic construct
  source 1..5: note = Description of Artificial Sequence: Synthetic peptide; note = XENP018593 vhCDR1
NYWMN

SEQ ID NO: 7227 - protein, 19 aa, synthetic construct
  source 1..19: note = Description of Artificial Sequence: Synthetic peptide; note = XENP018593 vhCDR2
EIRLKHNNYATHYAEPVKG

SEQ ID NO: 7228 - protein, 11 aa, synthetic construct
  source 1..11: note = Description of Artificial Sequence: Synthetic peptide; note = XENP018593 vhCDR3
YYGNYGGYFDV

SEQ ID NO: 7229 - protein, 11 aa, synthetic construct
  source 1..11: note = Description of Artificial Sequence: Synthetic peptide; note = XENP018593 vlCDR1
RASQSVSNDVA

SEQ ID NO: 7230 - protein, 7 aa, synthetic construct
  source 1..7: note = Description of Artificial Sequence: Synthetic peptide; note = XENP018593 vlCDR2
YASHRYT

SEQ ID NO: 7231 - protein, 9 aa, synthetic construct
  source 1..9: note = Description of Artificial Sequence: Synthetic peptide; note = XENP018593 vlCDR3
QQDYSSPRT

SEQ ID NO: 7232 - protein, 249 aa, synthetic construct
  source 1..249: note = Description of Artificial Sequence: Synthetic polypeptide; note = XENP018594 1G6_H1.98_L1_scFv(GKPGS)4
EVQLVESGGGLVKPGGSLRLSCAASGFTFSNYWMNWVRQAPGKGLEWVGEIRLKDNNYATHYAEPVKGRFTISRDDSKSTVYLQMNSLKTEDTAVYYCTRYYGNYGGYFDVWGAGTLVTVSSGKPGSGKPGSGKPGSGKPGSSIVMTQSPATLSVSPGERATLSCRASQSVSNDVAWYQQKPGQSPRLLINYASHRYTGVPDRFTGSGYGTEFTLTISSLQSEDFAVYFCQQDYSSPRTFGGGTKVEIK

SEQ ID NO: 7233 - protein, 122 aa, synthetic construct
  source 1..122: note = Description of Artificial Sequence: Synthetic polypeptide; note = VH of XENP018594
EVQLVESGGGLVKPGGSLRLSCAASGFTFSNYWMNWVRQAPGKGLEWVGEIRLKDNNYATHYAEPVKGRFTISRDDSKSTVYLQMNSLKTEDTAVYYCTRYYGNYGGYFDVWGAGTLVTVSS

SEQ ID NO: 7234 - protein, 107 aa, synthetic construct; identical to SEQ ID NO: 6247
  source 1..107: note = Description of Artificial Sequence: Synthetic polypeptide; note = VL of XENP018594

SEQ ID NO: 7235 - protein, 5 aa, synthetic construct
  source 1..5: note = Description of Artificial Sequence: Synthetic peptide; note = XENP018594 vhCDR1
NYWMN

SEQ ID NO: 7236 - protein, 19 aa, synthetic construct
  source 1..19: note = Description of Artificial Sequence: Synthetic peptide; note = XENP018594 vhCDR2
EIRLKDNNYATHYAEPVKG

SEQ ID NO: 7237 - protein, 11 aa, synthetic construct
  source 1..11: note = Description of Artificial Sequence: Synthetic peptide; note = XENP018594 vhCDR3
YYGNYGGYFDV

SEQ ID NO: 7238 - protein, 11 aa, synthetic construct
  source 1..11: note = Description of Artificial Sequence: Synthetic peptide; note = XENP018594 vlCDR1
RASQSVSNDVA

SEQ ID NO: 7239 - protein, 7 aa, synthetic construct
  source 1..7: note = Description of Artificial Sequence: Synthetic peptide; note = XENP018594 vlCDR2
YASHRYT

SEQ ID NO: 7240 - protein, 9 aa, synthetic construct
  source 1..9: note = Description of Artificial Sequence: Synthetic peptide; note = XENP018594 vlCDR3
QQDYSSPRT

SEQ ID NO: 7241 - protein, 249 aa, synthetic construct
  source 1..249: note = Description of Artificial Sequence: Synthetic polypeptide; note = XENP018595 1G6_H1.99_L1_scFv(GKPGS)4
EVQLVESGGGLVKPGGSLRLSCAASGFTFSNYWMNWVRQAPGKGLEWVGEIRLKKNNYATHYAEPVKGRFTISRDDSKSTVYLQMNSLKTEDTAVYYCTRYYGNYGGYFDVWGAGTLVTVSSGKPGSGKPGSGKPGSGKPGSSIVMTQSPATLSVSPGERATLSCRASQSVSNDVAWYQQKPGQSPRLLINYASHRYTGVPDRFTGSGYGTEFTLTISSLQSEDFAVYFCQQDYSSPRTFGGGTKVEIK

SEQ ID NO: 7242 - protein, 122 aa, synthetic construct
  source 1..122: note = Description of Artificial Sequence: Synthetic polypeptide; note = VH of XENP018595
EVQLVESGGGLVKPGGSLRLSCAASGFTFSNYWMNWVRQAPGKGLEWVGEIRLKKNNYATHYAEPVKGRFTISRDDSKSTVYLQMNSLKTEDTAVYYCTRYYGNYGGYFDVWGAGTLVTVSS

SEQ ID NO: 7243 - protein, 107 aa, synthetic construct; identical to SEQ ID NO: 6247
  source 1..107: note = Description of Artificial Sequence: Synthetic polypeptide; note = VL of XENP018595

SEQ ID NO: 7244 - protein, 5 aa, synthetic construct
  source 1..5: note = Description of Artificial Sequence: Synthetic peptide; note = XENP018595 vhCDR1
NYWMN

SEQ ID NO: 7245 - protein, 19 aa, synthetic construct
  source 1..19: note = Description of Artificial Sequence: Synthetic peptide; note = XENP018595 vhCDR2
EIRLKKNNYATHYAEPVKG

SEQ ID NO: 7246 - protein, 11 aa, synthetic construct
  source 1..11: note = Description of Artificial Sequence: Synthetic peptide; note = XENP018595 vhCDR3
YYGNYGGYFDV

SEQ ID NO: 7247 - protein, 11 aa, synthetic construct
  source 1..11: note = Description of Artificial Sequence: Synthetic peptide; note = XENP018595 vlCDR1
RASQSVSNDVA

SEQ ID NO: 7248 - protein, 7 aa, synthetic construct
  source 1..7: note = Description of Artificial Sequence: Synthetic peptide; note = XENP018595 vlCDR2
YASHRYT

SEQ ID NO: 7249 - protein, 9 aa, synthetic construct
  source 1..9: note = Description of Artificial Sequence: Synthetic peptide; note = XENP018595 vlCDR3
QQDYSSPRT

SEQ ID NO: 7250 - protein, 249 aa, synthetic construct
  source 1..249: note = Description of Artificial Sequence: Synthetic polypeptide; note = XENP018596 1G6_H1.100_L1_scFv(GKPGS)4
EVQLVESGGGLVKPGGSLRLSCAASGFTFSNYWMNWVRQAPGKGLEWVGEIRLKYNNYATHYAEPVKGRFTISRDDSKSTVYLQMNSLKTEDTAVYYCTRYYGNYGGYFDVWGAGTLVTVSSGKPGSGKPGSGKPGSGKPGSSIVMTQSPATLSVSPGERATLSCRASQSVSNDVAWYQQKPGQSPRLLINYASHRYTGVPDRFTGSGYGTEFTLTISSLQSEDFAVYFCQQDYSSPRTFGGGTKVEIK

SEQ ID NO: 7251 - protein, 122 aa, synthetic construct
  source 1..122: note = Description of Artificial Sequence: Synthetic polypeptide; note = VH of XENP018596
EVQLVESGGGLVKPGGSLRLSCAASGFTFSNYWMNWVRQAPGKGLEWVGEIRLKYNNYATHYAEPVKGRFTISRDDSKSTVYLQMNSLKTEDTAVYYCTRYYGNYGGYFDVWGAGTLVTVSS

SEQ ID NO: 7252 - protein, 107 aa, synthetic construct; identical to SEQ ID NO: 6247
  source 1..107: note = Description of Artificial Sequence: Synthetic polypeptide; note = VL of XENP018596

SEQ ID NO: 7253 - protein, 5 aa, synthetic construct
  source 1..5: note = Description of Artificial Sequence: Synthetic peptide; note = XENP018596 vhCDR1
NYWMN

SEQ ID NO: 7254 - protein, 19 aa, synthetic construct
  source 1..19: note = Description of Artificial Sequence: Synthetic peptide; note = XENP018596 vhCDR2
EIRLKYNNYATHYAEPVKG

SEQ ID NO: 7255 - protein, 11 aa, synthetic construct
  source 1..11: note = Description of Artificial Sequence: Synthetic peptide; note = XENP018596 vhCDR3
YYGNYGGYFDV

SEQ ID NO: 7256 - protein, 11 aa, synthetic construct
  source 1..11: note = Description of Artificial Sequence: Synthetic peptide; note = XENP018596 vlCDR1
RASQSVSNDVA

SEQ ID NO: 7257 - protein, 7 aa, synthetic construct
  source 1..7: note = Description of Artificial Sequence: Synthetic peptide; note = XENP018596 vlCDR2
YASHRYT

SEQ ID NO: 7258 - protein, 9 aa, synthetic construct
  source 1..9: note = Description of Artificial Sequence: Synthetic peptide; note = XENP018596 vlCDR3
QQDYSSPRT

SEQ ID NO: 7259 - protein, 249 aa, synthetic construct
  source 1..249: note = Description of Artificial Sequence: Synthetic polypeptide; note = XENP018601 1G6_H1.101_L1_scFv(GKPGS)4
EVQLVESGGGLVKPGGSLRLSCAASGFTFSNYWMNWVRQAPGKGLEWVGEIRLKSDNYATHYAEPVKGRFTISRDDSKSTVYLQMNSLKTEDTAVYYCTRYYGNYGGYFDVWGAGTLVTVSSGKPGSGKPGSGKPGSGKPGSSIVMTQSPATLSVSPGERATLSCRASQSVSNDVAWYQQKPGQSPRLLINYASHRYTGVPDRFTGSGYGTEFTLTISSLQSEDFAVYFCQQDYSSPRTFGGGTKVEIK

SEQ ID NO: 7260 - protein, 122 aa, synthetic construct
  source 1..122: note = Description of Artificial Sequence: Synthetic polypeptide; note = VH of XENP018601
EVQLVESGGGLVKPGGSLRLSCAASGFTFSNYWMNWVRQAPGKGLEWVGEIRLKSDNYATHYAEPVKGRFTISRDDSKSTVYLQMNSLKTEDTAVYYCTRYYGNYGGYFDVWGAGTLVTVSS

SEQ ID NO: 7261 - protein, 107 aa, synthetic construct; identical to SEQ ID NO: 6247
  source 1..107: note = Description of Artificial Sequence: Synthetic polypeptide; note = VL of XENP018601

SEQ ID NO: 7262 - protein, 5 aa, synthetic construct
  source 1..5: note = Description of Artificial Sequence: Synthetic peptide; note = XENP018601 vhCDR1
NYWMN

SEQ ID NO: 7263 - protein, 19 aa, synthetic construct
  source 1..19: note = Description of Artificial Sequence: Synthetic peptide; note = XENP018601 vhCDR2
EIRLKSDNYATHYAEPVKG

SEQ ID NO: 7264 - protein, 11 aa, synthetic construct
  source 1..11: note = Description of Artificial Sequence: Synthetic peptide; note = XENP018601 vhCDR3
YYGNYGGYFDV

SEQ ID NO: 7265 - protein, 11 aa, synthetic construct
  source 1..11: note = Description of Artificial Sequence: Synthetic peptide; note = XENP018601 vlCDR1
RASQSVSNDVA

SEQ ID NO: 7266 - protein, 7 aa, synthetic construct
  source 1..7: note = Description of Artificial Sequence: Synthetic peptide; note = XENP018601 vlCDR2
YASHRYT

SEQ ID NO: 7267 - protein, 9 aa, synthetic construct
  source 1..9: note = Description of Artificial Sequence: Synthetic peptide; note = XENP018601 vlCDR3
QQDYSSPRT

SEQ ID NO: 7268 - protein, 249 aa, synthetic construct
  source 1..249: note = Description of Artificial Sequence: Synthetic polypeptide; note = XENP018602 1G6_H1.102_L1_scFv(GKPGS)4
EVQLVESGGGLVKPGGSLRLSCAASGFTFSNYWMNWVRQAPGKGLEWVGEIRLKSHNYATHYAEPVKGRFTISRDDSKSTVYLQMNSLKTEDTAVYYCTRYYGNYGGYFDVWGAGTLVTVSSGKPGSGKPGSGKPGSGKPGSSIVMTQSPATLSVSPGERATLSCRASQSVSNDVAWYQQKPGQSPRLLINYASHRYTGVPDRFTGSGYGTEFTLTISSLQSEDFAVYFCQQDYSSPRTFGGGTKVEIK

SEQ ID NO: 7269 - protein, 122 aa, synthetic construct
  source 1..122: note = Description of Artificial Sequence: Synthetic polypeptide; note = VH of XENP018602
EVQLVESGGGLVKPGGSLRLSCAASGFTFSNYWMNWVRQAPGKGLEWVGEIRLKSHNYATHYAEPVKGRFTISRDDSKSTVYLQMNSLKTEDTAVYYCTRYYGNYGGYFDVWGAGTLVTVSS

SEQ ID NO: 7270 - protein, 107 aa, synthetic construct; identical to SEQ ID NO: 6247
  source 1..107: note = Description of Artificial Sequence: Synthetic polypeptide; note = VL of XENP018602

SEQ ID NO: 7271 - protein, 5 aa, synthetic construct
  source 1..5: note = Description of Artificial Sequence: Synthetic peptide; note = XENP018602 vhCDR1
NYWMN

SEQ ID NO: 7272 - protein, 19 aa, synthetic construct
  source 1..19: note = Description of Artificial Sequence: Synthetic peptide; note = XENP018602 vhCDR2
EIRLKSHNYATHYAEPVKG

SEQ ID NO: 7273 - protein, 11 aa, synthetic construct
  source 1..11: note = Description of Artificial Sequence: Synthetic peptide; note = XENP018602 vhCDR3
YYGNYGGYFDV

SEQ ID NO: 7274 - protein, 11 aa, synthetic construct
  source 1..11: note = Description of Artificial Sequence: Synthetic peptide; note = XENP018602 vlCDR1
RASQSVSNDVA

SEQ ID NO: 7275 - protein, 7 aa, synthetic construct
  source 1..7: note = Description of Artificial Sequence: Synthetic peptide; note = XENP018602 vlCDR2
YASHRYT

SEQ ID NO: 7276 - protein, 9 aa, synthetic construct
  source 1..9: note = Description of Artificial Sequence: Synthetic peptide; note = XENP018602 vlCDR3
QQDYSSPRT

SEQ ID NO: 7277 - protein, 249 aa, synthetic construct
  source 1..249: note = Description of Artificial Sequence: Synthetic polypeptide; note = XENP018603 1G6_H1.103_L1_scFv(GKPGS)4
EVQLVESGGGLVKPGGSLRLSCAASGFTFSNYWMNWVRQAPGKGLEWVGEIRLKSENYATHYAEPVKGRFTISRDDSKSTVYLQMNSLKTEDTAVYYCTRYYGNYGGYFDVWGAGTLVTVSSGKPGSGKPGSGKPGSGKPGSSIVMTQSPATLSVSPGERATLSCRASQSVSNDVAWYQQKPGQSPRLLINYASHRYTGVPDRFTGSGYGTEFTLTISSLQSEDFAVYFCQQDYSSPRTFGGGTKVEIK

SEQ ID NO: 7278 - protein, 122 aa, synthetic construct
  source 1..122: note = Description of Artificial Sequence: Synthetic polypeptide; note = VH of XENP018603
EVQLVESGGGLVKPGGSLRLSCAASGFTFSNYWMNWVRQAPGKGLEWVGEIRLKSENYATHYAEPVKGRFTISRDDSKSTVYLQMNSLKTEDTAVYYCTRYYGNYGGYFDVWGAGTLVTVSS

SEQ ID NO: 7279 - protein, 107 aa, synthetic construct; identical to SEQ ID NO: 6247
  source 1..107: note = Description of Artificial Sequence: Synthetic polypeptide; note = VL of XENP018603

SEQ ID NO: 7280 - protein, 5 aa, synthetic construct
  source 1..5: note = Description of Artificial Sequence: Synthetic peptide; note = XENP018603 vhCDR1
NYWMN

SEQ ID NO: 7281 - protein, 19 aa, synthetic construct
  source 1..19: note = Description of Artificial Sequence: Synthetic peptide; note = XENP018603 vhCDR2
EIRLKSENYATHYAEPVKG

SEQ ID NO: 7282 - protein, 11 aa, synthetic construct
  source 1..11: note = Description of Artificial Sequence: Synthetic peptide; note = XENP018603 vhCDR3
YYGNYGGYFDV

SEQ ID NO: 7283 - protein, 11 aa, synthetic construct
  source 1..11: note = Description of Artificial Sequence: Synthetic peptide; note = XENP018603 vlCDR1
RASQSVSNDVA

SEQ ID NO: 7284 - protein, 7 aa, synthetic construct
  source 1..7: note = Description of Artificial Sequence: Synthetic peptide; note = XENP018603 vlCDR2
YASHRYT

SEQ ID NO: 7285 - protein, 9 aa, synthetic construct
  source 1..9: note = Description of Artificial Sequence: Synthetic peptide; note = XENP018603 vlCDR3
QQDYSSPRT

SEQ ID NO: 7286 - protein, 249 aa, synthetic construct
  source 1..249: note = Description of Artificial Sequence: Synthetic polypeptide; note = XENP018604 1G6_H1.104_L1_scFv(GKPGS)4
EVQLVESGGGLVKPGGSLRLSCAASGFTFSNYWMNWVRQAPGKGLEWVGEIRLKSSNYATHYAEPVKGRFTISRDDSKSTVYLQMNSLKTEDTAVYYCTRYYGNYGGYFDVWGAGTLVTVSSGKPGSGKPGSGKPGSGKPGSSIVMTQSPATLSVSPGERATLSCRASQSVSNDVAWYQQKPGQSPRLLINYASHRYTGVPDRFTGSGYGTEFTLTISSLQSEDFAVYFCQQDYSSPRTFGGGTKVEIK

SEQ ID NO: 7287 - protein, 122 aa, synthetic construct
  source 1..122: note = Description of Artificial Sequence: Synthetic polypeptide; note = VH of XENP018604
EVQLVESGGGLVKPGGSLRLSCAASGFTFSNYWMNWVRQAPGKGLEWVGEIRLKSSNYATHYAEPVKGRFTISRDDSKSTVYLQMNSLKTEDTAVYYCTRYYGNYGGYFDVWGAGTLVTVSS

SEQ ID NO: 7288 - protein, 107 aa, synthetic construct; identical to SEQ ID NO: 6247
  source 1..107: note = Description of Artificial Sequence: Synthetic polypeptide; note = VL of XENP018604

SEQ ID NO: 7289 - protein, 5 aa, synthetic construct
  source 1..5: note = Description of Artificial Sequence: Synthetic peptide; note = XENP018604 vhCDR1
NYWMN

SEQ ID NO: 7290 - protein, 19 aa, synthetic construct
  source 1..19: note = Description of Artificial Sequence: Synthetic peptide; note = XENP018604 vhCDR2
EIRLKSSNYATHYAEPVKG

SEQ ID NO: 7291 - protein, 11 aa, synthetic construct
  source 1..11: note = Description of Artificial Sequence: Synthetic peptide; note = XENP018604 vhCDR3
YYGNYGGYFDV

SEQ ID NO: 7292 - protein, 11 aa, synthetic construct
  source 1..11: note = Description of Artificial Sequence: Synthetic peptide; note = XENP018604 vlCDR1
RASQSVSNDVA

SEQ ID NO: 7293 - protein, 7 aa, synthetic construct
  source 1..7: note = Description of Artificial Sequence: Synthetic peptide; note = XENP018604 vlCDR2
YASHRYT

SEQ ID NO: 7294 - protein, 9 aa, synthetic construct
  source 1..9: note = Description of Artificial Sequence: Synthetic peptide; note = XENP018604 vlCDR3
QQDYSSPRT

SEQ ID NO: 7295 - protein, 249 aa, synthetic construct
  source 1..249: note = Description of Artificial Sequence: Synthetic polypeptide; note = XENP018605 1G6_H1.105_L1_scFv(GKPGS)4
EVQLVESGGGLVKPGGSLRLSCAASGFTFSNYWMNWVRQAPGKGLEWVGEIRLKSRNYATHYAEPVKGRFTISRDDSKSTVYLQMNSLKTEDTAVYYCTRYYGNYGGYFDVWGAGTLVTVSSGKPGSGKPGSGKPGSGKPGSSIVMTQSPATLSVSPGERATLSCRASQSVSNDVAWYQQKPGQSPRLLINYASHRYTGVPDRFTGSGYGTEFTLTISSLQSEDFAVYFCQQDYSSPRTFGGGTKVEIK

SEQ ID NO: 7296 - protein, 122 aa, synthetic construct
  source 1..122: note = Description of Artificial Sequence: Synthetic polypeptide; note = VH of XENP018605
EVQLVESGGGLVKPGGSLRLSCAASGFTFSNYWMNWVRQAPGKGLEWVGEIRLKSRNYATHYAEPVKGRFTISRDDSKSTVYLQMNSLKTEDTAVYYCTRYYGNYGGYFDVWGAGTLVTVSS

SEQ ID NO: 7297 - protein, 107 aa, synthetic construct; identical to SEQ ID NO: 6247
  source 1..107: note = Description of Artificial Sequence: Synthetic polypeptide; note = VL of XENP018605

SEQ ID NO: 7298 - protein, 5 aa, synthetic construct
  source 1..5: note = Description of Artificial Sequence: Synthetic peptide; note = XENP018605 vhCDR1
NYWMN

SEQ ID NO: 7299 - protein, 19 aa, synthetic construct
  source 1..19: note = Description of Artificial Sequence: Synthetic peptide; note = XENP018605 vhCDR2
EIRLKSRNYATHYAEPVKG

SEQ ID NO: 7300 - protein, 11 aa, synthetic construct
  source 1..11: note = Description of Artificial Sequence: Synthetic peptide; note = XENP018605 vhCDR3
YYGNYGGYFDV

SEQ ID NO: 7301 - protein, 11 aa, synthetic construct
  source 1..11: note = Description of Artificial Sequence: Synthetic peptide; note = XENP018605 vlCDR1
RASQSVSNDVA

SEQ ID NO: 7302 - protein, 7 aa, synthetic construct
  source 1..7: note = Description of Artificial Sequence: Synthetic peptide; note = XENP018605 vlCDR2
YASHRYT

SEQ ID NO: 7303 - protein, 9 aa, synthetic construct
  source 1..9: note = Description of Artificial Sequence: Synthetic peptide; note = XENP018605 vlCDR3
QQDYSSPRT

SEQ ID NO: 7304 - protein, 249 aa, synthetic construct
  source 1..249: note = Description of Artificial Sequence: Synthetic polypeptide; note = XENP018606 1G6_H1.106_L1_scFv(GKPGS)4
EVQLVESGGGLVKPGGSLRLSCAASGFTFSNYWMNWVRQAPGKGLEWVGEIRLKSLNYATHYAEPVKGRFTISRDDSKSTVYLQMNSLKTEDTAVYYCTRYYGNYGGYFDVWGAGTLVTVSSGKPGSGKPGSGKPGSGKPGSSIVMTQSPATLSVSPGERATLSCRASQSVSNDVAWYQQKPGQSPRLLINYASHRYTGVPDRFTGSGYGTEFTLTISSLQSEDFAVYFCQQDYSSPRTFGGGTKVEIK

SEQ ID NO: 7305 - protein, 122 aa, synthetic construct
  source 1..122: note = Description of Artificial Sequence: Synthetic polypeptide; note = VH of XENP018606
EVQLVESGGGLVKPGGSLRLSCAASGFTFSNYWMNWVRQAPGKGLEWVGEIRLKSLNYATHYAEPVKGRFTISRDDSKSTVYLQMNSLKTEDTAVYYCTRYYGNYGGYFDVWGAGTLVTVSS

SEQ ID NO: 7306 - protein, 107 aa, synthetic construct; identical to SEQ ID NO: 6247
  source 1..107: note = Description of Artificial Sequence: Synthetic polypeptide; note = VL of XENP018606

SEQ ID NO: 7307 - protein, 5 aa, synthetic construct
  source 1..5: note = Description of Artificial Sequence: Synthetic peptide; note = XENP018606 vhCDR1
NYWMN

SEQ ID NO: 7308 - protein, 19 aa, synthetic construct
  source 1..19: note = Description of Artificial Sequence: Synthetic peptide; note = XENP018606 vhCDR2
EIRLKSLNYATHYAEPVKG

SEQ ID NO: 7309 - protein, 11 aa, synthetic construct
  source 1..11: note = Description of Artificial Sequence: Synthetic peptide; note = XENP018606 vhCDR3
YYGNYGGYFDV

SEQ ID NO: 7310 - protein, 11 aa, synthetic construct
  source 1..11: note = Description of Artificial Sequence: Synthetic peptide; note = XENP018606 vlCDR1
RASQSVSNDVA

SEQ ID NO: 7311 - protein, 7 aa, synthetic construct
  source 1..7: note = Description of Artificial Sequence: Synthetic peptide; note = XENP018606 vlCDR2
YASHRYT

SEQ ID NO: 7312 - protein, 9 aa, synthetic construct
  source 1..9: note = Description of Artificial Sequence: Synthetic peptide; note = XENP018606 vlCDR3
QQDYSSPRT

SEQ ID NO: 7313 - protein, 249 aa, synthetic construct
  source 1..249: note = Description of Artificial Sequence: Synthetic polypeptide; note = XENP018607 1G6_H1.107_L1_scFv(GKPGS)4
EVQLVESGGGLVKPGGSLRLSCAASGFTFSNYWMNWVRQAPGKGLEWVGEIRLKSTNYATHYAEPVKGRFTISRDDSKSTVYLQMNSLKTEDTAVYYCTRYYGNYGGYFDVWGAGTLVTVSSGKPGSGKPGSGKPGSGKPGSSIVMTQSPATLSVSPGERATLSCRASQSVSNDVAWYQQKPGQSPRLLINYASHRYTGVPDRFTGSGYGTEFTLTISSLQSEDFAVYFCQQDYSSPRTFGGGTKVEIK

SEQ ID NO: 7314 - protein, 122 aa, synthetic construct
  source 1..122: note = Description of Artificial Sequence: Synthetic polypeptide; note = VH of XENP018607
EVQLVESGGGLVKPGGSLRLSCAASGFTFSNYWMNWVRQAPGKGLEWVGEIRLKSTNYATHYAEPVKGRFTISRDDSKSTVYLQMNSLKTEDTAVYYCTRYYGNYGGYFDVWGAGTLVTVSS

SEQ ID NO: 7315 - protein, 107 aa, synthetic construct; identical to SEQ ID NO: 6247
  source 1..107: note = Description of Artificial Sequence: Synthetic polypeptide; note = VL of XENP018607

SEQ ID NO: 7316 - protein, 5 aa, synthetic construct
  source 1..5: note = Description of Artificial Sequence: Synthetic peptide; note = XENP018607 vhCDR1
NYWMN

SEQ ID NO: 7317 - protein, 19 aa, synthetic construct
  source 1..19: note = Description of Artificial Sequence: Synthetic peptide; note = XENP018607 vhCDR2
EIRLKSTNYATHYAEPVKG

SEQ ID NO: 7318 - protein, 11 aa, synthetic construct
  source 1..11: note = Description of Artificial Sequence: Synthetic peptide; note = XENP018607 vhCDR3
YYGNYGGYFDV

SEQ ID NO: 7319 - protein, 11 aa, synthetic construct
  source 1..11: note = Description of Artificial Sequence: Synthetic peptide; note = XENP018607 vlCDR1
RASQSVSNDVA

SEQ ID NO: 7320 - protein, 7 aa, synthetic construct
  source 1..7: note = Description of Artificial Sequence: Synthetic peptide; note = XENP018607 vlCDR2
YASHRYT

SEQ ID NO: 7321 - protein, 9 aa, synthetic construct
  source 1..9: note = Description of Artificial Sequence: Synthetic peptide; note = XENP018607 vlCDR3
QQDYSSPRT

SEQ ID NO: 7322 - protein, 249 aa, synthetic construct
  source 1..249: note = Description of Artificial Sequence: Synthetic polypeptide; note = XENP018608 1G6_H1.108_L1_scFv(GKPGS)4
EVQLVESGGGLVKPGGSLRLSCAASGFTFSNYWMNWVRQAPGKGLEWVGEIRLKSGNYATHYAEPVKGRFTISRDDSKSTVYLQMNSLKTEDTAVYYCTRYYGNYGGYFDVWGAGTLVTVSSGKPGSGKPGSGKPGSGKPGSSIVMTQSPATLSVSPGERATLSCRASQSVSNDVAWYQQKPGQSPRLLINYASHRYTGVPDRFTGSGYGTEFTLTISSLQSEDFAVYFCQQDYSSPRTFGGGTKVEIK

SEQ ID NO: 7323 - protein, 122 aa, synthetic construct
  source 1..122: note = Description of Artificial Sequence: Synthetic polypeptide; note = VH of XENP018608
EVQLVESGGGLVKPGGSLRLSCAASGFTFSNYWMNWVRQAPGKGLEWVGEIRLKSGNYATHYAEPVKGRFTISRDDSKSTVYLQMNSLKTEDTAVYYCTRYYGNYGGYFDVWGAGTLVTVSS

SEQ ID NO: 7324 - protein, 107 aa, synthetic construct; identical to SEQ ID NO: 6247
  source 1..107: note = Description of Artificial Sequence: Synthetic polypeptide; note = VL of XENP018608

SEQ ID NO: 7325 - protein, 5 aa, synthetic construct
  source 1..5: note = Description of Artificial Sequence: Synthetic peptide; note = XENP018608 vhCDR1
NYWMN

SEQ ID NO: 7326 - protein, 19 aa, synthetic construct
  source 1..19: note = Description of Artificial Sequence: Synthetic peptide; note = XENP018608 vhCDR2
EIRLKSGNYATHYAEPVKG

SEQ ID NO: 7327 - protein, 11 aa, synthetic construct
  source 1..11: note = Description of Artificial Sequence: Synthetic peptide; note = XENP018608 vhCDR3
YYGNYGGYFDV

SEQ ID NO: 7328 - protein, 11 aa, synthetic construct
  source 1..11: note = Description of Artificial Sequence: Synthetic peptide; note = XENP018608 vlCDR1
RASQSVSNDVA

SEQ ID NO: 7329 - protein, 7 aa, synthetic construct
  source 1..7: note = Description of Artificial Sequence: Synthetic peptide; note = XENP018608 vlCDR2
YASHRYT

SEQ ID NO: 7330 - protein, 9 aa, synthetic construct
  source 1..9: note = Description of Artificial Sequence: Synthetic peptide; note = XENP018608 vlCDR3
QQDYSSPRT

SEQ ID NO: 7331 - protein, 249 aa, synthetic construct
  source 1..249: note = Description of Artificial Sequence: Synthetic polypeptide; note = XENP018609 1G6_H1.109_L1_scFv(GKPGS)4
EVQLVESGGGLVKPGGSLRLSCAASGFTFSNYWMNWVRQAPGKGLEWVGEIRLKSYNYATHYAEPVKGRFTISRDDSKSTVYLQMNSLKTEDTAVYYCTRYYGNYGGYFDVWGAGTLVTVSSGKPGSGKPGSGKPGSGKPGSSIVMTQSPATLSVSPGERATLSCRASQSVSNDVAWYQQKPGQSPRLLINYASHRYTGVPDRFTGSGYGTEFTLTISSLQSEDFAVYFCQQDYSSPRTFGGGTKVEIK

SEQ ID NO: 7332 - protein, 122 aa, synthetic construct
  source 1..122: note = Description of Artificial Sequence: Synthetic polypeptide; note = VH of XENP018609
EVQLVESGGGLVKPGGSLRLSCAASGFTFSNYWMNWVRQAPGKGLEWVGEIRLKSYNYATHYAEPVKGRFTISRDDSKSTVYLQMNSLKTEDTAVYYCTRYYGNYGGYFDVWGAGTLVTVSS

SEQ ID NO: 7333 - protein, 107 aa, synthetic construct; identical to SEQ ID NO: 6247
  source 1..107: note = Description of Artificial Sequence: Synthetic polypeptide; note = VL of XENP018609

SEQ ID NO: 7334 - protein, 5 aa, synthetic construct
  source 1..5: note = Description of Artificial Sequence: Synthetic peptide; note = XENP018609 vhCDR1
NYWMN

SEQ ID NO: 7335 - protein, 19 aa, synthetic construct
  source 1..19: note = Description of Artificial Sequence: Synthetic peptide; note = XENP018609 vhCDR2
EIRLKSYNYATHYAEPVKG

SEQ ID NO: 7336 - protein, 11 aa, synthetic construct
  source 1..11: note = Description of Artificial Sequence: Synthetic peptide; note = XENP018609 vhCDR3
YYGNYGGYFDV

SEQ ID NO: 7337 - protein, 11 aa, synthetic construct
  source 1..11: note = Description of Artificial Sequence: Synthetic peptide; note = XENP018609 vlCDR1
RASQSVSNDVA

SEQ ID NO: 7338 - protein, 7 aa, synthetic construct
  source 1..7: note = Description of Artificial Sequence: Synthetic peptide; note = XENP018609 vlCDR2
YASHRYT

SEQ ID NO: 7339 - protein, 9 aa, synthetic construct
  source 1..9: note = Description of Artificial Sequence: Synthetic peptide; note = XENP018609 vlCDR3
QQDYSSPRT

SEQ ID NO: 7340 - protein, 249 aa, synthetic construct
  source 1..249: note = Description of Artificial Sequence: Synthetic polypeptide; note = XENP018610 1G6_H1.110_L1_scFv(GKPGS)4
EVQLVESGGGLVKPGGSLRLSCAASGFTFSNYWMNWVRQAPGKGLEWVGEIRLKSNDYATHYAEPVKGRFTISRDDSKSTVYLQMNSLKTEDTAVYYCTRYYGNYGGYFDVWGAGTLVTVSSGKPGSGKPGSGKPGSGKPGSSIVMTQSPATLSVSPGERATLSCRASQSVSNDVAWYQQKPGQSPRLLINYASHRYTGVPDRFTGSGYGTEFTLTISSLQSEDFAVYFCQQDYSSPRTFGGGTKVEIK

SEQ ID NO: 7341 - protein, 122 aa, synthetic construct
  source 1..122: note = Description of Artificial Sequence: Synthetic polypeptide; note = VH of XENP018610
EVQLVESGGGLVKPGGSLRLSCAASGFTFSNYWMNWVRQAPGKGLEWVGEIRLKSNDYATHYAEPVKGRFTISRDDSKSTVYLQMNSLKTEDTAVYYCTRYYGNYGGYFDVWGAGTLVTVSS

SEQ ID NO: 7342 - protein, 107 aa, synthetic construct; identical to SEQ ID NO: 6247
  source 1..107: note = Description of Artificial Sequence: Synthetic polypeptide; note = VL of XENP018610

SEQ ID NO: 7343 - protein, 5 aa, synthetic construct
  source 1..5: note = Description of Artificial Sequence: Synthetic peptide; note = XENP018610 vhCDR1
NYWMN

SEQ ID NO: 7344 - protein, 19 aa, synthetic construct
  source 1..19: note = Description of Artificial Sequence: Synthetic peptide; note = XENP018610 vhCDR2
EIRLKSNDYATHYAEPVKG

SEQ ID NO: 7345 - protein, 11 aa, synthetic construct
  source 1..11: note = Description of Artificial Sequence: Synthetic peptide; note = XENP018610 vhCDR3
YYGNYGGYFDV

SEQ ID NO: 7346 - protein, 11 aa, synthetic construct
  source 1..11: note = Description of Artificial Sequence: Synthetic peptide; note = XENP018610 vlCDR1
RASQSVSNDVA

SEQ ID NO: 7347 - protein, 7 aa, synthetic construct
  source 1..7: note = Description of Artificial Sequence: Synthetic peptide; note = XENP018610 vlCDR2
YASHRYT

SEQ ID NO: 7348 - protein, 9 aa, synthetic construct
  source 1..9: note = Description of Artificial Sequence: Synthetic peptide; note = XENP018610 vlCDR3
QQDYSSPRT

SEQ ID NO: 7349 - protein, 249 aa, synthetic construct
  source 1..249: note = Description of Artificial Sequence: Synthetic polypeptide; note = XENP018611 1G6_H1.111_L1_scFv(GKPGS)4
EVQLVESGGGLVKPGGSLRLSCAASGFTFSNYWMNWVRQAPGKGLEWVGEIRLKSNHYATHYAEPVKGRFTISRDDSKSTVYLQMNSLKTEDTAVYYCTRYYGNYGGYFDVWGAGTLVTVSSGKPGSGKPGSGKPGSGKPGSSIVMTQSPATLSVSPGERATLSCRASQSVSNDVAWYQQKPGQSPRLLINYASHRYTGVPDRFTGSGYGTEFTLTISSLQSEDFAVYFCQQDYSSPRTFGGGTKVEIK

SEQ ID NO: 7350 - protein, 122 aa, synthetic construct
  source 1..122: note = Description of Artificial Sequence: Synthetic polypeptide; note = VH of XENP018611
EVQLVESGGGLVKPGGSLRLSCAASGFTFSNYWMNWVRQAPGKGLEWVGEIRLKSNHYATHYAEPVKGRFTISRDDSKSTVYLQMNSLKTEDTAVYYCTRYYGNYGGYFDVWGAGTLVTVSS

SEQ ID NO: 7351 - protein, 107 aa, synthetic construct; identical to SEQ ID NO: 6247
  source 1..107: note = Description of Artificial Sequence: Synthetic polypeptide; note = VL of XENP018611

SEQ ID NO: 7352 - protein, 5 aa, synthetic construct
  source 1..5: note = Description of Artificial Sequence: Synthetic peptide; note = XENP018611 vhCDR1
NYWMN

SEQ ID NO: 7353 - protein, 19 aa, synthetic construct
  source 1..19: note = Description of Artificial Sequence: Synthetic peptide; note = XENP018611 vhCDR2
EIRLKSNHYATHYAEPVKG

SEQ ID NO: 7354 - protein, 11 aa, synthetic construct
  source 1..11: note = Description of Artificial Sequence: Synthetic peptide; note = XENP018611 vhCDR3
YYGNYGGYFDV

SEQ ID NO: 7355 - protein, 11 aa, synthetic construct
  source 1..11: note = Description of Artificial Sequence: Synthetic peptide; note = XENP018611 vlCDR1
RASQSVSNDVA

SEQ ID NO: 7356 - protein, 7 aa, synthetic construct
  source 1..7: note = Description of Artificial Sequence: Synthetic peptide; note = XENP018611 vlCDR2
YASHRYT

SEQ ID NO: 7357 - protein, 9 aa, synthetic construct
  source 1..9: note = Description of Artificial Sequence: Synthetic peptide; note = XENP018611 vlCDR3
QQDYSSPRT

SEQ ID NO: 7358 - protein, 249 aa, synthetic construct
  source 1..249: note = Description of Artificial Sequence: Synthetic polypeptide; note = XENP018612 1G6_H1.112_L1_scFv(GKPGS)4
EVQLVESGGGLVKPGGSLRLSCAASGFTFSNYWMNWVRQAPGKGLEWVGEIRLKSNEYATHYAEPVKGRFTISRDDSKSTVYLQMNSLKTEDTAVYYCTRYYGNYGGYFDVWGAGTLVTVSSGKPGSGKPGSGKPGSGKPGSSIVMTQSPATLSVSPGERATLSCRASQSVSNDVAWYQQKPGQSPRLLINYASHRYTGVPDRFTGSGYGTEFTLTISSLQSEDFAVYFCQQDYSSPRTFGGGTKVEIK

SEQ ID NO: 7359 - protein, 122 aa, synthetic construct
  source 1..122: note = Description of Artificial Sequence: Synthetic polypeptide; note = VH of XENP018612
EVQLVESGGGLVKPGGSLRLSCAASGFTFSNYWMNWVRQAPGKGLEWVGEIRLKSNEYATHYAEPVKGRFTISRDDSKSTVYLQMNSLKTEDTAVYYCTRYYGNYGGYFDVWGAGTLVTVSS

SEQ ID NO: 7360 - protein, 107 aa, synthetic construct; identical to SEQ ID NO: 6247
  source 1..107: note = Description of Artificial Sequence: Synthetic polypeptide; note = VL of XENP018612

SEQ ID NO: 7361 - protein, 5 aa, synthetic construct
  source 1..5: note = Description of Artificial Sequence: Synthetic peptide; note = XENP018612 vhCDR1
NYWMN

SEQ ID NO: 7362 - protein, 19 aa, synthetic construct
  source 1..19: note = Description of Artificial Sequence: Synthetic peptide; note = XENP018612 vhCDR2
EIRLKSNEYATHYAEPVKG

SEQ ID NO: 7363 - protein, 11 aa, synthetic construct
  source 1..11: note = Description of Artificial Sequence: Synthetic peptide; note = XENP018612 vhCDR3
YYGNYGGYFDV

SEQ ID NO: 7364 - protein, 11 aa, synthetic construct
  source 1..11: note = Description of Artificial Sequence: Synthetic peptide; note = XENP018612 vlCDR1
RASQSVSNDVA

SEQ ID NO: 7365 - protein, 7 aa, synthetic construct
  source 1..7: note = Description of Artificial Sequence: Synthetic peptide; note = XENP018612 vlCDR2
YASHRYT

SEQ ID NO: 7366 - protein, 9 aa, synthetic construct
  source 1..9: note = Description of Artificial Sequence: Synthetic peptide; note = XENP018612 vlCDR3
QQDYSSPRT

SEQ ID NO: 7367 - protein, 249 aa, synthetic construct
  source 1..249: note = Description of Artificial Sequence: Synthetic polypeptide; note = XENP018613 1G6_H1.113_L1_scFv(GKPGS)4
EVQLVESGGGLVKPGGSLRLSCAASGFTFSNYWMNWVRQAPGKGLEWVGEIRLKSNSYATHYAEPVKGRFTISRDDSKSTVYLQMNSLKTEDTAVYYCTRYYGNYGGYFDVWGAGTLVTVSSGKPGSGKPGSGKPGSGKPGSSIVMTQSPATLSVSPGERATLSCRASQSVSNDVAWYQQKPGQSPRLLINYASHRYTGVPDRFTGSGYGTEFTLTISSLQSEDFAVYFCQQDYSSPRTFGGGTKVEIK

SEQ ID NO: 7368 - protein, 122 aa, synthetic construct
  source 1..122: note = Description of Artificial Sequence: Synthetic polypeptide; note = VH of XENP018613
EVQLVESGGGLVKPGGSLRLSCAASGFTFSNYWMNWVRQAPGKGLEWVGEIRLKSNSYATHYAEPVKGRFTISRDDSKSTVYLQMNSLKTEDTAVYYCTRYYGNYGGYFDVWGAGTLVTVSS

SEQ ID NO: 7369 - protein, 107 aa, synthetic construct; identical to SEQ ID NO: 6247
  source 1..107: note = Description of Artificial Sequence: Synthetic polypeptide; note = VL of XENP018613

SEQ ID NO: 7370 - protein, 5 aa, synthetic construct
  source 1..5: note = Description of Artificial Sequence: Synthetic peptide; note = XENP018613 vhCDR1
NYWMN

SEQ ID NO: 7371 - protein, 19 aa, synthetic construct
  source 1..19: note = Description of Artificial Sequence: Synthetic peptide; note = XENP018613 vhCDR2
EIRLKSNSYATHYAEPVKG

SEQ ID NO: 7372 - protein, 11 aa, synthetic construct
  source 1..11: note = Description of Artificial Sequence: Synthetic peptide; note = XENP018613 vhCDR3
YYGNYGGYFDV

SEQ ID NO: 7373 - protein, 11 aa, synthetic construct
  source 1..11: note = Description of Artificial Sequence: Synthetic peptide; note = XENP018613 vlCDR1
RASQSVSNDVA

SEQ ID NO: 7374 - protein, 7 aa, synthetic construct
  source 1..7: note = Description of Artificial Sequence: Synthetic peptide; note = XENP018613 vlCDR2
YASHRYT

SEQ ID NO: 7375 - protein, 9 aa, synthetic construct
  source 1..9: note = Description of Artificial Sequence: Synthetic peptide; note = XENP018613 vlCDR3
QQDYSSPRT

SEQ ID NO: 7376 - protein, 249 aa, synthetic construct
  source 1..249: note = Description of Artificial Sequence: Synthetic polypeptide; note = XENP018614 1G6_H1.114_L1_scFv(GKPGS)4
EVQLVESGGGLVKPGGSLRLSCAASGFTFSNYWMNWVRQAPGKGLEWVGEIRLKSNRYATHYAEPVKGRFTISRDDSKSTVYLQMNSLKTEDTAVYYCTRYYGNYGGYFDVWGAGTLVTVSSGKPGSGKPGSGKPGSGKPGSSIVMTQSPATLSVSPGERATLSCRASQSVSNDVAWYQQKPGQSPRLLINYASHRYTGVPDRFTGSGYGTEFTLTISSLQSEDFAVYFCQQDYSSPRTFGGGTKVEIK

SEQ ID NO: 7377 - protein, 122 aa, synthetic construct
  source 1..122: note = Description of Artificial Sequence: Synthetic polypeptide; note = VH of XENP018614
EVQLVESGGGLVKPGGSLRLSCAASGFTFSNYWMNWVRQAPGKGLEWVGEIRLKSNRYATHYAEPVKGRFTISRDDSKSTVYLQMNSLKTEDTAVYYCTRYYGNYGGYFDVWGAGTLVTVSS

SEQ ID NO: 7378 - protein, 107 aa, synthetic construct; identical to SEQ ID NO: 6247
  source 1..107: note = Description of Artificial Sequence: Synthetic polypeptide; note = VL of XENP018614

SEQ ID NO: 7379 - protein, 5 aa, synthetic construct
  source 1..5: note = Description of Artificial Sequence: Synthetic peptide; note = XENP018614 vhCDR1
NYWMN

SEQ ID NO: 7380 - protein, 19 aa, synthetic construct
  source 1..19: note = Description of Artificial Sequence: Synthetic peptide; note = XENP018614 vhCDR2
EIRLKSNRYATHYAEPVKG

SEQ ID NO: 7381 - protein, 11 aa, synthetic construct
  source 1..11: note = Description of Artificial Sequence: Synthetic peptide; note = XENP018614 vhCDR3
YYGNYGGYFDV

SEQ ID NO: 7382 - protein, 11 aa, synthetic construct
  source 1..11: note = Description of Artificial Sequence: Synthetic peptide; note = XENP018614 vlCDR1
RASQSVSNDVA

SEQ ID NO: 7383 - protein, 7 aa, synthetic construct
  source 1..7: note = Description of Artificial Sequence: Synthetic peptide; note = XENP018614 vlCDR2
YASHRYT

SEQ ID NO: 7384 - protein, 9 aa, synthetic construct
  source 1..9: note = Description of Artificial Sequence: Synthetic peptide; note = XENP018614 vlCDR3
QQDYSSPRT

SEQ ID NO: 7385 - protein, 249 aa, synthetic construct
  source 1..249: note = Description of Artificial Sequence: Synthetic polypeptide; note = XENP018615 1G6_H1.115_L1_scFv(GKPGS)4
EVQLVESGGGLVKPGGSLRLSCAASGFTFSNYWMNWVRQAPGKGLEWVGEIRLKSNLYATHYAEPVKGRFTISRDDSKSTVYLQMNSLKTEDTAVYYCTRYYGNYGGYFDVWGAGTLVTVSSGKPGSGKPGSGKPGSGKPGSSIVMTQSPATLSVSPGERATLSCRASQSVSNDVAWYQQKPGQSPRLLINYASHRYTGVPDRFTGSGYGTEFTLTISSLQSEDFAVYFCQQDYSSPRTFGGGTKVEIK

SEQ ID NO: 7386 - protein, 122 aa, synthetic construct
  source 1..122: note = Description of Artificial Sequence: Synthetic polypeptide; note = VH of XENP018615
EVQLVESGGGLVKPGGSLRLSCAASGFTFSNYWMNWVRQAPGKGLEWVGEIRLKSNLYATHYAEPVKGRFTISRDDSKSTVYLQMNSLKTEDTAVYYCTRYYGNYGGYFDVWGAGTLVTVSS

SEQ ID NO: 7387 - protein, 107 aa, synthetic construct; identical to SEQ ID NO: 6247
  source 1..107: note = Description of Artificial Sequence: Synthetic polypeptide; note = VL of XENP018615

SEQ ID NO: 7388 - protein, 5 aa, synthetic construct
  source 1..5: note = Description of Artificial Sequence: Synthetic peptide; note = XENP018615 vhCDR1
NYWMN

SEQ ID NO: 7389 - protein, 19 aa, synthetic construct
  source 1..19: note = Description of Artificial Sequence: Synthetic peptide; note = XENP018615 vhCDR2
EIRLKSNLYATHYAEPVKG

SEQ ID NO: 7390 - protein, 11 aa, synthetic construct
  source 1..11: note = Description of Artificial Sequence: Synthetic peptide; note = XENP018615 vhCDR3
YYGNYGGYFDV

SEQ ID NO: 7391 - protein, 11 aa, synthetic construct
  source 1..11: note = Description of Artificial Sequence: Synthetic peptide; note = XENP018615 vlCDR1
RASQSVSNDVA

SEQ ID NO: 7392 - protein, 7 aa, synthetic construct
  source 1..7: note = Description of Artificial Sequence: Synthetic peptide; note = XENP018615 vlCDR2
YASHRYT

SEQ ID NO: 7393 - protein, 9 aa, synthetic construct
  source 1..9: note = Description of Artificial Sequence: Synthetic peptide; note = XENP018615 vlCDR3
QQDYSSPRT

SEQ ID NO: 7394 - protein, 249 aa, synthetic construct
  source 1..249: note = Description of Artificial Sequence: Synthetic polypeptide; note = XENP018616 1G6_H1.116_L1_scFv(GKPGS)4
EVQLVESGGGLVKPGGSLRLSCAASGFTFSNYWMNWVRQAPGKGLEWVGEIRLKSNTYATHYAEPVKGRFTISRDDSKSTVYLQMNSLKTEDTAVYYCTRYYGNYGGYFDVWGAGTLVTVSSGKPGSGKPGSGKPGSGKPGSSIVMTQSPATLSVSPGERATLSCRASQSVSNDVAWYQQKPGQSPRLLINYASHRYTGVPDRFTGSGYGTEFTLTISSLQSEDFAVYFCQQDYSSPRTFGGGTKVEIK

SEQ ID NO: 7395 - protein, 122 aa, synthetic construct
  source 1..122: note = Description of Artificial Sequence: Synthetic polypeptide; note = VH of XENP018616
EVQLVESGGGLVKPGGSLRLSCAASGFTFSNYWMNWVRQAPGKGLEWVGEIRLKSNTYATHYAEPVKGRFTISRDDSKSTVYLQMNSLKTEDTAVYYCTRYYGNYGGYFDVWGAGTLVTVSS

SEQ ID NO: 7396 - protein, 107 aa, synthetic construct; identical to SEQ ID NO: 6247
  source 1..107: note = Description of Artificial Sequence: Synthetic polypeptide; note = VL of XENP018616

SEQ ID NO: 7397 - protein, 5 aa, synthetic construct
  source 1..5: note = Description of Artificial Sequence: Synthetic peptide; note = XENP018616 vhCDR1
NYWMN

SEQ ID NO: 7398 - protein, 19 aa, synthetic construct
  source 1..19: note = Description of Artificial Sequence: Synthetic peptide; note = XENP018616 vhCDR2
EIRLKSNTYATHYAEPVKG

SEQ ID NO: 7399 - protein, 11 aa, synthetic construct
  source 1..11: note = Description of Artificial Sequence: Synthetic peptide; note = XENP018616 vhCDR3
YYGNYGGYFDV

SEQ ID NO: 7400 - protein, 11 aa, synthetic construct
  source 1..11: note = Description of Artificial Sequence: Synthetic peptide; note = XENP018616 vlCDR1
RASQSVSNDVA

SEQ ID NO: 7401 - protein, 7 aa, synthetic construct
  source 1..7: note = Description of Artificial Sequence: Synthetic peptide; note = XENP018616 vlCDR2
YASHRYT

SEQ ID NO: 7402 - protein, 9 aa, synthetic construct
  source 1..9: note = Description of Artificial Sequence: Synthetic peptide; note = XENP018616 vlCDR3
QQDYSSPRT

SEQ ID NO: 7403 - protein, 249 aa, synthetic construct
  source 1..249: note = Description of Artificial Sequence: Synthetic polypeptide; note = XENP018617 1G6_H1.117_L1_scFv(GKPGS)4
EVQLVESGGGLVKPGGSLRLSCAASGFTFSNYWMNWVRQAPGKGLEWVGEIRLKSNGYATHYAEPVKGRFTISRDDSKSTVYLQMNSLKTEDTAVYYCTRYYGNYGGYFDVWGAGTLVTVSSGKPGSGKPGSGKPGSGKPGSSIVMTQSPATLSVSPGERATLSCRASQSVSNDVAWYQQKPGQSPRLLINYASHRYTGVPDRFTGSGYGTEFTLTISSLQSEDFAVYFCQQDYSSPRTFGGGTKVEIK

SEQ ID NO: 7404 - protein, 122 aa, synthetic construct
  source 1..122: note = Description of Artificial Sequence: Synthetic polypeptide; note = VH of XENP018617
EVQLVESGGGLVKPGGSLRLSCAASGFTFSNYWMNWVRQAPGKGLEWVGEIRLKSNGYATHYAEPVKGRFTISRDDSKSTVYLQMNSLKTEDTAVYYCTRYYGNYGGYFDVWGAGTLVTVSS

SEQ ID NO: 7405 - protein, 107 aa, synthetic construct; identical to SEQ ID NO: 6247
  source 1..107: note = Description of Artificial Sequence: Synthetic polypeptide; note = VL of XENP018617

SEQ ID NO: 7406 - protein, 5 aa, synthetic construct
  source 1..5: note = Description of Artificial Sequence: Synthetic peptide; note = XENP018617 vhCDR1
NYWMN

SEQ ID NO: 7407 - protein, 19 aa, synthetic construct
  source 1..19: note = Description of Artificial Sequence: Synthetic peptide; note = XENP018617 vhCDR2
EIRLKSNGYATHYAEPVKG

SEQ ID NO: 7408 - protein, 11 aa, synthetic construct
  source 1..11: note = Description of Artificial Sequence: Synthetic peptide; note = XENP018617 vhCDR3
YYGNYGGYFDV

SEQ ID NO: 7409 - protein, 11 aa, synthetic construct
  source 1..11: note = Description of Artificial Sequence: Synthetic peptide; note = XENP018617 vlCDR1
RASQSVSNDVA

SEQ ID NO: 7410 - protein, 7 aa, synthetic construct
  source 1..7: note = Description of Artificial Sequence: Synthetic peptide; note = XENP018617 vlCDR2
YASHRYT

SEQ ID NO: 7411 - protein, 9 aa, synthetic construct
  source 1..9: note = Description of Artificial Sequence: Synthetic peptide; note = XENP018617 vlCDR3
QQDYSSPRT

SEQ ID NO: 7412 - protein, 249 aa, synthetic construct
  source 1..249: note = Description of Artificial Sequence: Synthetic polypeptide; note = XENP018618 1G6_H1.118_L1_scFv(GKPGS)4
EVQLVESGGGLVKPGGSLRLSCAASGFTFSNYWMNWVRQAPGKGLEWVGEIRLKSNYYATHYAEPVKGRFTISRDDSKSTVYLQMNSLKTEDTAVYYCTRYYGNYGGYFDVWGAGTLVTVSSGKPGSGKPGSGKPGSGKPGSSIVMTQSPATLSVSPGERATLSCRASQSVSNDVAWYQQKPGQSPRLLINYASHRYTGVPDRFTGSGYGTEFTLTISSLQSEDFAVYFCQQDYSSPRTFGGGTKVEIK

SEQ ID NO: 7413 - protein, 122 aa, synthetic construct
  source 1..122: note = Description of Artificial Sequence: Synthetic polypeptide; note = VH of XENP018618
EVQLVESGGGLVKPGGSLRLSCAASGFTFSNYWMNWVRQAPGKGLEWVGEIRLKSNYYATHYAEPVKGRFTISRDDSKSTVYLQMNSLKTEDTAVYYCTRYYGNYGGYFDVWGAGTLVTVSS

SEQ ID NO: 7414 - protein, 107 aa, synthetic construct; identical to SEQ ID NO: 6247
  source 1..107: note = Description of Artificial Sequence: Synthetic polypeptide; note = VL of XENP018618

SEQ ID NO: 7415 - protein, 5 aa, synthetic construct
  source 1..5: note = Description of Artificial Sequence: Synthetic peptide; note = XENP018618 vhCDR1
NYWMN

SEQ ID NO: 7416 - protein, 19 aa, synthetic construct
  source 1..19: note = Description of Artificial Sequence: Synthetic peptide; note = XENP018618 vhCDR2
EIRLKSNYYATHYAEPVKG

SEQ ID NO: 7417 - protein, 11 aa, synthetic construct
  source 1..11: note = Description of Artificial Sequence: Synthetic peptide; note = XENP018618 vhCDR3
YYGNYGGYFDV

SEQ ID NO: 7418 - protein, 11 aa, synthetic construct
  source 1..11: note = Description of Artificial Sequence: Synthetic peptide; note = XENP018618 vlCDR1
RASQSVSNDVA

SEQ ID NO: 7419 - protein, 7 aa, synthetic construct
  source 1..7: note = Description of Artificial Sequence: Synthetic peptide; note = XENP018618 vlCDR2
YASHRYT

SEQ ID NO: 7420 - protein, 9 aa, synthetic construct
  source 1..9: note = Description of Artificial Sequence: Synthetic peptide; note = XENP018618 vlCDR3
QQDYSSPRT

SEQ ID NO: 7421 - protein, 249 aa, synthetic construct
  source 1..249: note = Description of Artificial Sequence: Synthetic polypeptide; note = XENP018619 1G6_H1.119_L1_scFv(GKPGS)4
EVQLVESGGGLVKPGGSLRLSCAASGFTFSNYWMNWVRQAPGKGLEWVGEIRLKSNNFATHYAEPVKGRFTISRDDSKSTVYLQMNSLKTEDTAVYYCTRYYGNYGGYFDVWGAGTLVTVSSGKPGSGKPGSGKPGSGKPGSSIVMTQSPATLSVSPGERATLSCRASQSVSNDVAWYQQKPGQSPRLLINYASHRYTGVPDRFTGSGYGTEFTLTISSLQSEDFAVYFCQQDYSSPRTFGGGTKVEIK

SEQ ID NO: 7422 - protein, 122 aa, synthetic construct
  source 1..122: note = Description of Artificial Sequence: Synthetic polypeptide; note = VH of XENP018619
EVQLVESGGGLVKPGGSLRLSCAASGFTFSNYWMNWVRQAPGKGLEWVGEIRLKSNNFATHYAEPVKGRFTISRDDSKSTVYLQMNSLKTEDTAVYYCTRYYGNYGGYFDVWGAGTLVTVSS

SEQ ID NO: 7423 - protein, 107 aa, synthetic construct; identical to SEQ ID NO: 6247
  source 1..107: note = Description of Artificial Sequence: Synthetic polypeptide; note = VL of XENP018619

SEQ ID NO: 7424 - protein, 5 aa, synthetic construct
  source 1..5: note = Description of Artificial Sequence: Synthetic peptide; note = XENP018619 vhCDR1
NYWMN

SEQ ID NO: 7425 - protein, 19 aa, synthetic construct
  source 1..19: note = Description of Artificial Sequence: Synthetic peptide; note = XENP018619 vhCDR2
EIRLKSNNFATHYAEPVKG

SEQ ID NO: 7426 - protein, 11 aa, synthetic construct
  source 1..11: note = Description of Artificial Sequence: Synthetic peptide; note = XENP018619 vhCDR3
YYGNYGGYFDV

SEQ ID NO: 7427 - protein, 11 aa, synthetic construct
  source 1..11: note = Description of Artificial Sequence: Synthetic peptide; note = XENP018619 vlCDR1
RASQSVSNDVA

SEQ ID NO: 7428 - protein, 7 aa, synthetic construct
  source 1..7: note = Description of Artificial Sequence: Synthetic peptide; note = XENP018619 vlCDR2
YASHRYT

SEQ ID NO: 7429 - protein, 9 aa, synthetic construct
  source 1..9: note = Description of Artificial Sequence: Synthetic peptide; note = XENP018619 vlCDR3
QQDYSSPRT

SEQ ID NO: 7430 - protein, 249 aa, synthetic construct
  source 1..249: note = Description of Artificial Sequence: Synthetic polypeptide; note = XENP018620 1G6_H1.120_L1_scFv(GKPGS)4
EVQLVESGGGLVKPGGSLRLSCAASGFTFSNYWMNWVRQAPGKGLEWVGEIRLKSNNHATHYAEPVKGRFTISRDDSKSTVYLQMNSLKTEDTAVYYCTRYYGNYGGYFDVWGAGTLVTVSSGKPGSGKPGSGKPGSGKPGSSIVMTQSPATLSVSPGERATLSCRASQSVSNDVAWYQQKPGQSPRLLINYASHRYTGVPDRFTGSGYGTEFTLTISSLQSEDFAVYFCQQDYSSPRTFGGGTKVEIK

SEQ ID NO: 7431 - protein, 122 aa, synthetic construct
  source 1..122: note = Description of Artificial Sequence: Synthetic polypeptide; note = VH of XENP018620
EVQLVESGGGLVKPGGSLRLSCAASGFTFSNYWMNWVRQAPGKGLEWVGEIRLKSNNHATHYAEPVKGRFTISRDDSKSTVYLQMNSLKTEDTAVYYCTRYYGNYGGYFDVWGAGTLVTVSS

SEQ ID NO: 7432 - protein, 107 aa, synthetic construct; identical to SEQ ID NO: 6247
  source 1..107: note = Description of Artificial Sequence: Synthetic polypeptide; note = VL of XENP018620

SEQ ID NO: 7433 - protein, 5 aa, synthetic construct
  source 1..5: note = Description of Artificial Sequence: Synthetic peptide; note = XENP018620 vhCDR1
NYWMN

SEQ ID NO: 7434 - protein, 19 aa, synthetic construct
  source 1..19: note = Description of Artificial Sequence: Synthetic peptide; note = XENP018620 vhCDR2
EIRLKSNNHATHYAEPVKG

SEQ ID NO: 7435 - protein, 11 aa, synthetic construct
  source 1..11: note = Description of Artificial Sequence: Synthetic peptide; note = XENP018620 vhCDR3
YYGNYGGYFDV

SEQ ID NO: 7436 - protein, 11 aa, synthetic construct
  source 1..11: note = Description of Artificial Sequence: Synthetic peptide; note = XENP018620 vlCDR1
RASQSVSNDVA

SEQ ID NO: 7437 - protein, 7 aa, synthetic construct
  source 1..7: note = Description of Artificial Sequence: Synthetic peptide; note = XENP018620 vlCDR2
YASHRYT

SEQ ID NO: 7438 - protein, 9 aa, synthetic construct
  source 1..9: note = Description of Artificial Sequence: Synthetic peptide; note = XENP018620 vlCDR3
QQDYSSPRT

SEQ ID NO: 7439 - protein, 249 aa, synthetic construct
  source 1..249: note = Description of Artificial Sequence: Synthetic polypeptide; note = XENP018621 1G6_H1.121_L1_scFv(GKPGS)4
EVQLVESGGGLVKPGGSLRLSCAASGFTFSNYWMNWVRQAPGKGLEWVGEIRLKSNNLATHYAEPVKGRFTISRDDSKSTVYLQMNSLKTEDTAVYYCTRYYGNYGGYFDVWGAGTLVTVSSGKPGSGKPGSGKPGSGKPGSSIVMTQSPATLSVSPGERATLSCRASQSVSNDVAWYQQKPGQSPRLLINYASHRYTGVPDRFTGSGYGTEFTLTISSLQSEDFAVYFCQQDYSSPRTFGGGTKVEIK

SEQ ID NO: 7440 - protein, 122 aa, synthetic construct
  source 1..122: note = Description of Artificial Sequence: Synthetic polypeptide; note = VH of XENP018621
EVQLVESGGGLVKPGGSLRLSCAASGFTFSNYWMNWVRQAPGKGLEWVGEIRLKSNNLATHYAEPVKGRFTISRDDSKSTVYLQMNSLKTEDTAVYYCTRYYGNYGGYFDVWGAGTLVTVSS

SEQ ID NO: 7441 - protein, 107 aa, synthetic construct; identical to SEQ ID NO: 6247
  source 1..107: note = Description of Artificial Sequence: Synthetic polypeptide; note = VL of XENP018621

SEQ ID NO: 7442 - protein, 5 aa, synthetic construct
  source 1..5: note = Description of Artificial Sequence: Synthetic peptide; note = XENP018621 vhCDR1
NYWMN

SEQ ID NO: 7443 - protein, 19 aa, synthetic construct
  source 1..19: note = Description of Artificial Sequence: Synthetic peptide; note = XENP018621 vhCDR2
EIRLKSNNLATHYAEPVKG

SEQ ID NO: 7444 - protein, 11 aa, synthetic construct
  source 1..11: note = Description of Artificial Sequence: Synthetic peptide; note = XENP018621 vhCDR3
YYGNYGGYFDV

SEQ ID NO: 7445 - protein, 11 aa, synthetic construct
  source 1..11: note = Description of Artificial Sequence: Synthetic peptide; note = XENP018621 vlCDR1
RASQSVSNDVA

SEQ ID NO: 7446 - protein, 7 aa, synthetic construct
  source 1..7: note = Description of Artificial Sequence: Synthetic peptide; note = XENP018621 vlCDR2
YASHRYT

SEQ ID NO: 7447 - protein, 9 aa, synthetic construct
  source 1..9: note = Description of Artificial Sequence: Synthetic peptide; note = XENP018621 vlCDR3
QQDYSSPRT

SEQ ID NO: 7448 - protein, 249 aa, synthetic construct
  source 1..249: note = Description of Artificial Sequence: Synthetic polypeptide; note = XENP018622 1G6_H1.122_L1_scFv(GKPGS)4
EVQLVESGGGLVKPGGSLRLSCAASGFTFSNYWMNWVRQAPGKGLEWVGEIRLKSNNWATHYAEPVKGRFTISRDDSKSTVYLQMNSLKTEDTAVYYCTRYYGNYGGYFDVWGAGTLVTVSSGKPGSGKPGSGKPGSGKPGSSIVMTQSPATLSVSPGERATLSCRASQSVSNDVAWYQQKPGQSPRLLINYASHRYTGVPDRFTGSGYGTEFTLTISSLQSEDFAVYFCQQDYSSPRTFGGGTKVEIK

SEQ ID NO: 7449 - protein, 122 aa, synthetic construct
  source 1..122: note = Description of Artificial Sequence: Synthetic polypeptide; note = VH of XENP018622
EVQLVESGGGLVKPGGSLRLSCAASGFTFSNYWMNWVRQAPGKGLEWVGEIRLKSNNWATHYAEPVKGRFTISRDDSKSTVYLQMNSLKTEDTAVYYCTRYYGNYGGYFDVWGAGTLVTVSS

SEQ ID NO: 7450 - protein, 107 aa, synthetic construct; identical to SEQ ID NO: 6247
  source 1..107: note = Description of Artificial Sequence: Synthetic polypeptide; note = VL of XENP018622

SEQ ID NO: 7451 - protein, 5 aa, synthetic construct
  source 1..5: note = Description of Artificial Sequence: Synthetic peptide; note = XENP018622 vhCDR1
NYWMN

SEQ ID NO: 7452 - protein, 19 aa, synthetic construct
  source 1..19: note = Description of Artificial Sequence: Synthetic peptide; note = XENP018622 vhCDR2
EIRLKSNNWATHYAEPVKG

SEQ ID NO: 7453 - protein, 11 aa, synthetic construct
  source 1..11: note = Description of Artificial Sequence: Synthetic peptide; note = XENP018622 vhCDR3
YYGNYGGYFDV

SEQ ID NO: 7454 - protein, 11 aa, synthetic construct
  source 1..11: note = Description of Artificial Sequence: Synthetic peptide; note = XENP018622 vlCDR1
RASQSVSNDVA

SEQ ID NO: 7455 - protein, 7 aa, synthetic construct
  source 1..7: note = Description of Artificial Sequence: Synthetic peptide; note = XENP018622 vlCDR2
YASHRYT

SEQ ID NO: 7456 - protein, 9 aa, synthetic construct
  source 1..9: note = Description of Artificial Sequence: Synthetic peptide; note = XENP018622 vlCDR3
QQDYSSPRT

SEQ ID NO: 7457 - protein, 249 aa, synthetic construct
  source 1..249: note = Description of Artificial Sequence: Synthetic polypeptide; note = XENP018623 1G6_H1.123_L1_scFv(GKPGS)4
EVQLVESGGGLVKPGGSLRLSCAASGFTFSNYWMNWVRQAPGKGLEWVGEIRLKSNNVATHYAEPVKGRFTISRDDSKSTVYLQMNSLKTEDTAVYYCTRYYGNYGGYFDVWGAGTLVTVSSGKPGSGKPGSGKPGSGKPGSSIVMTQSPATLSVSPGERATLSCRASQSVSNDVAWYQQKPGQSPRLLINYASHRYTGVPDRFTGSGYGTEFTLTISSLQSEDFAVYFCQQDYSSPRTFGGGTKVEIK

SEQ ID NO: 7458 - protein, 122 aa, synthetic construct
  source 1..122: note = Description of Artificial Sequence: Synthetic polypeptide; note = VH of XENP018623
EVQLVESGGGLVKPGGSLRLSCAASGFTFSNYWMNWVRQAPGKGLEWVGEIRLKSNNVATHYAEPVKGRFTISRDDSKSTVYLQMNSLKTEDTAVYYCTRYYGNYGGYFDVWGAGTLVTVSS

SEQ ID NO: 7459 - protein, 107 aa, synthetic construct; identical to SEQ ID NO: 6247
  source 1..107: note = Description of Artificial Sequence: Synthetic polypeptide; note = VL of XENP018623

SEQ ID NO: 7460 - protein, 5 aa, synthetic construct
  source 1..5: note = Description of Artificial Sequence: Synthetic peptide; note = XENP018623 vhCDR1
NYWMN

SEQ ID NO: 7461 - protein, 19 aa, synthetic construct
  source 1..19: note = Description of Artificial Sequence: Synthetic peptide; note = XENP018623 vhCDR2
EIRLKSNNVATHYAEPVKG

SEQ ID NO: 7462 - protein, 11 aa, synthetic construct
  source 1..11: note = Description of Artificial Sequence: Synthetic peptide; note = XENP018623 vhCDR3
YYGNYGGYFDV

SEQ ID NO: 7463 - protein, 11 aa, synthetic construct
  source 1..11: note = Description of Artificial Sequence: Synthetic peptide; note = XENP018623 vlCDR1
RASQSVSNDVA

SEQ ID NO: 7464 - protein, 7 aa, synthetic construct
  source 1..7: note = Description of Artificial Sequence: Synthetic peptide; note = XENP018623 vlCDR2
YASHRYT

SEQ ID NO: 7465 - protein, 9 aa, synthetic construct
  source 1..9: note = Description of Artificial Sequence: Synthetic peptide; note = XENP018623 vlCDR3
QQDYSSPRT

SEQ ID NO: 7466 - protein, 249 aa, synthetic construct
  source 1..249: note = Description of Artificial Sequence: Synthetic polypeptide; note = XENP018624 1G6_H1.124_L1_scFv(GKPGS)4
EVQLVESGGGLVKPGGSLRLSCAASGFTFSNYWMNWVRQAPGKGLEWVGEIRLKSNNAATHYAEPVKGRFTISRDDSKSTVYLQMNSLKTEDTAVYYCTRYYGNYGGYFDVWGAGTLVTVSSGKPGSGKPGSGKPGSGKPGSSIVMTQSPATLSVSPGERATLSCRASQSVSNDVAWYQQKPGQSPRLLINYASHRYTGVPDRFTGSGYGTEFTLTISSLQSEDFAVYFCQQDYSSPRTFGGGTKVEIK

SEQ ID NO: 7467 - protein, 122 aa, synthetic construct
  source 1..122: note = Description of Artificial Sequence: Synthetic polypeptide; note = VH of XENP018624
EVQLVESGGGLVKPGGSLRLSCAASGFTFSNYWMNWVRQAPGKGLEWVGEIRLKSNNAATHYAEPVKGRFTISRDDSKSTVYLQMNSLKTEDTAVYYCTRYYGNYGGYFDVWGAGTLVTVSS

SEQ ID NO: 7468 - protein, 107 aa, synthetic construct; identical to SEQ ID NO: 6247
  source 1..107: note = Description of Artificial Sequence: Synthetic polypeptide; note = VL of XENP018624

SEQ ID NO: 7469 - protein, 5 aa, synthetic construct
  source 1..5: note = Description of Artificial Sequence: Synthetic peptide; note = XENP018624 vhCDR1
NYWMN

SEQ ID NO: 7470 - protein, 19 aa, synthetic construct
  source 1..19: note = Description of Artificial Sequence: Synthetic peptide; note = XENP018624 vhCDR2
EIRLKSNNAATHYAEPVKG

SEQ ID NO: 7471 - protein, 11 aa, synthetic construct
  source 1..11: note = Description of Artificial Sequence: Synthetic peptide; note = XENP018624 vhCDR3
YYGNYGGYFDV

SEQ ID NO: 7472 - protein, 11 aa, synthetic construct
  source 1..11: note = Description of Artificial Sequence: Synthetic peptide; note = XENP018624 vlCDR1
RASQSVSNDVA

SEQ ID NO: 7473 - protein, 7 aa, synthetic construct
  source 1..7: note = Description of Artificial Sequence: Synthetic peptide; note = XENP018624 vlCDR2
YASHRYT

SEQ ID NO: 7474 - protein, 9 aa, synthetic construct
  source 1..9: note = Description of Artificial Sequence: Synthetic peptide; note = XENP018624 vlCDR3
QQDYSSPRT

SEQ ID NO: 7475 - protein, 249 aa, synthetic construct
  source 1..249: note = Description of Artificial Sequence: Synthetic polypeptide; note = XENP018625 1G6_H1.125_L1_scFv(GKPGS)4
EVQLVESGGGLVKPGGSLRLSCAASGFTFSNYWMNWVRQAPGKGLEWVGEIRLKSNNQATHYAEPVKGRFTISRDDSKSTVYLQMNSLKTEDTAVYYCTRYYGNYGGYFDVWGAGTLVTVSSGKPGSGKPGSGKPGSGKPGSSIVMTQSPATLSVSPGERATLSCRASQSVSNDVAWYQQKPGQSPRLLINYASHRYTGVPDRFTGSGYGTEFTLTISSLQSEDFAVYFCQQDYSSPRTFGGGTKVEIK

SEQ ID NO: 7476 - protein, 122 aa, synthetic construct
  source 1..122: note = Description of Artificial Sequence: Synthetic polypeptide; note = VH of XENP018625
EVQLVESGGGLVKPGGSLRLSCAASGFTFSNYWMNWVRQAPGKGLEWVGEIRLKSNNQATHYAEPVKGRFTISRDDSKSTVYLQMNSLKTEDTAVYYCTRYYGNYGGYFDVWGAGTLVTVSS

SEQ ID NO: 7477 - protein, 107 aa, synthetic construct; identical to SEQ ID NO: 6247
  source 1..107: note = Description of Artificial Sequence: Synthetic polypeptide; note = VL of XENP018625

SEQ ID NO: 7478 - protein, 5 aa, synthetic construct
  source 1..5: note = Description of Artificial Sequence: Synthetic peptide; note = XENP018625 vhCDR1
NYWMN

SEQ ID NO: 7479 - protein, 19 aa, synthetic construct
  source 1..19: note = Description of Artificial Sequence: Synthetic peptide; note = XENP018625 vhCDR2
EIRLKSNNQATHYAEPVKG

SEQ ID NO: 7480 - protein, 11 aa, synthetic construct
  source 1..11: note = Description of Artificial Sequence: Synthetic peptide; note = XENP018625 vhCDR3
YYGNYGGYFDV

SEQ ID NO: 7481 - protein, 11 aa, synthetic construct
  source 1..11: note = Description of Artificial Sequence: Synthetic peptide; note = XENP018625 vlCDR1
RASQSVSNDVA

SEQ ID NO: 7482 - protein, 7 aa, synthetic construct
  source 1..7: note = Description of Artificial Sequence: Synthetic peptide; note = XENP018625 vlCDR2
YASHRYT

SEQ ID NO: 7483 - protein, 9 aa, synthetic construct
  source 1..9: note = Description of Artificial Sequence: Synthetic peptide; note = XENP018625 vlCDR3
QQDYSSPRT

SEQ ID NO: 7484 - protein, 249 aa, synthetic construct
  source 1..249: note = Description of Artificial Sequence: Synthetic polypeptide; note = XENP018626 1G6_H1.126_L1_scFv(GKPGS)4
EVQLVESGGGLVKPGGSLRLSCAASGFTFSNYWMNWVRQAPGKGLEWVGEIRLKSNNDATHYAEPVKGRFTISRDDSKSTVYLQMNSLKTEDTAVYYCTRYYGNYGGYFDVWGAGTLVTVSSGKPGSGKPGSGKPGSGKPGSSIVMTQSPATLSVSPGERATLSCRASQSVSNDVAWYQQKPGQSPRLLINYASHRYTGVPDRFTGSGYGTEFTLTISSLQSEDFAVYFCQQDYSSPRTFGGGTKVEIK

SEQ ID NO: 7485 - protein, 122 aa, synthetic construct
  source 1..122: note = Description of Artificial Sequence: Synthetic polypeptide; note = VH of XENP018626
EVQLVESGGGLVKPGGSLRLSCAASGFTFSNYWMNWVRQAPGKGLEWVGEIRLKSNNDATHYAEPVKGRFTISRDDSKSTVYLQMNSLKTEDTAVYYCTRYYGNYGGYFDVWGAGTLVTVSS

SEQ ID NO: 7486 - protein, 107 aa, synthetic construct; identical to SEQ ID NO: 6247
  source 1..107: note = Description of Artificial Sequence: Synthetic polypeptide; note = VL of XENP018626

SEQ ID NO: 7487 - protein, 5 aa, synthetic construct
  source 1..5: note = Description of Artificial Sequence: Synthetic peptide; note = XENP018626 vhCDR1
NYWMN

SEQ ID NO: 7488 - protein, 19 aa, synthetic construct
  source 1..19: note = Description of Artificial Sequence: Synthetic peptide; note = XENP018626 vhCDR2
EIRLKSNNDATHYAEPVKG

SEQ ID NO: 7489 - protein, 11 aa, synthetic construct
  source 1..11: note = Description of Artificial Sequence: Synthetic peptide; note = XENP018626 vhCDR3
YYGNYGGYFDV

SEQ ID NO: 7490 - protein, 11 aa, synthetic construct
  source 1..11: note = Description of Artificial Sequence: Synthetic peptide; note = XENP018626 vlCDR1
RASQSVSNDVA

SEQ ID NO: 7491 - protein, 7 aa, synthetic construct
  source 1..7: note = Description of Artificial Sequence: Synthetic peptide; note = XENP018626 vlCDR2
YASHRYT

SEQ ID NO: 7492 - protein, 9 aa, synthetic construct
  source 1..9: note = Description of Artificial Sequence: Synthetic peptide; note = XENP018626 vlCDR3
QQDYSSPRT

SEQ ID NO: 7493 - protein, 249 aa, synthetic construct
  source 1..249: note = Description of Artificial Sequence: Synthetic polypeptide; note = XENP018627 1G6_H1.127_L1_scFv(GKPGS)4
EVQLVESGGGLVKPGGSLRLSCAASGFTFSNYWMNWVRQAPGKGLEWVGEIRLKSNNKATHYAEPVKGRFTISRDDSKSTVYLQMNSLKTEDTAVYYCTRYYGNYGGYFDVWGAGTLVTVSSGKPGSGKPGSGKPGSGKPGSSIVMTQSPATLSVSPGERATLSCRASQSVSNDVAWYQQKPGQSPRLLINYASHRYTGVPDRFTGSGYGTEFTLTISSLQSEDFAVYFCQQDYSSPRTFGGGTKVEIK

SEQ ID NO: 7494 - protein, 122 aa, synthetic construct
  source 1..122: note = Description of Artificial Sequence: Synthetic polypeptide; note = VH of XENP018627
EVQLVESGGGLVKPGGSLRLSCAASGFTFSNYWMNWVRQAPGKGLEWVGEIRLKSNNKATHYAEPVKGRFTISRDDSKSTVYLQMNSLKTEDTAVYYCTRYYGNYGGYFDVWGAGTLVTVSS

SEQ ID NO: 7495 - protein, 107 aa, synthetic construct; identical to SEQ ID NO: 6247
  source 1..107: note = Description of Artificial Sequence: Synthetic polypeptide; note = VL of XENP018627

SEQ ID NO: 7496 - protein, 5 aa, synthetic construct
  source 1..5: note = Description of Artificial Sequence: Synthetic peptide; note = XENP018627 vhCDR1
NYWMN

SEQ ID NO: 7497 - protein, 19 aa, synthetic construct
  source 1..19: note = Description of Artificial Sequence: Synthetic peptide; note = XENP018627 vhCDR2
EIRLKSNNKATHYAEPVKG

SEQ ID NO: 7498 - protein, 11 aa, synthetic construct
  source 1..11: note = Description of Artificial Sequence: Synthetic peptide; note = XENP018627 vhCDR3
YYGNYGGYFDV

SEQ ID NO: 7499 - protein, 11 aa, synthetic construct
  source 1..11: note = Description of Artificial Sequence: Synthetic peptide; note = XENP018627 vlCDR1
RASQSVSNDVA

SEQ ID NO: 7500 - protein, 7 aa, synthetic construct
  source 1..7: note = Description of Artificial Sequence: Synthetic peptide; note = XENP018627 vlCDR2
YASHRYT

SEQ ID NO: 7501 - protein, 9 aa, synthetic construct
  source 1..9: note = Description of Artificial Sequence: Synthetic peptide; note = XENP018627 vlCDR3
QQDYSSPRT

SEQ ID NO: 7502 - protein, 249 aa, synthetic construct
  source 1..249: note = Description of Artificial Sequence: Synthetic polypeptide; note = XENP018628 1G6_H1.128_L1_scFv(GKPGS)4
EVQLVESGGGLVKPGGSLRLSCAASGFTFSNYWMNWVRQAPGKGLEWVGEIRLKSNNYGTHYAEPVKGRFTISRDDSKSTVYLQMNSLKTEDTAVYYCTRYYGNYGGYFDVWGAGTLVTVSSGKPGSGKPGSGKPGSGKPGSSIVMTQSPATLSVSPGERATLSCRASQSVSNDVAWYQQKPGQSPRLLINYASHRYTGVPDRFTGSGYGTEFTLTISSLQSEDFAVYFCQQDYSSPRTFGGGTKVEIK

SEQ ID NO: 7503 - protein, 122 aa, synthetic construct
  source 1..122: note = Description of Artificial Sequence: Synthetic polypeptide; note = VH of XENP018628
EVQLVESGGGLVKPGGSLRLSCAASGFTFSNYWMNWVRQAPGKGLEWVGEIRLKSNNYGTHYAEPVKGRFTISRDDSKSTVYLQMNSLKTEDTAVYYCTRYYGNYGGYFDVWGAGTLVTVSS

SEQ ID NO: 7504 - protein, 107 aa, synthetic construct; identical to SEQ ID NO: 6247
  source 1..107: note = Description of Artificial Sequence: Synthetic polypeptide; note = VL of XENP018628

SEQ ID NO: 7505 - protein, 5 aa, synthetic construct
  source 1..5: note = Description of Artificial Sequence: Synthetic peptide; note = XENP018628 vhCDR1
NYWMN

SEQ ID NO: 7506 - protein, 19 aa, synthetic construct
  source 1..19: note = Description of Artificial Sequence: Synthetic peptide; note = XENP018628 vhCDR2
EIRLKSNNYGTHYAEPVKG

SEQ ID NO: 7507 - protein, 11 aa, synthetic construct
  source 1..11: note = Description of Artificial Sequence: Synthetic peptide; note = XENP018628 vhCDR3
YYGNYGGYFDV

SEQ ID NO: 7508 - protein, 11 aa, synthetic construct
  source 1..11: note = Description of Artificial Sequence: Synthetic peptide; note = XENP018628 vlCDR1
RASQSVSNDVA

SEQ ID NO: 7509 - protein, 7 aa, synthetic construct
  source 1..7: note = Description of Artificial Sequence: Synthetic peptide; note = XENP018628 vlCDR2
YASHRYT

SEQ ID NO: 7510 - protein, 9 aa, synthetic construct
  source 1..9: note = Description of Artificial Sequence: Synthetic peptide; note = XENP018628 vlCDR3
QQDYSSPRT

SEQ ID NO: 7511 - protein, 249 aa, synthetic construct
  source 1..249: note = Description of Artificial Sequence: Synthetic polypeptide; note = XENP018629 1G6_H1.129_L1_scFv(GKPGS)4
EVQLVESGGGLVKPGGSLRLSCAASGFTFSNYWMNWVRQAPGKGLEWVGEIRLKSNNYHTHYAEPVKGRFTISRDDSKSTVYLQMNSLKTEDTAVYYCTRYYGNYGGYFDVWGAGTLVTVSSGKPGSGKPGSGKPGSGKPGSSIVMTQSPATLSVSPGERATLSCRASQSVSNDVAWYQQKPGQSPRLLINYASHRYTGVPDRFTGSGYGTEFTLTISSLQSEDFAVYFCQQDYSSPRTFGGGTKVEIK

SEQ ID NO: 7512 - protein, 122 aa, synthetic construct
  source 1..122: note = Description of Artificial Sequence: Synthetic polypeptide; note = VH of XENP018629
EVQLVESGGGLVKPGGSLRLSCAASGFTFSNYWMNWVRQAPGKGLEWVGEIRLKSNNYHTHYAEPVKGRFTISRDDSKSTVYLQMNSLKTEDTAVYYCTRYYGNYGGYFDVWGAGTLVTVSS

SEQ ID NO: 7513 - protein, 107 aa, synthetic construct; identical to SEQ ID NO: 6247
  source 1..107: note = Description of Artificial Sequence: Synthetic polypeptide; note = VL of XENP018629

SEQ ID NO: 7514 - protein, 5 aa, synthetic construct
  source 1..5: note = Description of Artificial Sequence: Synthetic peptide; note = XENP018629 vhCDR1
NYWMN

SEQ ID NO: 7515 - protein, 19 aa, synthetic construct
  source 1..19: note = Description of Artificial Sequence: Synthetic peptide; note = XENP018629 vhCDR2
EIRLKSNNYHTHYAEPVKG

SEQ ID NO: 7516 - protein, 11 aa, synthetic construct
  source 1..11: note = Description of Artificial Sequence: Synthetic peptide; note = XENP018629 vhCDR3
YYGNYGGYFDV

SEQ ID NO: 7517 - protein, 11 aa, synthetic construct
  source 1..11: note = Description of Artificial Sequence: Synthetic peptide; note = XENP018629 vlCDR1
RASQSVSNDVA

SEQ ID NO: 7518 - protein, 7 aa, synthetic construct
  source 1..7: note = Description of Artificial Sequence: Synthetic peptide; note = XENP018629 vlCDR2
YASHRYT

SEQ ID NO: 7519 - protein, 9 aa, synthetic construct
  source 1..9: note = Description of Artificial Sequence: Synthetic peptide; note = XENP018629 vlCDR3
QQDYSSPRT

SEQ ID NO: 7520 - protein, 249 aa, synthetic construct
  source 1..249: note = Description of Artificial Sequence: Synthetic polypeptide; note = XENP018630 1G6_H1.130_L1_scFv(GKPGS)4
EVQLVESGGGLVKPGGSLRLSCAASGFTFSNYWMNWVRQAPGKGLEWVGEIRLKSNNYQTHYAEPVKGRFTISRDDSKSTVYLQMNSLKTEDTAVYYCTRYYGNYGGYFDVWGAGTLVTVSSGKPGSGKPGSGKPGSGKPGSSIVMTQSPATLSVSPGERATLSCRASQSVSNDVAWYQQKPGQSPRLLINYASHRYTGVPDRFTGSGYGTEFTLTISSLQSEDFAVYFCQQDYSSPRTFGGGTKVEIK

SEQ ID NO: 7521 - protein, 122 aa, synthetic construct
  source 1..122: note = Description of Artificial Sequence: Synthetic polypeptide; note = VH of XENP018630
EVQLVESGGGLVKPGGSLRLSCAASGFTFSNYWMNWVRQAPGKGLEWVGEIRLKSNNYQTHYAEPVKGRFTISRDDSKSTVYLQMNSLKTEDTAVYYCTRYYGNYGGYFDVWGAGTLVTVSS

SEQ ID NO: 7522 - protein, 107 aa, synthetic construct; identical to SEQ ID NO: 6247
  source 1..107: note = Description of Artificial Sequence: Synthetic polypeptide; note = VL of XENP018630

SEQ ID NO: 7523 - protein, 5 aa, synthetic construct
  source 1..5: note = Description of Artificial Sequence: Synthetic peptide; note = XENP018630 vhCDR1
NYWMN

SEQ ID NO: 7524 - protein, 19 aa, synthetic construct
  source 1..19: note = Description of Artificial Sequence: Synthetic peptide; note = XENP018630 vhCDR2
EIRLKSNNYQTHYAEPVKG

SEQ ID NO: 7525 - protein, 11 aa, synthetic construct
  source 1..11: note = Description of Artificial Sequence: Synthetic peptide; note = XENP018630 vhCDR3
YYGNYGGYFDV

SEQ ID NO: 7526 - protein, 11 aa, synthetic construct
  source 1..11: note = Description of Artificial Sequence: Synthetic peptide; note = XENP018630 vlCDR1
RASQSVSNDVA

SEQ ID NO: 7527 - protein, 7 aa, synthetic construct
  source 1..7: note = Description of Artificial Sequence: Synthetic peptide; note = XENP018630 vlCDR2
YASHRYT

SEQ ID NO: 7528 - protein, 9 aa, synthetic construct
  source 1..9: note = Description of Artificial Sequence: Synthetic peptide; note = XENP018630 vlCDR3
QQDYSSPRT

SEQ ID NO: 7529 - protein, 249 aa, synthetic construct
  source 1..249: note = Description of Artificial Sequence: Synthetic polypeptide; note = XENP018631 1G6_H1.131_L1_scFv(GKPGS)4
EVQLVESGGGLVKPGGSLRLSCAASGFTFSNYWMNWVRQAPGKGLEWVGEIRLKSNNYDTHYAEPVKGRFTISRDDSKSTVYLQMNSLKTEDTAVYYCTRYYGNYGGYFDVWGAGTLVTVSSGKPGSGKPGSGKPGSGKPGSSIVMTQSPATLSVSPGERATLSCRASQSVSNDVAWYQQKPGQSPRLLINYASHRYTGVPDRFTGSGYGTEFTLTISSLQSEDFAVYFCQQDYSSPRTFGGGTKVEIK

SEQ ID NO: 7530 - protein, 122 aa, synthetic construct
  source 1..122: note = Description of Artificial Sequence: Synthetic polypeptide; note = VH of XENP018631
EVQLVESGGGLVKPGGSLRLSCAASGFTFSNYWMNWVRQAPGKGLEWVGEIRLKSNNYDTHYAEPVKGRFTISRDDSKSTVYLQMNSLKTEDTAVYYCTRYYGNYGGYFDVWGAGTLVTVSS

SEQ ID NO: 7531 - protein, 107 aa, synthetic construct; identical to SEQ ID NO: 6247
  source 1..107: note = Description of Artificial Sequence: Synthetic polypeptide; note = VL of XENP018631

SEQ ID NO: 7532 - protein, 5 aa, synthetic construct
  source 1..5: note = Description of Artificial Sequence: Synthetic peptide; note = XENP018631 vhCDR1
NYWMN

SEQ ID NO: 7533 - protein, 19 aa, synthetic construct
  source 1..19: note = Description of Artificial Sequence: Synthetic peptide; note = XENP018631 vhCDR2
EIRLKSNNYDTHYAEPVKG

SEQ ID NO: 7534 - protein, 11 aa, synthetic construct
  source 1..11: note = Description of Artificial Sequence: Synthetic peptide; note = XENP018631 vhCDR3
YYGNYGGYFDV

SEQ ID NO: 7535 - protein, 11 aa, synthetic construct
  source 1..11: note = Description of Artificial Sequence: Synthetic peptide; note = XENP018631 vlCDR1
RASQSVSNDVA

SEQ ID NO: 7536 - protein, 7 aa, synthetic construct
  source 1..7: note = Description of Artificial Sequence: Synthetic peptide; note = XENP018631 vlCDR2
YASHRYT

SEQ ID NO: 7537 - protein, 9 aa, synthetic construct
  source 1..9: note = Description of Artificial Sequence: Synthetic peptide; note = XENP018631 vlCDR3
QQDYSSPRT

SEQ ID NO: 7538 - protein, 249 aa, synthetic construct
  source 1..249: note = Description of Artificial Sequence: Synthetic polypeptide; note = XENP018632 1G6_H1.132_L1_scFv(GKPGS)4
EVQLVESGGGLVKPGGSLRLSCAASGFTFSNYWMNWVRQAPGKGLEWVGEIRLKSNNYLTHYAEPVKGRFTISRDDSKSTVYLQMNSLKTEDTAVYYCTRYYGNYGGYFDVWGAGTLVTVSSGKPGSGKPGSGKPGSGKPGSSIVMTQSPATLSVSPGERATLSCRASQSVSNDVAWYQQKPGQSPRLLINYASHRYTGVPDRFTGSGYGTEFTLTISSLQSEDFAVYFCQQDYSSPRTFGGGTKVEIK

SEQ ID NO: 7539 - protein, 122 aa, synthetic construct
  source 1..122: note = Description of Artificial Sequence: Synthetic polypeptide; note = VH of XENP018632
EVQLVESGGGLVKPGGSLRLSCAASGFTFSNYWMNWVRQAPGKGLEWVGEIRLKSNNYLTHYAEPVKGRFTISRDDSKSTVYLQMNSLKTEDTAVYYCTRYYGNYGGYFDVWGAGTLVTVSS

SEQ ID NO: 7540 - protein, 107 aa, synthetic construct; identical to SEQ ID NO: 6247
  source 1..107: note = Description of Artificial Sequence: Synthetic polypeptide; note = VL of XENP018632

SEQ ID NO: 7541 - protein, 5 aa, synthetic construct
  source 1..5: note = Description of Artificial Sequence: Synthetic peptide; note = XENP018632 vhCDR1
NYWMN

SEQ ID NO: 7542 - protein, 19 aa, synthetic construct
  source 1..19: note = Description of Artificial Sequence: Synthetic peptide; note = XENP018632 vhCDR2
EIRLKSNNYLTHYAEPVKG

SEQ ID NO: 7543 - protein, 11 aa, synthetic construct
  source 1..11: note = Description of Artificial Sequence: Synthetic peptide; note = XENP018632 vhCDR3
YYGNYGGYFDV

SEQ ID NO: 7544 - protein, 11 aa, synthetic construct
  source 1..11: note = Description of Artificial Sequence: Synthetic peptide; note = XENP018632 vlCDR1
RASQSVSNDVA

SEQ ID NO: 7545 - protein, 7 aa, synthetic construct
  source 1..7: note = Description of Artificial Sequence: Synthetic peptide; note = XENP018632 vlCDR2
YASHRYT

SEQ ID NO: 7546 - protein, 9 aa, synthetic construct
  source 1..9: note = Description of Artificial Sequence: Synthetic peptide; note = XENP018632 vlCDR3
QQDYSSPRT

SEQ ID NO: 7547 - protein, 249 aa, synthetic construct
  source 1..249: note = Description of Artificial Sequence: Synthetic polypeptide; note = XENP018633 1G6_H1.133_L1_scFv(GKPGS)4
EVQLVESGGGLVKPGGSLRLSCAASGFTFSNYWMNWVRQAPGKGLEWVGEIRLKSNNYKTHYAEPVKGRFTISRDDSKSTVYLQMNSLKTEDTAVYYCTRYYGNYGGYFDVWGAGTLVTVSSGKPGSGKPGSGKPGSGKPGSSIVMTQSPATLSVSPGERATLSCRASQSVSNDVAWYQQKPGQSPRLLINYASHRYTGVPDRFTGSGYGTEFTLTISSLQSEDFAVYFCQQDYSSPRTFGGGTKVEIK

SEQ ID NO: 7548 - protein, 122 aa, synthetic construct
  source 1..122: note = Description of Artificial Sequence: Synthetic polypeptide; note = VH of XENP018633
EVQLVESGGGLVKPGGSLRLSCAASGFTFSNYWMNWVRQAPGKGLEWVGEIRLKSNNYKTHYAEPVKGRFTISRDDSKSTVYLQMNSLKTEDTAVYYCTRYYGNYGGYFDVWGAGTLVTVSS

SEQ ID NO: 7549 - protein, 107 aa, synthetic construct; identical to SEQ ID NO: 6247
  source 1..107: note = Description of Artificial Sequence: Synthetic polypeptide; note = VL of XENP018633

SEQ ID NO: 7550 - protein, 5 aa, synthetic construct
  source 1..5: note = Description of Artificial Sequence: Synthetic peptide; note = XENP018633 vhCDR1
NYWMN

SEQ ID NO: 7551 - protein, 19 aa, synthetic construct
  source 1..19: note = Description of Artificial Sequence: Synthetic peptide; note = XENP018633 vhCDR2
EIRLKSNNYKTHYAEPVKG

SEQ ID NO: 7552 - protein, 11 aa, synthetic construct
  source 1..11: note = Description of Artificial Sequence: Synthetic peptide; note = XENP018633 vhCDR3
YYGNYGGYFDV

SEQ ID NO: 7553 - protein, 11 aa, synthetic construct
  source 1..11: note = Description of Artificial Sequence: Synthetic peptide; note = XENP018633 vlCDR1
RASQSVSNDVA

SEQ ID NO: 7554 - protein, 7 aa, synthetic construct
  source 1..7: note = Description of Artificial Sequence: Synthetic peptide; note = XENP018633 vlCDR2
YASHRYT

SEQ ID NO: 7555 - protein, 9 aa, synthetic construct
  source 1..9: note = Description of Artificial Sequence: Synthetic peptide; note = XENP018633 vlCDR3
QQDYSSPRT

SEQ ID NO: 7556 - protein, 249 aa, synthetic construct
  source 1..249: note = Description of Artificial Sequence: Synthetic polypeptide; note = XENP018634 1G6_H1.134_L1_scFv(GKPGS)4
EVQLVESGGGLVKPGGSLRLSCAASGFTFSNYWMNWVRQAPGKGLEWVGEIRLKSNNYYTHYAEPVKGRFTISRDDSKSTVYLQMNSLKTEDTAVYYCTRYYGNYGGYFDVWGAGTLVTVSSGKPGSGKPGSGKPGSGKPGSSIVMTQSPATLSVSPGERATLSCRASQSVSNDVAWYQQKPGQSPRLLINYASHRYTGVPDRFTGSGYGTEFTLTISSLQSEDFAVYFCQQDYSSPRTFGGGTKVEIK

SEQ ID NO: 7557 - protein, 122 aa, synthetic construct
  source 1..122: note = Description of Artificial Sequence: Synthetic polypeptide; note = VH of XENP018634
EVQLVESGGGLVKPGGSLRLSCAASGFTFSNYWMNWVRQAPGKGLEWVGEIRLKSNNYYTHYAEPVKGRFTISRDDSKSTVYLQMNSLKTEDTAVYYCTRYYGNYGGYFDVWGAGTLVTVSS

SEQ ID NO: 7558 - protein, 107 aa, synthetic construct; identical to SEQ ID NO: 6247
  source 1..107: note = Description of Artificial Sequence: Synthetic polypeptide; note = VL of XENP018634

SEQ ID NO: 7559 - protein, 5 aa, synthetic construct
  source 1..5: note = Description of Artificial Sequence: Synthetic peptide; note = XENP018634 vhCDR1
NYWMN

SEQ ID NO: 7560 - protein, 19 aa, synthetic construct
  source 1..19: note = Description of Artificial Sequence: Synthetic peptide; note = XENP018634 vhCDR2
EIRLKSNNYYTHYAEPVKG

SEQ ID NO: 7561 - protein, 11 aa, synthetic construct
  source 1..11: note = Description of Artificial Sequence: Synthetic peptide; note = XENP018634 vhCDR3
YYGNYGGYFDV

SEQ ID NO: 7562 - protein, 11 aa, synthetic construct
  source 1..11: note = Description of Artificial Sequence: Synthetic peptide; note = XENP018634 vlCDR1
RASQSVSNDVA

SEQ ID NO: 7563 - protein, 7 aa, synthetic construct
  source 1..7: note = Description of Artificial Sequence: Synthetic peptide; note = XENP018634 vlCDR2
YASHRYT

SEQ ID NO: 7564 - protein, 9 aa, synthetic construct
  source 1..9: note = Description of Artificial Sequence: Synthetic peptide; note = XENP018634 vlCDR3
QQDYSSPRT

SEQ ID NO: 7565 - protein, 249 aa, synthetic construct
  source 1..249: note = Description of Artificial Sequence: Synthetic polypeptide; note = XENP018635 1G6_H1.135_L1_scFv(GKPGS)4
EVQLVESGGGLVKPGGSLRLSCAASGFTFSNYWMNWVRQAPGKGLEWVGEIRLKSNNYAKHYAEPVKGRFTISRDDSKSTVYLQMNSLKTEDTAVYYCTRYYGNYGGYFDVWGAGTLVTVSSGKPGSGKPGSGKPGSGKPGSSIVMTQSPATLSVSPGERATLSCRASQSVSNDVAWYQQKPGQSPRLLINYASHRYTGVPDRFTGSGYGTEFTLTISSLQSEDFAVYFCQQDYSSPRTFGGGTKVEIK

SEQ ID NO: 7566 - protein, 122 aa, synthetic construct
  source 1..122: note = Description of Artificial Sequence: Synthetic polypeptide; note = VH of XENP018635
EVQLVESGGGLVKPGGSLRLSCAASGFTFSNYWMNWVRQAPGKGLEWVGEIRLKSNNYAKHYAEPVKGRFTISRDDSKSTVYLQMNSLKTEDTAVYYCTRYYGNYGGYFDVWGAGTLVTVSS

SEQ ID NO: 7567 - protein, 107 aa, synthetic construct; identical to SEQ ID NO: 6247
  source 1..107: note = Description of Artificial Sequence: Synthetic polypeptide; note = VL of XENP018635

SEQ ID NO: 7568 - protein, 5 aa, synthetic construct
  source 1..5: note = Description of Artificial Sequence: Synthetic peptide; note = XENP018635 vhCDR1
NYWMN

SEQ ID NO: 7569 - protein, 19 aa, synthetic construct
  source 1..19: note = Description of Artificial Sequence: Synthetic peptide; note = XENP018635 vhCDR2
EIRLKSNNYAKHYAEPVKG

SEQ ID NO: 7570 - protein, 11 aa, synthetic construct
  source 1..11: note = Description of Artificial Sequence: Synthetic peptide; note = XENP018635 vhCDR3
YYGNYGGYFDV

SEQ ID NO: 7571 - protein, 11 aa, synthetic construct
  source 1..11: note = Description of Artificial Sequence: Synthetic peptide; note = XENP018635 vlCDR1
RASQSVSNDVA

SEQ ID NO: 7572 - protein, 7 aa, synthetic construct
  source 1..7: note = Description of Artificial Sequence: Synthetic peptide; note = XENP018635 vlCDR2
YASHRYT

SEQ ID NO: 7573 - protein, 9 aa, synthetic construct
  source 1..9: note = Description of Artificial Sequence: Synthetic peptide; note = XENP018635 vlCDR3
QQDYSSPRT

SEQ ID NO: 7574 - protein, 249 aa, synthetic construct
  source 1..249: note = Description of Artificial Sequence: Synthetic polypeptide; note = XENP018636 1G6_H1.136_L1_scFv(GKPGS)4
EVQLVESGGGLVKPGGSLRLSCAASGFTFSNYWMNWVRQAPGKGLEWVGEIRLKSNNYAIHYAEPVKGRFTISRDDSKSTVYLQMNSLKTEDTAVYYCTRYYGNYGGYFDVWGAGTLVTVSSGKPGSGKPGSGKPGSGKPGSSIVMTQSPATLSVSPGERATLSCRASQSVSNDVAWYQQKPGQSPRLLINYASHRYTGVPDRFTGSGYGTEFTLTISSLQSEDFAVYFCQQDYSSPRTFGGGTKVEIK

SEQ ID NO: 7575 - protein, 122 aa, synthetic construct
  source 1..122: note = Description of Artificial Sequence: Synthetic polypeptide; note = VH of XENP018636
EVQLVESGGGLVKPGGSLRLSCAASGFTFSNYWMNWVRQAPGKGLEWVGEIRLKSNNYAIHYAEPVKGRFTISRDDSKSTVYLQMNSLKTEDTAVYYCTRYYGNYGGYFDVWGAGTLVTVSS

SEQ ID NO: 7576 - protein, 107 aa, synthetic construct; identical to SEQ ID NO: 6247
  source 1..107: note = Description of Artificial Sequence: Synthetic polypeptide; note = VL of XENP018636

SEQ ID NO: 7577 - protein, 5 aa, synthetic construct
  source 1..5: note = Description of Artificial Sequence: Synthetic peptide; note = XENP018636 vhCDR1
NYWMN

SEQ ID NO: 7578 - protein, 19 aa, synthetic construct
  source 1..19: note = Description of Artificial Sequence: Synthetic peptide; note = XENP018636 vhCDR2
EIRLKSNNYAIHYAEPVKG

SEQ ID NO: 7579 - protein, 11 aa, synthetic construct
  source 1..11: note = Description of Artificial Sequence: Synthetic peptide; note = XENP018636 vhCDR3
YYGNYGGYFDV

SEQ ID NO: 7580 - protein, 11 aa, synthetic construct
  source 1..11: note = Description of Artificial Sequence: Synthetic peptide; note = XENP018636 vlCDR1
RASQSVSNDVA

SEQ ID NO: 7581 - protein, 7 aa, synthetic construct
  source 1..7: note = Description of Artificial Sequence: Synthetic peptide; note = XENP018636 vlCDR2
YASHRYT

SEQ ID NO: 7582 - protein, 9 aa, synthetic construct
  source 1..9: note = Description of Artificial Sequence: Synthetic peptide; note = XENP018636 vlCDR3
QQDYSSPRT

SEQ ID NO: 7583 - protein, 249 aa, synthetic construct
  source 1..249: note = Description of Artificial Sequence: Synthetic polypeptide; note = XENP018637 1G6_H1.137_L1_scFv(GKPGS)4
EVQLVESGGGLVKPGGSLRLSCAASGFTFSNYWMNWVRQAPGKGLEWVGEIRLKSNNYATYYAEPVKGRFTISRDDSKSTVYLQMNSLKTEDTAVYYCTRYYGNYGGYFDVWGAGTLVTVSSGKPGSGKPGSGKPGSGKPGSSIVMTQSPATLSVSPGERATLSCRASQSVSNDVAWYQQKPGQSPRLLINYASHRYTGVPDRFTGSGYGTEFTLTISSLQSEDFAVYFCQQDYSSPRTFGGGTKVEIK

SEQ ID NO: 7584 - protein, 122 aa, synthetic construct
  source 1..122: note = Description of Artificial Sequence: Synthetic polypeptide; note = VH of XENP018637
EVQLVESGGGLVKPGGSLRLSCAASGFTFSNYWMNWVRQAPGKGLEWVGEIRLKSNNYATYYAEPVKGRFTISRDDSKSTVYLQMNSLKTEDTAVYYCTRYYGNYGGYFDVWGAGTLVTVSS

SEQ ID NO: 7585 - protein, 107 aa, synthetic construct; identical to SEQ ID NO: 6247
  source 1..107: note = Description of Artificial Sequence: Synthetic polypeptide; note = VL of XENP018637

SEQ ID NO: 7586 - protein, 5 aa, synthetic construct
  source 1..5: note = Description of Artificial Sequence: Synthetic peptide; note = XENP018637 vhCDR1
NYWMN

SEQ ID NO: 7587 - protein, 19 aa, synthetic construct
  source 1..19: note = Description of Artificial Sequence: Synthetic peptide; note = XENP018637 vhCDR2
EIRLKSNNYATYYAEPVKG

SEQ ID NO: 7588 - protein, 11 aa, synthetic construct
  source 1..11: note = Description of Artificial Sequence: Synthetic peptide; note = XENP018637 vhCDR3
YYGNYGGYFDV

SEQ ID NO: 7589 - protein, 11 aa, synthetic construct
  source 1..11: note = Description of Artificial Sequence: Synthetic peptide; note = XENP018637 vlCDR1
RASQSVSNDVA

SEQ ID NO: 7590 - protein, 7 aa, synthetic construct
  source 1..7: note = Description of Artificial Sequence: Synthetic peptide; note = XENP018637 vlCDR2
YASHRYT

SEQ ID NO: 7591 - protein, 9 aa, synthetic construct
  source 1..9: note = Description of Artificial Sequence: Synthetic peptide; note = XENP018637 vlCDR3
QQDYSSPRT

SEQ ID NO: 7592 - protein, 249 aa, synthetic construct
  source 1..249: note = Description of Artificial Sequence: Synthetic polypeptide; note = XENP018638 1G6_H1.138_L1_scFv(GKPGS)4
EVQLVESGGGLVKPGGSLRLSCAASGFTFSNYWMNWVRQAPGKGLEWVGEIRLKSNNYATQYAEPVKGRFTISRDDSKSTVYLQMNSLKTEDTAVYYCTRYYGNYGGYFDVWGAGTLVTVSSGKPGSGKPGSGKPGSGKPGSSIVMTQSPATLSVSPGERATLSCRASQSVSNDVAWYQQKPGQSPRLLINYASHRYTGVPDRFTGSGYGTEFTLTISSLQSEDFAVYFCQQDYSSPRTFGGGTKVEIK

SEQ ID NO: 7593 - protein, 122 aa, synthetic construct
  source 1..122: note = Description of Artificial Sequence: Synthetic polypeptide; note = VH of XENP018638
EVQLVESGGGLVKPGGSLRLSCAASGFTFSNYWMNWVRQAPGKGLEWVGEIRLKSNNYATQYAEPVKGRFTISRDDSKSTVYLQMNSLKTEDTAVYYCTRYYGNYGGYFDVWGAGTLVTVSS

SEQ ID NO: 7594 - protein, 107 aa, synthetic construct; identical to SEQ ID NO: 6247
  source 1..107: note = Description of Artificial Sequence: Synthetic polypeptide; note = VL of XENP018638

SEQ ID NO: 7595 - protein, 5 aa, synthetic construct
  source 1..5: note = Description of Artificial Sequence: Synthetic peptide; note = XENP018638 vhCDR1
NYWMN

SEQ ID NO: 7596 - protein, 19 aa, synthetic construct
  source 1..19: note = Description of Artificial Sequence: Synthetic peptide; note = XENP018638 vhCDR2
EIRLKSNNYATQYAEPVKG

SEQ ID NO: 7597 - protein, 11 aa, synthetic construct
  source 1..11: note = Description of Artificial Sequence: Synthetic peptide; note = XENP018638 vhCDR3
YYGNYGGYFDV

SEQ ID NO: 7598 - protein, 11 aa, synthetic construct
  source 1..11: note = Description of Artificial Sequence: Synthetic peptide; note = XENP018638 vlCDR1
RASQSVSNDVA

SEQ ID NO: 7599 - protein, 7 aa, synthetic construct
  source 1..7: note = Description of Artificial Sequence: Synthetic peptide; note = XENP018638 vlCDR2
YASHRYT

SEQ ID NO: 7600 - protein, 9 aa, synthetic construct
  source 1..9: note = Description of Artificial Sequence: Synthetic peptide; note = XENP018638 vlCDR3
QQDYSSPRT

SEQ ID NO: 7601 - protein, 249 aa, synthetic construct
  source 1..249: note = Description of Artificial Sequence: Synthetic polypeptide; note = XENP018639 1G6_H1.139_L1_scFv(GKPGS)4
EVQLVESGGGLVKPGGSLRLSCAASGFTFSNYWMNWVRQAPGKGLEWVGEIRLKSNNYATDYAEPVKGRFTISRDDSKSTVYLQMNSLKTEDTAVYYCTRYYGNYGGYFDVWGAGTLVTVSSGKPGSGKPGSGKPGSGKPGSSIVMTQSPATLSVSPGERATLSCRASQSVSNDVAWYQQKPGQSPRLLINYASHRYTGVPDRFTGSGYGTEFTLTISSLQSEDFAVYFCQQDYSSPRTFGGGTKVEIK

SEQ ID NO: 7602 - protein, 122 aa, synthetic construct
  source 1..122: note = Description of Artificial Sequence: Synthetic polypeptide; note = VH of XENP018639
EVQLVESGGGLVKPGGSLRLSCAASGFTFSNYWMNWVRQAPGKGLEWVGEIRLKSNNYATDYAEPVKGRFTISRDDSKSTVYLQMNSLKTEDTAVYYCTRYYGNYGGYFDVWGAGTLVTVSS

SEQ ID NO: 7603 - protein, 107 aa, synthetic construct; identical to SEQ ID NO: 6247
  source 1..107: note = Description of Artificial Sequence: Synthetic polypeptide; note = VL of XENP018639

SEQ ID NO: 7604 - protein, 5 aa, synthetic construct
  source 1..5: note = Description of Artificial Sequence: Synthetic peptide; note = XENP018639 vhCDR1
NYWMN

SEQ ID NO: 7605 - protein, 19 aa, synthetic construct
  source 1..19: note = Description of Artificial Sequence: Synthetic peptide; note = XENP018639 vhCDR2
EIRLKSNNYATDYAEPVKG

SEQ ID NO: 7606 - protein, 11 aa, synthetic construct
  source 1..11: note = Description of Artificial Sequence: Synthetic peptide; note = XENP018639 vhCDR3
YYGNYGGYFDV

SEQ ID NO: 7607 - protein, 11 aa, synthetic construct
  source 1..11: note = Description of Artificial Sequence: Synthetic peptide; note = XENP018639 vlCDR1
RASQSVSNDVA

SEQ ID NO: 7608 - protein, 7 aa, synthetic construct
  source 1..7: note = Description of Artificial Sequence: Synthetic peptide; note = XENP018639 vlCDR2
YASHRYT

SEQ ID NO: 7609 - protein, 9 aa, synthetic construct
  source 1..9: note = Description of Artificial Sequence: Synthetic peptide; note = XENP018639 vlCDR3
QQDYSSPRT

SEQ ID NO: 7610 - protein, 249 aa, synthetic construct
  source 1..249: note = Description of Artificial Sequence: Synthetic polypeptide; note = XENP018640 1G6_H1.140_L1_scFv(GKPGS)4
EVQLVESGGGLVKPGGSLRLSCAASGFTFSNYWMNWVRQAPGKGLEWVGEIRLKSNNYATFYAEPVKGRFTISRDDSKSTVYLQMNSLKTEDTAVYYCTRYYGNYGGYFDVWGAGTLVTVSSGKPGSGKPGSGKPGSGKPGSSIVMTQSPATLSVSPGERATLSCRASQSVSNDVAWYQQKPGQSPRLLINYASHRYTGVPDRFTGSGYGTEFTLTISSLQSEDFAVYFCQQDYSSPRTFGGGTKVEIK

SEQ ID NO: 7611 - protein, 122 aa, synthetic construct
  source 1..122: note = Description of Artificial Sequence: Synthetic polypeptide; note = VH of XENP018640
EVQLVESGGGLVKPGGSLRLSCAASGFTFSNYWMNWVRQAPGKGLEWVGEIRLKSNNYATFYAEPVKGRFTISRDDSKSTVYLQMNSLKTEDTAVYYCTRYYGNYGGYFDVWGAGTLVTVSS

SEQ ID NO: 7612 - protein, 107 aa, synthetic construct; identical to SEQ ID NO: 6247
  source 1..107: note = Description of Artificial Sequence: Synthetic polypeptide; note = VL of XENP018640

SEQ ID NO: 7613 - protein, 5 aa, synthetic construct
  source 1..5: note = Description of Artificial Sequence: Synthetic peptide; note = XENP018640 vhCDR1
NYWMN

SEQ ID NO: 7614 - protein, 19 aa, synthetic construct
  source 1..19: note = Description of Artificial Sequence: Synthetic peptide; note = XENP018640 vhCDR2
EIRLKSNNYATFYAEPVKG

SEQ ID NO: 7615 - protein, 11 aa, synthetic construct
  source 1..11: note = Description of Artificial Sequence: Synthetic peptide; note = XENP018640 vhCDR3
YYGNYGGYFDV

SEQ ID NO: 7616 - protein, 11 aa, synthetic construct
  source 1..11: note = Description of Artificial Sequence: Synthetic peptide; note = XENP018640 vlCDR1
RASQSVSNDVA

SEQ ID NO: 7617 - protein, 7 aa, synthetic construct
  source 1..7: note = Description of Artificial Sequence: Synthetic peptide; note = XENP018640 vlCDR2
YASHRYT

SEQ ID NO: 7618 - protein, 9 aa, synthetic construct
  source 1..9: note = Description of Artificial Sequence: Synthetic peptide; note = XENP018640 vlCDR3
QQDYSSPRT

SEQ ID NO: 7619 - protein, 249 aa, synthetic construct
  source 1..249: note = Description of Artificial Sequence: Synthetic polypeptide; note = XENP018641 1G6_H1.141_L1_scFv(GKPGS)4
EVQLVESGGGLVKPGGSLRLSCAASGFTFSNYWMNWVRQAPGKGLEWVGEIRLKSNNYATAYAEPVKGRFTISRDDSKSTVYLQMNSLKTEDTAVYYCTRYYGNYGGYFDVWGAGTLVTVSSGKPGSGKPGSGKPGSGKPGSSIVMTQSPATLSVSPGERATLSCRASQSVSNDVAWYQQKPGQSPRLLINYASHRYTGVPDRFTGSGYGTEFTLTISSLQSEDFAVYFCQQDYSSPRTFGGGTKVEIK

SEQ ID NO: 7620 - protein, 122 aa, synthetic construct
  source 1..122: note = Description of Artificial Sequence: Synthetic polypeptide; note = VH of XENP018641
EVQLVESGGGLVKPGGSLRLSCAASGFTFSNYWMNWVRQAPGKGLEWVGEIRLKSNNYATAYAEPVKGRFTISRDDSKSTVYLQMNSLKTEDTAVYYCTRYYGNYGGYFDVWGAGTLVTVSS

SEQ ID NO: 7621 - protein, 107 aa, synthetic construct; identical to SEQ ID NO: 6247
  source 1..107: note = Description of Artificial Sequence: Synthetic polypeptide; note = VL of XENP018641

SEQ ID NO: 7622 - protein, 5 aa, synthetic construct
  source 1..5: note = Description of Artificial Sequence: Synthetic peptide; note = XENP018641 vhCDR1
NYWMN

SEQ ID NO: 7623 - protein, 19 aa, synthetic construct
  source 1..19: note = Description of Artificial Sequence: Synthetic peptide; note = XENP018641 vhCDR2
EIRLKSNNYATAYAEPVKG

SEQ ID NO: 7624 - protein, 11 aa, synthetic construct
  source 1..11: note = Description of Artificial Sequence: Synthetic peptide; note = XENP018641 vhCDR3
YYGNYGGYFDV

SEQ ID NO: 7625 - protein, 11 aa, synthetic construct
  source 1..11: note = Description of Artificial Sequence: Synthetic peptide; note = XENP018641 vlCDR1
RASQSVSNDVA

SEQ ID NO: 7626 - protein, 7 aa, synthetic construct
  source 1..7: note = Description of Artificial Sequence: Synthetic peptide; note = XENP018641 vlCDR2
YASHRYT

SEQ ID NO: 7627 - protein, 9 aa, synthetic construct
  source 1..9: note = Description of Artificial Sequence: Synthetic peptide; note = XENP018641 vlCDR3
QQDYSSPRT

SEQ ID NO: 7628 - protein, 249 aa, synthetic construct
  source 1..249: note = Description of Artificial Sequence: Synthetic polypeptide; note = XENP018642 1G6_H1.142_L1_scFv(GKPGS)4
EVQLVESGGGLVKPGGSLRLSCAASGFTFSNYWMNWVRQAPGKGLEWVGEIRLKSNNYATTYAEPVKGRFTISRDDSKSTVYLQMNSLKTEDTAVYYCTRYYGNYGGYFDVWGAGTLVTVSSGKPGSGKPGSGKPGSGKPGSSIVMTQSPATLSVSPGERATLSCRASQSVSNDVAWYQQKPGQSPRLLINYASHRYTGVPDRFTGSGYGTEFTLTISSLQSEDFAVYFCQQDYSSPRTFGGGTKVEIK

SEQ ID NO: 7629 - protein, 122 aa, synthetic construct
  source 1..122: note = Description of Artificial Sequence: Synthetic polypeptide; note = VH of XENP018642
EVQLVESGGGLVKPGGSLRLSCAASGFTFSNYWMNWVRQAPGKGLEWVGEIRLKSNNYATTYAEPVKGRFTISRDDSKSTVYLQMNSLKTEDTAVYYCTRYYGNYGGYFDVWGAGTLVTVSS

SEQ ID NO: 7630 - protein, 107 aa, synthetic construct; identical to SEQ ID NO: 6247
  source 1..107: note = Description of Artificial Sequence: Synthetic polypeptide; note = VL of XENP018642

SEQ ID NO: 7631 - protein, 5 aa, synthetic construct
  source 1..5: note = Description of Artificial Sequence: Synthetic peptide; note = XENP018642 vhCDR1
NYWMN

SEQ ID NO: 7632 - protein, 19 aa, synthetic construct
  source 1..19: note = Description of Artificial Sequence: Synthetic peptide; note = XENP018642 vhCDR2
EIRLKSNNYATTYAEPVKG

SEQ ID NO: 7633 - protein, 11 aa, synthetic construct
  source 1..11: note = Description of Artificial Sequence: Synthetic peptide; note = XENP018642 vhCDR3
YYGNYGGYFDV

SEQ ID NO: 7634 - protein, 11 aa, synthetic construct
  source 1..11: note = Description of Artificial Sequence: Synthetic peptide; note = XENP018642 vlCDR1
RASQSVSNDVA

SEQ ID NO: 7635 - protein, 7 aa, synthetic construct
  source 1..7: note = Description of Artificial Sequence: Synthetic peptide; note = XENP018642 vlCDR2
YASHRYT

SEQ ID NO: 7636 - protein, 9 aa, synthetic construct
  source 1..9: note = Description of Artificial Sequence: Synthetic peptide; note = XENP018642 vlCDR3
QQDYSSPRT

SEQ ID NO: 7637 - protein, 249 aa, synthetic construct
  source 1..249: note = Description of Artificial Sequence: Synthetic polypeptide; note = XENP018643 1G6_H1.143_L1_scFv(GKPGS)4
EVQLVESGGGLVKPGGSLRLSCAASGFTFSNYWMNWVRQAPGKGLEWVGEIRLKSNNYATKYAEPVKGRFTISRDDSKSTVYLQMNSLKTEDTAVYYCTRYYGNYGGYFDVWGAGTLVTVSSGKPGSGKPGSGKPGSGKPGSSIVMTQSPATLSVSPGERATLSCRASQSVSNDVAWYQQKPGQSPRLLINYASHRYTGVPDRFTGSGYGTEFTLTISSLQSEDFAVYFCQQDYSSPRTFGGGTKVEIK

SEQ ID NO: 7638 - protein, 122 aa, synthetic construct
  source 1..122: note = Description of Artificial Sequence: Synthetic polypeptide; note = VH of XENP018643
EVQLVESGGGLVKPGGSLRLSCAASGFTFSNYWMNWVRQAPGKGLEWVGEIRLKSNNYATKYAEPVKGRFTISRDDSKSTVYLQMNSLKTEDTAVYYCTRYYGNYGGYFDVWGAGTLVTVSS

SEQ ID NO: 7639 - protein, 107 aa, synthetic construct; identical to SEQ ID NO: 6247
  source 1..107: note = Description of Artificial Sequence: Synthetic polypeptide; note = VL of XENP018643

SEQ ID NO: 7640 - protein, 5 aa, synthetic construct
  source 1..5: note = Description of Artificial Sequence: Synthetic peptide; note = XENP018643 vhCDR1
NYWMN

SEQ ID NO: 7641 - protein, 19 aa, synthetic construct
  source 1..19: note = Description of Artificial Sequence: Synthetic peptide; note = XENP018643 vhCDR2
EIRLKSNNYATKYAEPVKG

SEQ ID NO: 7642 - protein, 11 aa, synthetic construct
  source 1..11: note = Description of Artificial Sequence: Synthetic peptide; note = XENP018643 vhCDR3
YYGNYGGYFDV

SEQ ID NO: 7643 - protein, 11 aa, synthetic construct
  source 1..11: note = Description of Artificial Sequence: Synthetic peptide; note = XENP018643 vlCDR1
RASQSVSNDVA

SEQ ID NO: 7644 - protein, 7 aa, synthetic construct
  source 1..7: note = Description of Artificial Sequence: Synthetic peptide; note = XENP018643 vlCDR2
YASHRYT

SEQ ID NO: 7645 - protein, 9 aa, synthetic construct
  source 1..9: note = Description of Artificial Sequence: Synthetic peptide; note = XENP018643 vlCDR3
QQDYSSPRT

SEQ ID NO: 7646 - protein, 249 aa, synthetic construct
  source 1..249: note = Description of Artificial Sequence: Synthetic polypeptide; note = XENP018644 1G6_H1.144_L1_scFv(GKPGS)4
EVQLVESGGGLVKPGGSLRLSCAASGFTFSNYWMNWVRQAPGKGLEWVGEIRLKSNNYATGYAEPVKGRFTISRDDSKSTVYLQMNSLKTEDTAVYYCTRYYGNYGGYFDVWGAGTLVTVSSGKPGSGKPGSGKPGSGKPGSSIVMTQSPATLSVSPGERATLSCRASQSVSNDVAWYQQKPGQSPRLLINYASHRYTGVPDRFTGSGYGTEFTLTISSLQSEDFAVYFCQQDYSSPRTFGGGTKVEIK

SEQ ID NO: 7647 - protein, 122 aa, synthetic construct
  source 1..122: note = Description of Artificial Sequence: Synthetic polypeptide; note = VH of XENP018644
EVQLVESGGGLVKPGGSLRLSCAASGFTFSNYWMNWVRQAPGKGLEWVGEIRLKSNNYATGYAEPVKGRFTISRDDSKSTVYLQMNSLKTEDTAVYYCTRYYGNYGGYFDVWGAGTLVTVSS

SEQ ID NO: 7648 - protein, 107 aa, synthetic construct; identical to SEQ ID NO: 6247
  source 1..107: note = Description of Artificial Sequence: Synthetic polypeptide; note = VL of XENP018644

SEQ ID NO: 7649 - protein, 5 aa, synthetic construct
  source 1..5: note = Description of Artificial Sequence: Synthetic peptide; note = XENP018644 vhCDR1
NYWMN

SEQ ID NO: 7650 - protein, 19 aa, synthetic construct
  source 1..19: note = Description of Artificial Sequence: Synthetic peptide; note = XENP018644 vhCDR2
EIRLKSNNYATGYAEPVKG

SEQ ID NO: 7651 - protein, 11 aa, synthetic construct
  source 1..11: note = Description of Artificial Sequence: Synthetic peptide; note = XENP018644 vhCDR3
YYGNYGGYFDV

SEQ ID NO: 7652 - protein, 11 aa, synthetic construct
  source 1..11: note = Description of Artificial Sequence: Synthetic peptide; note = XENP018644 vlCDR1
RASQSVSNDVA

SEQ ID NO: 7653 - protein, 7 aa, synthetic construct
  source 1..7: note = Description of Artificial Sequence: Synthetic peptide; note = XENP018644 vlCDR2
YASHRYT

SEQ ID NO: 7654 - protein, 9 aa, synthetic construct
  source 1..9: note = Description of Artificial Sequence: Synthetic peptide; note = XENP018644 vlCDR3
QQDYSSPRT

SEQ ID NO: 7655 - protein, 249 aa, synthetic construct
  source 1..249: note = Description of Artificial Sequence: Synthetic polypeptide; note = XENP018645 1G6_H1.145_L1_scFv(GKPGS)4
EVQLVESGGGLVKPGGSLRLSCAASGFTFSNYWMNWVRQAPGKGLEWVGEIRLKSNNYATLYAEPVKGRFTISRDDSKSTVYLQMNSLKTEDTAVYYCTRYYGNYGGYFDVWGAGTLVTVSSGKPGSGKPGSGKPGSGKPGSSIVMTQSPATLSVSPGERATLSCRASQSVSNDVAWYQQKPGQSPRLLINYASHRYTGVPDRFTGSGYGTEFTLTISSLQSEDFAVYFCQQDYSSPRTFGGGTKVEIK

SEQ ID NO: 7656 - protein, 122 aa, synthetic construct
  source 1..122: note = Description of Artificial Sequence: Synthetic polypeptide; note = VH of XENP018645
EVQLVESGGGLVKPGGSLRLSCAASGFTFSNYWMNWVRQAPGKGLEWVGEIRLKSNNYATLYAEPVKGRFTISRDDSKSTVYLQMNSLKTEDTAVYYCTRYYGNYGGYFDVWGAGTLVTVSS

SEQ ID NO: 7657 - protein, 107 aa, synthetic construct; identical to SEQ ID NO: 6247
  source 1..107: note = Description of Artificial Sequence: Synthetic polypeptide; note = VL of XENP018645

SEQ ID NO: 7658 - protein, 5 aa, synthetic construct
  source 1..5: note = Description of Artificial Sequence: Synthetic peptide; note = XENP018645 vhCDR1
NYWMN

SEQ ID NO: 7659 - protein, 19 aa, synthetic construct
  source 1..19: note = Description of Artificial Sequence: Synthetic peptide; note = XENP018645 vhCDR2
EIRLKSNNYATLYAEPVKG

SEQ ID NO: 7660 - protein, 11 aa, synthetic construct
  source 1..11: note = Description of Artificial Sequence: Synthetic peptide; note = XENP018645 vhCDR3
YYGNYGGYFDV

SEQ ID NO: 7661 - protein, 11 aa, synthetic construct
  source 1..11: note = Description of Artificial Sequence: Synthetic peptide; note = XENP018645 vlCDR1
RASQSVSNDVA

SEQ ID NO: 7662 - protein, 7 aa, synthetic construct
  source 1..7: note = Description of Artificial Sequence: Synthetic peptide; note = XENP018645 vlCDR2
YASHRYT

SEQ ID NO: 7663 - protein, 9 aa, synthetic construct
  source 1..9: note = Description of Artificial Sequence: Synthetic peptide; note = XENP018645 vlCDR3
QQDYSSPRT

SEQ ID NO: 7664 - protein, 249 aa, synthetic construct
  source 1..249: note = Description of Artificial Sequence: Synthetic polypeptide; note = XENP018646 1G6_H1.146_L1_scFv(GKPGS)4
EVQLVESGGGLVKPGGSLRLSCAASGFTFSNYWMNWVRQAPGKGLEWVGEIRLKSNNYATHYPEPVKGRFTISRDDSKSTVYLQMNSLKTEDTAVYYCTRYYGNYGGYFDVWGAGTLVTVSSGKPGSGKPGSGKPGSGKPGSSIVMTQSPATLSVSPGERATLSCRASQSVSNDVAWYQQKPGQSPRLLINYASHRYTGVPDRFTGSGYGTEFTLTISSLQSEDFAVYFCQQDYSSPRTFGGGTKVEIK

SEQ ID NO: 7665 - protein, 122 aa, synthetic construct
  source 1..122: note = Description of Artificial Sequence: Synthetic polypeptide; note = VH of XENP018646
EVQLVESGGGLVKPGGSLRLSCAASGFTFSNYWMNWVRQAPGKGLEWVGEIRLKSNNYATHYPEPVKGRFTISRDDSKSTVYLQMNSLKTEDTAVYYCTRYYGNYGGYFDVWGAGTLVTVSS

SEQ ID NO: 7666 - protein, 107 aa, synthetic construct; identical to SEQ ID NO: 6247
  source 1..107: note = Description of Artificial Sequence: Synthetic polypeptide; note = VL of XENP018646

SEQ ID NO: 7667 - protein, 5 aa, synthetic construct
  source 1..5: note = Description of Artificial Sequence: Synthetic peptide; note = XENP018646 vhCDR1
NYWMN

SEQ ID NO: 7668 - protein, 19 aa, synthetic construct
  source 1..19: note = Description of Artificial Sequence: Synthetic peptide; note = XENP018646 vhCDR2
EIRLKSNNYATHYPEPVKG

SEQ ID NO: 7669 - protein, 11 aa, synthetic construct
  source 1..11: note = Description of Artificial Sequence: Synthetic peptide; note = XENP018646 vhCDR3
YYGNYGGYFDV

SEQ ID NO: 7670 - protein, 11 aa, synthetic construct
  source 1..11: note = Description of Artificial Sequence: Synthetic peptide; note = XENP018646 vlCDR1
RASQSVSNDVA

SEQ ID NO: 7671 - protein, 7 aa, synthetic construct
  source 1..7: note = Description of Artificial Sequence: Synthetic peptide; note = XENP018646 vlCDR2
YASHRYT

SEQ ID NO: 7672 - protein, 9 aa, synthetic construct
  source 1..9: note = Description of Artificial Sequence: Synthetic peptide; note = XENP018646 vlCDR3
QQDYSSPRT

SEQ ID NO: 7673 - protein, 249 aa, synthetic construct
  source 1..249: note = Description of Artificial Sequence: Synthetic polypeptide; note = XENP018647 1G6_H1.147_L1_scFv(GKPGS)4
EVQLVESGGGLVKPGGSLRLSCAASGFTFSNYWMNWVRQAPGKGLEWVGEIRLKSNNYATHYVEPVKGRFTISRDDSKSTVYLQMNSLKTEDTAVYYCTRYYGNYGGYFDVWGAGTLVTVSSGKPGSGKPGSGKPGSGKPGSSIVMTQSPATLSVSPGERATLSCRASQSVSNDVAWYQQKPGQSPRLLINYASHRYTGVPDRFTGSGYGTEFTLTISSLQSEDFAVYFCQQDYSSPRTFGGGTKVEIK

SEQ ID NO: 7674 - protein, 122 aa, synthetic construct
  source 1..122: note = Description of Artificial Sequence: Synthetic polypeptide; note = VH of XENP018647
EVQLVESGGGLVKPGGSLRLSCAASGFTFSNYWMNWVRQAPGKGLEWVGEIRLKSNNYATHYVEPVKGRFTISRDDSKSTVYLQMNSLKTEDTAVYYCTRYYGNYGGYFDVWGAGTLVTVSS

SEQ ID NO: 7675 - protein, 107 aa, synthetic construct; identical to SEQ ID NO: 6247
  source 1..107: note = Description of Artificial Sequence: Synthetic polypeptide; note = VL of XENP018647

SEQ ID NO: 7676 - protein, 5 aa, synthetic construct
  source 1..5: note = Description of Artificial Sequence: Synthetic peptide; note = XENP018647 vhCDR1
NYWMN

SEQ ID NO: 7677 - protein, 19 aa, synthetic construct
  source 1..19: note = Description of Artificial Sequence: Synthetic peptide; note = XENP018647 vhCDR2
EIRLKSNNYATHYVEPVKG

SEQ ID NO: 7678 - protein, 11 aa, synthetic construct
  source 1..11: note = Description of Artificial Sequence: Synthetic peptide; note = XENP018647 vhCDR3
YYGNYGGYFDV

SEQ ID NO: 7679 - protein, 11 aa, synthetic construct
  source 1..11: note = Description of Artificial Sequence: Synthetic peptide; note = XENP018647 vlCDR1
RASQSVSNDVA

SEQ ID NO: 7680 - protein, 7 aa, synthetic construct
  source 1..7: note = Description of Artificial Sequence: Synthetic peptide; note = XENP018647 vlCDR2
YASHRYT

SEQ ID NO: 7681 - protein, 9 aa, synthetic construct
  source 1..9: note = Description of Artificial Sequence: Synthetic peptide; note = XENP018647 vlCDR3
QQDYSSPRT

SEQ ID NO: 7682 - protein, 249 aa, synthetic construct
  source 1..249: note = Description of Artificial Sequence: Synthetic polypeptide; note = XENP018648 1G6_H1.148_L1_scFv(GKPGS)4
EVQLVESGGGLVKPGGSLRLSCAASGFTFSNYWMNWVRQAPGKGLEWVGEIRLKSNNYATHYADPVKGRFTISRDDSKSTVYLQMNSLKTEDTAVYYCTRYYGNYGGYFDVWGAGTLVTVSSGKPGSGKPGSGKPGSGKPGSSIVMTQSPATLSVSPGERATLSCRASQSVSNDVAWYQQKPGQSPRLLINYASHRYTGVPDRFTGSGYGTEFTLTISSLQSEDFAVYFCQQDYSSPRTFGGGTKVEIK

SEQ ID NO: 7683 - protein, 122 aa, synthetic construct
  source 1..122: note = Description of Artificial Sequence: Synthetic polypeptide; note = VH of XENP018648
EVQLVESGGGLVKPGGSLRLSCAASGFTFSNYWMNWVRQAPGKGLEWVGEIRLKSNNYATHYADPVKGRFTISRDDSKSTVYLQMNSLKTEDTAVYYCTRYYGNYGGYFDVWGAGTLVTVSS

SEQ ID NO: 7684 - protein, 107 aa, synthetic construct; identical to SEQ ID NO: 6247
  source 1..107: note = Description of Artificial Sequence: Synthetic polypeptide; note = VL of XENP018648

SEQ ID NO: 7685 - protein, 5 aa, synthetic construct
  source 1..5: note = Description of Artificial Sequence: Synthetic peptide; note = XENP018648 vhCDR1
NYWMN

SEQ ID NO: 7686 - protein, 19 aa, synthetic construct
  source 1..19: note = Description of Artificial Sequence: Synthetic peptide; note = XENP018648 vhCDR2
EIRLKSNNYATHYADPVKG

SEQ ID NO: 7687 - protein, 11 aa, synthetic construct
  source 1..11: note = Description of Artificial Sequence: Synthetic peptide; note = XENP018648 vhCDR3
YYGNYGGYFDV

SEQ ID NO: 7688 - protein, 11 aa, synthetic construct
  source 1..11: note = Description of Artificial Sequence: Synthetic peptide; note = XENP018648 vlCDR1
RASQSVSNDVA

SEQ ID NO: 7689 - protein, 7 aa, synthetic construct
  source 1..7: note = Description of Artificial Sequence: Synthetic peptide; note = XENP018648 vlCDR2
YASHRYT

SEQ ID NO: 7690 - protein, 9 aa, synthetic construct
  source 1..9: note = Description of Artificial Sequence: Synthetic peptide; note = XENP018648 vlCDR3
QQDYSSPRT

SEQ ID NO: 7691 - protein, 249 aa, synthetic construct
  source 1..249: note = Description of Artificial Sequence: Synthetic polypeptide; note = XENP018649 1G6_H1.149_L1_scFv(GKPGS)4
EVQLVESGGGLVKPGGSLRLSCAASGFTFSNYWMNWVRQAPGKGLEWVGEIRLKSNNYATHYAGPVKGRFTISRDDSKSTVYLQMNSLKTEDTAVYYCTRYYGNYGGYFDVWGAGTLVTVSSGKPGSGKPGSGKPGSGKPGSSIVMTQSPATLSVSPGERATLSCRASQSVSNDVAWYQQKPGQSPRLLINYASHRYTGVPDRFTGSGYGTEFTLTISSLQSEDFAVYFCQQDYSSPRTFGGGTKVEIK

SEQ ID NO: 7692 - protein, 122 aa, synthetic construct
  source 1..122: note = Description of Artificial Sequence: Synthetic polypeptide; note = VH of XENP018649
EVQLVESGGGLVKPGGSLRLSCAASGFTFSNYWMNWVRQAPGKGLEWVGEIRLKSNNYATHYAGPVKGRFTISRDDSKSTVYLQMNSLKTEDTAVYYCTRYYGNYGGYFDVWGAGTLVTVSS

SEQ ID NO: 7693 - protein, 107 aa, synthetic construct; identical to SEQ ID NO: 6247
  source 1..107: note = Description of Artificial Sequence: Synthetic polypeptide; note = VL of XENP018649

SEQ ID NO: 7694 - protein, 5 aa, synthetic construct
  source 1..5: note = Description of Artificial Sequence: Synthetic peptide; note = XENP018649 vhCDR1
NYWMN

SEQ ID NO: 7695 - protein, 19 aa, synthetic construct
  source 1..19: note = Description of Artificial Sequence: Synthetic peptide; note = XENP018649 vhCDR2
EIRLKSNNYATHYAGPVKG

SEQ ID NO: 7696 - protein, 11 aa, synthetic construct
  source 1..11: note = Description of Artificial Sequence: Synthetic peptide; note = XENP018649 vhCDR3
YYGNYGGYFDV

SEQ ID NO: 7697 - protein, 11 aa, synthetic construct
  source 1..11: note = Description of Artificial Sequence: Synthetic peptide; note = XENP018649 vlCDR1
RASQSVSNDVA

SEQ ID NO: 7698 - protein, 7 aa, synthetic construct
  source 1..7: note = Description of Artificial Sequence: Synthetic peptide; note = XENP018649 vlCDR2
YASHRYT

SEQ ID NO: 7699 - protein, 9 aa, synthetic construct
  source 1..9: note = Description of Artificial Sequence: Synthetic peptide; note = XENP018649 vlCDR3
QQDYSSPRT

SEQ ID NO: 7700 - protein, 249 aa, synthetic construct
  source 1..249: note = Description of Artificial Sequence: Synthetic polypeptide; note = XENP018650 1G6_H1.150_L1_scFv(GKPGS)4
EVQLVESGGGLVKPGGSLRLSCAASGFTFSNYWMNWVRQAPGKGLEWVGEIRLKSNNYATHYAAPVKGRFTISRDDSKSTVYLQMNSLKTEDTAVYYCTRYYGNYGGYFDVWGAGTLVTVSSGKPGSGKPGSGKPGSGKPGSSIVMTQSPATLSVSPGERATLSCRASQSVSNDVAWYQQKPGQSPRLLINYASHRYTGVPDRFTGSGYGTEFTLTISSLQSEDFAVYFCQQDYSSPRTFGGGTKVEIK

SEQ ID NO: 7701 - protein, 122 aa, synthetic construct
  source 1..122: note = Description of Artificial Sequence: Synthetic polypeptide; note = VH of XENP018650
EVQLVESGGGLVKPGGSLRLSCAASGFTFSNYWMNWVRQAPGKGLEWVGEIRLKSNNYATHYAAPVKGRFTISRDDSKSTVYLQMNSLKTEDTAVYYCTRYYGNYGGYFDVWGAGTLVTVSS

SEQ ID NO: 7702 - protein, 107 aa, synthetic construct; identical to SEQ ID NO: 6247
  source 1..107: note = Description of Artificial Sequence: Synthetic polypeptide; note = VL of XENP018650

SEQ ID NO: 7703 - protein, 5 aa, synthetic construct
  source 1..5: note = Description of Artificial Sequence: Synthetic peptide; note = XENP018650 vhCDR1
NYWMN

SEQ ID NO: 7704 - protein, 19 aa, synthetic construct
  source 1..19: note = Description of Artificial Sequence: Synthetic peptide; note = XENP018650 vhCDR2
EIRLKSNNYATHYAAPVKG

SEQ ID NO: 7705 - protein, 11 aa, synthetic construct
  source 1..11: note = Description of Artificial Sequence: Synthetic peptide; note = XENP018650 vhCDR3
YYGNYGGYFDV

SEQ ID NO: 7706 - protein, 11 aa, synthetic construct
  source 1..11: note = Description of Artificial Sequence: Synthetic peptide; note = XENP018650 vlCDR1
RASQSVSNDVA

SEQ ID NO: 7707 - protein, 7 aa, synthetic construct
  source 1..7: note = Description of Artificial Sequence: Synthetic peptide; note = XENP018650 vlCDR2
YASHRYT

SEQ ID NO: 7708 - protein, 9 aa, synthetic construct
  source 1..9: note = Description of Artificial Sequence: Synthetic peptide; note = XENP018650 vlCDR3
QQDYSSPRT

SEQ ID NO: 7709 - protein, 249 aa, synthetic construct
  source 1..249: note = Description of Artificial Sequence: Synthetic polypeptide; note = XENP018651 1G6_H1.151_L1_scFv(GKPGS)4
EVQLVESGGGLVKPGGSLRLSCAASGFTFSNYWMNWVRQAPGKGLEWVGEIRLKSNNYATHYAESVKGRFTISRDDSKSTVYLQMNSLKTEDTAVYYCTRYYGNYGGYFDVWGAGTLVTVSSGKPGSGKPGSGKPGSGKPGSSIVMTQSPATLSVSPGERATLSCRASQSVSNDVAWYQQKPGQSPRLLINYASHRYTGVPDRFTGSGYGTEFTLTISSLQSEDFAVYFCQQDYSSPRTFGGGTKVEIK

SEQ ID NO: 7710 - protein, 122 aa, synthetic construct
  source 1..122: note = Description of Artificial Sequence: Synthetic polypeptide; note = VH of XENP018651
EVQLVESGGGLVKPGGSLRLSCAASGFTFSNYWMNWVRQAPGKGLEWVGEIRLKSNNYATHYAESVKGRFTISRDDSKSTVYLQMNSLKTEDTAVYYCTRYYGNYGGYFDVWGAGTLVTVSS

SEQ ID NO: 7711 - protein, 107 aa, synthetic construct; identical to SEQ ID NO: 6247
  source 1..107: note = Description of Artificial Sequence: Synthetic polypeptide; note = VL of XENP018651

SEQ ID NO: 7712 - protein, 5 aa, synthetic construct
  source 1..5: note = Description of Artificial Sequence: Synthetic peptide; note = XENP018651 vhCDR1
NYWMN

SEQ ID NO: 7713 - protein, 19 aa, synthetic construct
  source 1..19: note = Description of Artificial Sequence: Synthetic peptide; note = XENP018651 vhCDR2
EIRLKSNNYATHYAESVKG

SEQ ID NO: 7714 - protein, 11 aa, synthetic construct
  source 1..11: note = Description of Artificial Sequence: Synthetic peptide; note = XENP018651 vhCDR3
YYGNYGGYFDV

SEQ ID NO: 7715 - protein, 11 aa, synthetic construct
  source 1..11: note = Description of Artificial Sequence: Synthetic peptide; note = XENP018651 vlCDR1
RASQSVSNDVA

SEQ ID NO: 7716 - protein, 7 aa, synthetic construct
  source 1..7: note = Description of Artificial Sequence: Synthetic peptide; note = XENP018651 vlCDR2
YASHRYT

SEQ ID NO: 7717 - protein, 9 aa, synthetic construct
  source 1..9: note = Description of Artificial Sequence: Synthetic peptide; note = XENP018651 vlCDR3
QQDYSSPRT

SEQ ID NO: 7718 - protein, 249 aa, synthetic construct
  source 1..249: note = Description of Artificial Sequence: Synthetic polypeptide; note = XENP018652 1G6_H1.152_L1_scFv(GKPGS)4
EVQLVESGGGLVKPGGSLRLSCAASGFTFSNYWMNWVRQAPGKGLEWVGEIRLKSNNYATHYAEPVKGRFTISRDNSKSTVYLQMNSLKTEDTAVYYCTRYYGNYGGYFDVWGAGTLVTVSSGKPGSGKPGSGKPGSGKPGSSIVMTQSPATLSVSPGERATLSCRASQSVSNDVAWYQQKPGQSPRLLINYASHRYTGVPDRFTGSGYGTEFTLTISSLQSEDFAVYFCQQDYSSPRTFGGGTKVEIK

SEQ ID NO: 7719 - protein, 122 aa, synthetic construct
  source 1..122: note = Description of Artificial Sequence: Synthetic polypeptide; note = VH of XENP018652
EVQLVESGGGLVKPGGSLRLSCAASGFTFSNYWMNWVRQAPGKGLEWVGEIRLKSNNYATHYAEPVKGRFTISRDNSKSTVYLQMNSLKTEDTAVYYCTRYYGNYGGYFDVWGAGTLVTVSS

SEQ ID NO: 7720 - protein, 107 aa, synthetic construct; identical to SEQ ID NO: 6247
  source 1..107: note = Description of Artificial Sequence: Synthetic polypeptide; note = VL of XENP018652

SEQ ID NO: 7721 - protein, 5 aa, synthetic construct
  source 1..5: note = Description of Artificial Sequence: Synthetic peptide; note = XENP018652 vhCDR1
NYWMN

SEQ ID NO: 7722 - protein, 19 aa, synthetic construct
  source 1..19: note = Description of Artificial Sequence: Synthetic peptide; note = XENP018652 vhCDR2
EIRLKSNNYATHYAEPVKG

SEQ ID NO: 7723 - protein, 11 aa, synthetic construct
  source 1..11: note = Description of Artificial Sequence: Synthetic peptide; note = XENP018652 vhCDR3
YYGNYGGYFDV

SEQ ID NO: 7724 - protein, 11 aa, synthetic construct
  source 1..11: note = Description of Artificial Sequence: Synthetic peptide; note = XENP018652 vlCDR1
RASQSVSNDVA

SEQ ID NO: 7725 - protein, 7 aa, synthetic construct
  source 1..7: note = Description of Artificial Sequence: Synthetic peptide; note = XENP018652 vlCDR2
YASHRYT

SEQ ID NO: 7726 - protein, 9 aa, synthetic construct
  source 1..9: note = Description of Artificial Sequence: Synthetic peptide; note = XENP018652 vlCDR3
QQDYSSPRT

SEQ ID NO: 7727 - protein, 249 aa, synthetic construct
  source 1..249: note = Description of Artificial Sequence: Synthetic polypeptide; note = XENP018653 1G6_H1.153_L1_scFv(GKPGS)4
EVQLVESGGGLVKPGGSLRLSCAASGFTFSNYWMNWVRQAPGKGLEWVGEIRLKSNNYATHYAEPVKGRFTISRDDSKNTVYLQMNSLKTEDTAVYYCTRYYGNYGGYFDVWGAGTLVTVSSGKPGSGKPGSGKPGSGKPGSSIVMTQSPATLSVSPGERATLSCRASQSVSNDVAWYQQKPGQSPRLLINYASHRYTGVPDRFTGSGYGTEFTLTISSLQSEDFAVYFCQQDYSSPRTFGGGTKVEIK

SEQ ID NO: 7728 - protein, 122 aa, synthetic construct
  source 1..122: note = Description of Artificial Sequence: Synthetic polypeptide; note = VH of XENP018653
EVQLVESGGGLVKPGGSLRLSCAASGFTFSNYWMNWVRQAPGKGLEWVGEIRLKSNNYATHYAEPVKGRFTISRDDSKNTVYLQMNSLKTEDTAVYYCTRYYGNYGGYFDVWGAGTLVTVSS

SEQ ID NO: 7729 - protein, 107 aa, synthetic construct; identical to SEQ ID NO: 6247
  source 1..107: note = Description of Artificial Sequence: Synthetic polypeptide; note = VL of XENP018653

SEQ ID NO: 7730 - protein, 5 aa, synthetic construct
  source 1..5: note = Description of Artificial Sequence: Synthetic peptide; note = XENP018653 vhCDR1
NYWMN

SEQ ID NO: 7731 - protein, 19 aa, synthetic construct
  source 1..19: note = Description of Artificial Sequence: Synthetic peptide; note = XENP018653 vhCDR2
EIRLKSNNYATHYAEPVKG

SEQ ID NO: 7732 - protein, 11 aa, synthetic construct
  source 1..11: note = Description of Artificial Sequence: Synthetic peptide; note = XENP018653 vhCDR3
YYGNYGGYFDV

SEQ ID NO: 7733 - protein, 11 aa, synthetic construct
  source 1..11: note = Description of Artificial Sequence: Synthetic peptide; note = XENP018653 vlCDR1
RASQSVSNDVA

SEQ ID NO: 7734 - protein, 7 aa, synthetic construct
  source 1..7: note = Description of Artificial Sequence: Synthetic peptide; note = XENP018653 vlCDR2
YASHRYT

SEQ ID NO: 7735 - protein, 9 aa, synthetic construct
  source 1..9: note = Description of Artificial Sequence: Synthetic peptide; note = XENP018653 vlCDR3
QQDYSSPRT

SEQ ID NO: 7736 - protein, 249 aa, synthetic construct
  source 1..249: note = Description of Artificial Sequence: Synthetic polypeptide; note = XENP018654 1G6_H1.154_L1_scFv(GKPGS)4
EVQLVESGGGLVKPGGSLRLSCAASGFTFSNYWMNWVRQAPGKGLEWVGEIRLKSNNYATHYAEPVKGRFTISRDDSKSSVYLQMNSLKTEDTAVYYCTRYYGNYGGYFDVWGAGTLVTVSSGKPGSGKPGSGKPGSGKPGSSIVMTQSPATLSVSPGERATLSCRASQSVSNDVAWYQQKPGQSPRLLINYASHRYTGVPDRFTGSGYGTEFTLTISSLQSEDFAVYFCQQDYSSPRTFGGGTKVEIK

SEQ ID NO: 7737 - protein, 122 aa, synthetic construct
  source 1..122: note = Description of Artificial Sequence: Synthetic polypeptide; note = VH of XENP018654
EVQLVESGGGLVKPGGSLRLSCAASGFTFSNYWMNWVRQAPGKGLEWVGEIRLKSNNYATHYAEPVKGRFTISRDDSKSSVYLQMNSLKTEDTAVYYCTRYYGNYGGYFDVWGAGTLVTVSS

SEQ ID NO: 7738 - protein, 107 aa, synthetic construct; identical to SEQ ID NO: 6247
  source 1..107: note = Description of Artificial Sequence: Synthetic polypeptide; note = VL of XENP018654

SEQ ID NO: 7739 - protein, 5 aa, synthetic construct
  source 1..5: note = Description of Artificial Sequence: Synthetic peptide; note = XENP018654 vhCDR1
NYWMN

SEQ ID NO: 7740 - protein, 19 aa, synthetic construct
  source 1..19: note = Description of Artificial Sequence: Synthetic peptide; note = XENP018654 vhCDR2
EIRLKSNNYATHYAEPVKG

SEQ ID NO: 7741 - protein, 11 aa, synthetic construct
  source 1..11: note = Description of Artificial Sequence: Synthetic peptide; note = XENP018654 vhCDR3
YYGNYGGYFDV

SEQ ID NO: 7742 - protein, 11 aa, synthetic construct
  source 1..11: note = Description of Artificial Sequence: Synthetic peptide; note = XENP018654 vlCDR1
RASQSVSNDVA

SEQ ID NO: 7743 - protein, 7 aa, synthetic construct
  source 1..7: note = Description of Artificial Sequence: Synthetic peptide; note = XENP018654 vlCDR2
YASHRYT

SEQ ID NO: 7744 - protein, 9 aa, synthetic construct
  source 1..9: note = Description of Artificial Sequence: Synthetic peptide; note = XENP018654 vlCDR3
QQDYSSPRT

SEQ ID NO: 7745 - protein, 249 aa, synthetic construct
  source 1..249: note = Description of Artificial Sequence: Synthetic polypeptide; note = XENP018655 1G6_H1.155_L1_scFv(GKPGS)4
EVQLVESGGGLVKPGGSLRLSCAASGFTFSNYWMNWVRQAPGKGLEWVGEIRLKSNNYATHYAEPVKGRFTISRDDSKSTLYLQMNSLKTEDTAVYYCTRYYGNYGGYFDVWGAGTLVTVSSGKPGSGKPGSGKPGSGKPGSSIVMTQSPATLSVSPGERATLSCRASQSVSNDVAWYQQKPGQSPRLLINYASHRYTGVPDRFTGSGYGTEFTLTISSLQSEDFAVYFCQQDYSSPRTFGGGTKVEIK

SEQ ID NO: 7746 - protein, 122 aa, synthetic construct
  source 1..122: note = Description of Artificial Sequence: Synthetic polypeptide; note = VH of XENP018655
EVQLVESGGGLVKPGGSLRLSCAASGFTFSNYWMNWVRQAPGKGLEWVGEIRLKSNNYATHYAEPVKGRFTISRDDSKSTLYLQMNSLKTEDTAVYYCTRYYGNYGGYFDVWGAGTLVTVSS

SEQ ID NO: 7747 - protein, 107 aa, synthetic construct; identical to SEQ ID NO: 6247
  source 1..107: note = Description of Artificial Sequence: Synthetic polypeptide; note = VL of XENP018655

SEQ ID NO: 7748 - protein, 5 aa, synthetic construct
  source 1..5: note = Description of Artificial Sequence: Synthetic peptide; note = XENP018655 vhCDR1
NYWMN

SEQ ID NO: 7749 - protein, 19 aa, synthetic construct
  source 1..19: note = Description of Artificial Sequence: Synthetic peptide; note = XENP018655 vhCDR2
EIRLKSNNYATHYAEPVKG

SEQ ID NO: 7750 - protein, 11 aa, synthetic construct
  source 1..11: note = Description of Artificial Sequence: Synthetic peptide; note = XENP018655 vhCDR3
YYGNYGGYFDV

SEQ ID NO: 7751 - protein, 11 aa, synthetic construct
  source 1..11: note = Description of Artificial Sequence: Synthetic peptide; note = XENP018655 vlCDR1
RASQSVSNDVA

SEQ ID NO: 7752 - protein, 7 aa, synthetic construct
  source 1..7: note = Description of Artificial Sequence: Synthetic peptide; note = XENP018655 vlCDR2
YASHRYT

SEQ ID NO: 7753 - protein, 9 aa, synthetic construct
  source 1..9: note = Description of Artificial Sequence: Synthetic peptide; note = XENP018655 vlCDR3
QQDYSSPRT

SEQ ID NO: 7754 - protein, 249 aa, synthetic construct
  source 1..249: note = Description of Artificial Sequence: Synthetic polypeptide; note = XENP018656 1G6_H1.156_L1_scFv(GKPGS)4
EVQLVESGGGLVKPGGSLRLSCAASGFTFSNYWMNWVRQAPGKGLEWVGEIRLKSNNYATHYAEPVKGRFTISRDDSKSTAYLQMNSLKTEDTAVYYCTRYYGNYGGYFDVWGAGTLVTVSSGKPGSGKPGSGKPGSGKPGSSIVMTQSPATLSVSPGERATLSCRASQSVSNDVAWYQQKPGQSPRLLINYASHRYTGVPDRFTGSGYGTEFTLTISSLQSEDFAVYFCQQDYSSPRTFGGGTKVEIK

SEQ ID NO: 7755 - protein, 122 aa, synthetic construct
  source 1..122: note = Description of Artificial Sequence: Synthetic polypeptide; note = VH of XENP018656
EVQLVESGGGLVKPGGSLRLSCAASGFTFSNYWMNWVRQAPGKGLEWVGEIRLKSNNYATHYAEPVKGRFTISRDDSKSTAYLQMNSLKTEDTAVYYCTRYYGNYGGYFDVWGAGTLVTVSS

SEQ ID NO: 7756 - protein, 107 aa, synthetic construct; identical to SEQ ID NO: 6247
  source 1..107: note = Description of Artificial Sequence: Synthetic polypeptide; note = VL of XENP018656

SEQ ID NO: 7757 - protein, 5 aa, synthetic construct
  source 1..5: note = Description of Artificial Sequence: Synthetic peptide; note = XENP018656 vhCDR1
NYWMN

SEQ ID NO: 7758 - protein, 19 aa, synthetic construct
  source 1..19: note = Description of Artificial Sequence: Synthetic peptide; note = XENP018656 vhCDR2
EIRLKSNNYATHYAEPVKG

SEQ ID NO: 7759 - protein, 11 aa, synthetic construct
  source 1..11: note = Description of Artificial Sequence: Synthetic peptide; note = XENP018656 vhCDR3
YYGNYGGYFDV

SEQ ID NO: 7760 - protein, 11 aa, synthetic construct
  source 1..11: note = Description of Artificial Sequence: Synthetic peptide; note = XENP018656 vlCDR1
RASQSVSNDVA

SEQ ID NO: 7761 - protein, 7 aa, synthetic construct
  source 1..7: note = Description of Artificial Sequence: Synthetic peptide; note = XENP018656 vlCDR2
YASHRYT

SEQ ID NO: 7762 - protein, 9 aa, synthetic construct
  source 1..9: note = Description of Artificial Sequence: Synthetic peptide; note = XENP018656 vlCDR3
QQDYSSPRT

SEQ ID NO: 7763 - protein, 249 aa, synthetic construct
  source 1..249: note = Description of Artificial Sequence: Synthetic polypeptide; note = XENP018657 1G6_H1.157_L1_scFv(GKPGS)4
EVQLVESGGGLVKPGGSLRLSCAASGFTFSNYWMNWVRQAPGKGLEWVGEIRLKSNNYATHYAEPVKGRFTISRDDSKSTVYLQMNNLKTEDTAVYYCTRYYGNYGGYFDVWGAGTLVTVSSGKPGSGKPGSGKPGSGKPGSSIVMTQSPATLSVSPGERATLSCRASQSVSNDVAWYQQKPGQSPRLLINYASHRYTGVPDRFTGSGYGTEFTLTISSLQSEDFAVYFCQQDYSSPRTFGGGTKVEIK

SEQ ID NO: 7764 - protein, 122 aa, synthetic construct
  source 1..122: note = Description of Artificial Sequence: Synthetic polypeptide; note = VH of XENP018657
EVQLVESGGGLVKPGGSLRLSCAASGFTFSNYWMNWVRQAPGKGLEWVGEIRLKSNNYATHYAEPVKGRFTISRDDSKSTVYLQMNNLKTEDTAVYYCTRYYGNYGGYFDVWGAGTLVTVSS

SEQ ID NO: 7765 - protein, 107 aa, synthetic construct; identical to SEQ ID NO: 6247
  source 1..107: note = Description of Artificial Sequence: Synthetic polypeptide; note = VL of XENP018657

SEQ ID NO: 7766 - protein, 5 aa, synthetic construct
  source 1..5: note = Description of Artificial Sequence: Synthetic peptide; note = XENP018657 vhCDR1
NYWMN

SEQ ID NO: 7767 - protein, 19 aa, synthetic construct
  source 1..19: note = Description of Artificial Sequence: Synthetic peptide; note = XENP018657 vhCDR2
EIRLKSNNYATHYAEPVKG

SEQ ID NO: 7768 - protein, 11 aa, synthetic construct
  source 1..11: note = Description of Artificial Sequence: Synthetic peptide; note = XENP018657 vhCDR3
YYGNYGGYFDV

SEQ ID NO: 7769 - protein, 11 aa, synthetic construct
  source 1..11: note = Description of Artificial Sequence: Synthetic peptide; note = XENP018657 vlCDR1
RASQSVSNDVA

SEQ ID NO: 7770 - protein, 7 aa, synthetic construct
  source 1..7: note = Description of Artificial Sequence: Synthetic peptide; note = XENP018657 vlCDR2
YASHRYT

SEQ ID NO: 7771 - protein, 9 aa, synthetic construct
  source 1..9: note = Description of Artificial Sequence: Synthetic peptide; note = XENP018657 vlCDR3
QQDYSSPRT

SEQ ID NO: 7772 - protein, 249 aa, synthetic construct
  source 1..249: note = Description of Artificial Sequence: Synthetic polypeptide; note = XENP018658 1G6_H1.158_L1_scFv(GKPGS)4
EVQLVESGGGLVKPGGSLRLSCAASGFTFSNYWMNWVRQAPGKGLEWVGEIRLKSNNYATHYAEPVKGRFTISRDDSKSTVYLQMNSLRTEDTAVYYCTRYYGNYGGYFDVWGAGTLVTVSSGKPGSGKPGSGKPGSGKPGSSIVMTQSPATLSVSPGERATLSCRASQSVSNDVAWYQQKPGQSPRLLINYASHRYTGVPDRFTGSGYGTEFTLTISSLQSEDFAVYFCQQDYSSPRTFGGGTKVEIK

SEQ ID NO: 7773 - protein, 122 aa, synthetic construct
  source 1..122: note = Description of Artificial Sequence: Synthetic polypeptide; note = VH of XENP018658
EVQLVESGGGLVKPGGSLRLSCAASGFTFSNYWMNWVRQAPGKGLEWVGEIRLKSNNYATHYAEPVKGRFTISRDDSKSTVYLQMNSLRTEDTAVYYCTRYYGNYGGYFDVWGAGTLVTVSS

SEQ ID NO: 7774 - protein, 107 aa, synthetic construct; identical to SEQ ID NO: 6247
  source 1..107: note = Description of Artificial Sequence: Synthetic polypeptide; note = VL of XENP018658

SEQ ID NO: 7775 - protein, 5 aa, synthetic construct
  source 1..5: note = Description of Artificial Sequence: Synthetic peptide; note = XENP018658 vhCDR1
NYWMN

SEQ ID NO: 7776 - protein, 19 aa, synthetic construct
  source 1..19: note = Description of Artificial Sequence: Synthetic peptide; note = XENP018658 vhCDR2
EIRLKSNNYATHYAEPVKG

SEQ ID NO: 7777 - protein, 11 aa, synthetic construct
  source 1..11: note = Description of Artificial Sequence: Synthetic peptide; note = XENP018658 vhCDR3
YYGNYGGYFDV

SEQ ID NO: 7778 - protein, 11 aa, synthetic construct
  source 1..11: note = Description of Artificial Sequence: Synthetic peptide; note = XENP018658 vlCDR1
RASQSVSNDVA

SEQ ID NO: 7779 - protein, 7 aa, synthetic construct
  source 1..7: note = Description of Artificial Sequence: Synthetic peptide; note = XENP018658 vlCDR2
YASHRYT

SEQ ID NO: 7780 - protein, 9 aa, synthetic construct
  source 1..9: note = Description of Artificial Sequence: Synthetic peptide; note = XENP018658 vlCDR3
QQDYSSPRT

SEQ ID NO: 7781 - protein, 249 aa, synthetic construct
  source 1..249: note = Description of Artificial Sequence: Synthetic polypeptide; note = XENP018659 1G6_H1.159_L1_scFv(GKPGS)4
EVQLVESGGGLVKPGGSLRLSCAASGFTFSNYWMNWVRQAPGKGLEWVGEIRLKSNNYATHYAEPVKGRFTISRDDSKSTVYLQMNSLKAEDTAVYYCTRYYGNYGGYFDVWGAGTLVTVSSGKPGSGKPGSGKPGSGKPGSSIVMTQSPATLSVSPGERATLSCRASQSVSNDVAWYQQKPGQSPRLLINYASHRYTGVPDRFTGSGYGTEFTLTISSLQSEDFAVYFCQQDYSSPRTFGGGTKVEIK

SEQ ID NO: 7782 - protein, 122 aa, synthetic construct
  source 1..122: note = Description of Artificial Sequence: Synthetic polypeptide; note = VH of XENP018659
EVQLVESGGGLVKPGGSLRLSCAASGFTFSNYWMNWVRQAPGKGLEWVGEIRLKSNNYATHYAEPVKGRFTISRDDSKSTVYLQMNSLKAEDTAVYYCTRYYGNYGGYFDVWGAGTLVTVSS

SEQ ID NO: 7783 - protein, 107 aa, synthetic construct; identical to SEQ ID NO: 6247
  source 1..107: note = Description of Artificial Sequence: Synthetic polypeptide; note = VL of XENP018659

SEQ ID NO: 7784 - protein, 5 aa, synthetic construct
  source 1..5: note = Description of Artificial Sequence: Synthetic peptide; note = XENP018659 vhCDR1
NYWMN

SEQ ID NO: 7785 - protein, 19 aa, synthetic construct
  source 1..19: note = Description of Artificial Sequence: Synthetic peptide; note = XENP018659 vhCDR2
EIRLKSNNYATHYAEPVKG

SEQ ID NO: 7786 - protein, 11 aa, synthetic construct
  source 1..11: note = Description of Artificial Sequence: Synthetic peptide; note = XENP018659 vhCDR3
YYGNYGGYFDV

SEQ ID NO: 7787 - protein, 11 aa, synthetic construct
  source 1..11: note = Description of Artificial Sequence: Synthetic peptide; note = XENP018659 vlCDR1
RASQSVSNDVA

SEQ ID NO: 7788 - protein, 7 aa, synthetic construct
  source 1..7: note = Description of Artificial Sequence: Synthetic peptide; note = XENP018659 vlCDR2
YASHRYT

SEQ ID NO: 7789 - protein, 9 aa, synthetic construct
  source 1..9: note = Description of Artificial Sequence: Synthetic peptide; note = XENP018659 vlCDR3
QQDYSSPRT

SEQ ID NO: 7790 - protein, 249 aa, synthetic construct
  source 1..249: note = Description of Artificial Sequence: Synthetic polypeptide; note = XENP018660 1G6_H1.160_L1_scFv(GKPGS)4
EVQLVESGGGLVKPGGSLRLSCAASGFTFSNYWMNWVRQAPGKGLEWVGEIRLKSNNYATHYAEPVKGRFTISRDDSKSTVYLQMNSLKTEDTGVYYCTRYYGNYGGYFDVWGAGTLVTVSSGKPGSGKPGSGKPGSGKPGSSIVMTQSPATLSVSPGERATLSCRASQSVSNDVAWYQQKPGQSPRLLINYASHRYTGVPDRFTGSGYGTEFTLTISSLQSEDFAVYFCQQDYSSPRTFGGGTKVEIK

SEQ ID NO: 7791 - protein, 122 aa, synthetic construct
  source 1..122: note = Description of Artificial Sequence: Synthetic polypeptide; note = VH of XENP018660
EVQLVESGGGLVKPGGSLRLSCAASGFTFSNYWMNWVRQAPGKGLEWVGEIRLKSNNYATHYAEPVKGRFTISRDDSKSTVYLQMNSLKTEDTGVYYCTRYYGNYGGYFDVWGAGTLVTVSS

SEQ ID NO: 7792 - protein, 107 aa, synthetic construct; identical to SEQ ID NO: 6247
  source 1..107: note = Description of Artificial Sequence: Synthetic polypeptide; note = VL of XENP018660

SEQ ID NO: 7793 - protein, 5 aa, synthetic construct
  source 1..5: note = Description of Artificial Sequence: Synthetic peptide; note = XENP018660 vhCDR1
NYWMN

SEQ ID NO: 7794 - protein, 19 aa, synthetic construct
  source 1..19: note = Description of Artificial Sequence: Synthetic peptide; note = XENP018660 vhCDR2
EIRLKSNNYATHYAEPVKG

SEQ ID NO: 7795 - protein, 11 aa, synthetic construct
  source 1..11: note = Description of Artificial Sequence: Synthetic peptide; note = XENP018660 vhCDR3
YYGNYGGYFDV

SEQ ID NO: 7796 - protein, 11 aa, synthetic construct
  source 1..11: note = Description of Artificial Sequence: Synthetic peptide; note = XENP018660 vlCDR1
RASQSVSNDVA

SEQ ID NO: 7797 - protein, 7 aa, synthetic construct
  source 1..7: note = Description of Artificial Sequence: Synthetic peptide; note = XENP018660 vlCDR2
YASHRYT

SEQ ID NO: 7798 - protein, 9 aa, synthetic construct
  source 1..9: note = Description of Artificial Sequence: Synthetic peptide; note = XENP018660 vlCDR3
QQDYSSPRT

SEQ ID NO: 7799 - protein, 249 aa, synthetic construct
  source 1..249: note = Description of Artificial Sequence: Synthetic polypeptide; note = XENP018661 1G6_H1.161_L1_scFv(GKPGS)4
EVQLVESGGGLVKPGGSLRLSCAASGFTFSNYWMNWVRQAPGKGLEWVGEIRLKSNNYATHYAEPVKGRFTISRDDSKSTVYLQMNSLKTEDTAIYYCTRYYGNYGGYFDVWGAGTLVTVSSGKPGSGKPGSGKPGSGKPGSSIVMTQSPATLSVSPGERATLSCRASQSVSNDVAWYQQKPGQSPRLLINYASHRYTGVPDRFTGSGYGTEFTLTISSLQSEDFAVYFCQQDYSSPRTFGGGTKVEIK

SEQ ID NO: 7800 - protein, 122 aa, synthetic construct
  source 1..122: note = Description of Artificial Sequence: Synthetic polypeptide; note = VH of XENP018661
EVQLVESGGGLVKPGGSLRLSCAASGFTFSNYWMNWVRQAPGKGLEWVGEIRLKSNNYATHYAEPVKGRFTISRDDSKSTVYLQMNSLKTEDTAIYYCTRYYGNYGGYFDVWGAGTLVTVSS

SEQ ID NO: 7801 - protein, 107 aa, synthetic construct; identical to SEQ ID NO: 6247
  source 1..107: note = Description of Artificial Sequence: Synthetic polypeptide; note = VL of XENP018661

SEQ ID NO: 7802 - protein, 5 aa, synthetic construct
  source 1..5: note = Description of Artificial Sequence: Synthetic peptide; note = XENP018661 vhCDR1
NYWMN

SEQ ID NO: 7803 - protein, 19 aa, synthetic construct
  source 1..19: note = Description of Artificial Sequence: Synthetic peptide; note = XENP018661 vhCDR2
EIRLKSNNYATHYAEPVKG

SEQ ID NO: 7804 - protein, 11 aa, synthetic construct
  source 1..11: note = Description of Artificial Sequence: Synthetic peptide; note = XENP018661 vhCDR3
YYGNYGGYFDV

SEQ ID NO: 7805 - protein, 11 aa, synthetic construct
  source 1..11: note = Description of Artificial Sequence: Synthetic peptide; note = XENP018661 vlCDR1
RASQSVSNDVA

SEQ ID NO: 7806 - protein, 7 aa, synthetic construct
  source 1..7: note = Description of Artificial Sequence: Synthetic peptide; note = XENP018661 vlCDR2
YASHRYT

SEQ ID NO: 7807 - protein, 9 aa, synthetic construct
  source 1..9: note = Description of Artificial Sequence: Synthetic peptide; note = XENP018661 vlCDR3
QQDYSSPRT

SEQ ID NO: 7808 - protein, 249 aa, synthetic construct
  source 1..249: note = Description of Artificial Sequence: Synthetic polypeptide; note = XENP018662 1G6_H1.162_L1_scFv(GKPGS)4
EVQLVESGGGLVKPGGSLRLSCAASGFTFSNYWMNWVRQAPGKGLEWVGEIRLKSNNYATHYAEPVKGRFTISRDDSKSTVYLQMNSLKTEDTAVYHCTRYYGNYGGYFDVWGAGTLVTVSSGKPGSGKPGSGKPGSGKPGSSIVMTQSPATLSVSPGERATLSCRASQSVSNDVAWYQQKPGQSPRLLINYASHRYTGVPDRFTGSGYGTEFTLTISSLQSEDFAVYFCQQDYSSPRTFGGGTKVEIK

SEQ ID NO: 7809 - protein, 122 aa, synthetic construct
  source 1..122: note = Description of Artificial Sequence: Synthetic polypeptide; note = VH of XENP018662
EVQLVESGGGLVKPGGSLRLSCAASGFTFSNYWMNWVRQAPGKGLEWVGEIRLKSNNYATHYAEPVKGRFTISRDDSKSTVYLQMNSLKTEDTAVYHCTRYYGNYGGYFDVWGAGTLVTVSS

SEQ ID NO: 7810 - protein, 107 aa, synthetic construct; identical to SEQ ID NO: 6247
  source 1..107: note = Description of Artificial Sequence: Synthetic polypeptide; note = VL of XENP018662

SEQ ID NO: 7811 - protein, 5 aa, synthetic construct
  source 1..5: note = Description of Artificial Sequence: Synthetic peptide; note = XENP018662 vhCDR1
NYWMN

SEQ ID NO: 7812 - protein, 19 aa, synthetic construct
  source 1..19: note = Description of Artificial Sequence: Synthetic peptide; note = XENP018662 vhCDR2
EIRLKSNNYATHYAEPVKG

SEQ ID NO: 7813 - protein, 11 aa, synthetic construct
  source 1..11: note = Description of Artificial Sequence: Synthetic peptide; note = XENP018662 vhCDR3
YYGNYGGYFDV

SEQ ID NO: 7814 - protein, 11 aa, synthetic construct
  source 1..11: note = Description of Artificial Sequence: Synthetic peptide; note = XENP018662 vlCDR1
RASQSVSNDVA

SEQ ID NO: 7815 - protein, 7 aa, synthetic construct
  source 1..7: note = Description of Artificial Sequence: Synthetic peptide; note = XENP018662 vlCDR2
YASHRYT

SEQ ID NO: 7816 - protein, 9 aa, synthetic construct
  source 1..9: note = Description of Artificial Sequence: Synthetic peptide; note = XENP018662 vlCDR3
QQDYSSPRT

SEQ ID NO: 7817 - protein, 249 aa, synthetic construct
  source 1..249: note = Description of Artificial Sequence: Synthetic polypeptide; note = XENP018663 1G6_H1.163_L1_scFv(GKPGS)4
EVQLVESGGGLVKPGGSLRLSCAASGFTFSNYWMNWVRQAPGKGLEWVGEIRLKSNNYATHYAEPVKGRFTISRDDSKSTVYLQMNSLKTEDTAVYYCARYYGNYGGYFDVWGAGTLVTVSSGKPGSGKPGSGKPGSGKPGSSIVMTQSPATLSVSPGERATLSCRASQSVSNDVAWYQQKPGQSPRLLINYASHRYTGVPDRFTGSGYGTEFTLTISSLQSEDFAVYFCQQDYSSPRTFGGGTKVEIK

SEQ ID NO: 7818 - protein, 122 aa, synthetic construct
  source 1..122: note = Description of Artificial Sequence: Synthetic polypeptide; note = VH of XENP018663
EVQLVESGGGLVKPGGSLRLSCAASGFTFSNYWMNWVRQAPGKGLEWVGEIRLKSNNYATHYAEPVKGRFTISRDDSKSTVYLQMNSLKTEDTAVYYCARYYGNYGGYFDVWGAGTLVTVSS

SEQ ID NO: 7819 - protein, 107 aa, synthetic construct; identical to SEQ ID NO: 6247
  source 1..107: note = Description of Artificial Sequence: Synthetic polypeptide; note = VL of XENP018663

SEQ ID NO: 7820 - protein, 5 aa, synthetic construct
  source 1..5: note = Description of Artificial Sequence: Synthetic peptide; note = XENP018663 vhCDR1
NYWMN

SEQ ID NO: 7821 - protein, 19 aa, synthetic construct
  source 1..19: note = Description of Artificial Sequence: Synthetic peptide; note = XENP018663 vhCDR2
EIRLKSNNYATHYAEPVKG

SEQ ID NO: 7822 - protein, 11 aa, synthetic construct
  source 1..11: note = Description of Artificial Sequence: Synthetic peptide; note = XENP018663 vhCDR3
YYGNYGGYFDV

SEQ ID NO: 7823 - protein, 11 aa, synthetic construct
  source 1..11: note = Description of Artificial Sequence: Synthetic peptide; note = XENP018663 vlCDR1
RASQSVSNDVA

SEQ ID NO: 7824 - protein, 7 aa, synthetic construct
  source 1..7: note = Description of Artificial Sequence: Synthetic peptide; note = XENP018663 vlCDR2
YASHRYT

SEQ ID NO: 7825 - protein, 9 aa, synthetic construct
  source 1..9: note = Description of Artificial Sequence: Synthetic peptide; note = XENP018663 vlCDR3
QQDYSSPRT

SEQ ID NO: 7826 - protein, 249 aa, synthetic construct
  source 1..249: note = Description of Artificial Sequence: Synthetic polypeptide; note = XENP018664 1G6_H1.164_L1_scFv(GKPGS)4
EVQLVESGGGLVKPGGSLRLSCAASGFTFSNYWMNWVRQAPGKGLEWVGEIRLKSNNYATHYAEPVKGRFTISRDDSKSTVYLQMNSLKTEDTAVYYCVRYYGNYGGYFDVWGAGTLVTVSSGKPGSGKPGSGKPGSGKPGSSIVMTQSPATLSVSPGERATLSCRASQSVSNDVAWYQQKPGQSPRLLINYASHRYTGVPDRFTGSGYGTEFTLTISSLQSEDFAVYFCQQDYSSPRTFGGGTKVEIK

SEQ ID NO: 7827 - protein, 122 aa, synthetic construct
  source 1..122: note = Description of Artificial Sequence: Synthetic polypeptide; note = VH of XENP018664
EVQLVESGGGLVKPGGSLRLSCAASGFTFSNYWMNWVRQAPGKGLEWVGEIRLKSNNYATHYAEPVKGRFTISRDDSKSTVYLQMNSLKTEDTAVYYCVRYYGNYGGYFDVWGAGTLVTVSS

SEQ ID NO: 7828 - protein, 107 aa, synthetic construct; identical to SEQ ID NO: 6247
  source 1..107: note = Description of Artificial Sequence: Synthetic polypeptide; note = VL of XENP018664

SEQ ID NO: 7829 - protein, 5 aa, synthetic construct
  source 1..5: note = Description of Artificial Sequence: Synthetic peptide; note = XENP018664 vhCDR1
NYWMN

SEQ ID NO: 7830 - protein, 19 aa, synthetic construct
  source 1..19: note = Description of Artificial Sequence: Synthetic peptide; note = XENP018664 vhCDR2
EIRLKSNNYATHYAEPVKG

SEQ ID NO: 7831 - protein, 11 aa, synthetic construct
  source 1..11: note = Description of Artificial Sequence: Synthetic peptide; note = XENP018664 vhCDR3
YYGNYGGYFDV

SEQ ID NO: 7832 - protein, 11 aa, synthetic construct
  source 1..11: note = Description of Artificial Sequence: Synthetic peptide; note = XENP018664 vlCDR1
RASQSVSNDVA

SEQ ID NO: 7833 - protein, 7 aa, synthetic construct
  source 1..7: note = Description of Artificial Sequence: Synthetic peptide; note = XENP018664 vlCDR2
YASHRYT

SEQ ID NO: 7834 - protein, 9 aa, synthetic construct
  source 1..9: note = Description of Artificial Sequence: Synthetic peptide; note = XENP018664 vlCDR3
QQDYSSPRT

SEQ ID NO: 7835 - protein, 249 aa, synthetic construct
  source 1..249: note = Description of Artificial Sequence: Synthetic polypeptide; note = XENP018665 1G6_H1.165_L1_scFv(GKPGS)4
EVQLVESGGGLVKPGGSLRLSCAASGFTFSNYWMNWVRQAPGKGLEWVGEIRLKSNNYATHYAEPVKGRFTISRDDSKSTVYLQMNSLKTEDTAVYYCTTYYGNYGGYFDVWGAGTLVTVSSGKPGSGKPGSGKPGSGKPGSSIVMTQSPATLSVSPGERATLSCRASQSVSNDVAWYQQKPGQSPRLLINYASHRYTGVPDRFTGSGYGTEFTLTISSLQSEDFAVYFCQQDYSSPRTFGGGTKVEIK

SEQ ID NO: 7836 - protein, 122 aa, synthetic construct
  source 1..122: note = Description of Artificial Sequence: Synthetic polypeptide; note = VH of XENP018665
EVQLVESGGGLVKPGGSLRLSCAASGFTFSNYWMNWVRQAPGKGLEWVGEIRLKSNNYATHYAEPVKGRFTISRDDSKSTVYLQMNSLKTEDTAVYYCTTYYGNYGGYFDVWGAGTLVTVSS

SEQ ID NO: 7837 - protein, 107 aa, synthetic construct; identical to SEQ ID NO: 6247
  source 1..107: note = Description of Artificial Sequence: Synthetic polypeptide; note = VL of XENP018665

SEQ ID NO: 7838 - protein, 5 aa, synthetic construct
  source 1..5: note = Description of Artificial Sequence: Synthetic peptide; note = XENP018665 vhCDR1
NYWMN

SEQ ID NO: 7839 - protein, 19 aa, synthetic construct
  source 1..19: note = Description of Artificial Sequence: Synthetic peptide; note = XENP018665 vhCDR2
EIRLKSNNYATHYAEPVKG

SEQ ID NO: 7840 - protein, 11 aa, synthetic construct
  source 1..11: note = Description of Artificial Sequence: Synthetic peptide; note = XENP018665 vhCDR3
YYGNYGGYFDV

SEQ ID NO: 7841 - protein, 11 aa, synthetic construct
  source 1..11: note = Description of Artificial Sequence: Synthetic peptide; note = XENP018665 vlCDR1
RASQSVSNDVA

SEQ ID NO: 7842 - protein, 7 aa, synthetic construct
  source 1..7: note = Description of Artificial Sequence: Synthetic peptide; note = XENP018665 vlCDR2
YASHRYT

SEQ ID NO: 7843 - protein, 9 aa, synthetic construct
  source 1..9: note = Description of Artificial Sequence: Synthetic peptide; note = XENP018665 vlCDR3
QQDYSSPRT

SEQ ID NO: 7844 - protein, 249 aa, synthetic construct
  source 1..249: note = Description of Artificial Sequence: Synthetic polypeptide; note = XENP018666 1G6_H1.166_L1_scFv(GKPGS)4
EVQLVESGGGLVKPGGSLRLSCAASGFTFSNYWMNWVRQAPGKGLEWVGEIRLKSNNYATHYAEPVKGRFTISRDDSKSTVYLQMNSLKTEDTAVYYCTKYYGNYGGYFDVWGAGTLVTVSSGKPGSGKPGSGKPGSGKPGSSIVMTQSPATLSVSPGERATLSCRASQSVSNDVAWYQQKPGQSPRLLINYASHRYTGVPDRFTGSGYGTEFTLTISSLQSEDFAVYFCQQDYSSPRTFGGGTKVEIK

SEQ ID NO: 7845 - protein, 122 aa, synthetic construct
  source 1..122: note = Description of Artificial Sequence: Synthetic polypeptide; note = VH of XENP018666
EVQLVESGGGLVKPGGSLRLSCAASGFTFSNYWMNWVRQAPGKGLEWVGEIRLKSNNYATHYAEPVKGRFTISRDDSKSTVYLQMNSLKTEDTAVYYCTKYYGNYGGYFDVWGAGTLVTVSS

SEQ ID NO: 7846 - protein, 107 aa, synthetic construct; identical to SEQ ID NO: 6247
  source 1..107: note = Description of Artificial Sequence: Synthetic polypeptide; note = VL of XENP018666

SEQ ID NO: 7847 - protein, 5 aa, synthetic construct
  source 1..5: note = Description of Artificial Sequence: Synthetic peptide; note = XENP018666 vhCDR1
NYWMN

SEQ ID NO: 7848 - protein, 19 aa, synthetic construct
  source 1..19: note = Description of Artificial Sequence: Synthetic peptide; note = XENP018666 vhCDR2
EIRLKSNNYATHYAEPVKG

SEQ ID NO: 7849 - protein, 11 aa, synthetic construct
  source 1..11: note = Description of Artificial Sequence: Synthetic peptide; note = XENP018666 vhCDR3
YYGNYGGYFDV

SEQ ID NO: 7850 - protein, 11 aa, synthetic construct
  source 1..11: note = Description of Artificial Sequence: Synthetic peptide; note = XENP018666 vlCDR1
RASQSVSNDVA

SEQ ID NO: 7851 - protein, 7 aa, synthetic construct
  source 1..7: note = Description of Artificial Sequence: Synthetic peptide; note = XENP018666 vlCDR2
YASHRYT

SEQ ID NO: 7852 - protein, 9 aa, synthetic construct
  source 1..9: note = Description of Artificial Sequence: Synthetic peptide; note = XENP018666 vlCDR3
QQDYSSPRT

SEQ ID NO: 7853 - protein, 249 aa, synthetic construct
  source 1..249: note = Description of Artificial Sequence: Synthetic polypeptide; note = XENP018667 1G6_H1.167_L1_scFv(GKPGS)4
EVQLVESGGGLVKPGGSLRLSCAASGFTFSNYWMNWVRQAPGKGLEWVGEIRLKSNNYATHYAEPVKGRFTISRDDSKSTVYLQMNSLKTEDTAVYYCTRFYGNYGGYFDVWGAGTLVTVSSGKPGSGKPGSGKPGSGKPGSSIVMTQSPATLSVSPGERATLSCRASQSVSNDVAWYQQKPGQSPRLLINYASHRYTGVPDRFTGSGYGTEFTLTISSLQSEDFAVYFCQQDYSSPRTFGGGTKVEIK

SEQ ID NO: 7854 - protein, 122 aa, synthetic construct
  source 1..122: note = Description of Artificial Sequence: Synthetic polypeptide; note = VH of XENP018667
EVQLVESGGGLVKPGGSLRLSCAASGFTFSNYWMNWVRQAPGKGLEWVGEIRLKSNNYATHYAEPVKGRFTISRDDSKSTVYLQMNSLKTEDTAVYYCTRFYGNYGGYFDVWGAGTLVTVSS

SEQ ID NO: 7855 - protein, 107 aa, synthetic construct; identical to SEQ ID NO: 6247
  source 1..107: note = Description of Artificial Sequence: Synthetic polypeptide; note = VL of XENP018667

SEQ ID NO: 7856 - protein, 5 aa, synthetic construct
  source 1..5: note = Description of Artificial Sequence: Synthetic peptide; note = XENP018667 vhCDR1
NYWMN

SEQ ID NO: 7857 - protein, 19 aa, synthetic construct
  source 1..19: note = Description of Artificial Sequence: Synthetic peptide; note = XENP018667 vhCDR2
EIRLKSNNYATHYAEPVKG

SEQ ID NO: 7858 - protein, 11 aa, synthetic construct
  source 1..11: note = Description of Artificial Sequence: Synthetic peptide; note = XENP018667 vhCDR3
FYGNYGGYFDV

SEQ ID NO: 7859 - protein, 11 aa, synthetic construct
  source 1..11: note = Description of Artificial Sequence: Synthetic peptide; note = XENP018667 vlCDR1
RASQSVSNDVA

SEQ ID NO: 7860 - protein, 7 aa, synthetic construct
  source 1..7: note = Description of Artificial Sequence: Synthetic peptide; note = XENP018667 vlCDR2
YASHRYT

SEQ ID NO: 7861 - protein, 9 aa, synthetic construct
  source 1..9: note = Description of Artificial Sequence: Synthetic peptide; note = XENP018667 vlCDR3
QQDYSSPRT

SEQ ID NO: 7862 - protein, 249 aa, synthetic construct
  source 1..249: note = Description of Artificial Sequence: Synthetic polypeptide; note = XENP018668 1G6_H1.168_L1_scFv(GKPGS)4
EVQLVESGGGLVKPGGSLRLSCAASGFTFSNYWMNWVRQAPGKGLEWVGEIRLKSNNYATHYAEPVKGRFTISRDDSKSTVYLQMNSLKTEDTAVYYCTRHYGNYGGYFDVWGAGTLVTVSSGKPGSGKPGSGKPGSGKPGSSIVMTQSPATLSVSPGERATLSCRASQSVSNDVAWYQQKPGQSPRLLINYASHRYTGVPDRFTGSGYGTEFTLTISSLQSEDFAVYFCQQDYSSPRTFGGGTKVEIK

SEQ ID NO: 7863 - protein, 122 aa, synthetic construct
  source 1..122: note = Description of Artificial Sequence: Synthetic polypeptide; note = VH of XENP018668
EVQLVESGGGLVKPGGSLRLSCAASGFTFSNYWMNWVRQAPGKGLEWVGEIRLKSNNYATHYAEPVKGRFTISRDDSKSTVYLQMNSLKTEDTAVYYCTRHYGNYGGYFDVWGAGTLVTVSS

SEQ ID NO: 7864 - protein, 107 aa, synthetic construct; identical to SEQ ID NO: 6247
  source 1..107: note = Description of Artificial Sequence: Synthetic polypeptide; note = VL of XENP018668

SEQ ID NO: 7865 - protein, 5 aa, synthetic construct
  source 1..5: note = Description of Artificial Sequence: Synthetic peptide; note = XENP018668 vhCDR1
NYWMN

SEQ ID NO: 7866 - protein, 19 aa, synthetic construct
  source 1..19: note = Description of Artificial Sequence: Synthetic peptide; note = XENP018668 vhCDR2
EIRLKSNNYATHYAEPVKG

SEQ ID NO: 7867 - protein, 11 aa, synthetic construct
  source 1..11: note = Description of Artificial Sequence: Synthetic peptide; note = XENP018668 vhCDR3
HYGNYGGYFDV

SEQ ID NO: 7868 - protein, 11 aa, synthetic construct
  source 1..11: note = Description of Artificial Sequence: Synthetic peptide; note = XENP018668 vlCDR1
RASQSVSNDVA

SEQ ID NO: 7869 - protein, 7 aa, synthetic construct
  source 1..7: note = Description of Artificial Sequence: Synthetic peptide; note = XENP018668 vlCDR2
YASHRYT

SEQ ID NO: 7870 - protein, 9 aa, synthetic construct
  source 1..9: note = Description of Artificial Sequence: Synthetic peptide; note = XENP018668 vlCDR3
QQDYSSPRT

SEQ ID NO: 7871 - protein, 249 aa, synthetic construct
  source 1..249: note = Description of Artificial Sequence: Synthetic polypeptide; note = XENP018669 1G6_H1.169_L1_scFv(GKPGS)4
EVQLVESGGGLVKPGGSLRLSCAASGFTFSNYWMNWVRQAPGKGLEWVGEIRLKSNNYATHYAEPVKGRFTISRDDSKSTVYLQMNSLKTEDTAVYYCTRLYGNYGGYFDVWGAGTLVTVSSGKPGSGKPGSGKPGSGKPGSSIVMTQSPATLSVSPGERATLSCRASQSVSNDVAWYQQKPGQSPRLLINYASHRYTGVPDRFTGSGYGTEFTLTISSLQSEDFAVYFCQQDYSSPRTFGGGTKVEIK

SEQ ID NO: 7872 - protein, 122 aa, synthetic construct
  source 1..122: note = Description of Artificial Sequence: Synthetic polypeptide; note = VH of XENP018669
EVQLVESGGGLVKPGGSLRLSCAASGFTFSNYWMNWVRQAPGKGLEWVGEIRLKSNNYATHYAEPVKGRFTISRDDSKSTVYLQMNSLKTEDTAVYYCTRLYGNYGGYFDVWGAGTLVTVSS

SEQ ID NO: 7873 - protein, 107 aa, synthetic construct; identical to SEQ ID NO: 6247
  source 1..107: note = Description of Artificial Sequence: Synthetic polypeptide; note = VL of XENP018669

SEQ ID NO: 7874 - protein, 5 aa, synthetic construct
  source 1..5: note = Description of Artificial Sequence: Synthetic peptide; note = XENP018669 vhCDR1
NYWMN

SEQ ID NO: 7875 - protein, 19 aa, synthetic construct
  source 1..19: note = Description of Artificial Sequence: Synthetic peptide; note = XENP018669 vhCDR2
EIRLKSNNYATHYAEPVKG

SEQ ID NO: 7876 - protein, 11 aa, synthetic construct
  source 1..11: note = Description of Artificial Sequence: Synthetic peptide; note = XENP018669 vhCDR3
LYGNYGGYFDV

SEQ ID NO: 7877 - protein, 11 aa, synthetic construct
  source 1..11: note = Description of Artificial Sequence: Synthetic peptide; note = XENP018669 vlCDR1
RASQSVSNDVA

SEQ ID NO: 7878 - protein, 7 aa, synthetic construct
  source 1..7: note = Description of Artificial Sequence: Synthetic peptide; note = XENP018669 vlCDR2
YASHRYT

SEQ ID NO: 7879 - protein, 9 aa, synthetic construct
  source 1..9: note = Description of Artificial Sequence: Synthetic peptide; note = XENP018669 vlCDR3
QQDYSSPRT

SEQ ID NO: 7880 - protein, 249 aa, synthetic construct
  source 1..249: note = Description of Artificial Sequence: Synthetic polypeptide; note = XENP018670 1G6_H1.170_L1_scFv(GKPGS)4
EVQLVESGGGLVKPGGSLRLSCAASGFTFSNYWMNWVRQAPGKGLEWVGEIRLKSNNYATHYAEPVKGRFTISRDDSKSTVYLQMNSLKTEDTAVYYCTRWYGNYGGYFDVWGAGTLVTVSSGKPGSGKPGSGKPGSGKPGSSIVMTQSPATLSVSPGERATLSCRASQSVSNDVAWYQQKPGQSPRLLINYASHRYTGVPDRFTGSGYGTEFTLTISSLQSEDFAVYFCQQDYSSPRTFGGGTKVEIK

SEQ ID NO: 7881 - protein, 122 aa, synthetic construct
  source 1..122: note = Description of Artificial Sequence: Synthetic polypeptide; note = VH of XENP018670
EVQLVESGGGLVKPGGSLRLSCAASGFTFSNYWMNWVRQAPGKGLEWVGEIRLKSNNYATHYAEPVKGRFTISRDDSKSTVYLQMNSLKTEDTAVYYCTRWYGNYGGYFDVWGAGTLVTVSS

SEQ ID NO: 7882 - protein, 107 aa, synthetic construct; identical to SEQ ID NO: 6247
  source 1..107: note = Description of Artificial Sequence: Synthetic polypeptide; note = VL of XENP018670

SEQ ID NO: 7883 - protein, 5 aa, synthetic construct
  source 1..5: note = Description of Artificial Sequence: Synthetic peptide; note = XENP018670 vhCDR1
NYWMN

SEQ ID NO: 7884 - protein, 19 aa, synthetic construct
  source 1..19: note = Description of Artificial Sequence: Synthetic peptide; note = XENP018670 vhCDR2
EIRLKSNNYATHYAEPVKG

SEQ ID NO: 7885 - protein, 11 aa, synthetic construct
  source 1..11: note = Description of Artificial Sequence: Synthetic peptide; note = XENP018670 vhCDR3
WYGNYGGYFDV

SEQ ID NO: 7886 - protein, 11 aa, synthetic construct
  source 1..11: note = Description of Artificial Sequence: Synthetic peptide; note = XENP018670 vlCDR1
RASQSVSNDVA

SEQ ID NO: 7887 - protein, 7 aa, synthetic construct
  source 1..7: note = Description of Artificial Sequence: Synthetic peptide; note = XENP018670 vlCDR2
YASHRYT

SEQ ID NO: 7888 - protein, 9 aa, synthetic construct
  source 1..9: note = Description of Artificial Sequence: Synthetic peptide; note = XENP018670 vlCDR3
QQDYSSPRT

SEQ ID NO: 7889 - protein, 249 aa, synthetic construct
  source 1..249: note = Description of Artificial Sequence: Synthetic polypeptide; note = XENP018671 1G6_H1.171_L1_scFv(GKPGS)4
EVQLVESGGGLVKPGGSLRLSCAASGFTFSNYWMNWVRQAPGKGLEWVGEIRLKSNNYATHYAEPVKGRFTISRDDSKSTVYLQMNSLKTEDTAVYYCTRVYGNYGGYFDVWGAGTLVTVSSGKPGSGKPGSGKPGSGKPGSSIVMTQSPATLSVSPGERATLSCRASQSVSNDVAWYQQKPGQSPRLLINYASHRYTGVPDRFTGSGYGTEFTLTISSLQSEDFAVYFCQQDYSSPRTFGGGTKVEIK

SEQ ID NO: 7890 - protein, 122 aa, synthetic construct
  source 1..122: note = Description of Artificial Sequence: Synthetic polypeptide; note = VH of XENP018671
EVQLVESGGGLVKPGGSLRLSCAASGFTFSNYWMNWVRQAPGKGLEWVGEIRLKSNNYATHYAEPVKGRFTISRDDSKSTVYLQMNSLKTEDTAVYYCTRVYGNYGGYFDVWGAGTLVTVSS

SEQ ID NO: 7891 - protein, 107 aa, synthetic construct; identical to SEQ ID NO: 6247
  source 1..107: note = Description of Artificial Sequence: Synthetic polypeptide; note = VL of XENP018671

SEQ ID NO: 7892 - protein, 5 aa, synthetic construct
  source 1..5: note = Description of Artificial Sequence: Synthetic peptide; note = XENP018671 vhCDR1
NYWMN

SEQ ID NO: 7893 - protein, 19 aa, synthetic construct
  source 1..19: note = Description of Artificial Sequence: Synthetic peptide; note = XENP018671 vhCDR2
EIRLKSNNYATHYAEPVKG

SEQ ID NO: 7894 - protein, 11 aa, synthetic construct
  source 1..11: note = Description of Artificial Sequence: Synthetic peptide; note = XENP018671 vhCDR3
VYGNYGGYFDV

SEQ ID NO: 7895 - protein, 11 aa, synthetic construct
  source 1..11: note = Description of Artificial Sequence: Synthetic peptide; note = XENP018671 vlCDR1
RASQSVSNDVA

SEQ ID NO: 7896 - protein, 7 aa, synthetic construct
  source 1..7: note = Description of Artificial Sequence: Synthetic peptide; note = XENP018671 vlCDR2
YASHRYT

SEQ ID NO: 7897 - protein, 9 aa, synthetic construct
  source 1..9: note = Description of Artificial Sequence: Synthetic peptide; note = XENP018671 vlCDR3
QQDYSSPRT

SEQ ID NO: 7898 - protein, 249 aa, synthetic construct
  source 1..249: note = Description of Artificial Sequence: Synthetic polypeptide; note = XENP018672 1G6_H1.172_L1_scFv(GKPGS)4
EVQLVESGGGLVKPGGSLRLSCAASGFTFSNYWMNWVRQAPGKGLEWVGEIRLKSNNYATHYAEPVKGRFTISRDDSKSTVYLQMNSLKTEDTAVYYCTRAYGNYGGYFDVWGAGTLVTVSSGKPGSGKPGSGKPGSGKPGSSIVMTQSPATLSVSPGERATLSCRASQSVSNDVAWYQQKPGQSPRLLINYASHRYTGVPDRFTGSGYGTEFTLTISSLQSEDFAVYFCQQDYSSPRTFGGGTKVEIK

SEQ ID NO: 7899 - protein, 122 aa, synthetic construct
  source 1..122: note = Description of Artificial Sequence: Synthetic polypeptide; note = VH of XENP018672
EVQLVESGGGLVKPGGSLRLSCAASGFTFSNYWMNWVRQAPGKGLEWVGEIRLKSNNYATHYAEPVKGRFTISRDDSKSTVYLQMNSLKTEDTAVYYCTRAYGNYGGYFDVWGAGTLVTVSS

SEQ ID NO: 7900 - protein, 107 aa, synthetic construct; identical to SEQ ID NO: 6247
  source 1..107: note = Description of Artificial Sequence: Synthetic polypeptide; note = VL of XENP018672

SEQ ID NO: 7901 - protein, 5 aa, synthetic construct
  source 1..5: note = Description of Artificial Sequence: Synthetic peptide; note = XENP018672 vhCDR1
NYWMN

SEQ ID NO: 7902 - protein, 19 aa, synthetic construct
  source 1..19: note = Description of Artificial Sequence: Synthetic peptide; note = XENP018672 vhCDR2
EIRLKSNNYATHYAEPVKG

SEQ ID NO: 7903 - protein, 11 aa, synthetic construct
  source 1..11: note = Description of Artificial Sequence: Synthetic peptide; note = XENP018672 vhCDR3
AYGNYGGYFDV

SEQ ID NO: 7904 - protein, 11 aa, synthetic construct
  source 1..11: note = Description of Artificial Sequence: Synthetic peptide; note = XENP018672 vlCDR1
RASQSVSNDVA

SEQ ID NO: 7905 - protein, 7 aa, synthetic construct
  source 1..7: note = Description of Artificial Sequence: Synthetic peptide; note = XENP018672 vlCDR2
YASHRYT

SEQ ID NO: 7906 - protein, 9 aa, synthetic construct
  source 1..9: note = Description of Artificial Sequence: Synthetic peptide; note = XENP018672 vlCDR3
QQDYSSPRT

SEQ ID NO: 7907 - protein, 249 aa, synthetic construct
  source 1..249: note = Description of Artificial Sequence: Synthetic polypeptide; note = XENP018673 1G6_H1.173_L1_scFv(GKPGS)4
EVQLVESGGGLVKPGGSLRLSCAASGFTFSNYWMNWVRQAPGKGLEWVGEIRLKSNNYATHYAEPVKGRFTISRDDSKSTVYLQMNSLKTEDTAVYYCTRQYGNYGGYFDVWGAGTLVTVSSGKPGSGKPGSGKPGSGKPGSSIVMTQSPATLSVSPGERATLSCRASQSVSNDVAWYQQKPGQSPRLLINYASHRYTGVPDRFTGSGYGTEFTLTISSLQSEDFAVYFCQQDYSSPRTFGGGTKVEIK

SEQ ID NO: 7908 - protein, 122 aa, synthetic construct
  source 1..122: note = Description of Artificial Sequence: Synthetic polypeptide; note = VH of XENP018673
EVQLVESGGGLVKPGGSLRLSCAASGFTFSNYWMNWVRQAPGKGLEWVGEIRLKSNNYATHYAEPVKGRFTISRDDSKSTVYLQMNSLKTEDTAVYYCTRQYGNYGGYFDVWGAGTLVTVSS

SEQ ID NO: 7909 - protein, 107 aa, synthetic construct; identical to SEQ ID NO: 6247
  source 1..107: note = Description of Artificial Sequence: Synthetic polypeptide; note = VL of XENP018673

SEQ ID NO: 7910 - protein, 5 aa, synthetic construct
  source 1..5: note = Description of Artificial Sequence: Synthetic peptide; note = XENP018673 vhCDR1
NYWMN

SEQ ID NO: 7911 - protein, 19 aa, synthetic construct
  source 1..19: note = Description of Artificial Sequence: Synthetic peptide; note = XENP018673 vhCDR2
EIRLKSNNYATHYAEPVKG

SEQ ID NO: 7912 - protein, 11 aa, synthetic construct
  source 1..11: note = Description of Artificial Sequence: Synthetic peptide; note = XENP018673 vhCDR3
QYGNYGGYFDV

SEQ ID NO: 7913 - protein, 11 aa, synthetic construct
  source 1..11: note = Description of Artificial Sequence: Synthetic peptide; note = XENP018673 vlCDR1
RASQSVSNDVA

SEQ ID NO: 7914 - protein, 7 aa, synthetic construct
  source 1..7: note = Description of Artificial Sequence: Synthetic peptide; note = XENP018673 vlCDR2
YASHRYT

SEQ ID NO: 7915 - protein, 9 aa, synthetic construct
  source 1..9: note = Description of Artificial Sequence: Synthetic peptide; note = XENP018673 vlCDR3
QQDYSSPRT

SEQ ID NO: 7916 - protein, 249 aa, synthetic construct
  source 1..249: note = Description of Artificial Sequence: Synthetic polypeptide; note = XENP018674 1G6_H1.174_L1_scFv(GKPGS)4
EVQLVESGGGLVKPGGSLRLSCAASGFTFSNYWMNWVRQAPGKGLEWVGEIRLKSNNYATHYAEPVKGRFTISRDDSKSTVYLQMNSLKTEDTAVYYCTRDYGNYGGYFDVWGAGTLVTVSSGKPGSGKPGSGKPGSGKPGSSIVMTQSPATLSVSPGERATLSCRASQSVSNDVAWYQQKPGQSPRLLINYASHRYTGVPDRFTGSGYGTEFTLTISSLQSEDFAVYFCQQDYSSPRTFGGGTKVEIK

SEQ ID NO: 7917 - protein, 122 aa, synthetic construct
  source 1..122: note = Description of Artificial Sequence: Synthetic polypeptide; note = VH of XENP018674
EVQLVESGGGLVKPGGSLRLSCAASGFTFSNYWMNWVRQAPGKGLEWVGEIRLKSNNYATHYAEPVKGRFTISRDDSKSTVYLQMNSLKTEDTAVYYCTRDYGNYGGYFDVWGAGTLVTVSS

SEQ ID NO: 7918 - protein, 107 aa, synthetic construct; identical to SEQ ID NO: 6247
  source 1..107: note = Description of Artificial Sequence: Synthetic polypeptide; note = VL of XENP018674

SEQ ID NO: 7919 - protein, 5 aa, synthetic construct
  source 1..5: note = Description of Artificial Sequence: Synthetic peptide; note = XENP018674 vhCDR1
NYWMN

SEQ ID NO: 7920 - protein, 19 aa, synthetic construct
  source 1..19: note = Description of Artificial Sequence: Synthetic peptide; note = XENP018674 vhCDR2
EIRLKSNNYATHYAEPVKG

SEQ ID NO: 7921 - protein, 11 aa, synthetic construct
  source 1..11: note = Description of Artificial Sequence: Synthetic peptide; note = XENP018674 vhCDR3
DYGNYGGYFDV

SEQ ID NO: 7922 - protein, 11 aa, synthetic construct
  source 1..11: note = Description of Artificial Sequence: Synthetic peptide; note = XENP018674 vlCDR1
RASQSVSNDVA

SEQ ID NO: 7923 - protein, 7 aa, synthetic construct
  source 1..7: note = Description of Artificial Sequence: Synthetic peptide; note = XENP018674 vlCDR2
YASHRYT

SEQ ID NO: 7924 - protein, 9 aa, synthetic construct
  source 1..9: note = Description of Artificial Sequence: Synthetic peptide; note = XENP018674 vlCDR3
QQDYSSPRT

SEQ ID NO: 7925 - protein, 249 aa, synthetic construct
  source 1..249: note = Description of Artificial Sequence: Synthetic polypeptide; note = XENP018675 1G6_H1.175_L1_scFv(GKPGS)4
EVQLVESGGGLVKPGGSLRLSCAASGFTFSNYWMNWVRQAPGKGLEWVGEIRLKSNNYATHYAEPVKGRFTISRDDSKSTVYLQMNSLKTEDTAVYYCTRKYGNYGGYFDVWGAGTLVTVSSGKPGSGKPGSGKPGSGKPGSSIVMTQSPATLSVSPGERATLSCRASQSVSNDVAWYQQKPGQSPRLLINYASHRYTGVPDRFTGSGYGTEFTLTISSLQSEDFAVYFCQQDYSSPRTFGGGTKVEIK

SEQ ID NO: 7926 - protein, 122 aa, synthetic construct
  source 1..122: note = Description of Artificial Sequence: Synthetic polypeptide; note = VH of XENP018675
EVQLVESGGGLVKPGGSLRLSCAASGFTFSNYWMNWVRQAPGKGLEWVGEIRLKSNNYATHYAEPVKGRFTISRDDSKSTVYLQMNSLKTEDTAVYYCTRKYGNYGGYFDVWGAGTLVTVSS

SEQ ID NO: 7927 - protein, 107 aa, synthetic construct; identical to SEQ ID NO: 6247
  source 1..107: note = Description of Artificial Sequence: Synthetic polypeptide; note = VL of XENP018675

SEQ ID NO: 7928 - protein, 5 aa, synthetic construct
  source 1..5: note = Description of Artificial Sequence: Synthetic peptide; note = XENP018675 vhCDR1
NYWMN

SEQ ID NO: 7929 - protein, 19 aa, synthetic construct
  source 1..19: note = Description of Artificial Sequence: Synthetic peptide; note = XENP018675 vhCDR2
EIRLKSNNYATHYAEPVKG

SEQ ID NO: 7930 - protein, 11 aa, synthetic construct
  source 1..11: note = Description of Artificial Sequence: Synthetic peptide; note = XENP018675 vhCDR3
KYGNYGGYFDV

SEQ ID NO: 7931 - protein, 11 aa, synthetic construct
  source 1..11: note = Description of Artificial Sequence: Synthetic peptide; note = XENP018675 vlCDR1
RASQSVSNDVA

SEQ ID NO: 7932 - protein, 7 aa, synthetic construct
  source 1..7: note = Description of Artificial Sequence: Synthetic peptide; note = XENP018675 vlCDR2
YASHRYT

SEQ ID NO: 7933 - protein, 9 aa, synthetic construct
  source 1..9: note = Description of Artificial Sequence: Synthetic peptide; note = XENP018675 vlCDR3
QQDYSSPRT

SEQ ID NO: 7934 - protein, 249 aa, synthetic construct
  source 1..249: note = Description of Artificial Sequence: Synthetic polypeptide; note = XENP018676 1G6_H1.176_L1_scFv(GKPGS)4
EVQLVESGGGLVKPGGSLRLSCAASGFTFSNYWMNWVRQAPGKGLEWVGEIRLKSNNYATHYAEPVKGRFTISRDDSKSTVYLQMNSLKTEDTAVYYCTRYFGNYGGYFDVWGAGTLVTVSSGKPGSGKPGSGKPGSGKPGSSIVMTQSPATLSVSPGERATLSCRASQSVSNDVAWYQQKPGQSPRLLINYASHRYTGVPDRFTGSGYGTEFTLTISSLQSEDFAVYFCQQDYSSPRTFGGGTKVEIK

SEQ ID NO: 7935 - protein, 122 aa, synthetic construct
  source 1..122: note = Description of Artificial Sequence: Synthetic polypeptide; note = VH of XENP018676
EVQLVESGGGLVKPGGSLRLSCAASGFTFSNYWMNWVRQAPGKGLEWVGEIRLKSNNYATHYAEPVKGRFTISRDDSKSTVYLQMNSLKTEDTAVYYCTRYFGNYGGYFDVWGAGTLVTVSS

SEQ ID NO: 7936 - protein, 107 aa, synthetic construct; identical to SEQ ID NO: 6247
  source 1..107: note = Description of Artificial Sequence: Synthetic polypeptide; note = VL of XENP018676

SEQ ID NO: 7937 - protein, 5 aa, synthetic construct
  source 1..5: note = Description of Artificial Sequence: Synthetic peptide; note = XENP018676 vhCDR1
NYWMN

SEQ ID NO: 7938 - protein, 19 aa, synthetic construct
  source 1..19: note = Description of Artificial Sequence: Synthetic peptide; note = XENP018676 vhCDR2
EIRLKSNNYATHYAEPVKG

SEQ ID NO: 7939 - protein, 11 aa, synthetic construct
  source 1..11: note = Description of Artificial Sequence: Synthetic peptide; note = XENP018676 vhCDR3
YFGNYGGYFDV

SEQ ID NO: 7940 - protein, 11 aa, synthetic construct
  source 1..11: note = Description of Artificial Sequence: Synthetic peptide; note = XENP018676 vlCDR1
RASQSVSNDVA

SEQ ID NO: 7941 - protein, 7 aa, synthetic construct
  source 1..7: note = Description of Artificial Sequence: Synthetic peptide; note = XENP018676 vlCDR2
YASHRYT

SEQ ID NO: 7942 - protein, 9 aa, synthetic construct
  source 1..9: note = Description of Artificial Sequence: Synthetic peptide; note = XENP018676 vlCDR3
QQDYSSPRT

SEQ ID NO: 7943 - protein, 249 aa, synthetic construct
  source 1..249: note = Description of Artificial Sequence: Synthetic polypeptide; note = XENP018677 1G6_H1.177_L1_scFv(GKPGS)4
EVQLVESGGGLVKPGGSLRLSCAASGFTFSNYWMNWVRQAPGKGLEWVGEIRLKSNNYATHYAEPVKGRFTISRDDSKSTVYLQMNSLKTEDTAVYYCTRYHGNYGGYFDVWGAGTLVTVSSGKPGSGKPGSGKPGSGKPGSSIVMTQSPATLSVSPGERATLSCRASQSVSNDVAWYQQKPGQSPRLLINYASHRYTGVPDRFTGSGYGTEFTLTISSLQSEDFAVYFCQQDYSSPRTFGGGTKVEIK

SEQ ID NO: 7944 - protein, 122 aa, synthetic construct
  source 1..122: note = Description of Artificial Sequence: Synthetic polypeptide; note = VH of XENP018677
EVQLVESGGGLVKPGGSLRLSCAASGFTFSNYWMNWVRQAPGKGLEWVGEIRLKSNNYATHYAEPVKGRFTISRDDSKSTVYLQMNSLKTEDTAVYYCTRYHGNYGGYFDVWGAGTLVTVSS

SEQ ID NO: 7945 - protein, 107 aa, synthetic construct; identical to SEQ ID NO: 6247
  source 1..107: note = Description of Artificial Sequence: Synthetic polypeptide; note = VL of XENP018677

SEQ ID NO: 7946 - protein, 5 aa, synthetic construct
  source 1..5: note = Description of Artificial Sequence: Synthetic peptide; note = XENP018677 vhCDR1
NYWMN

SEQ ID NO: 7947 - protein, 19 aa, synthetic construct
  source 1..19: note = Description of Artificial Sequence: Synthetic peptide; note = XENP018677 vhCDR2
EIRLKSNNYATHYAEPVKG

SEQ ID NO: 7948 - protein, 11 aa, synthetic construct
  source 1..11: note = Description of Artificial Sequence: Synthetic peptide; note = XENP018677 vhCDR3
YHGNYGGYFDV

SEQ ID NO: 7949 - protein, 11 aa, synthetic construct
  source 1..11: note = Description of Artificial Sequence: Synthetic peptide; note = XENP018677 vlCDR1
RASQSVSNDVA

SEQ ID NO: 7950 - protein, 7 aa, synthetic construct
  source 1..7: note = Description of Artificial Sequence: Synthetic peptide; note = XENP018677 vlCDR2
YASHRYT

SEQ ID NO: 7951 - protein, 9 aa, synthetic construct
  source 1..9: note = Description of Artificial Sequence: Synthetic peptide; note = XENP018677 vlCDR3
QQDYSSPRT

SEQ ID NO: 7952 - protein, 249 aa, synthetic construct
  source 1..249: note = Description of Artificial Sequence: Synthetic polypeptide; note = XENP018678 1G6_H1.178_L1_scFv(GKPGS)4
EVQLVESGGGLVKPGGSLRLSCAASGFTFSNYWMNWVRQAPGKGLEWVGEIRLKSNNYATHYAEPVKGRFTISRDDSKSTVYLQMNSLKTEDTAVYYCTRYLGNYGGYFDVWGAGTLVTVSSGKPGSGKPGSGKPGSGKPGSSIVMTQSPATLSVSPGERATLSCRASQSVSNDVAWYQQKPGQSPRLLINYASHRYTGVPDRFTGSGYGTEFTLTISSLQSEDFAVYFCQQDYSSPRTFGGGTKVEIK

SEQ ID NO: 7953 - protein, 122 aa, synthetic construct
  source 1..122: note = Description of Artificial Sequence: Synthetic polypeptide; note = VH of XENP018678
EVQLVESGGGLVKPGGSLRLSCAASGFTFSNYWMNWVRQAPGKGLEWVGEIRLKSNNYATHYAEPVKGRFTISRDDSKSTVYLQMNSLKTEDTAVYYCTRYLGNYGGYFDVWGAGTLVTVSS

SEQ ID NO: 7954 - protein, 107 aa, synthetic construct; identical to SEQ ID NO: 6247
  source 1..107: note = Description of Artificial Sequence: Synthetic polypeptide; note = VL of XENP018678

SEQ ID NO: 7955 - protein, 5 aa, synthetic construct
  source 1..5: note = Description of Artificial Sequence: Synthetic peptide; note = XENP018678 vhCDR1
NYWMN

SEQ ID NO: 7956 - protein, 19 aa, synthetic construct
  source 1..19: note = Description of Artificial Sequence: Synthetic peptide; note = XENP018678 vhCDR2
EIRLKSNNYATHYAEPVKG

SEQ ID NO: 7957 - protein, 11 aa, synthetic construct
  source 1..11: note = Description of Artificial Sequence: Synthetic peptide; note = XENP018678 vhCDR3
YLGNYGGYFDV

SEQ ID NO: 7958 - protein, 11 aa, synthetic construct
  source 1..11: note = Description of Artificial Sequence: Synthetic peptide; note = XENP018678 vlCDR1
RASQSVSNDVA

SEQ ID NO: 7959 - protein, 7 aa, synthetic construct
  source 1..7: note = Description of Artificial Sequence: Synthetic peptide; note = XENP018678 vlCDR2
YASHRYT

SEQ ID NO: 7960 - protein, 9 aa, synthetic construct
  source 1..9: note = Description of Artificial Sequence: Synthetic peptide; note = XENP018678 vlCDR3
QQDYSSPRT

SEQ ID NO: 7961 - protein, 249 aa, synthetic construct
  source 1..249: note = Description of Artificial Sequence: Synthetic polypeptide; note = XENP018679 1G6_H1.179_L1_scFv(GKPGS)4
EVQLVESGGGLVKPGGSLRLSCAASGFTFSNYWMNWVRQAPGKGLEWVGEIRLKSNNYATHYAEPVKGRFTISRDDSKSTVYLQMNSLKTEDTAVYYCTRYWGNYGGYFDVWGAGTLVTVSSGKPGSGKPGSGKPGSGKPGSSIVMTQSPATLSVSPGERATLSCRASQSVSNDVAWYQQKPGQSPRLLINYASHRYTGVPDRFTGSGYGTEFTLTISSLQSEDFAVYFCQQDYSSPRTFGGGTKVEIK

SEQ ID NO: 7962 - protein, 122 aa, synthetic construct
  source 1..122: note = Description of Artificial Sequence: Synthetic polypeptide; note = VH of XENP018679
EVQLVESGGGLVKPGGSLRLSCAASGFTFSNYWMNWVRQAPGKGLEWVGEIRLKSNNYATHYAEPVKGRFTISRDDSKSTVYLQMNSLKTEDTAVYYCTRYWGNYGGYFDVWGAGTLVTVSS

SEQ ID NO: 7963 - protein, 107 aa, synthetic construct; identical to SEQ ID NO: 6247
  source 1..107: note = Description of Artificial Sequence: Synthetic polypeptide; note = VL of XENP018679

SEQ ID NO: 7964 - protein, 5 aa, synthetic construct
  source 1..5: note = Description of Artificial Sequence: Synthetic peptide; note = XENP018679 vhCDR1
NYWMN

SEQ ID NO: 7965 - protein, 19 aa, synthetic construct
  source 1..19: note = Description of Artificial Sequence: Synthetic peptide; note = XENP018679 vhCDR2
EIRLKSNNYATHYAEPVKG

SEQ ID NO: 7966 - protein, 11 aa, synthetic construct
  source 1..11: note = Description of Artificial Sequence: Synthetic peptide; note = XENP018679 vhCDR3
YWGNYGGYFDV

SEQ ID NO: 7967 - protein, 11 aa, synthetic construct
  source 1..11: note = Description of Artificial Sequence: Synthetic peptide; note = XENP018679 vlCDR1
RASQSVSNDVA

SEQ ID NO: 7968 - protein, 7 aa, synthetic construct
  source 1..7: note = Description of Artificial Sequence: Synthetic peptide; note = XENP018679 vlCDR2
YASHRYT

SEQ ID NO: 7969 - protein, 9 aa, synthetic construct
  source 1..9: note = Description of Artificial Sequence: Synthetic peptide; note = XENP018679 vlCDR3
QQDYSSPRT

SEQ ID NO: 7970 - protein, 249 aa, synthetic construct
  source 1..249: note = Description of Artificial Sequence: Synthetic polypeptide; note = XENP018680 1G6_H1.180_L1_scFv(GKPGS)4
EVQLVESGGGLVKPGGSLRLSCAASGFTFSNYWMNWVRQAPGKGLEWVGEIRLKSNNYATHYAEPVKGRFTISRDDSKSTVYLQMNSLKTEDTAVYYCTRYVGNYGGYFDVWGAGTLVTVSSGKPGSGKPGSGKPGSGKPGSSIVMTQSPATLSVSPGERATLSCRASQSVSNDVAWYQQKPGQSPRLLINYASHRYTGVPDRFTGSGYGTEFTLTISSLQSEDFAVYFCQQDYSSPRTFGGGTKVEIK

SEQ ID NO: 7971 - protein, 122 aa, synthetic construct
  source 1..122: note = Description of Artificial Sequence: Synthetic polypeptide; note = VH of XENP018680
EVQLVESGGGLVKPGGSLRLSCAASGFTFSNYWMNWVRQAPGKGLEWVGEIRLKSNNYATHYAEPVKGRFTISRDDSKSTVYLQMNSLKTEDTAVYYCTRYVGNYGGYFDVWGAGTLVTVSS

SEQ ID NO: 7972 - protein, 107 aa, synthetic construct; identical to SEQ ID NO: 6247
  source 1..107: note = Description of Artificial Sequence: Synthetic polypeptide; note = VL of XENP018680

SEQ ID NO: 7973 - protein, 5 aa, synthetic construct
  source 1..5: note = Description of Artificial Sequence: Synthetic peptide; note = XENP018680 vhCDR1
NYWMN

SEQ ID NO: 7974 - protein, 19 aa, synthetic construct
  source 1..19: note = Description of Artificial Sequence: Synthetic peptide; note = XENP018680 vhCDR2
EIRLKSNNYATHYAEPVKG

SEQ ID NO: 7975 - protein, 11 aa, synthetic construct
  source 1..11: note = Description of Artificial Sequence: Synthetic peptide; note = XENP018680 vhCDR3
YVGNYGGYFDV

SEQ ID NO: 7976 - protein, 11 aa, synthetic construct
  source 1..11: note = Description of Artificial Sequence: Synthetic peptide; note = XENP018680 vlCDR1
RASQSVSNDVA

SEQ ID NO: 7977 - protein, 7 aa, synthetic construct
  source 1..7: note = Description of Artificial Sequence: Synthetic peptide; note = XENP018680 vlCDR2
YASHRYT

SEQ ID NO: 7978 - protein, 9 aa, synthetic construct
  source 1..9: note = Description of Artificial Sequence: Synthetic peptide; note = XENP018680 vlCDR3
QQDYSSPRT

SEQ ID NO: 7979 - protein, 249 aa, synthetic construct
  source 1..249: note = Description of Artificial Sequence: Synthetic polypeptide; note = XENP018681 1G6_H1.181_L1_scFv(GKPGS)4
EVQLVESGGGLVKPGGSLRLSCAASGFTFSNYWMNWVRQAPGKGLEWVGEIRLKSNNYATHYAEPVKGRFTISRDDSKSTVYLQMNSLKTEDTAVYYCTRYAGNYGGYFDVWGAGTLVTVSSGKPGSGKPGSGKPGSGKPGSSIVMTQSPATLSVSPGERATLSCRASQSVSNDVAWYQQKPGQSPRLLINYASHRYTGVPDRFTGSGYGTEFTLTISSLQSEDFAVYFCQQDYSSPRTFGGGTKVEIK

SEQ ID NO: 7980 - protein, 122 aa, synthetic construct
  source 1..122: note = Description of Artificial Sequence: Synthetic polypeptide; note = VH of XENP018681
EVQLVESGGGLVKPGGSLRLSCAASGFTFSNYWMNWVRQAPGKGLEWVGEIRLKSNNYATHYAEPVKGRFTISRDDSKSTVYLQMNSLKTEDTAVYYCTRYAGNYGGYFDVWGAGTLVTVSS

SEQ ID NO: 7981 - protein, 107 aa, synthetic construct; identical to SEQ ID NO: 6247
  source 1..107: note = Description of Artificial Sequence: Synthetic polypeptide; note = VL of XENP018681

SEQ ID NO: 7982 - protein, 5 aa, synthetic construct
  source 1..5: note = Description of Artificial Sequence: Synthetic peptide; note = XENP018681 vhCDR1
NYWMN

SEQ ID NO: 7983 - protein, 19 aa, synthetic construct
  source 1..19: note = Description of Artificial Sequence: Synthetic peptide; note = XENP018681 vhCDR2
EIRLKSNNYATHYAEPVKG

SEQ ID NO: 7984 - protein, 11 aa, synthetic construct
  source 1..11: note = Description of Artificial Sequence: Synthetic peptide; note = XENP018681 vhCDR3
YAGNYGGYFDV

SEQ ID NO: 7985 - protein, 11 aa, synthetic construct
  source 1..11: note = Description of Artificial Sequence: Synthetic peptide; note = XENP018681 vlCDR1
RASQSVSNDVA

SEQ ID NO: 7986 - protein, 7 aa, synthetic construct
  source 1..7: note = Description of Artificial Sequence: Synthetic peptide; note = XENP018681 vlCDR2
YASHRYT

SEQ ID NO: 7987 - protein, 9 aa, synthetic construct
  source 1..9: note = Description of Artificial Sequence: Synthetic peptide; note = XENP018681 vlCDR3
QQDYSSPRT

SEQ ID NO: 7988 - protein, 249 aa, synthetic construct
  source 1..249: note = Description of Artificial Sequence: Synthetic polypeptide; note = XENP018682 1G6_H1.182_L1_scFv(GKPGS)4
EVQLVESGGGLVKPGGSLRLSCAASGFTFSNYWMNWVRQAPGKGLEWVGEIRLKSNNYATHYAEPVKGRFTISRDDSKSTVYLQMNSLKTEDTAVYYCTRYQGNYGGYFDVWGAGTLVTVSSGKPGSGKPGSGKPGSGKPGSSIVMTQSPATLSVSPGERATLSCRASQSVSNDVAWYQQKPGQSPRLLINYASHRYTGVPDRFTGSGYGTEFTLTISSLQSEDFAVYFCQQDYSSPRTFGGGTKVEIK

SEQ ID NO: 7989 - protein, 122 aa, synthetic construct
  source 1..122: note = Description of Artificial Sequence: Synthetic polypeptide; note = VH of XENP018682
EVQLVESGGGLVKPGGSLRLSCAASGFTFSNYWMNWVRQAPGKGLEWVGEIRLKSNNYATHYAEPVKGRFTISRDDSKSTVYLQMNSLKTEDTAVYYCTRYQGNYGGYFDVWGAGTLVTVSS

SEQ ID NO: 7990 - protein, 107 aa, synthetic construct; identical to SEQ ID NO: 6247
  source 1..107: note = Description of Artificial Sequence: Synthetic polypeptide; note = VL of XENP018682

SEQ ID NO: 7991 - protein, 5 aa, synthetic construct
  source 1..5: note = Description of Artificial Sequence: Synthetic peptide; note = XENP018682 vhCDR1
NYWMN

SEQ ID NO: 7992 - protein, 19 aa, synthetic construct
  source 1..19: note = Description of Artificial Sequence: Synthetic peptide; note = XENP018682 vhCDR2
EIRLKSNNYATHYAEPVKG

SEQ ID NO: 7993 - protein, 11 aa, synthetic construct
  source 1..11: note = Description of Artificial Sequence: Synthetic peptide; note = XENP018682 vhCDR3
YQGNYGGYFDV

SEQ ID NO: 7994 - protein, 11 aa, synthetic construct
  source 1..11: note = Description of Artificial Sequence: Synthetic peptide; note = XENP018682 vlCDR1
RASQSVSNDVA

SEQ ID NO: 7995 - protein, 7 aa, synthetic construct
  source 1..7: note = Description of Artificial Sequence: Synthetic peptide; note = XENP018682 vlCDR2
YASHRYT

SEQ ID NO: 7996 - protein, 9 aa, synthetic construct
  source 1..9: note = Description of Artificial Sequence: Synthetic peptide; note = XENP018682 vlCDR3
QQDYSSPRT

SEQ ID NO: 7997 - protein, 249 aa, synthetic construct
  source 1..249: note = Description of Artificial Sequence: Synthetic polypeptide; note = XENP018683 1G6_H1.183_L1_scFv(GKPGS)4
EVQLVESGGGLVKPGGSLRLSCAASGFTFSNYWMNWVRQAPGKGLEWVGEIRLKSNNYATHYAEPVKGRFTISRDDSKSTVYLQMNSLKTEDTAVYYCTRYDGNYGGYFDVWGAGTLVTVSSGKPGSGKPGSGKPGSGKPGSSIVMTQSPATLSVSPGERATLSCRASQSVSNDVAWYQQKPGQSPRLLINYASHRYTGVPDRFTGSGYGTEFTLTISSLQSEDFAVYFCQQDYSSPRTFGGGTKVEIK

SEQ ID NO: 7998 - protein, 122 aa, synthetic construct
  source 1..122: note = Description of Artificial Sequence: Synthetic polypeptide; note = VH of XENP018683
EVQLVESGGGLVKPGGSLRLSCAASGFTFSNYWMNWVRQAPGKGLEWVGEIRLKSNNYATHYAEPVKGRFTISRDDSKSTVYLQMNSLKTEDTAVYYCTRYDGNYGGYFDVWGAGTLVTVSS

SEQ ID NO: 7999 - protein, 107 aa, synthetic construct; identical to SEQ ID NO: 6247
  source 1..107: note = Description of Artificial Sequence: Synthetic polypeptide; note = VL of XENP018683

SEQ ID NO: 8000 - protein, 5 aa, synthetic construct
  source 1..5: note = Description of Artificial Sequence: Synthetic peptide; note = XENP018683 vhCDR1
NYWMN

SEQ ID NO: 8001 - protein, 19 aa, synthetic construct
  source 1..19: note = Description of Artificial Sequence: Synthetic peptide; note = XENP018683 vhCDR2
EIRLKSNNYATHYAEPVKG

SEQ ID NO: 8002 - protein, 11 aa, synthetic construct
  source 1..11: note = Description of Artificial Sequence: Synthetic peptide; note = XENP018683 vhCDR3
YDGNYGGYFDV

SEQ ID NO: 8003 - protein, 11 aa, synthetic construct
  source 1..11: note = Description of Artificial Sequence: Synthetic peptide; note = XENP018683 vlCDR1
RASQSVSNDVA

SEQ ID NO: 8004 - protein, 7 aa, synthetic construct
  source 1..7: note = Description of Artificial Sequence: Synthetic peptide; note = XENP018683 vlCDR2
YASHRYT

SEQ ID NO: 8005 - protein, 9 aa, synthetic construct
  source 1..9: note = Description of Artificial Sequence: Synthetic peptide; note = XENP018683 vlCDR3
QQDYSSPRT

SEQ ID NO: 8006 - protein, 249 aa, synthetic construct
  source 1..249: note = Description of Artificial Sequence: Synthetic polypeptide; note = XENP018684 1G6_H1.184_L1_scFv(GKPGS)4
EVQLVESGGGLVKPGGSLRLSCAASGFTFSNYWMNWVRQAPGKGLEWVGEIRLKSNNYATHYAEPVKGRFTISRDDSKSTVYLQMNSLKTEDTAVYYCTRYKGNYGGYFDVWGAGTLVTVSSGKPGSGKPGSGKPGSGKPGSSIVMTQSPATLSVSPGERATLSCRASQSVSNDVAWYQQKPGQSPRLLINYASHRYTGVPDRFTGSGYGTEFTLTISSLQSEDFAVYFCQQDYSSPRTFGGGTKVEIK

SEQ ID NO: 8007 - protein, 122 aa, synthetic construct
  source 1..122: note = Description of Artificial Sequence: Synthetic polypeptide; note = VH of XENP018684
EVQLVESGGGLVKPGGSLRLSCAASGFTFSNYWMNWVRQAPGKGLEWVGEIRLKSNNYATHYAEPVKGRFTISRDDSKSTVYLQMNSLKTEDTAVYYCTRYKGNYGGYFDVWGAGTLVTVSS

SEQ ID NO: 8008 - protein, 107 aa, synthetic construct; identical to SEQ ID NO: 6247
  source 1..107: note = Description of Artificial Sequence: Synthetic polypeptide; note = VL of XENP018684

SEQ ID NO: 8009 - protein, 5 aa, synthetic construct
  source 1..5: note = Description of Artificial Sequence: Synthetic peptide; note = XENP018684 vhCDR1
NYWMN

SEQ ID NO: 8010 - protein, 19 aa, synthetic construct
  source 1..19: note = Description of Artificial Sequence: Synthetic peptide; note = XENP018684 vhCDR2
EIRLKSNNYATHYAEPVKG

SEQ ID NO: 8011 - protein, 11 aa, synthetic construct
  source 1..11: note = Description of Artificial Sequence: Synthetic peptide; note = XENP018684 vhCDR3
YKGNYGGYFDV

SEQ ID NO: 8012 - protein, 11 aa, synthetic construct
  source 1..11: note = Description of Artificial Sequence: Synthetic peptide; note = XENP018684 vlCDR1
RASQSVSNDVA

SEQ ID NO: 8013 - protein, 7 aa, synthetic construct
  source 1..7: note = Description of Artificial Sequence: Synthetic peptide; note = XENP018684 vlCDR2
YASHRYT

SEQ ID NO: 8014 - protein, 9 aa, synthetic construct
  source 1..9: note = Description of Artificial Sequence: Synthetic peptide; note = XENP018684 vlCDR3
QQDYSSPRT

SEQ ID NO: 8015 - protein, 249 aa, synthetic construct
  source 1..249: note = Description of Artificial Sequence: Synthetic polypeptide; note = XENP018685 1G6_H1.185_L1_scFv(GKPGS)4
EVQLVESGGGLVKPGGSLRLSCAASGFTFSNYWMNWVRQAPGKGLEWVGEIRLKSNNYATHYAEPVKGRFTISRDDSKSTVYLQMNSLKTEDTAVYYCTRYYANYGGYFDVWGAGTLVTVSSGKPGSGKPGSGKPGSGKPGSSIVMTQSPATLSVSPGERATLSCRASQSVSNDVAWYQQKPGQSPRLLINYASHRYTGVPDRFTGSGYGTEFTLTISSLQSEDFAVYFCQQDYSSPRTFGGGTKVEIK

SEQ ID NO: 8016 - protein, 122 aa, synthetic construct
  source 1..122: note = Description of Artificial Sequence: Synthetic polypeptide; note = VH of XENP018685
EVQLVESGGGLVKPGGSLRLSCAASGFTFSNYWMNWVRQAPGKGLEWVGEIRLKSNNYATHYAEPVKGRFTISRDDSKSTVYLQMNSLKTEDTAVYYCTRYYANYGGYFDVWGAGTLVTVSS

SEQ ID NO: 8017 - protein, 107 aa, synthetic construct; identical to SEQ ID NO: 6247
  source 1..107: note = Description of Artificial Sequence: Synthetic polypeptide; note = VL of XENP018685

SEQ ID NO: 8018 - protein, 5 aa, synthetic construct
  source 1..5: note = Description of Artificial Sequence: Synthetic peptide; note = XENP018685 vhCDR1
NYWMN

SEQ ID NO: 8019 - protein, 19 aa, synthetic construct
  source 1..19: note = Description of Artificial Sequence: Synthetic peptide; note = XENP018685 vhCDR2
EIRLKSNNYATHYAEPVKG

SEQ ID NO: 8020 - protein, 11 aa, synthetic construct
  source 1..11: note = Description of Artificial Sequence: Synthetic peptide; note = XENP018685 vhCDR3
YYANYGGYFDV

SEQ ID NO: 8021 - protein, 11 aa, synthetic construct
  source 1..11: note = Description of Artificial Sequence: Synthetic peptide; note = XENP018685 vlCDR1
RASQSVSNDVA

SEQ ID NO: 8022 - protein, 7 aa, synthetic construct
  source 1..7: note = Description of Artificial Sequence: Synthetic peptide; note = XENP018685 vlCDR2
YASHRYT

SEQ ID NO: 8023 - protein, 9 aa, synthetic construct
  source 1..9: note = Description of Artificial Sequence: Synthetic peptide; note = XENP018685 vlCDR3
QQDYSSPRT

SEQ ID NO: 8024 - protein, 249 aa, synthetic construct
  source 1..249: note = Description of Artificial Sequence: Synthetic polypeptide; note = XENP018686 1G6_H1.186_L1_scFv(GKPGS)4
EVQLVESGGGLVKPGGSLRLSCAASGFTFSNYWMNWVRQAPGKGLEWVGEIRLKSNNYATHYAEPVKGRFTISRDDSKSTVYLQMNSLKTEDTAVYYCTRYYSNYGGYFDVWGAGTLVTVSSGKPGSGKPGSGKPGSGKPGSSIVMTQSPATLSVSPGERATLSCRASQSVSNDVAWYQQKPGQSPRLLINYASHRYTGVPDRFTGSGYGTEFTLTISSLQSEDFAVYFCQQDYSSPRTFGGGTKVEIK

SEQ ID NO: 8025 - protein, 122 aa, synthetic construct
  source 1..122: note = Description of Artificial Sequence: Synthetic polypeptide; note = VH of XENP018686
EVQLVESGGGLVKPGGSLRLSCAASGFTFSNYWMNWVRQAPGKGLEWVGEIRLKSNNYATHYAEPVKGRFTISRDDSKSTVYLQMNSLKTEDTAVYYCTRYYSNYGGYFDVWGAGTLVTVSS

SEQ ID NO: 8026 - protein, 107 aa, synthetic construct; identical to SEQ ID NO: 6247
  source 1..107: note = Description of Artificial Sequence: Synthetic polypeptide; note = VL of XENP018686

SEQ ID NO: 8027 - protein, 5 aa, synthetic construct
  source 1..5: note = Description of Artificial Sequence: Synthetic peptide; note = XENP018686 vhCDR1
NYWMN

SEQ ID NO: 8028 - protein, 19 aa, synthetic construct
  source 1..19: note = Description of Artificial Sequence: Synthetic peptide; note = XENP018686 vhCDR2
EIRLKSNNYATHYAEPVKG

SEQ ID NO: 8029 - protein, 11 aa, synthetic construct
  source 1..11: note = Description of Artificial Sequence: Synthetic peptide; note = XENP018686 vhCDR3
YYSNYGGYFDV

SEQ ID NO: 8030 - protein, 11 aa, synthetic construct
  source 1..11: note = Description of Artificial Sequence: Synthetic peptide; note = XENP018686 vlCDR1
RASQSVSNDVA

SEQ ID NO: 8031 - protein, 7 aa, synthetic construct
  source 1..7: note = Description of Artificial Sequence: Synthetic peptide; note = XENP018686 vlCDR2
YASHRYT

SEQ ID NO: 8032 - protein, 9 aa, synthetic construct
  source 1..9: note = Description of Artificial Sequence: Synthetic peptide; note = XENP018686 vlCDR3
QQDYSSPRT

SEQ ID NO: 8033 - protein, 249 aa, synthetic construct
  source 1..249: note = Description of Artificial Sequence: Synthetic polypeptide; note = XENP018687 1G6_H1.187_L1_scFv(GKPGS)4
EVQLVESGGGLVKPGGSLRLSCAASGFTFSNYWMNWVRQAPGKGLEWVGEIRLKSNNYATHYAEPVKGRFTISRDDSKSTVYLQMNSLKTEDTAVYYCTRYYTNYGGYFDVWGAGTLVTVSSGKPGSGKPGSGKPGSGKPGSSIVMTQSPATLSVSPGERATLSCRASQSVSNDVAWYQQKPGQSPRLLINYASHRYTGVPDRFTGSGYGTEFTLTISSLQSEDFAVYFCQQDYSSPRTFGGGTKVEIK

SEQ ID NO: 8034 - protein, 122 aa, synthetic construct
  source 1..122: note = Description of Artificial Sequence: Synthetic polypeptide; note = VH of XENP018687
EVQLVESGGGLVKPGGSLRLSCAASGFTFSNYWMNWVRQAPGKGLEWVGEIRLKSNNYATHYAEPVKGRFTISRDDSKSTVYLQMNSLKTEDTAVYYCTRYYTNYGGYFDVWGAGTLVTVSS

SEQ ID NO: 8035 - protein, 107 aa, synthetic construct; identical to SEQ ID NO: 6247
  source 1..107: note = Description of Artificial Sequence: Synthetic polypeptide; note = VL of XENP018687

SEQ ID NO: 8036 - protein, 5 aa, synthetic construct
  source 1..5: note = Description of Artificial Sequence: Synthetic peptide; note = XENP018687 vhCDR1
NYWMN

SEQ ID NO: 8037 - protein, 19 aa, synthetic construct
  source 1..19: note = Description of Artificial Sequence: Synthetic peptide; note = XENP018687 vhCDR2
EIRLKSNNYATHYAEPVKG

SEQ ID NO: 8038 - protein, 11 aa, synthetic construct
  source 1..11: note = Description of Artificial Sequence: Synthetic peptide; note = XENP018687 vhCDR3
YYTNYGGYFDV

SEQ ID NO: 8039 - protein, 11 aa, synthetic construct
  source 1..11: note = Description of Artificial Sequence: Synthetic peptide; note = XENP018687 vlCDR1
RASQSVSNDVA

SEQ ID NO: 8040 - protein, 7 aa, synthetic construct
  source 1..7: note = Description of Artificial Sequence: Synthetic peptide; note = XENP018687 vlCDR2
YASHRYT

SEQ ID NO: 8041 - protein, 9 aa, synthetic construct
  source 1..9: note = Description of Artificial Sequence: Synthetic peptide; note = XENP018687 vlCDR3
QQDYSSPRT

SEQ ID NO: 8042 - protein, 249 aa, synthetic construct
  source 1..249: note = Description of Artificial Sequence: Synthetic polypeptide; note = XENP018688 1G6_H1.188_L1_scFv(GKPGS)4
EVQLVESGGGLVKPGGSLRLSCAASGFTFSNYWMNWVRQAPGKGLEWVGEIRLKSNNYATHYAEPVKGRFTISRDDSKSTVYLQMNSLKTEDTAVYYCTRYYQNYGGYFDVWGAGTLVTVSSGKPGSGKPGSGKPGSGKPGSSIVMTQSPATLSVSPGERATLSCRASQSVSNDVAWYQQKPGQSPRLLINYASHRYTGVPDRFTGSGYGTEFTLTISSLQSEDFAVYFCQQDYSSPRTFGGGTKVEIK

SEQ ID NO: 8043 - protein, 122 aa, synthetic construct
  source 1..122: note = Description of Artificial Sequence: Synthetic polypeptide; note = VH of XENP018688
EVQLVESGGGLVKPGGSLRLSCAASGFTFSNYWMNWVRQAPGKGLEWVGEIRLKSNNYATHYAEPVKGRFTISRDDSKSTVYLQMNSLKTEDTAVYYCTRYYQNYGGYFDVWGAGTLVTVSS

SEQ ID NO: 8044 - protein, 107 aa, synthetic construct; identical to SEQ ID NO: 6247
  source 1..107: note = Description of Artificial Sequence: Synthetic polypeptide; note = VL of XENP018688

SEQ ID NO: 8045 - protein, 5 aa, synthetic construct
  source 1..5: note = Description of Artificial Sequence: Synthetic peptide; note = XENP018688 vhCDR1
NYWMN

SEQ ID NO: 8046 - protein, 19 aa, synthetic construct
  source 1..19: note = Description of Artificial Sequence: Synthetic peptide; note = XENP018688 vhCDR2
EIRLKSNNYATHYAEPVKG

SEQ ID NO: 8047 - protein, 11 aa, synthetic construct
  source 1..11: note = Description of Artificial Sequence: Synthetic peptide; note = XENP018688 vhCDR3
YYQNYGGYFDV

SEQ ID NO: 8048 - protein, 11 aa, synthetic construct
  source 1..11: note = Description of Artificial Sequence: Synthetic peptide; note = XENP018688 vlCDR1
RASQSVSNDVA

SEQ ID NO: 8049 - protein, 7 aa, synthetic construct
  source 1..7: note = Description of Artificial Sequence: Synthetic peptide; note = XENP018688 vlCDR2
YASHRYT

SEQ ID NO: 8050 - protein, 9 aa, synthetic construct
  source 1..9: note = Description of Artificial Sequence: Synthetic peptide; note = XENP018688 vlCDR3
QQDYSSPRT

SEQ ID NO: 8051 - protein, 249 aa, synthetic construct
  source 1..249: note = Description of Artificial Sequence: Synthetic polypeptide; note = XENP018689 1G6_H1.189_L1_scFv(GKPGS)4
EVQLVESGGGLVKPGGSLRLSCAASGFTFSNYWMNWVRQAPGKGLEWVGEIRLKSNNYATHYAEPVKGRFTISRDDSKSTVYLQMNSLKTEDTAVYYCTRYYHNYGGYFDVWGAGTLVTVSSGKPGSGKPGSGKPGSGKPGSSIVMTQSPATLSVSPGERATLSCRASQSVSNDVAWYQQKPGQSPRLLINYASHRYTGVPDRFTGSGYGTEFTLTISSLQSEDFAVYFCQQDYSSPRTFGGGTKVEIK

SEQ ID NO: 8052 - protein, 122 aa, synthetic construct
  source 1..122: note = Description of Artificial Sequence: Synthetic polypeptide; note = VH of XENP018689
EVQLVESGGGLVKPGGSLRLSCAASGFTFSNYWMNWVRQAPGKGLEWVGEIRLKSNNYATHYAEPVKGRFTISRDDSKSTVYLQMNSLKTEDTAVYYCTRYYHNYGGYFDVWGAGTLVTVSS

SEQ ID NO: 8053 - protein, 107 aa, synthetic construct; identical to SEQ ID NO: 6247
  source 1..107: note = Description of Artificial Sequence: Synthetic polypeptide; note = VL of XENP018689

SEQ ID NO: 8054 - protein, 5 aa, synthetic construct
  source 1..5: note = Description of Artificial Sequence: Synthetic peptide; note = XENP018689 vhCDR1
NYWMN

SEQ ID NO: 8055 - protein, 19 aa, synthetic construct
  source 1..19: note = Description of Artificial Sequence: Synthetic peptide; note = XENP018689 vhCDR2
EIRLKSNNYATHYAEPVKG

SEQ ID NO: 8056 - protein, 11 aa, synthetic construct
  source 1..11: note = Description of Artificial Sequence: Synthetic peptide; note = XENP018689 vhCDR3
YYHNYGGYFDV

SEQ ID NO: 8057 - protein, 11 aa, synthetic construct
  source 1..11: note = Description of Artificial Sequence: Synthetic peptide; note = XENP018689 vlCDR1
RASQSVSNDVA

SEQ ID NO: 8058 - protein, 7 aa, synthetic construct
  source 1..7: note = Description of Artificial Sequence: Synthetic peptide; note = XENP018689 vlCDR2
YASHRYT

SEQ ID NO: 8059 - protein, 9 aa, synthetic construct
  source 1..9: note = Description of Artificial Sequence: Synthetic peptide; note = XENP018689 vlCDR3
QQDYSSPRT

SEQ ID NO: 8060 - protein, 249 aa, synthetic construct
  source 1..249: note = Description of Artificial Sequence: Synthetic polypeptide; note = XENP018690 1G6_H1.190_L1_scFv(GKPGS)4
EVQLVESGGGLVKPGGSLRLSCAASGFTFSNYWMNWVRQAPGKGLEWVGEIRLKSNNYATHYAEPVKGRFTISRDDSKSTVYLQMNSLKTEDTAVYYCTRYYDNYGGYFDVWGAGTLVTVSSGKPGSGKPGSGKPGSGKPGSSIVMTQSPATLSVSPGERATLSCRASQSVSNDVAWYQQKPGQSPRLLINYASHRYTGVPDRFTGSGYGTEFTLTISSLQSEDFAVYFCQQDYSSPRTFGGGTKVEIK

SEQ ID NO: 8061 - protein, 122 aa, synthetic construct
  source 1..122: note = Description of Artificial Sequence: Synthetic polypeptide; note = VH of XENP018690
EVQLVESGGGLVKPGGSLRLSCAASGFTFSNYWMNWVRQAPGKGLEWVGEIRLKSNNYATHYAEPVKGRFTISRDDSKSTVYLQMNSLKTEDTAVYYCTRYYDNYGGYFDVWGAGTLVTVSS

SEQ ID NO: 8062 - protein, 107 aa, synthetic construct; identical to SEQ ID NO: 6247
  source 1..107: note = Description of Artificial Sequence: Synthetic polypeptide; note = VL of XENP018690

SEQ ID NO: 8063 - protein, 5 aa, synthetic construct
  source 1..5: note = Description of Artificial Sequence: Synthetic peptide; note = XENP018690 vhCDR1
NYWMN

SEQ ID NO: 8064 - protein, 19 aa, synthetic construct
  source 1..19: note = Description of Artificial Sequence: Synthetic peptide; note = XENP018690 vhCDR2
EIRLKSNNYATHYAEPVKG

SEQ ID NO: 8065 - protein, 11 aa, synthetic construct
  source 1..11: note = Description of Artificial Sequence: Synthetic peptide; note = XENP018690 vhCDR3
YYDNYGGYFDV

SEQ ID NO: 8066 - protein, 11 aa, synthetic construct
  source 1..11: note = Description of Artificial Sequence: Synthetic peptide; note = XENP018690 vlCDR1
RASQSVSNDVA

SEQ ID NO: 8067 - protein, 7 aa, synthetic construct
  source 1..7: note = Description of Artificial Sequence: Synthetic peptide; note = XENP018690 vlCDR2
YASHRYT

SEQ ID NO: 8068 - protein, 9 aa, synthetic construct
  source 1..9: note = Description of Artificial Sequence: Synthetic peptide; note = XENP018690 vlCDR3
QQDYSSPRT

SEQ ID NO: 8069 - protein, 249 aa, synthetic construct
  source 1..249: note = Description of Artificial Sequence: Synthetic polypeptide; note = XENP018691 1G6_H1.191_L1_scFv(GKPGS)4
EVQLVESGGGLVKPGGSLRLSCAASGFTFSNYWMNWVRQAPGKGLEWVGEIRLKSNNYATHYAEPVKGRFTISRDDSKSTVYLQMNSLKTEDTAVYYCTRYYKNYGGYFDVWGAGTLVTVSSGKPGSGKPGSGKPGSGKPGSSIVMTQSPATLSVSPGERATLSCRASQSVSNDVAWYQQKPGQSPRLLINYASHRYTGVPDRFTGSGYGTEFTLTISSLQSEDFAVYFCQQDYSSPRTFGGGTKVEIK

SEQ ID NO: 8070 - protein, 122 aa, synthetic construct
  source 1..122: note = Description of Artificial Sequence: Synthetic polypeptide; note = VH of XENP018691
EVQLVESGGGLVKPGGSLRLSCAASGFTFSNYWMNWVRQAPGKGLEWVGEIRLKSNNYATHYAEPVKGRFTISRDDSKSTVYLQMNSLKTEDTAVYYCTRYYKNYGGYFDVWGAGTLVTVSS

SEQ ID NO: 8071 - protein, 107 aa, synthetic construct; identical to SEQ ID NO: 6247
  source 1..107: note = Description of Artificial Sequence: Synthetic polypeptide; note = VL of XENP018691

SEQ ID NO: 8072 - protein, 5 aa, synthetic construct
  source 1..5: note = Description of Artificial Sequence: Synthetic peptide; note = XENP018691 vhCDR1
NYWMN

SEQ ID NO: 8073 - protein, 19 aa, synthetic construct
  source 1..19: note = Description of Artificial Sequence: Synthetic peptide; note = XENP018691 vhCDR2
EIRLKSNNYATHYAEPVKG

SEQ ID NO: 8074 - protein, 11 aa, synthetic construct
  source 1..11: note = Description of Artificial Sequence: Synthetic peptide; note = XENP018691 vhCDR3
YYKNYGGYFDV

SEQ ID NO: 8075 - protein, 11 aa, synthetic construct
  source 1..11: note = Description of Artificial Sequence: Synthetic peptide; note = XENP018691 vlCDR1
RASQSVSNDVA

SEQ ID NO: 8076 - protein, 7 aa, synthetic construct
  source 1..7: note = Description of Artificial Sequence: Synthetic peptide; note = XENP018691 vlCDR2
YASHRYT

SEQ ID NO: 8077 - protein, 9 aa, synthetic construct
  source 1..9: note = Description of Artificial Sequence: Synthetic peptide; note = XENP018691 vlCDR3
QQDYSSPRT

SEQ ID NO: 8078 - protein, 249 aa, synthetic construct
  source 1..249: note = Description of Artificial Sequence: Synthetic polypeptide; note = XENP018692 1G6_H1.192_L1_scFv(GKPGS)4
EVQLVESGGGLVKPGGSLRLSCAASGFTFSNYWMNWVRQAPGKGLEWVGEIRLKSNNYATHYAEPVKGRFTISRDDSKSTVYLQMNSLKTEDTAVYYCTRYYLNYGGYFDVWGAGTLVTVSSGKPGSGKPGSGKPGSGKPGSSIVMTQSPATLSVSPGERATLSCRASQSVSNDVAWYQQKPGQSPRLLINYASHRYTGVPDRFTGSGYGTEFTLTISSLQSEDFAVYFCQQDYSSPRTFGGGTKVEIK

SEQ ID NO: 8079 - protein, 122 aa, synthetic construct
  source 1..122: note = Description of Artificial Sequence: Synthetic polypeptide; note = VH of XENP018692
EVQLVESGGGLVKPGGSLRLSCAASGFTFSNYWMNWVRQAPGKGLEWVGEIRLKSNNYATHYAEPVKGRFTISRDDSKSTVYLQMNSLKTEDTAVYYCTRYYLNYGGYFDVWGAGTLVTVSS

SEQ ID NO: 8080 - protein, 107 aa, synthetic construct; identical to SEQ ID NO: 6247
  source 1..107: note = Description of Artificial Sequence: Synthetic polypeptide; note = VL of XENP018692

SEQ ID NO: 8081 - protein, 5 aa, synthetic construct
  source 1..5: note = Description of Artificial Sequence: Synthetic peptide; note = XENP018692 vhCDR1
NYWMN

SEQ ID NO: 8082 - protein, 19 aa, synthetic construct
  source 1..19: note = Description of Artificial Sequence: Synthetic peptide; note = XENP018692 vhCDR2
EIRLKSNNYATHYAEPVKG

SEQ ID NO: 8083 - protein, 11 aa, synthetic construct
  source 1..11: note = Description of Artificial Sequence: Synthetic peptide; note = XENP018692 vhCDR3
YYLNYGGYFDV

SEQ ID NO: 8084 - protein, 11 aa, synthetic construct
  source 1..11: note = Description of Artificial Sequence: Synthetic peptide; note = XENP018692 vlCDR1
RASQSVSNDVA

SEQ ID NO: 8085 - protein, 7 aa, synthetic construct
  source 1..7: note = Description of Artificial Sequence: Synthetic peptide; note = XENP018692 vlCDR2
YASHRYT

SEQ ID NO: 8086 - protein, 9 aa, synthetic construct
  source 1..9: note = Description of Artificial Sequence: Synthetic peptide; note = XENP018692 vlCDR3
QQDYSSPRT

SEQ ID NO: 8087 - protein, 249 aa, synthetic construct
  source 1..249: note = Description of Artificial Sequence: Synthetic polypeptide; note = XENP018693 1G6_H1.193_L1_scFv(GKPGS)4
EVQLVESGGGLVKPGGSLRLSCAASGFTFSNYWMNWVRQAPGKGLEWVGEIRLKSNNYATHYAEPVKGRFTISRDDSKSTVYLQMNSLKTEDTAVYYCTRYYFNYGGYFDVWGAGTLVTVSSGKPGSGKPGSGKPGSGKPGSSIVMTQSPATLSVSPGERATLSCRASQSVSNDVAWYQQKPGQSPRLLINYASHRYTGVPDRFTGSGYGTEFTLTISSLQSEDFAVYFCQQDYSSPRTFGGGTKVEIK

SEQ ID NO: 8088 - protein, 122 aa, synthetic construct
  source 1..122: note = Description of Artificial Sequence: Synthetic polypeptide; note = VH of XENP018693
EVQLVESGGGLVKPGGSLRLSCAASGFTFSNYWMNWVRQAPGKGLEWVGEIRLKSNNYATHYAEPVKGRFTISRDDSKSTVYLQMNSLKTEDTAVYYCTRYYFNYGGYFDVWGAGTLVTVSS

SEQ ID NO: 8089 - protein, 107 aa, synthetic construct; identical to SEQ ID NO: 6247
  source 1..107: note = Description of Artificial Sequence: Synthetic polypeptide; note = VL of XENP018693

SEQ ID NO: 8090 - protein, 5 aa, synthetic construct
  source 1..5: note = Description of Artificial Sequence: Synthetic peptide; note = XENP018693 vhCDR1
NYWMN

SEQ ID NO: 8091 - protein, 19 aa, synthetic construct
  source 1..19: note = Description of Artificial Sequence: Synthetic peptide; note = XENP018693 vhCDR2
EIRLKSNNYATHYAEPVKG

SEQ ID NO: 8092 - protein, 11 aa, synthetic construct
  source 1..11: note = Description of Artificial Sequence: Synthetic peptide; note = XENP018693 vhCDR3
YYFNYGGYFDV

SEQ ID NO: 8093 - protein, 11 aa, synthetic construct
  source 1..11: note = Description of Artificial Sequence: Synthetic peptide; note = XENP018693 vlCDR1
RASQSVSNDVA

SEQ ID NO: 8094 - protein, 7 aa, synthetic construct
  source 1..7: note = Description of Artificial Sequence: Synthetic peptide; note = XENP018693 vlCDR2
YASHRYT

SEQ ID NO: 8095 - protein, 9 aa, synthetic construct
  source 1..9: note = Description of Artificial Sequence: Synthetic peptide; note = XENP018693 vlCDR3
QQDYSSPRT

SEQ ID NO: 8096 - protein, 249 aa, synthetic construct
  source 1..249: note = Description of Artificial Sequence: Synthetic polypeptide; note = XENP018694 1G6_H1.194_L1_scFv(GKPGS)4
EVQLVESGGGLVKPGGSLRLSCAASGFTFSNYWMNWVRQAPGKGLEWVGEIRLKSNNYATHYAEPVKGRFTISRDDSKSTVYLQMNSLKTEDTAVYYCTRYYGDYGGYFDVWGAGTLVTVSSGKPGSGKPGSGKPGSGKPGSSIVMTQSPATLSVSPGERATLSCRASQSVSNDVAWYQQKPGQSPRLLINYASHRYTGVPDRFTGSGYGTEFTLTISSLQSEDFAVYFCQQDYSSPRTFGGGTKVEIK

SEQ ID NO: 8097 - protein, 122 aa, synthetic construct
  source 1..122: note = Description of Artificial Sequence: Synthetic polypeptide; note = VH of XENP018694
EVQLVESGGGLVKPGGSLRLSCAASGFTFSNYWMNWVRQAPGKGLEWVGEIRLKSNNYATHYAEPVKGRFTISRDDSKSTVYLQMNSLKTEDTAVYYCTRYYGDYGGYFDVWGAGTLVTVSS

SEQ ID NO: 8098 - protein, 107 aa, synthetic construct; identical to SEQ ID NO: 6247
  source 1..107: note = Description of Artificial Sequence: Synthetic polypeptide; note = VL of XENP018694

SEQ ID NO: 8099 - protein, 5 aa, synthetic construct
  source 1..5: note = Description of Artificial Sequence: Synthetic peptide; note = XENP018694 vhCDR1
NYWMN

SEQ ID NO: 8100 - protein, 19 aa, synthetic construct
  source 1..19: note = Description of Artificial Sequence: Synthetic peptide; note = XENP018694 vhCDR2
EIRLKSNNYATHYAEPVKG

SEQ ID NO: 8101 - protein, 11 aa, synthetic construct
  source 1..11: note = Description of Artificial Sequence: Synthetic peptide; note = XENP018694 vhCDR3
YYGDYGGYFDV

SEQ ID NO: 8102 - protein, 11 aa, synthetic construct
  source 1..11: note = Description of Artificial Sequence: Synthetic peptide; note = XENP018694 vlCDR1
RASQSVSNDVA

SEQ ID NO: 8103 - protein, 7 aa, synthetic construct
  source 1..7: note = Description of Artificial Sequence: Synthetic peptide; note = XENP018694 vlCDR2
YASHRYT

SEQ ID NO: 8104 - protein, 9 aa, synthetic construct
  source 1..9: note = Description of Artificial Sequence: Synthetic peptide; note = XENP018694 vlCDR3
QQDYSSPRT

SEQ ID NO: 8105 - protein, 249 aa, synthetic construct
  source 1..249: note = Description of Artificial Sequence: Synthetic polypeptide; note = XENP018695 1G6_H1.195_L1_scFv(GKPGS)4
EVQLVESGGGLVKPGGSLRLSCAASGFTFSNYWMNWVRQAPGKGLEWVGEIRLKSNNYATHYAEPVKGRFTISRDDSKSTVYLQMNSLKTEDTAVYYCTRYYGHYGGYFDVWGAGTLVTVSSGKPGSGKPGSGKPGSGKPGSSIVMTQSPATLSVSPGERATLSCRASQSVSNDVAWYQQKPGQSPRLLINYASHRYTGVPDRFTGSGYGTEFTLTISSLQSEDFAVYFCQQDYSSPRTFGGGTKVEIK

SEQ ID NO: 8106 - protein, 122 aa, synthetic construct
  source 1..122: note = Description of Artificial Sequence: Synthetic polypeptide; note = VH of XENP018695
EVQLVESGGGLVKPGGSLRLSCAASGFTFSNYWMNWVRQAPGKGLEWVGEIRLKSNNYATHYAEPVKGRFTISRDDSKSTVYLQMNSLKTEDTAVYYCTRYYGHYGGYFDVWGAGTLVTVSS

SEQ ID NO: 8107 - protein, 107 aa, synthetic construct; identical to SEQ ID NO: 6247
  source 1..107: note = Description of Artificial Sequence: Synthetic polypeptide; note = VL of XENP018695

SEQ ID NO: 8108 - protein, 5 aa, synthetic construct
  source 1..5: note = Description of Artificial Sequence: Synthetic peptide; note = XENP018695 vhCDR1
NYWMN

SEQ ID NO: 8109 - protein, 19 aa, synthetic construct
  source 1..19: note = Description of Artificial Sequence: Synthetic peptide; note = XENP018695 vhCDR2
EIRLKSNNYATHYAEPVKG

SEQ ID NO: 8110 - protein, 11 aa, synthetic construct
  source 1..11: note = Description of Artificial Sequence: Synthetic peptide; note = XENP018695 vhCDR3
YYGHYGGYFDV

SEQ ID NO: 8111 - protein, 11 aa, synthetic construct
  source 1..11: note = Description of Artificial Sequence: Synthetic peptide; note = XENP018695 vlCDR1
RASQSVSNDVA

SEQ ID NO: 8112 - protein, 7 aa, synthetic construct
  source 1..7: note = Description of Artificial Sequence: Synthetic peptide; note = XENP018695 vlCDR2
YASHRYT

SEQ ID NO: 8113 - protein, 9 aa, synthetic construct
  source 1..9: note = Description of Artificial Sequence: Synthetic peptide; note = XENP018695 vlCDR3
QQDYSSPRT

SEQ ID NO: 8114 - protein, 249 aa, synthetic construct
  source 1..249: note = Description of Artificial Sequence: Synthetic polypeptide; note = XENP018696 1G6_H1.196_L1_scFv(GKPGS)4
EVQLVESGGGLVKPGGSLRLSCAASGFTFSNYWMNWVRQAPGKGLEWVGEIRLKSNNYATHYAEPVKGRFTISRDDSKSTVYLQMNSLKTEDTAVYYCTRYYGEYGGYFDVWGAGTLVTVSSGKPGSGKPGSGKPGSGKPGSSIVMTQSPATLSVSPGERATLSCRASQSVSNDVAWYQQKPGQSPRLLINYASHRYTGVPDRFTGSGYGTEFTLTISSLQSEDFAVYFCQQDYSSPRTFGGGTKVEIK

SEQ ID NO: 8115 - protein, 122 aa, synthetic construct
  source 1..122: note = Description of Artificial Sequence: Synthetic polypeptide; note = VH of XENP018696
EVQLVESGGGLVKPGGSLRLSCAASGFTFSNYWMNWVRQAPGKGLEWVGEIRLKSNNYATHYAEPVKGRFTISRDDSKSTVYLQMNSLKTEDTAVYYCTRYYGEYGGYFDVWGAGTLVTVSS

SEQ ID NO: 8116 - protein, 107 aa, synthetic construct; identical to SEQ ID NO: 6247
  source 1..107: note = Description of Artificial Sequence: Synthetic polypeptide; note = VL of XENP018696

SEQ ID NO: 8117 - protein, 5 aa, synthetic construct
  source 1..5: note = Description of Artificial Sequence: Synthetic peptide; note = XENP018696 vhCDR1
NYWMN

SEQ ID NO: 8118 - protein, 19 aa, synthetic construct
  source 1..19: note = Description of Artificial Sequence: Synthetic peptide; note = XENP018696 vhCDR2
EIRLKSNNYATHYAEPVKG

SEQ ID NO: 8119 - protein, 11 aa, synthetic construct
  source 1..11: note = Description of Artificial Sequence: Synthetic peptide; note = XENP018696 vhCDR3
YYGEYGGYFDV

SEQ ID NO: 8120 - protein, 11 aa, synthetic construct
  source 1..11: note = Description of Artificial Sequence: Synthetic peptide; note = XENP018696 vlCDR1
RASQSVSNDVA

SEQ ID NO: 8121 - protein, 7 aa, synthetic construct
  source 1..7: note = Description of Artificial Sequence: Synthetic peptide; note = XENP018696 vlCDR2
YASHRYT

SEQ ID NO: 8122 - protein, 9 aa, synthetic construct
  source 1..9: note = Description of Artificial Sequence: Synthetic peptide; note = XENP018696 vlCDR3
QQDYSSPRT

SEQ ID NO: 8123 - protein, 249 aa, synthetic construct
  source 1..249: note = Description of Artificial Sequence: Synthetic polypeptide; note = XENP018701 1G6_H1.197_L1_scFv(GKPGS)4
EVQLVESGGGLVKPGGSLRLSCAASGFTFSNYWMNWVRQAPGKGLEWVGEIRLKSNNYATHYAEPVKGRFTISRDDSKSTVYLQMNSLKTEDTAVYYCTRYYGSYGGYFDVWGAGTLVTVSSGKPGSGKPGSGKPGSGKPGSSIVMTQSPATLSVSPGERATLSCRASQSVSNDVAWYQQKPGQSPRLLINYASHRYTGVPDRFTGSGYGTEFTLTISSLQSEDFAVYFCQQDYSSPRTFGGGTKVEIK

SEQ ID NO: 8124 - protein, 122 aa, synthetic construct
  source 1..122: note = Description of Artificial Sequence: Synthetic polypeptide; note = VH of XENP018701
EVQLVESGGGLVKPGGSLRLSCAASGFTFSNYWMNWVRQAPGKGLEWVGEIRLKSNNYATHYAEPVKGRFTISRDDSKSTVYLQMNSLKTEDTAVYYCTRYYGSYGGYFDVWGAGTLVTVSS

SEQ ID NO: 8125 - protein, 107 aa, synthetic construct; identical to SEQ ID NO: 6247
  source 1..107: note = Description of Artificial Sequence: Synthetic polypeptide; note = VL of XENP018701

SEQ ID NO: 8126 - protein, 5 aa, synthetic construct
  source 1..5: note = Description of Artificial Sequence: Synthetic peptide; note = XENP018701 vhCDR1
NYWMN

SEQ ID NO: 8127 - protein, 19 aa, synthetic construct
  source 1..19: note = Description of Artificial Sequence: Synthetic peptide; note = XENP018701 vhCDR2
EIRLKSNNYATHYAEPVKG

SEQ ID NO: 8128 - protein, 11 aa, synthetic construct
  source 1..11: note = Description of Artificial Sequence: Synthetic peptide; note = XENP018701 vhCDR3
YYGSYGGYFDV

SEQ ID NO: 8129 - protein, 11 aa, synthetic construct
  source 1..11: note = Description of Artificial Sequence: Synthetic peptide; note = XENP018701 vlCDR1
RASQSVSNDVA

SEQ ID NO: 8130 - protein, 7 aa, synthetic construct
  source 1..7: note = Description of Artificial Sequence: Synthetic peptide; note = XENP018701 vlCDR2
YASHRYT

SEQ ID NO: 8131 - protein, 9 aa, synthetic construct
  source 1..9: note = Description of Artificial Sequence: Synthetic peptide; note = XENP018701 vlCDR3
QQDYSSPRT

SEQ ID NO: 8132 - protein, 249 aa, synthetic construct
  source 1..249: note = Description of Artificial Sequence: Synthetic polypeptide; note = XENP018702 1G6_H1.198_L1_scFv(GKPGS)4
EVQLVESGGGLVKPGGSLRLSCAASGFTFSNYWMNWVRQAPGKGLEWVGEIRLKSNNYATHYAEPVKGRFTISRDDSKSTVYLQMNSLKTEDTAVYYCTRYYGRYGGYFDVWGAGTLVTVSSGKPGSGKPGSGKPGSGKPGSSIVMTQSPATLSVSPGERATLSCRASQSVSNDVAWYQQKPGQSPRLLINYASHRYTGVPDRFTGSGYGTEFTLTISSLQSEDFAVYFCQQDYSSPRTFGGGTKVEIK

SEQ ID NO: 8133 - protein, 122 aa, synthetic construct
  source 1..122: note = Description of Artificial Sequence: Synthetic polypeptide; note = VH of XENP018702
EVQLVESGGGLVKPGGSLRLSCAASGFTFSNYWMNWVRQAPGKGLEWVGEIRLKSNNYATHYAEPVKGRFTISRDDSKSTVYLQMNSLKTEDTAVYYCTRYYGRYGGYFDVWGAGTLVTVSS

SEQ ID NO: 8134 - protein, 107 aa, synthetic construct; identical to SEQ ID NO: 6247
  source 1..107: note = Description of Artificial Sequence: Synthetic polypeptide; note = VL of XENP018702

SEQ ID NO: 8135 - protein, 5 aa, synthetic construct
  source 1..5: note = Description of Artificial Sequence: Synthetic peptide; note = XENP018702 vhCDR1
NYWMN

SEQ ID NO: 8136 - protein, 19 aa, synthetic construct
  source 1..19: note = Description of Artificial Sequence: Synthetic peptide; note = XENP018702 vhCDR2
EIRLKSNNYATHYAEPVKG

SEQ ID NO: 8137 - protein, 11 aa, synthetic construct
  source 1..11: note = Description of Artificial Sequence: Synthetic peptide; note = XENP018702 vhCDR3
YYGRYGGYFDV

SEQ ID NO: 8138 - protein, 11 aa, synthetic construct
  source 1..11: note = Description of Artificial Sequence: Synthetic peptide; note = XENP018702 vlCDR1
RASQSVSNDVA

SEQ ID NO: 8139 - protein, 7 aa, synthetic construct
  source 1..7: note = Description of Artificial Sequence: Synthetic peptide; note = XENP018702 vlCDR2
YASHRYT

SEQ ID NO: 8140 - protein, 9 aa, synthetic construct
  source 1..9: note = Description of Artificial Sequence: Synthetic peptide; note = XENP018702 vlCDR3
QQDYSSPRT

SEQ ID NO: 8141 - protein, 249 aa, synthetic construct
  source 1..249: note = Description of Artificial Sequence: Synthetic polypeptide; note = XENP018703 1G6_H1.199_L1_scFv(GKPGS)4
EVQLVESGGGLVKPGGSLRLSCAASGFTFSNYWMNWVRQAPGKGLEWVGEIRLKSNNYATHYAEPVKGRFTISRDDSKSTVYLQMNSLKTEDTAVYYCTRYYGLYGGYFDVWGAGTLVTVSSGKPGSGKPGSGKPGSGKPGSSIVMTQSPATLSVSPGERATLSCRASQSVSNDVAWYQQKPGQSPRLLINYASHRYTGVPDRFTGSGYGTEFTLTISSLQSEDFAVYFCQQDYSSPRTFGGGTKVEIK

SEQ ID NO: 8142 - protein, 122 aa, synthetic construct
  source 1..122: note = Description of Artificial Sequence: Synthetic polypeptide; note = VH of XENP018703
EVQLVESGGGLVKPGGSLRLSCAASGFTFSNYWMNWVRQAPGKGLEWVGEIRLKSNNYATHYAEPVKGRFTISRDDSKSTVYLQMNSLKTEDTAVYYCTRYYGLYGGYFDVWGAGTLVTVSS

SEQ ID NO: 8143 - protein, 107 aa, synthetic construct; identical to SEQ ID NO: 6247
  source 1..107: note = Description of Artificial Sequence: Synthetic polypeptide; note = VL of XENP018703

SEQ ID NO: 8144 - protein, 5 aa, synthetic construct
  source 1..5: note = Description of Artificial Sequence: Synthetic peptide; note = XENP018703 vhCDR1
NYWMN

SEQ ID NO: 8145 - protein, 19 aa, synthetic construct
  source 1..19: note = Description of Artificial Sequence: Synthetic peptide; note = XENP018703 vhCDR2
EIRLKSNNYATHYAEPVKG

SEQ ID NO: 8146 - protein, 11 aa, synthetic construct
  source 1..11: note = Description of Artificial Sequence: Synthetic peptide; note = XENP018703 vhCDR3
YYGLYGGYFDV

SEQ ID NO: 8147 - protein, 11 aa, synthetic construct
  source 1..11: note = Description of Artificial Sequence: Synthetic peptide; note = XENP018703 vlCDR1
RASQSVSNDVA

SEQ ID NO: 8148 - protein, 7 aa, synthetic construct
  source 1..7: note = Description of Artificial Sequence: Synthetic peptide; note = XENP018703 vlCDR2
YASHRYT

SEQ ID NO: 8149 - protein, 9 aa, synthetic construct
  source 1..9: note = Description of Artificial Sequence: Synthetic peptide; note = XENP018703 vlCDR3
QQDYSSPRT

SEQ ID NO: 8150 - protein, 249 aa, synthetic construct
  source 1..249: note = Description of Artificial Sequence: Synthetic polypeptide; note = XENP018704 1G6_H1.200_L1_scFv(GKPGS)4
EVQLVESGGGLVKPGGSLRLSCAASGFTFSNYWMNWVRQAPGKGLEWVGEIRLKSNNYATHYAEPVKGRFTISRDDSKSTVYLQMNSLKTEDTAVYYCTRYYGTYGGYFDVWGAGTLVTVSSGKPGSGKPGSGKPGSGKPGSSIVMTQSPATLSVSPGERATLSCRASQSVSNDVAWYQQKPGQSPRLLINYASHRYTGVPDRFTGSGYGTEFTLTISSLQSEDFAVYFCQQDYSSPRTFGGGTKVEIK

SEQ ID NO: 8151 - protein, 122 aa, synthetic construct
  source 1..122: note = Description of Artificial Sequence: Synthetic polypeptide; note = VH of XENP018704
EVQLVESGGGLVKPGGSLRLSCAASGFTFSNYWMNWVRQAPGKGLEWVGEIRLKSNNYATHYAEPVKGRFTISRDDSKSTVYLQMNSLKTEDTAVYYCTRYYGTYGGYFDVWGAGTLVTVSS

SEQ ID NO: 8152 - protein, 107 aa, synthetic construct; identical to SEQ ID NO: 6247
  source 1..107: note = Description of Artificial Sequence: Synthetic polypeptide; note = VL of XENP018704

SEQ ID NO: 8153 - protein, 5 aa, synthetic construct
  source 1..5: note = Description of Artificial Sequence: Synthetic peptide; note = XENP018704 vhCDR1
NYWMN

SEQ ID NO: 8154 - protein, 19 aa, synthetic construct
  source 1..19: note = Description of Artificial Sequence: Synthetic peptide; note = XENP018704 vhCDR2
EIRLKSNNYATHYAEPVKG

SEQ ID NO: 8155 - protein, 11 aa, synthetic construct
  source 1..11: note = Description of Artificial Sequence: Synthetic peptide; note = XENP018704 vhCDR3
YYGTYGGYFDV

SEQ ID NO: 8156 - protein, 11 aa, synthetic construct
  source 1..11: note = Description of Artificial Sequence: Synthetic peptide; note = XENP018704 vlCDR1
RASQSVSNDVA

SEQ ID NO: 8157 - protein, 7 aa, synthetic construct
  source 1..7: note = Description of Artificial Sequence: Synthetic peptide; note = XENP018704 vlCDR2
YASHRYT

SEQ ID NO: 8158 - protein, 9 aa, synthetic construct
  source 1..9: note = Description of Artificial Sequence: Synthetic peptide; note = XENP018704 vlCDR3
QQDYSSPRT

SEQ ID NO: 8159 - protein, 249 aa, synthetic construct
  source 1..249: note = Description of Artificial Sequence: Synthetic polypeptide; note = XENP018705 1G6_H1.201_L1_scFv(GKPGS)4
EVQLVESGGGLVKPGGSLRLSCAASGFTFSNYWMNWVRQAPGKGLEWVGEIRLKSNNYATHYAEPVKGRFTISRDDSKSTVYLQMNSLKTEDTAVYYCTRYYGGYGGYFDVWGAGTLVTVSSGKPGSGKPGSGKPGSGKPGSSIVMTQSPATLSVSPGERATLSCRASQSVSNDVAWYQQKPGQSPRLLINYASHRYTGVPDRFTGSGYGTEFTLTISSLQSEDFAVYFCQQDYSSPRTFGGGTKVEIK

SEQ ID NO: 8160 - protein, 122 aa, synthetic construct
  source 1..122: note = Description of Artificial Sequence: Synthetic polypeptide; note = VH of XENP018705
EVQLVESGGGLVKPGGSLRLSCAASGFTFSNYWMNWVRQAPGKGLEWVGEIRLKSNNYATHYAEPVKGRFTISRDDSKSTVYLQMNSLKTEDTAVYYCTRYYGGYGGYFDVWGAGTLVTVSS

SEQ ID NO: 8161 - protein, 107 aa, synthetic construct; identical to SEQ ID NO: 6247
  source 1..107: note = Description of Artificial Sequence: Synthetic polypeptide; note = VL of XENP018705

SEQ ID NO: 8162 - protein, 5 aa, synthetic construct
  source 1..5: note = Description of Artificial Sequence: Synthetic peptide; note = XENP018705 vhCDR1
NYWMN

SEQ ID NO: 8163 - protein, 19 aa, synthetic construct
  source 1..19: note = Description of Artificial Sequence: Synthetic peptide; note = XENP018705 vhCDR2
EIRLKSNNYATHYAEPVKG

SEQ ID NO: 8164 - protein, 11 aa, synthetic construct
  source 1..11: note = Description of Artificial Sequence: Synthetic peptide; note = XENP018705 vhCDR3
YYGGYGGYFDV

SEQ ID NO: 8165 - protein, 11 aa, synthetic construct
  source 1..11: note = Description of Artificial Sequence: Synthetic peptide; note = XENP018705 vlCDR1
RASQSVSNDVA

SEQ ID NO: 8166 - protein, 7 aa, synthetic construct
  source 1..7: note = Description of Artificial Sequence: Synthetic peptide; note = XENP018705 vlCDR2
YASHRYT

SEQ ID NO: 8167 - protein, 9 aa, synthetic construct
  source 1..9: note = Description of Artificial Sequence: Synthetic peptide; note = XENP018705 vlCDR3
QQDYSSPRT

SEQ ID NO: 8168 - protein, 249 aa, synthetic construct
  source 1..249: note = Description of Artificial Sequence: Synthetic polypeptide; note = XENP018706 1G6_H1.202_L1_scFv(GKPGS)4
EVQLVESGGGLVKPGGSLRLSCAASGFTFSNYWMNWVRQAPGKGLEWVGEIRLKSNNYATHYAEPVKGRFTISRDDSKSTVYLQMNSLKTEDTAVYYCTRYYGFYGGYFDVWGAGTLVTVSSGKPGSGKPGSGKPGSGKPGSSIVMTQSPATLSVSPGERATLSCRASQSVSNDVAWYQQKPGQSPRLLINYASHRYTGVPDRFTGSGYGTEFTLTISSLQSEDFAVYFCQQDYSSPRTFGGGTKVEIK

SEQ ID NO: 8169 - protein, 122 aa, synthetic construct
  source 1..122: note = Description of Artificial Sequence: Synthetic polypeptide; note = VH of XENP018706
EVQLVESGGGLVKPGGSLRLSCAASGFTFSNYWMNWVRQAPGKGLEWVGEIRLKSNNYATHYAEPVKGRFTISRDDSKSTVYLQMNSLKTEDTAVYYCTRYYGFYGGYFDVWGAGTLVTVSS

SEQ ID NO: 8170 - protein, 107 aa, synthetic construct; identical to SEQ ID NO: 6247
  source 1..107: note = Description of Artificial Sequence: Synthetic polypeptide; note = VL of XENP018706

SEQ ID NO: 8171 - protein, 5 aa, synthetic construct
  source 1..5: note = Description of Artificial Sequence: Synthetic peptide; note = XENP018706 vhCDR1
NYWMN

SEQ ID NO: 8172 - protein, 19 aa, synthetic construct
  source 1..19: note = Description of Artificial Sequence: Synthetic peptide; note = XENP018706 vhCDR2
EIRLKSNNYATHYAEPVKG

SEQ ID NO: 8173 - protein, 11 aa, synthetic construct
  source 1..11: note = Description of Artificial Sequence: Synthetic peptide; note = XENP018706 vhCDR3
YYGFYGGYFDV

SEQ ID NO: 8174 - protein, 11 aa, synthetic construct
  source 1..11: note = Description of Artificial Sequence: Synthetic peptide; note = XENP018706 vlCDR1
RASQSVSNDVA

SEQ ID NO: 8175 - protein, 7 aa, synthetic construct
  source 1..7: note = Description of Artificial Sequence: Synthetic peptide; note = XENP018706 vlCDR2
YASHRYT

SEQ ID NO: 8176 - protein, 9 aa, synthetic construct
  source 1..9: note = Description of Artificial Sequence: Synthetic peptide; note = XENP018706 vlCDR3
QQDYSSPRT

SEQ ID NO: 8177 - protein, 249 aa, synthetic construct
  source 1..249: note = Description of Artificial Sequence: Synthetic polypeptide; note = XENP018707 1G6_H1.203_L1_scFv(GKPGS)4
EVQLVESGGGLVKPGGSLRLSCAASGFTFSNYWMNWVRQAPGKGLEWVGEIRLKSNNYATHYAEPVKGRFTISRDDSKSTVYLQMNSLKTEDTAVYYCTRYYGNFGGYFDVWGAGTLVTVSSGKPGSGKPGSGKPGSGKPGSSIVMTQSPATLSVSPGERATLSCRASQSVSNDVAWYQQKPGQSPRLLINYASHRYTGVPDRFTGSGYGTEFTLTISSLQSEDFAVYFCQQDYSSPRTFGGGTKVEIK

SEQ ID NO: 8178 - protein, 122 aa, synthetic construct
  source 1..122: note = Description of Artificial Sequence: Synthetic polypeptide; note = VH of XENP018707
EVQLVESGGGLVKPGGSLRLSCAASGFTFSNYWMNWVRQAPGKGLEWVGEIRLKSNNYATHYAEPVKGRFTISRDDSKSTVYLQMNSLKTEDTAVYYCTRYYGNFGGYFDVWGAGTLVTVSS

SEQ ID NO: 8179 - protein, 107 aa, synthetic construct; identical to SEQ ID NO: 6247
  source 1..107: note = Description of Artificial Sequence: Synthetic polypeptide; note = VL of XENP018707

SEQ ID NO: 8180 - protein, 5 aa, synthetic construct
  source 1..5: note = Description of Artificial Sequence: Synthetic peptide; note = XENP018707 vhCDR1
NYWMN

SEQ ID NO: 8181 - protein, 19 aa, synthetic construct
  source 1..19: note = Description of Artificial Sequence: Synthetic peptide; note = XENP018707 vhCDR2
EIRLKSNNYATHYAEPVKG

SEQ ID NO: 8182 - protein, 11 aa, synthetic construct
  source 1..11: note = Description of Artificial Sequence: Synthetic peptide; note = XENP018707 vhCDR3
YYGNFGGYFDV

SEQ ID NO: 8183 - protein, 11 aa, synthetic construct
  source 1..11: note = Description of Artificial Sequence: Synthetic peptide; note = XENP018707 vlCDR1
RASQSVSNDVA

SEQ ID NO: 8184 - protein, 7 aa, synthetic construct
  source 1..7: note = Description of Artificial Sequence: Synthetic peptide; note = XENP018707 vlCDR2
YASHRYT

SEQ ID NO: 8185 - protein, 9 aa, synthetic construct
  source 1..9: note = Description of Artificial Sequence: Synthetic peptide; note = XENP018707 vlCDR3
QQDYSSPRT

SEQ ID NO: 8186 - protein, 249 aa, synthetic construct
  source 1..249: note = Description of Artificial Sequence: Synthetic polypeptide; note = XENP018708 1G6_H1.204_L1_scFv(GKPGS)4
EVQLVESGGGLVKPGGSLRLSCAASGFTFSNYWMNWVRQAPGKGLEWVGEIRLKSNNYATHYAEPVKGRFTISRDDSKSTVYLQMNSLKTEDTAVYYCTRYYGNHGGYFDVWGAGTLVTVSSGKPGSGKPGSGKPGSGKPGSSIVMTQSPATLSVSPGERATLSCRASQSVSNDVAWYQQKPGQSPRLLINYASHRYTGVPDRFTGSGYGTEFTLTISSLQSEDFAVYFCQQDYSSPRTFGGGTKVEIK

SEQ ID NO: 8187 - protein, 122 aa, synthetic construct
  source 1..122: note = Description of Artificial Sequence: Synthetic polypeptide; note = VH of XENP018708
EVQLVESGGGLVKPGGSLRLSCAASGFTFSNYWMNWVRQAPGKGLEWVGEIRLKSNNYATHYAEPVKGRFTISRDDSKSTVYLQMNSLKTEDTAVYYCTRYYGNHGGYFDVWGAGTLVTVSS

SEQ ID NO: 8188 - protein, 107 aa, synthetic construct; identical to SEQ ID NO: 6247
  source 1..107: note = Description of Artificial Sequence: Synthetic polypeptide; note = VL of XENP018708

SEQ ID NO: 8189 - protein, 5 aa, synthetic construct
  source 1..5: note = Description of Artificial Sequence: Synthetic peptide; note = XENP018708 vhCDR1
NYWMN

SEQ ID NO: 8190 - protein, 19 aa, synthetic construct
  source 1..19: note = Description of Artificial Sequence: Synthetic peptide; note = XENP018708 vhCDR2
EIRLKSNNYATHYAEPVKG

SEQ ID NO: 8191 - protein, 11 aa, synthetic construct
  source 1..11: note = Description of Artificial Sequence: Synthetic peptide; note = XENP018708 vhCDR3
YYGNHGGYFDV

SEQ ID NO: 8192 - protein, 11 aa, synthetic construct
  source 1..11: note = Description of Artificial Sequence: Synthetic peptide; note = XENP018708 vlCDR1
RASQSVSNDVA

SEQ ID NO: 8193 - protein, 7 aa, synthetic construct
  source 1..7: note = Description of Artificial Sequence: Synthetic peptide; note = XENP018708 vlCDR2
YASHRYT

SEQ ID NO: 8194 - protein, 9 aa, synthetic construct
  source 1..9: note = Description of Artificial Sequence: Synthetic peptide; note = XENP018708 vlCDR3
QQDYSSPRT

SEQ ID NO: 8195 - protein, 249 aa, synthetic construct
  source 1..249: note = Description of Artificial Sequence: Synthetic polypeptide; note = XENP018709 1G6_H1.205_L1_scFv(GKPGS)4
EVQLVESGGGLVKPGGSLRLSCAASGFTFSNYWMNWVRQAPGKGLEWVGEIRLKSNNYATHYAEPVKGRFTISRDDSKSTVYLQMNSLKTEDTAVYYCTRYYGNLGGYFDVWGAGTLVTVSSGKPGSGKPGSGKPGSGKPGSSIVMTQSPATLSVSPGERATLSCRASQSVSNDVAWYQQKPGQSPRLLINYASHRYTGVPDRFTGSGYGTEFTLTISSLQSEDFAVYFCQQDYSSPRTFGGGTKVEIK

SEQ ID NO: 8196 - protein, 122 aa, synthetic construct
  source 1..122: note = Description of Artificial Sequence: Synthetic polypeptide; note = VH of XENP018709
EVQLVESGGGLVKPGGSLRLSCAASGFTFSNYWMNWVRQAPGKGLEWVGEIRLKSNNYATHYAEPVKGRFTISRDDSKSTVYLQMNSLKTEDTAVYYCTRYYGNLGGYFDVWGAGTLVTVSS

SEQ ID NO: 8197 - protein, 107 aa, synthetic construct; identical to SEQ ID NO: 6247
  source 1..107: note = Description of Artificial Sequence: Synthetic polypeptide; note = VL of XENP018709

SEQ ID NO: 8198 - protein, 5 aa, synthetic construct
  source 1..5: note = Description of Artificial Sequence: Synthetic peptide; note = XENP018709 vhCDR1
NYWMN

SEQ ID NO: 8199 - protein, 19 aa, synthetic construct
  source 1..19: note = Description of Artificial Sequence: Synthetic peptide; note = XENP018709 vhCDR2
EIRLKSNNYATHYAEPVKG

SEQ ID NO: 8200 - protein, 11 aa, synthetic construct
  source 1..11: note = Description of Artificial Sequence: Synthetic peptide; note = XENP018709 vhCDR3
YYGNLGGYFDV

SEQ ID NO: 8201 - protein, 11 aa, synthetic construct
  source 1..11: note = Description of Artificial Sequence: Synthetic peptide; note = XENP018709 vlCDR1
RASQSVSNDVA

SEQ ID NO: 8202 - protein, 7 aa, synthetic construct
  source 1..7: note = Description of Artificial Sequence: Synthetic peptide; note = XENP018709 vlCDR2
YASHRYT

SEQ ID NO: 8203 - protein, 9 aa, synthetic construct
  source 1..9: note = Description of Artificial Sequence: Synthetic peptide; note = XENP018709 vlCDR3
QQDYSSPRT

SEQ ID NO: 8204 - protein, 249 aa, synthetic construct
  source 1..249: note = Description of Artificial Sequence: Synthetic polypeptide; note = XENP018710 1G6_H1.206_L1_scFv(GKPGS)4
EVQLVESGGGLVKPGGSLRLSCAASGFTFSNYWMNWVRQAPGKGLEWVGEIRLKSNNYATHYAEPVKGRFTISRDDSKSTVYLQMNSLKTEDTAVYYCTRYYGNWGGYFDVWGAGTLVTVSSGKPGSGKPGSGKPGSGKPGSSIVMTQSPATLSVSPGERATLSCRASQSVSNDVAWYQQKPGQSPRLLINYASHRYTGVPDRFTGSGYGTEFTLTISSLQSEDFAVYFCQQDYSSPRTFGGGTKVEIK

SEQ ID NO: 8205 - protein, 122 aa, synthetic construct
  source 1..122: note = Description of Artificial Sequence: Synthetic polypeptide; note = VH of XENP018710
EVQLVESGGGLVKPGGSLRLSCAASGFTFSNYWMNWVRQAPGKGLEWVGEIRLKSNNYATHYAEPVKGRFTISRDDSKSTVYLQMNSLKTEDTAVYYCTRYYGNWGGYFDVWGAGTLVTVSS

SEQ ID NO: 8206 - protein, 107 aa, synthetic construct; identical to SEQ ID NO: 6247
  source 1..107: note = Description of Artificial Sequence: Synthetic polypeptide; note = VL of XENP018710

SEQ ID NO: 8207 - protein, 5 aa, synthetic construct
  source 1..5: note = Description of Artificial Sequence: Synthetic peptide; note = XENP018710 vhCDR1
NYWMN

SEQ ID NO: 8208 - protein, 19 aa, synthetic construct
  source 1..19: note = Description of Artificial Sequence: Synthetic peptide; note = XENP018710 vhCDR2
EIRLKSNNYATHYAEPVKG

SEQ ID NO: 8209 - protein, 11 aa, synthetic construct
  source 1..11: note = Description of Artificial Sequence: Synthetic peptide; note = XENP018710 vhCDR3
YYGNWGGYFDV

SEQ ID NO: 8210 - protein, 11 aa, synthetic construct
  source 1..11: note = Description of Artificial Sequence: Synthetic peptide; note = XENP018710 vlCDR1
RASQSVSNDVA

SEQ ID NO: 8211 - protein, 7 aa, synthetic construct
  source 1..7: note = Description of Artificial Sequence: Synthetic peptide; note = XENP018710 vlCDR2
YASHRYT

SEQ ID NO: 8212 - protein, 9 aa, synthetic construct
  source 1..9: note = Description of Artificial Sequence: Synthetic peptide; note = XENP018710 vlCDR3
QQDYSSPRT

SEQ ID NO: 8213 - protein, 249 aa, synthetic construct
  source 1..249: note = Description of Artificial Sequence: Synthetic polypeptide; note = XENP018711 1G6_H1.207_L1_scFv(GKPGS)4
EVQLVESGGGLVKPGGSLRLSCAASGFTFSNYWMNWVRQAPGKGLEWVGEIRLKSNNYATHYAEPVKGRFTISRDDSKSTVYLQMNSLKTEDTAVYYCTRYYGNVGGYFDVWGAGTLVTVSSGKPGSGKPGSGKPGSGKPGSSIVMTQSPATLSVSPGERATLSCRASQSVSNDVAWYQQKPGQSPRLLINYASHRYTGVPDRFTGSGYGTEFTLTISSLQSEDFAVYFCQQDYSSPRTFGGGTKVEIK

SEQ ID NO: 8214 - protein, 122 aa, synthetic construct
  source 1..122: note = Description of Artificial Sequence: Synthetic polypeptide; note = VH of XENP018711
EVQLVESGGGLVKPGGSLRLSCAASGFTFSNYWMNWVRQAPGKGLEWVGEIRLKSNNYATHYAEPVKGRFTISRDDSKSTVYLQMNSLKTEDTAVYYCTRYYGNVGGYFDVWGAGTLVTVSS

SEQ ID NO: 8215 - protein, 107 aa, synthetic construct; identical to SEQ ID NO: 6247
  source 1..107: note = Description of Artificial Sequence: Synthetic polypeptide; note = VL of XENP018711

SEQ ID NO: 8216 - protein, 5 aa, synthetic construct
  source 1..5: note = Description of Artificial Sequence: Synthetic peptide; note = XENP018711 vhCDR1
NYWMN

SEQ ID NO: 8217 - protein, 19 aa, synthetic construct
  source 1..19: note = Description of Artificial Sequence: Synthetic peptide; note = XENP018711 vhCDR2
EIRLKSNNYATHYAEPVKG

SEQ ID NO: 8218 - protein, 11 aa, synthetic construct
  source 1..11: note = Description of Artificial Sequence: Synthetic peptide; note = XENP018711 vhCDR3
YYGNVGGYFDV

SEQ ID NO: 8219 - protein, 11 aa, synthetic construct
  source 1..11: note = Description of Artificial Sequence: Synthetic peptide; note = XENP018711 vlCDR1
RASQSVSNDVA

SEQ ID NO: 8220 - protein, 7 aa, synthetic construct
  source 1..7: note = Description of Artificial Sequence: Synthetic peptide; note = XENP018711 vlCDR2
YASHRYT

SEQ ID NO: 8221 - protein, 9 aa, synthetic construct
  source 1..9: note = Description of Artificial Sequence: Synthetic peptide; note = XENP018711 vlCDR3
QQDYSSPRT

SEQ ID NO: 8222 - protein, 249 aa, synthetic construct
  source 1..249: note = Description of Artificial Sequence: Synthetic polypeptide; note = XENP018712 1G6_H1.208_L1_scFv(GKPGS)4
EVQLVESGGGLVKPGGSLRLSCAASGFTFSNYWMNWVRQAPGKGLEWVGEIRLKSNNYATHYAEPVKGRFTISRDDSKSTVYLQMNSLKTEDTAVYYCTRYYGNAGGYFDVWGAGTLVTVSSGKPGSGKPGSGKPGSGKPGSSIVMTQSPATLSVSPGERATLSCRASQSVSNDVAWYQQKPGQSPRLLINYASHRYTGVPDRFTGSGYGTEFTLTISSLQSEDFAVYFCQQDYSSPRTFGGGTKVEIK

SEQ ID NO: 8223 - protein, 122 aa, synthetic construct
  source 1..122: note = Description of Artificial Sequence: Synthetic polypeptide; note = VH of XENP018712
EVQLVESGGGLVKPGGSLRLSCAASGFTFSNYWMNWVRQAPGKGLEWVGEIRLKSNNYATHYAEPVKGRFTISRDDSKSTVYLQMNSLKTEDTAVYYCTRYYGNAGGYFDVWGAGTLVTVSS

SEQ ID NO: 8224 - protein, 107 aa, synthetic construct; identical to SEQ ID NO: 6247
  source 1..107: note = Description of Artificial Sequence: Synthetic polypeptide; note = VL of XENP018712

SEQ ID NO: 8225 - protein, 5 aa, synthetic construct
  source 1..5: note = Description of Artificial Sequence: Synthetic peptide; note = XENP018712 vhCDR1
NYWMN

SEQ ID NO: 8226 - protein, 19 aa, synthetic construct
  source 1..19: note = Description of Artificial Sequence: Synthetic peptide; note = XENP018712 vhCDR2
EIRLKSNNYATHYAEPVKG

SEQ ID NO: 8227 - protein, 11 aa, synthetic construct
  source 1..11: note = Description of Artificial Sequence: Synthetic peptide; note = XENP018712 vhCDR3
YYGNAGGYFDV

SEQ ID NO: 8228 - protein, 11 aa, synthetic construct
  source 1..11: note = Description of Artificial Sequence: Synthetic peptide; note = XENP018712 vlCDR1
RASQSVSNDVA

SEQ ID NO: 8229 - protein, 7 aa, synthetic construct
  source 1..7: note = Description of Artificial Sequence: Synthetic peptide; note = XENP018712 vlCDR2
YASHRYT

SEQ ID NO: 8230 - protein, 9 aa, synthetic construct
  source 1..9: note = Description of Artificial Sequence: Synthetic peptide; note = XENP018712 vlCDR3
QQDYSSPRT

SEQ ID NO: 8231 - protein, 249 aa, synthetic construct
  source 1..249: note = Description of Artificial Sequence: Synthetic polypeptide; note = XENP018713 1G6_H1.209_L1_scFv(GKPGS)4
EVQLVESGGGLVKPGGSLRLSCAASGFTFSNYWMNWVRQAPGKGLEWVGEIRLKSNNYATHYAEPVKGRFTISRDDSKSTVYLQMNSLKTEDTAVYYCTRYYGNQGGYFDVWGAGTLVTVSSGKPGSGKPGSGKPGSGKPGSSIVMTQSPATLSVSPGERATLSCRASQSVSNDVAWYQQKPGQSPRLLINYASHRYTGVPDRFTGSGYGTEFTLTISSLQSEDFAVYFCQQDYSSPRTFGGGTKVEIK

SEQ ID NO: 8232 - protein, 122 aa, synthetic construct
  source 1..122: note = Description of Artificial Sequence: Synthetic polypeptide; note = VH of XENP018713
EVQLVESGGGLVKPGGSLRLSCAASGFTFSNYWMNWVRQAPGKGLEWVGEIRLKSNNYATHYAEPVKGRFTISRDDSKSTVYLQMNSLKTEDTAVYYCTRYYGNQGGYFDVWGAGTLVTVSS

SEQ ID NO: 8233 - protein, 107 aa, synthetic construct; identical to SEQ ID NO: 6247
  source 1..107: note = Description of Artificial Sequence: Synthetic polypeptide; note = VL of XENP018713

SEQ ID NO: 8234 - protein, 5 aa, synthetic construct
  source 1..5: note = Description of Artificial Sequence: Synthetic peptide; note = XENP018713 vhCDR1
NYWMN

SEQ ID NO: 8235 - protein, 19 aa, synthetic construct
  source 1..19: note = Description of Artificial Sequence: Synthetic peptide; note = XENP018713 vhCDR2
EIRLKSNNYATHYAEPVKG

SEQ ID NO: 8236 - protein, 11 aa, synthetic construct
  source 1..11: note = Description of Artificial Sequence: Synthetic peptide; note = XENP018713 vhCDR3
YYGNQGGYFDV

SEQ ID NO: 8237 - protein, 11 aa, synthetic construct
  source 1..11: note = Description of Artificial Sequence: Synthetic peptide; note = XENP018713 vlCDR1
RASQSVSNDVA

SEQ ID NO: 8238 - protein, 7 aa, synthetic construct
  source 1..7: note = Description of Artificial Sequence: Synthetic peptide; note = XENP018713 vlCDR2
YASHRYT

SEQ ID NO: 8239 - protein, 9 aa, synthetic construct
  source 1..9: note = Description of Artificial Sequence: Synthetic peptide; note = XENP018713 vlCDR3
QQDYSSPRT

SEQ ID NO: 8240 - protein, 249 aa, synthetic construct
  source 1..249: note = Description of Artificial Sequence: Synthetic polypeptide; note = XENP018714 1G6_H1.210_L1_scFv(GKPGS)4
EVQLVESGGGLVKPGGSLRLSCAASGFTFSNYWMNWVRQAPGKGLEWVGEIRLKSNNYATHYAEPVKGRFTISRDDSKSTVYLQMNSLKTEDTAVYYCTRYYGNEGGYFDVWGAGTLVTVSSGKPGSGKPGSGKPGSGKPGSSIVMTQSPATLSVSPGERATLSCRASQSVSNDVAWYQQKPGQSPRLLINYASHRYTGVPDRFTGSGYGTEFTLTISSLQSEDFAVYFCQQDYSSPRTFGGGTKVEIK

SEQ ID NO: 8241 - protein, 122 aa, synthetic construct
  source 1..122: note = Description of Artificial Sequence: Synthetic polypeptide; note = VH of XENP018714
EVQLVESGGGLVKPGGSLRLSCAASGFTFSNYWMNWVRQAPGKGLEWVGEIRLKSNNYATHYAEPVKGRFTISRDDSKSTVYLQMNSLKTEDTAVYYCTRYYGNEGGYFDVWGAGTLVTVSS

SEQ ID NO: 8242 - protein, 107 aa, synthetic construct; identical to SEQ ID NO: 6247
  source 1..107: note = Description of Artificial Sequence: Synthetic polypeptide; note = VL of XENP018714

SEQ ID NO: 8243 - protein, 5 aa, synthetic construct
  source 1..5: note = Description of Artificial Sequence: Synthetic peptide; note = XENP018714 vhCDR1
NYWMN

SEQ ID NO: 8244 - protein, 19 aa, synthetic construct
  source 1..19: note = Description of Artificial Sequence: Synthetic peptide; note = XENP018714 vhCDR2
EIRLKSNNYATHYAEPVKG

SEQ ID NO: 8245 - protein, 11 aa, synthetic construct
  source 1..11: note = Description of Artificial Sequence: Synthetic peptide; note = XENP018714 vhCDR3
YYGNEGGYFDV

SEQ ID NO: 8246 - protein, 11 aa, synthetic construct
  source 1..11: note = Description of Artificial Sequence: Synthetic peptide; note = XENP018714 vlCDR1
RASQSVSNDVA

SEQ ID NO: 8247 - protein, 7 aa, synthetic construct
  source 1..7: note = Description of Artificial Sequence: Synthetic peptide; note = XENP018714 vlCDR2
YASHRYT

SEQ ID NO: 8248 - protein, 9 aa, synthetic construct
  source 1..9: note = Description of Artificial Sequence: Synthetic peptide; note = XENP018714 vlCDR3
QQDYSSPRT

SEQ ID NO: 8249 - protein, 249 aa, synthetic construct
  source 1..249: note = Description of Artificial Sequence: Synthetic polypeptide; note = XENP018715 1G6_H1.211_L1_scFv(GKPGS)4
EVQLVESGGGLVKPGGSLRLSCAASGFTFSNYWMNWVRQAPGKGLEWVGEIRLKSNNYATHYAEPVKGRFTISRDDSKSTVYLQMNSLKTEDTAVYYCTRYYGNKGGYFDVWGAGTLVTVSSGKPGSGKPGSGKPGSGKPGSSIVMTQSPATLSVSPGERATLSCRASQSVSNDVAWYQQKPGQSPRLLINYASHRYTGVPDRFTGSGYGTEFTLTISSLQSEDFAVYFCQQDYSSPRTFGGGTKVEIK

SEQ ID NO: 8250 - protein, 122 aa, synthetic construct
  source 1..122: note = Description of Artificial Sequence: Synthetic polypeptide; note = VH of XENP018715
EVQLVESGGGLVKPGGSLRLSCAASGFTFSNYWMNWVRQAPGKGLEWVGEIRLKSNNYATHYAEPVKGRFTISRDDSKSTVYLQMNSLKTEDTAVYYCTRYYGNKGGYFDVWGAGTLVTVSS

SEQ ID NO: 8251 - protein, 107 aa, synthetic construct; identical to SEQ ID NO: 6247
  source 1..107: note = Description of Artificial Sequence: Synthetic polypeptide; note = VL of XENP018715

SEQ ID NO: 8252 - protein, 5 aa, synthetic construct
  source 1..5: note = Description of Artificial Sequence: Synthetic peptide; note = XENP018715 vhCDR1
NYWMN

SEQ ID NO: 8253 - protein, 19 aa, synthetic construct
  source 1..19: note = Description of Artificial Sequence: Synthetic peptide; note = XENP018715 vhCDR2
EIRLKSNNYATHYAEPVKG

SEQ ID NO: 8254 - protein, 11 aa, synthetic construct
  source 1..11: note = Description of Artificial Sequence: Synthetic peptide; note = XENP018715 vhCDR3
YYGNKGGYFDV

SEQ ID NO: 8255 - protein, 11 aa, synthetic construct
  source 1..11: note = Description of Artificial Sequence: Synthetic peptide; note = XENP018715 vlCDR1
RASQSVSNDVA

SEQ ID NO: 8256 - protein, 7 aa, synthetic construct
  source 1..7: note = Description of Artificial Sequence: Synthetic peptide; note = XENP018715 vlCDR2
YASHRYT

SEQ ID NO: 8257 - protein, 9 aa, synthetic construct
  source 1..9: note = Description of Artificial Sequence: Synthetic peptide; note = XENP018715 vlCDR3
QQDYSSPRT

SEQ ID NO: 8258 - protein, 249 aa, synthetic construct
  source 1..249: note = Description of Artificial Sequence: Synthetic polypeptide; note = XENP018716 1G6_H1.212_L1_scFv(GKPGS)4
EVQLVESGGGLVKPGGSLRLSCAASGFTFSNYWMNWVRQAPGKGLEWVGEIRLKSNNYATHYAEPVKGRFTISRDDSKSTVYLQMNSLKTEDTAVYYCTRYYGNYAGYFDVWGAGTLVTVSSGKPGSGKPGSGKPGSGKPGSSIVMTQSPATLSVSPGERATLSCRASQSVSNDVAWYQQKPGQSPRLLINYASHRYTGVPDRFTGSGYGTEFTLTISSLQSEDFAVYFCQQDYSSPRTFGGGTKVEIK

SEQ ID NO: 8259 - protein, 122 aa, synthetic construct
  source 1..122: note = Description of Artificial Sequence: Synthetic polypeptide; note = VH of XENP018716
EVQLVESGGGLVKPGGSLRLSCAASGFTFSNYWMNWVRQAPGKGLEWVGEIRLKSNNYATHYAEPVKGRFTISRDDSKSTVYLQMNSLKTEDTAVYYCTRYYGNYAGYFDVWGAGTLVTVSS

SEQ ID NO: 8260 - protein, 107 aa, synthetic construct; identical to SEQ ID NO: 6247
  source 1..107: note = Description of Artificial Sequence: Synthetic polypeptide; note = VL of XENP018716

SEQ ID NO: 8261 - protein, 5 aa, synthetic construct
  source 1..5: note = Description of Artificial Sequence: Synthetic peptide; note = XENP018716 vhCDR1
NYWMN

SEQ ID NO: 8262 - protein, 19 aa, synthetic construct
  source 1..19: note = Description of Artificial Sequence: Synthetic peptide; note = XENP018716 vhCDR2
EIRLKSNNYATHYAEPVKG

SEQ ID NO: 8263 - protein, 11 aa, synthetic construct
  source 1..11: note = Description of Artificial Sequence: Synthetic peptide; note = XENP018716 vhCDR3
YYGNYAGYFDV

SEQ ID NO: 8264 - protein, 11 aa, synthetic construct
  source 1..11: note = Description of Artificial Sequence: Synthetic peptide; note = XENP018716 vlCDR1
RASQSVSNDVA

SEQ ID NO: 8265 - protein, 7 aa, synthetic construct
  source 1..7: note = Description of Artificial Sequence: Synthetic peptide; note = XENP018716 vlCDR2
YASHRYT

SEQ ID NO: 8266 - protein, 9 aa, synthetic construct
  source 1..9: note = Description of Artificial Sequence: Synthetic peptide; note = XENP018716 vlCDR3
QQDYSSPRT

SEQ ID NO: 8267 - protein, 249 aa, synthetic construct
  source 1..249: note = Description of Artificial Sequence: Synthetic polypeptide; note = XENP018717 1G6_H1.213_L1_scFv(GKPGS)4
EVQLVESGGGLVKPGGSLRLSCAASGFTFSNYWMNWVRQAPGKGLEWVGEIRLKSNNYATHYAEPVKGRFTISRDDSKSTVYLQMNSLKTEDTAVYYCTRYYGNYQGYFDVWGAGTLVTVSSGKPGSGKPGSGKPGSGKPGSSIVMTQSPATLSVSPGERATLSCRASQSVSNDVAWYQQKPGQSPRLLINYASHRYTGVPDRFTGSGYGTEFTLTISSLQSEDFAVYFCQQDYSSPRTFGGGTKVEIK

SEQ ID NO: 8268 - protein, 122 aa, synthetic construct
  source 1..122: note = Description of Artificial Sequence: Synthetic polypeptide; note = VH of XENP018717
EVQLVESGGGLVKPGGSLRLSCAASGFTFSNYWMNWVRQAPGKGLEWVGEIRLKSNNYATHYAEPVKGRFTISRDDSKSTVYLQMNSLKTEDTAVYYCTRYYGNYQGYFDVWGAGTLVTVSS

SEQ ID NO: 8269 - protein, 107 aa, synthetic construct; identical to SEQ ID NO: 6247
  source 1..107: note = Description of Artificial Sequence: Synthetic polypeptide; note = VL of XENP018717

SEQ ID NO: 8270 - protein, 5 aa, synthetic construct
  source 1..5: note = Description of Artificial Sequence: Synthetic peptide; note = XENP018717 vhCDR1
NYWMN

SEQ ID NO: 8271 - protein, 19 aa, synthetic construct
  source 1..19: note = Description of Artificial Sequence: Synthetic peptide; note = XENP018717 vhCDR2
EIRLKSNNYATHYAEPVKG

SEQ ID NO: 8272 - protein, 11 aa, synthetic construct
  source 1..11: note = Description of Artificial Sequence: Synthetic peptide; note = XENP018717 vhCDR3
YYGNYQGYFDV

SEQ ID NO: 8273 - protein, 11 aa, synthetic construct
  source 1..11: note = Description of Artificial Sequence: Synthetic peptide; note = XENP018717 vlCDR1
RASQSVSNDVA

SEQ ID NO: 8274 - protein, 7 aa, synthetic construct
  source 1..7: note = Description of Artificial Sequence: Synthetic peptide; note = XENP018717 vlCDR2
YASHRYT

SEQ ID NO: 8275 - protein, 9 aa, synthetic construct
  source 1..9: note = Description of Artificial Sequence: Synthetic peptide; note = XENP018717 vlCDR3
QQDYSSPRT

SEQ ID NO: 8276 - protein, 249 aa, synthetic construct
  source 1..249: note = Description of Artificial Sequence: Synthetic polypeptide; note = XENP018718 1G6_H1.214_L1_scFv(GKPGS)4
EVQLVESGGGLVKPGGSLRLSCAASGFTFSNYWMNWVRQAPGKGLEWVGEIRLKSNNYATHYAEPVKGRFTISRDDSKSTVYLQMNSLKTEDTAVYYCTRYYGNYHGYFDVWGAGTLVTVSSGKPGSGKPGSGKPGSGKPGSSIVMTQSPATLSVSPGERATLSCRASQSVSNDVAWYQQKPGQSPRLLINYASHRYTGVPDRFTGSGYGTEFTLTISSLQSEDFAVYFCQQDYSSPRTFGGGTKVEIK

SEQ ID NO: 8277 - protein, 122 aa, synthetic construct
  source 1..122: note = Description of Artificial Sequence: Synthetic polypeptide; note = VH of XENP018718
EVQLVESGGGLVKPGGSLRLSCAASGFTFSNYWMNWVRQAPGKGLEWVGEIRLKSNNYATHYAEPVKGRFTISRDDSKSTVYLQMNSLKTEDTAVYYCTRYYGNYHGYFDVWGAGTLVTVSS

SEQ ID NO: 8278 - protein, 107 aa, synthetic construct; identical to SEQ ID NO: 6247
  source 1..107: note = Description of Artificial Sequence: Synthetic polypeptide; note = VL of XENP018718

SEQ ID NO: 8279 - protein, 5 aa, synthetic construct
  source 1..5: note = Description of Artificial Sequence: Synthetic peptide; note = XENP018718 vhCDR1
NYWMN

SEQ ID NO: 8280 - protein, 19 aa, synthetic construct
  source 1..19: note = Description of Artificial Sequence: Synthetic peptide; note = XENP018718 vhCDR2
EIRLKSNNYATHYAEPVKG

SEQ ID NO: 8281 - protein, 11 aa, synthetic construct
  source 1..11: note = Description of Artificial Sequence: Synthetic peptide; note = XENP018718 vhCDR3
YYGNYHGYFDV

SEQ ID NO: 8282 - protein, 11 aa, synthetic construct
  source 1..11: note = Description of Artificial Sequence: Synthetic peptide; note = XENP018718 vlCDR1
RASQSVSNDVA

SEQ ID NO: 8283 - protein, 7 aa, synthetic construct
  source 1..7: note = Description of Artificial Sequence: Synthetic peptide; note = XENP018718 vlCDR2
YASHRYT

SEQ ID NO: 8284 - protein, 9 aa, synthetic construct
  source 1..9: note = Description of Artificial Sequence: Synthetic peptide; note = XENP018718 vlCDR3
QQDYSSPRT

SEQ ID NO: 8285 - protein, 249 aa, synthetic construct
  source 1..249: note = Description of Artificial Sequence: Synthetic polypeptide; note = XENP018719 1G6_H1.215_L1_scFv(GKPGS)4
EVQLVESGGGLVKPGGSLRLSCAASGFTFSNYWMNWVRQAPGKGLEWVGEIRLKSNNYATHYAEPVKGRFTISRDDSKSTVYLQMNSLKTEDTAVYYCTRYYGNYDGYFDVWGAGTLVTVSSGKPGSGKPGSGKPGSGKPGSSIVMTQSPATLSVSPGERATLSCRASQSVSNDVAWYQQKPGQSPRLLINYASHRYTGVPDRFTGSGYGTEFTLTISSLQSEDFAVYFCQQDYSSPRTFGGGTKVEIK

SEQ ID NO: 8286 - protein, 122 aa, synthetic construct
  source 1..122: note = Description of Artificial Sequence: Synthetic polypeptide; note = VH of XENP018719
EVQLVESGGGLVKPGGSLRLSCAASGFTFSNYWMNWVRQAPGKGLEWVGEIRLKSNNYATHYAEPVKGRFTISRDDSKSTVYLQMNSLKTEDTAVYYCTRYYGNYDGYFDVWGAGTLVTVSS

SEQ ID NO: 8287 - protein, 107 aa, synthetic construct; identical to SEQ ID NO: 6247
  source 1..107: note = Description of Artificial Sequence: Synthetic polypeptide; note = VL of XENP018719

SEQ ID NO: 8288 - protein, 5 aa, synthetic construct
  source 1..5: note = Description of Artificial Sequence: Synthetic peptide; note = XENP018719 vhCDR1
NYWMN

SEQ ID NO: 8289 - protein, 19 aa, synthetic construct
  source 1..19: note = Description of Artificial Sequence: Synthetic peptide; note = XENP018719 vhCDR2
EIRLKSNNYATHYAEPVKG

SEQ ID NO: 8290 - protein, 11 aa, synthetic construct
  source 1..11: note = Description of Artificial Sequence: Synthetic peptide; note = XENP018719 vhCDR3
YYGNYDGYFDV

SEQ ID NO: 8291 - protein, 11 aa, synthetic construct
  source 1..11: note = Description of Artificial Sequence: Synthetic peptide; note = XENP018719 vlCDR1
RASQSVSNDVA

SEQ ID NO: 8292 - protein, 7 aa, synthetic construct
  source 1..7: note = Description of Artificial Sequence: Synthetic peptide; note = XENP018719 vlCDR2
YASHRYT

SEQ ID NO: 8293 - protein, 9 aa, synthetic construct
  source 1..9: note = Description of Artificial Sequence: Synthetic peptide; note = XENP018719 vlCDR3
QQDYSSPRT

SEQ ID NO: 8294 - protein, 249 aa, synthetic construct
  source 1..249: note = Description of Artificial Sequence: Synthetic polypeptide; note = XENP018720 1G6_H1.216_L1_scFv(GKPGS)4
EVQLVESGGGLVKPGGSLRLSCAASGFTFSNYWMNWVRQAPGKGLEWVGEIRLKSNNYATHYAEPVKGRFTISRDDSKSTVYLQMNSLKTEDTAVYYCTRYYGNYKGYFDVWGAGTLVTVSSGKPGSGKPGSGKPGSGKPGSSIVMTQSPATLSVSPGERATLSCRASQSVSNDVAWYQQKPGQSPRLLINYASHRYTGVPDRFTGSGYGTEFTLTISSLQSEDFAVYFCQQDYSSPRTFGGGTKVEIK

SEQ ID NO: 8295 - protein, 122 aa, synthetic construct
  source 1..122: note = Description of Artificial Sequence: Synthetic polypeptide; note = VH of XENP018720
EVQLVESGGGLVKPGGSLRLSCAASGFTFSNYWMNWVRQAPGKGLEWVGEIRLKSNNYATHYAEPVKGRFTISRDDSKSTVYLQMNSLKTEDTAVYYCTRYYGNYKGYFDVWGAGTLVTVSS

SEQ ID NO: 8296 - protein, 107 aa, synthetic construct; identical to SEQ ID NO: 6247
  source 1..107: note = Description of Artificial Sequence: Synthetic polypeptide; note = VL of XENP018720

SEQ ID NO: 8297 - protein, 5 aa, synthetic construct
  source 1..5: note = Description of Artificial Sequence: Synthetic peptide; note = XENP018720 vhCDR1
NYWMN

SEQ ID NO: 8298 - protein, 19 aa, synthetic construct
  source 1..19: note = Description of Artificial Sequence: Synthetic peptide; note = XENP018720 vhCDR2
EIRLKSNNYATHYAEPVKG

SEQ ID NO: 8299 - protein, 11 aa, synthetic construct
  source 1..11: note = Description of Artificial Sequence: Synthetic peptide; note = XENP018720 vhCDR3
YYGNYKGYFDV

SEQ ID NO: 8300 - protein, 11 aa, synthetic construct
  source 1..11: note = Description of Artificial Sequence: Synthetic peptide; note = XENP018720 vlCDR1
RASQSVSNDVA

SEQ ID NO: 8301 - protein, 7 aa, synthetic construct
  source 1..7: note = Description of Artificial Sequence: Synthetic peptide; note = XENP018720 vlCDR2
YASHRYT

SEQ ID NO: 8302 - protein, 9 aa, synthetic construct
  source 1..9: note = Description of Artificial Sequence: Synthetic peptide; note = XENP018720 vlCDR3
QQDYSSPRT

SEQ ID NO: 8303 - protein, 249 aa, synthetic construct
  source 1..249: note = Description of Artificial Sequence: Synthetic polypeptide; note = XENP018721 1G6_H1.217_L1_scFv(GKPGS)4
EVQLVESGGGLVKPGGSLRLSCAASGFTFSNYWMNWVRQAPGKGLEWVGEIRLKSNNYATHYAEPVKGRFTISRDDSKSTVYLQMNSLKTEDTAVYYCTRYYGNYLGYFDVWGAGTLVTVSSGKPGSGKPGSGKPGSGKPGSSIVMTQSPATLSVSPGERATLSCRASQSVSNDVAWYQQKPGQSPRLLINYASHRYTGVPDRFTGSGYGTEFTLTISSLQSEDFAVYFCQQDYSSPRTFGGGTKVEIK

SEQ ID NO: 8304 - protein, 122 aa, synthetic construct
  source 1..122: note = Description of Artificial Sequence: Synthetic polypeptide; note = VH of XENP018721
EVQLVESGGGLVKPGGSLRLSCAASGFTFSNYWMNWVRQAPGKGLEWVGEIRLKSNNYATHYAEPVKGRFTISRDDSKSTVYLQMNSLKTEDTAVYYCTRYYGNYLGYFDVWGAGTLVTVSS

SEQ ID NO: 8305 - protein, 107 aa, synthetic construct; identical to SEQ ID NO: 6247
  source 1..107: note = Description of Artificial Sequence: Synthetic polypeptide; note = VL of XENP018721

SEQ ID NO: 8306 - protein, 5 aa, synthetic construct
  source 1..5: note = Description of Artificial Sequence: Synthetic peptide; note = XENP018721 vhCDR1
NYWMN

SEQ ID NO: 8307 - protein, 19 aa, synthetic construct
  source 1..19: note = Description of Artificial Sequence: Synthetic peptide; note = XENP018721 vhCDR2
EIRLKSNNYATHYAEPVKG

SEQ ID NO: 8308 - protein, 11 aa, synthetic construct
  source 1..11: note = Description of Artificial Sequence: Synthetic peptide; note = XENP018721 vhCDR3
YYGNYLGYFDV

SEQ ID NO: 8309 - protein, 11 aa, synthetic construct
  source 1..11: note = Description of Artificial Sequence: Synthetic peptide; note = XENP018721 vlCDR1
RASQSVSNDVA

SEQ ID NO: 8310 - protein, 7 aa, synthetic construct
  source 1..7: note = Description of Artificial Sequence: Synthetic peptide; note = XENP018721 vlCDR2
YASHRYT

SEQ ID NO: 8311 - protein, 9 aa, synthetic construct
  source 1..9: note = Description of Artificial Sequence: Synthetic peptide; note = XENP018721 vlCDR3
QQDYSSPRT

SEQ ID NO: 8312 - protein, 249 aa, synthetic construct
  source 1..249: note = Description of Artificial Sequence: Synthetic polypeptide; note = XENP018722 1G6_H1.218_L1_scFv(GKPGS)4
EVQLVESGGGLVKPGGSLRLSCAASGFTFSNYWMNWVRQAPGKGLEWVGEIRLKSNNYATHYAEPVKGRFTISRDDSKSTVYLQMNSLKTEDTAVYYCTRYYGNYFGYFDVWGAGTLVTVSSGKPGSGKPGSGKPGSGKPGSSIVMTQSPATLSVSPGERATLSCRASQSVSNDVAWYQQKPGQSPRLLINYASHRYTGVPDRFTGSGYGTEFTLTISSLQSEDFAVYFCQQDYSSPRTFGGGTKVEIK

SEQ ID NO: 8313 - protein, 122 aa, synthetic construct
  source 1..122: note = Description of Artificial Sequence: Synthetic polypeptide; note = VH of XENP018722
EVQLVESGGGLVKPGGSLRLSCAASGFTFSNYWMNWVRQAPGKGLEWVGEIRLKSNNYATHYAEPVKGRFTISRDDSKSTVYLQMNSLKTEDTAVYYCTRYYGNYFGYFDVWGAGTLVTVSS

SEQ ID NO: 8314 - protein, 107 aa, synthetic construct; identical to SEQ ID NO: 6247
  source 1..107: note = Description of Artificial Sequence: Synthetic polypeptide; note = VL of XENP018722

SEQ ID NO: 8315 - protein, 5 aa, synthetic construct
  source 1..5: note = Description of Artificial Sequence: Synthetic peptide; note = XENP018722 vhCDR1
NYWMN

SEQ ID NO: 8316 - protein, 19 aa, synthetic construct
  source 1..19: note = Description of Artificial Sequence: Synthetic peptide; note = XENP018722 vhCDR2
EIRLKSNNYATHYAEPVKG

SEQ ID NO: 8317 - protein, 11 aa, synthetic construct
  source 1..11: note = Description of Artificial Sequence: Synthetic peptide; note = XENP018722 vhCDR3
YYGNYFGYFDV

SEQ ID NO: 8318 - protein, 11 aa, synthetic construct
  source 1..11: note = Description of Artificial Sequence: Synthetic peptide; note = XENP018722 vlCDR1
RASQSVSNDVA

SEQ ID NO: 8319 - protein, 7 aa, synthetic construct
  source 1..7: note = Description of Artificial Sequence: Synthetic peptide; note = XENP018722 vlCDR2
YASHRYT

SEQ ID NO: 8320 - protein, 9 aa, synthetic construct
  source 1..9: note = Description of Artificial Sequence: Synthetic peptide; note = XENP018722 vlCDR3
QQDYSSPRT

SEQ ID NO: 8321 - protein, 249 aa, synthetic construct
  source 1..249: note = Description of Artificial Sequence: Synthetic polypeptide; note = XENP018723 1G6_H1.219_L1_scFv(GKPGS)4
EVQLVESGGGLVKPGGSLRLSCAASGFTFSNYWMNWVRQAPGKGLEWVGEIRLKSNNYATHYAEPVKGRFTISRDDSKSTVYLQMNSLKTEDTAVYYCTRYYGNYGAYFDVWGAGTLVTVSSGKPGSGKPGSGKPGSGKPGSSIVMTQSPATLSVSPGERATLSCRASQSVSNDVAWYQQKPGQSPRLLINYASHRYTGVPDRFTGSGYGTEFTLTISSLQSEDFAVYFCQQDYSSPRTFGGGTKVEIK

SEQ ID NO: 8322 - protein, 122 aa, synthetic construct
  source 1..122: note = Description of Artificial Sequence: Synthetic polypeptide; note = VH of XENP018723
EVQLVESGGGLVKPGGSLRLSCAASGFTFSNYWMNWVRQAPGKGLEWVGEIRLKSNNYATHYAEPVKGRFTISRDDSKSTVYLQMNSLKTEDTAVYYCTRYYGNYGAYFDVWGAGTLVTVSS

SEQ ID NO: 8323 - protein, 107 aa, synthetic construct; identical to SEQ ID NO: 6247
  source 1..107: note = Description of Artificial Sequence: Synthetic polypeptide; note = VL of XENP018723

SEQ ID NO: 8324 - protein, 5 aa, synthetic construct
  source 1..5: note = Description of Artificial Sequence: Synthetic peptide; note = XENP018723 vhCDR1
NYWMN

SEQ ID NO: 8325 - protein, 19 aa, synthetic construct
  source 1..19: note = Description of Artificial Sequence: Synthetic peptide; note = XENP018723 vhCDR2
EIRLKSNNYATHYAEPVKG

SEQ ID NO: 8326 - protein, 11 aa, synthetic construct
  source 1..11: note = Description of Artificial Sequence: Synthetic peptide; note = XENP018723 vhCDR3
YYGNYGAYFDV

SEQ ID NO: 8327 - protein, 11 aa, synthetic construct
  source 1..11: note = Description of Artificial Sequence: Synthetic peptide; note = XENP018723 vlCDR1
RASQSVSNDVA

SEQ ID NO: 8328 - protein, 7 aa, synthetic construct
  source 1..7: note = Description of Artificial Sequence: Synthetic peptide; note = XENP018723 vlCDR2
YASHRYT

SEQ ID NO: 8329 - protein, 9 aa, synthetic construct
  source 1..9: note = Description of Artificial Sequence: Synthetic peptide; note = XENP018723 vlCDR3
QQDYSSPRT

SEQ ID NO: 8330 - protein, 249 aa, synthetic construct
  source 1..249: note = Description of Artificial Sequence: Synthetic polypeptide; note = XENP018724 1G6_H1.220_L1_scFv(GKPGS)4
EVQLVESGGGLVKPGGSLRLSCAASGFTFSNYWMNWVRQAPGKGLEWVGEIRLKSNNYATHYAEPVKGRFTISRDDSKSTVYLQMNSLKTEDTAVYYCTRYYGNYGSYFDVWGAGTLVTVSSGKPGSGKPGSGKPGSGKPGSSIVMTQSPATLSVSPGERATLSCRASQSVSNDVAWYQQKPGQSPRLLINYASHRYTGVPDRFTGSGYGTEFTLTISSLQSEDFAVYFCQQDYSSPRTFGGGTKVEIK

SEQ ID NO: 8331 - protein, 122 aa, synthetic construct
  source 1..122: note = Description of Artificial Sequence: Synthetic polypeptide; note = VH of XENP018724
EVQLVESGGGLVKPGGSLRLSCAASGFTFSNYWMNWVRQAPGKGLEWVGEIRLKSNNYATHYAEPVKGRFTISRDDSKSTVYLQMNSLKTEDTAVYYCTRYYGNYGSYFDVWGAGTLVTVSS

SEQ ID NO: 8332 - protein, 107 aa, synthetic construct; identical to SEQ ID NO: 6247
  source 1..107: note = Description of Artificial Sequence: Synthetic polypeptide; note = VL of XENP018724

SEQ ID NO: 8333 - protein, 5 aa, synthetic construct
  source 1..5: note = Description of Artificial Sequence: Synthetic peptide; note = XENP018724 vhCDR1
NYWMN

SEQ ID NO: 8334 - protein, 19 aa, synthetic construct
  source 1..19: note = Description of Artificial Sequence: Synthetic peptide; note = XENP018724 vhCDR2
EIRLKSNNYATHYAEPVKG

SEQ ID NO: 8335 - protein, 11 aa, synthetic construct
  source 1..11: note = Description of Artificial Sequence: Synthetic peptide; note = XENP018724 vhCDR3
YYGNYGSYFDV

SEQ ID NO: 8336 - protein, 11 aa, synthetic construct
  source 1..11: note = Description of Artificial Sequence: Synthetic peptide; note = XENP018724 vlCDR1
RASQSVSNDVA

SEQ ID NO: 8337 - protein, 7 aa, synthetic construct
  source 1..7: note = Description of Artificial Sequence: Synthetic peptide; note = XENP018724 vlCDR2
YASHRYT

SEQ ID NO: 8338 - protein, 9 aa, synthetic construct
  source 1..9: note = Description of Artificial Sequence: Synthetic peptide; note = XENP018724 vlCDR3
QQDYSSPRT

SEQ ID NO: 8339 - protein, 249 aa, synthetic construct
  source 1..249: note = Description of Artificial Sequence: Synthetic polypeptide; note = XENP018725 1G6_H1.221_L1_scFv(GKPGS)4
EVQLVESGGGLVKPGGSLRLSCAASGFTFSNYWMNWVRQAPGKGLEWVGEIRLKSNNYATHYAEPVKGRFTISRDDSKSTVYLQMNSLKTEDTAVYYCTRYYGNYGTYFDVWGAGTLVTVSSGKPGSGKPGSGKPGSGKPGSSIVMTQSPATLSVSPGERATLSCRASQSVSNDVAWYQQKPGQSPRLLINYASHRYTGVPDRFTGSGYGTEFTLTISSLQSEDFAVYFCQQDYSSPRTFGGGTKVEIK

SEQ ID NO: 8340 - protein, 122 aa, synthetic construct
  source 1..122: note = Description of Artificial Sequence: Synthetic polypeptide; note = VH of XENP018725
EVQLVESGGGLVKPGGSLRLSCAASGFTFSNYWMNWVRQAPGKGLEWVGEIRLKSNNYATHYAEPVKGRFTISRDDSKSTVYLQMNSLKTEDTAVYYCTRYYGNYGTYFDVWGAGTLVTVSS

SEQ ID NO: 8341 - protein, 107 aa, synthetic construct; identical to SEQ ID NO: 6247
  source 1..107: note = Description of Artificial Sequence: Synthetic polypeptide; note = VL of XENP018725

SEQ ID NO: 8342 - protein, 5 aa, synthetic construct
  source 1..5: note = Description of Artificial Sequence: Synthetic peptide; note = XENP018725 vhCDR1
NYWMN

SEQ ID NO: 8343 - protein, 19 aa, synthetic construct
  source 1..19: note = Description of Artificial Sequence: Synthetic peptide; note = XENP018725 vhCDR2
EIRLKSNNYATHYAEPVKG

SEQ ID NO: 8344 - protein, 11 aa, synthetic construct
  source 1..11: note = Description of Artificial Sequence: Synthetic peptide; note = XENP018725 vhCDR3
YYGNYGTYFDV

SEQ ID NO: 8345 - protein, 11 aa, synthetic construct
  source 1..11: note = Description of Artificial Sequence: Synthetic peptide; note = XENP018725 vlCDR1
RASQSVSNDVA

SEQ ID NO: 8346 - protein, 7 aa, synthetic construct
  source 1..7: note = Description of Artificial Sequence: Synthetic peptide; note = XENP018725 vlCDR2
YASHRYT

SEQ ID NO: 8347 - protein, 9 aa, synthetic construct
  source 1..9: note = Description of Artificial Sequence: Synthetic peptide; note = XENP018725 vlCDR3
QQDYSSPRT

SEQ ID NO: 8348 - protein, 249 aa, synthetic construct
  source 1..249: note = Description of Artificial Sequence: Synthetic polypeptide; note = XENP018726 1G6_H1.222_L1_scFv(GKPGS)4
EVQLVESGGGLVKPGGSLRLSCAASGFTFSNYWMNWVRQAPGKGLEWVGEIRLKSNNYATHYAEPVKGRFTISRDDSKSTVYLQMNSLKTEDTAVYYCTRYYGNYGNYFDVWGAGTLVTVSSGKPGSGKPGSGKPGSGKPGSSIVMTQSPATLSVSPGERATLSCRASQSVSNDVAWYQQKPGQSPRLLINYASHRYTGVPDRFTGSGYGTEFTLTISSLQSEDFAVYFCQQDYSSPRTFGGGTKVEIK

SEQ ID NO: 8349 - protein, 122 aa, synthetic construct
  source 1..122: note = Description of Artificial Sequence: Synthetic polypeptide; note = VH of XENP018726
EVQLVESGGGLVKPGGSLRLSCAASGFTFSNYWMNWVRQAPGKGLEWVGEIRLKSNNYATHYAEPVKGRFTISRDDSKSTVYLQMNSLKTEDTAVYYCTRYYGNYGNYFDVWGAGTLVTVSS

SEQ ID NO: 8350 - protein, 107 aa, synthetic construct; identical to SEQ ID NO: 6247
  source 1..107: note = Description of Artificial Sequence: Synthetic polypeptide; note = VL of XENP018726

SEQ ID NO: 8351 - protein, 5 aa, synthetic construct
  source 1..5: note = Description of Artificial Sequence: Synthetic peptide; note = XENP018726 vhCDR1
NYWMN

SEQ ID NO: 8352 - protein, 19 aa, synthetic construct
  source 1..19: note = Description of Artificial Sequence: Synthetic peptide; note = XENP018726 vhCDR2
EIRLKSNNYATHYAEPVKG

SEQ ID NO: 8353 - protein, 11 aa, synthetic construct
  source 1..11: note = Description of Artificial Sequence: Synthetic peptide; note = XENP018726 vhCDR3
YYGNYGNYFDV

SEQ ID NO: 8354 - protein, 11 aa, synthetic construct
  source 1..11: note = Description of Artificial Sequence: Synthetic peptide; note = XENP018726 vlCDR1
RASQSVSNDVA

SEQ ID NO: 8355 - protein, 7 aa, synthetic construct
  source 1..7: note = Description of Artificial Sequence: Synthetic peptide; note = XENP018726 vlCDR2
YASHRYT

SEQ ID NO: 8356 - protein, 9 aa, synthetic construct
  source 1..9: note = Description of Artificial Sequence: Synthetic peptide; note = XENP018726 vlCDR3
QQDYSSPRT

SEQ ID NO: 8357 - protein, 249 aa, synthetic construct
  source 1..249: note = Description of Artificial Sequence: Synthetic polypeptide; note = XENP018727 1G6_H1.223_L1_scFv(GKPGS)4
EVQLVESGGGLVKPGGSLRLSCAASGFTFSNYWMNWVRQAPGKGLEWVGEIRLKSNNYATHYAEPVKGRFTISRDDSKSTVYLQMNSLKTEDTAVYYCTRYYGNYGHYFDVWGAGTLVTVSSGKPGSGKPGSGKPGSGKPGSSIVMTQSPATLSVSPGERATLSCRASQSVSNDVAWYQQKPGQSPRLLINYASHRYTGVPDRFTGSGYGTEFTLTISSLQSEDFAVYFCQQDYSSPRTFGGGTKVEIK

SEQ ID NO: 8358 - protein, 122 aa, synthetic construct
  source 1..122: note = Description of Artificial Sequence: Synthetic polypeptide; note = VH of XENP018727
EVQLVESGGGLVKPGGSLRLSCAASGFTFSNYWMNWVRQAPGKGLEWVGEIRLKSNNYATHYAEPVKGRFTISRDDSKSTVYLQMNSLKTEDTAVYYCTRYYGNYGHYFDVWGAGTLVTVSS

SEQ ID NO: 8359 - protein, 107 aa, synthetic construct; identical to SEQ ID NO: 6247
  source 1..107: note = Description of Artificial Sequence: Synthetic polypeptide; note = VL of XENP018727

SEQ ID NO: 8360 - protein, 5 aa, synthetic construct
  source 1..5: note = Description of Artificial Sequence: Synthetic peptide; note = XENP018727 vhCDR1
NYWMN

SEQ ID NO: 8361 - protein, 19 aa, synthetic construct
  source 1..19: note = Description of Artificial Sequence: Synthetic peptide; note = XENP018727 vhCDR2
EIRLKSNNYATHYAEPVKG

SEQ ID NO: 8362 - protein, 11 aa, synthetic construct
  source 1..11: note = Description of Artificial Sequence: Synthetic peptide; note = XENP018727 vhCDR3
YYGNYGHYFDV

SEQ ID NO: 8363 - protein, 11 aa, synthetic construct
  source 1..11: note = Description of Artificial Sequence: Synthetic peptide; note = XENP018727 vlCDR1
RASQSVSNDVA

SEQ ID NO: 8364 - protein, 7 aa, synthetic construct
  source 1..7: note = Description of Artificial Sequence: Synthetic peptide; note = XENP018727 vlCDR2
YASHRYT

SEQ ID NO: 8365 - protein, 9 aa, synthetic construct
  source 1..9: note = Description of Artificial Sequence: Synthetic peptide; note = XENP018727 vlCDR3
QQDYSSPRT

SEQ ID NO: 8366 - protein, 249 aa, synthetic construct
  source 1..249: note = Description of Artificial Sequence: Synthetic polypeptide; note = XENP018728 1G6_H1.224_L1_scFv(GKPGS)4
EVQLVESGGGLVKPGGSLRLSCAASGFTFSNYWMNWVRQAPGKGLEWVGEIRLKSNNYATHYAEPVKGRFTISRDDSKSTVYLQMNSLKTEDTAVYYCTRYYGNYGDYFDVWGAGTLVTVSSGKPGSGKPGSGKPGSGKPGSSIVMTQSPATLSVSPGERATLSCRASQSVSNDVAWYQQKPGQSPRLLINYASHRYTGVPDRFTGSGYGTEFTLTISSLQSEDFAVYFCQQDYSSPRTFGGGTKVEIK

SEQ ID NO: 8367 - protein, 122 aa, synthetic construct
  source 1..122: note = Description of Artificial Sequence: Synthetic polypeptide; note = VH of XENP018728
EVQLVESGGGLVKPGGSLRLSCAASGFTFSNYWMNWVRQAPGKGLEWVGEIRLKSNNYATHYAEPVKGRFTISRDDSKSTVYLQMNSLKTEDTAVYYCTRYYGNYGDYFDVWGAGTLVTVSS

SEQ ID NO: 8368 - protein, 107 aa, synthetic construct; identical to SEQ ID NO: 6247
  source 1..107: note = Description of Artificial Sequence: Synthetic polypeptide; note = VL of XENP018728

SEQ ID NO: 8369 - protein, 5 aa, synthetic construct
  source 1..5: note = Description of Artificial Sequence: Synthetic peptide; note = XENP018728 vhCDR1
NYWMN

SEQ ID NO: 8370 - protein, 19 aa, synthetic construct
  source 1..19: note = Description of Artificial Sequence: Synthetic peptide; note = XENP018728 vhCDR2
EIRLKSNNYATHYAEPVKG

SEQ ID NO: 8371 - protein, 11 aa, synthetic construct
  source 1..11: note = Description of Artificial Sequence: Synthetic peptide; note = XENP018728 vhCDR3
YYGNYGDYFDV

SEQ ID NO: 8372 - protein, 11 aa, synthetic construct
  source 1..11: note = Description of Artificial Sequence: Synthetic peptide; note = XENP018728 vlCDR1
RASQSVSNDVA

SEQ ID NO: 8373 - protein, 7 aa, synthetic construct
  source 1..7: note = Description of Artificial Sequence: Synthetic peptide; note = XENP018728 vlCDR2
YASHRYT

SEQ ID NO: 8374 - protein, 9 aa, synthetic construct
  source 1..9: note = Description of Artificial Sequence: Synthetic peptide; note = XENP018728 vlCDR3
QQDYSSPRT

SEQ ID NO: 8375 - protein, 249 aa, synthetic construct
  source 1..249: note = Description of Artificial Sequence: Synthetic polypeptide; note = XENP018729 1G6_H1.225_L1_scFv(GKPGS)4
EVQLVESGGGLVKPGGSLRLSCAASGFTFSNYWMNWVRQAPGKGLEWVGEIRLKSNNYATHYAEPVKGRFTISRDDSKSTVYLQMNSLKTEDTAVYYCTRYYGNYGKYFDVWGAGTLVTVSSGKPGSGKPGSGKPGSGKPGSSIVMTQSPATLSVSPGERATLSCRASQSVSNDVAWYQQKPGQSPRLLINYASHRYTGVPDRFTGSGYGTEFTLTISSLQSEDFAVYFCQQDYSSPRTFGGGTKVEIK

SEQ ID NO: 8376 - protein, 122 aa, synthetic construct
  source 1..122: note = Description of Artificial Sequence: Synthetic polypeptide; note = VH of XENP018729
EVQLVESGGGLVKPGGSLRLSCAASGFTFSNYWMNWVRQAPGKGLEWVGEIRLKSNNYATHYAEPVKGRFTISRDDSKSTVYLQMNSLKTEDTAVYYCTRYYGNYGKYFDVWGAGTLVTVSS

SEQ ID NO: 8377 - protein, 107 aa, synthetic construct; identical to SEQ ID NO: 6247
  source 1..107: note = Description of Artificial Sequence: Synthetic polypeptide; note = VL of XENP018729

SEQ ID NO: 8378 - protein, 5 aa, synthetic construct
  source 1..5: note = Description of Artificial Sequence: Synthetic peptide; note = XENP018729 vhCDR1
NYWMN

SEQ ID NO: 8379 - protein, 19 aa, synthetic construct
  source 1..19: note = Description of Artificial Sequence: Synthetic peptide; note = XENP018729 vhCDR2
EIRLKSNNYATHYAEPVKG

SEQ ID NO: 8380 - protein, 11 aa, synthetic construct
  source 1..11: note = Description of Artificial Sequence: Synthetic peptide; note = XENP018729 vhCDR3
YYGNYGKYFDV

SEQ ID NO: 8381 - protein, 11 aa, synthetic construct
  source 1..11: note = Description of Artificial Sequence: Synthetic peptide; note = XENP018729 vlCDR1
RASQSVSNDVA

SEQ ID NO: 8382 - protein, 7 aa, synthetic construct
  source 1..7: note = Description of Artificial Sequence: Synthetic peptide; note = XENP018729 vlCDR2
YASHRYT

SEQ ID NO: 8383 - protein, 9 aa, synthetic construct
  source 1..9: note = Description of Artificial Sequence: Synthetic peptide; note = XENP018729 vlCDR3
QQDYSSPRT

SEQ ID NO: 8384 - protein, 249 aa, synthetic construct
  source 1..249: note = Description of Artificial Sequence: Synthetic polypeptide; note = XENP018730 1G6_H1.226_L1_scFv(GKPGS)4
EVQLVESGGGLVKPGGSLRLSCAASGFTFSNYWMNWVRQAPGKGLEWVGEIRLKSNNYATHYAEPVKGRFTISRDDSKSTVYLQMNSLKTEDTAVYYCTRYYGNYGLYFDVWGAGTLVTVSSGKPGSGKPGSGKPGSGKPGSSIVMTQSPATLSVSPGERATLSCRASQSVSNDVAWYQQKPGQSPRLLINYASHRYTGVPDRFTGSGYGTEFTLTISSLQSEDFAVYFCQQDYSSPRTFGGGTKVEIK

SEQ ID NO: 8385 - protein, 122 aa, synthetic construct
  source 1..122: note = Description of Artificial Sequence: Synthetic polypeptide; note = VH of XENP018730
EVQLVESGGGLVKPGGSLRLSCAASGFTFSNYWMNWVRQAPGKGLEWVGEIRLKSNNYATHYAEPVKGRFTISRDDSKSTVYLQMNSLKTEDTAVYYCTRYYGNYGLYFDVWGAGTLVTVSS

SEQ ID NO: 8386 - protein, 107 aa, synthetic construct; identical to SEQ ID NO: 6247
  source 1..107: note = Description of Artificial Sequence: Synthetic polypeptide; note = VL of XENP018730

SEQ ID NO: 8387 - protein, 5 aa, synthetic construct
  source 1..5: note = Description of Artificial Sequence: Synthetic peptide; note = XENP018730 vhCDR1
NYWMN

SEQ ID NO: 8388 - protein, 19 aa, synthetic construct
  source 1..19: note = Description of Artificial Sequence: Synthetic peptide; note = XENP018730 vhCDR2
EIRLKSNNYATHYAEPVKG

SEQ ID NO: 8389 - protein, 11 aa, synthetic construct
  source 1..11: note = Description of Artificial Sequence: Synthetic peptide; note = XENP018730 vhCDR3
YYGNYGLYFDV

SEQ ID NO: 8390 - protein, 11 aa, synthetic construct
  source 1..11: note = Description of Artificial Sequence: Synthetic peptide; note = XENP018730 vlCDR1
RASQSVSNDVA

SEQ ID NO: 8391 - protein, 7 aa, synthetic construct
  source 1..7: note = Description of Artificial Sequence: Synthetic peptide; note = XENP018730 vlCDR2
YASHRYT

SEQ ID NO: 8392 - protein, 9 aa, synthetic construct
  source 1..9: note = Description of Artificial Sequence: Synthetic peptide; note = XENP018730 vlCDR3
QQDYSSPRT

SEQ ID NO: 8393 - protein, 249 aa, synthetic construct
  source 1..249: note = Description of Artificial Sequence: Synthetic polypeptide; note = XENP018731 1G6_H1.227_L1_scFv(GKPGS)4
EVQLVESGGGLVKPGGSLRLSCAASGFTFSNYWMNWVRQAPGKGLEWVGEIRLKSNNYATHYAEPVKGRFTISRDDSKSTVYLQMNSLKTEDTAVYYCTRYYGNYGFYFDVWGAGTLVTVSSGKPGSGKPGSGKPGSGKPGSSIVMTQSPATLSVSPGERATLSCRASQSVSNDVAWYQQKPGQSPRLLINYASHRYTGVPDRFTGSGYGTEFTLTISSLQSEDFAVYFCQQDYSSPRTFGGGTKVEIK

SEQ ID NO: 8394 - protein, 122 aa, synthetic construct
  source 1..122: note = Description of Artificial Sequence: Synthetic polypeptide; note = VH of XENP018731
EVQLVESGGGLVKPGGSLRLSCAASGFTFSNYWMNWVRQAPGKGLEWVGEIRLKSNNYATHYAEPVKGRFTISRDDSKSTVYLQMNSLKTEDTAVYYCTRYYGNYGFYFDVWGAGTLVTVSS

SEQ ID NO: 8395 - protein, 107 aa, synthetic construct; identical to SEQ ID NO: 6247
  source 1..107: note = Description of Artificial Sequence: Synthetic polypeptide; note = VL of XENP018731

SEQ ID NO: 8396 - protein, 5 aa, synthetic construct
  source 1..5: note = Description of Artificial Sequence: Synthetic peptide; note = XENP018731 vhCDR1
NYWMN

SEQ ID NO: 8397 - protein, 19 aa, synthetic construct
  source 1..19: note = Description of Artificial Sequence: Synthetic peptide; note = XENP018731 vhCDR2
EIRLKSNNYATHYAEPVKG

SEQ ID NO: 8398 - protein, 11 aa, synthetic construct
  source 1..11: note = Description of Artificial Sequence: Synthetic peptide; note = XENP018731 vhCDR3
YYGNYGFYFDV

SEQ ID NO: 8399 - protein, 11 aa, synthetic construct
  source 1..11: note = Description of Artificial Sequence: Synthetic peptide; note = XENP018731 vlCDR1
RASQSVSNDVA

SEQ ID NO: 8400 - protein, 7 aa, synthetic construct
  source 1..7: note = Description of Artificial Sequence: Synthetic peptide; note = XENP018731 vlCDR2
YASHRYT

SEQ ID NO: 8401 - protein, 9 aa, synthetic construct
  source 1..9: note = Description of Artificial Sequence: Synthetic peptide; note = XENP018731 vlCDR3
QQDYSSPRT

SEQ ID NO: 8402 - protein, 249 aa, synthetic construct
  source 1..249: note = Description of Artificial Sequence: Synthetic polypeptide; note = XENP018732 1G6_H1.228_L1_scFv(GKPGS)4
EVQLVESGGGLVKPGGSLRLSCAASGFTFSNYWMNWVRQAPGKGLEWVGEIRLKSNNYATHYAEPVKGRFTISRDDSKSTVYLQMNSLKTEDTAVYYCTRYYGNYGGFFDVWGAGTLVTVSSGKPGSGKPGSGKPGSGKPGSSIVMTQSPATLSVSPGERATLSCRASQSVSNDVAWYQQKPGQSPRLLINYASHRYTGVPDRFTGSGYGTEFTLTISSLQSEDFAVYFCQQDYSSPRTFGGGTKVEIK

SEQ ID NO: 8403 - protein, 122 aa, synthetic construct
  source 1..122: note = Description of Artificial Sequence: Synthetic polypeptide; note = VH of XENP018732
EVQLVESGGGLVKPGGSLRLSCAASGFTFSNYWMNWVRQAPGKGLEWVGEIRLKSNNYATHYAEPVKGRFTISRDDSKSTVYLQMNSLKTEDTAVYYCTRYYGNYGGFFDVWGAGTLVTVSS

SEQ ID NO: 8404 - protein, 107 aa, synthetic construct; identical to SEQ ID NO: 6247
  source 1..107: note = Description of Artificial Sequence: Synthetic polypeptide; note = VL of XENP018732

SEQ ID NO: 8405 - protein, 5 aa, synthetic construct
  source 1..5: note = Description of Artificial Sequence: Synthetic peptide; note = XENP018732 vhCDR1
NYWMN

SEQ ID NO: 8406 - protein, 19 aa, synthetic construct
  source 1..19: note = Description of Artificial Sequence: Synthetic peptide; note = XENP018732 vhCDR2
EIRLKSNNYATHYAEPVKG

SEQ ID NO: 8407 - protein, 11 aa, synthetic construct
  source 1..11: note = Description of Artificial Sequence: Synthetic peptide; note = XENP018732 vhCDR3
YYGNYGGFFDV

SEQ ID NO: 8408 - protein, 11 aa, synthetic construct
  source 1..11: note = Description of Artificial Sequence: Synthetic peptide; note = XENP018732 vlCDR1
RASQSVSNDVA

SEQ ID NO: 8409 - protein, 7 aa, synthetic construct
  source 1..7: note = Description of Artificial Sequence: Synthetic peptide; note = XENP018732 vlCDR2
YASHRYT

SEQ ID NO: 8410 - protein, 9 aa, synthetic construct
  source 1..9: note = Description of Artificial Sequence: Synthetic peptide; note = XENP018732 vlCDR3
QQDYSSPRT

SEQ ID NO: 8411 - protein, 249 aa, synthetic construct
  source 1..249: note = Description of Artificial Sequence: Synthetic polypeptide; note = XENP018733 1G6_H1.229_L1_scFv(GKPGS)4
EVQLVESGGGLVKPGGSLRLSCAASGFTFSNYWMNWVRQAPGKGLEWVGEIRLKSNNYATHYAEPVKGRFTISRDDSKSTVYLQMNSLKTEDTAVYYCTRYYGNYGGHFDVWGAGTLVTVSSGKPGSGKPGSGKPGSGKPGSSIVMTQSPATLSVSPGERATLSCRASQSVSNDVAWYQQKPGQSPRLLINYASHRYTGVPDRFTGSGYGTEFTLTISSLQSEDFAVYFCQQDYSSPRTFGGGTKVEIK

SEQ ID NO: 8412 - protein, 122 aa, synthetic construct
  source 1..122: note = Description of Artificial Sequence: Synthetic polypeptide; note = VH of XENP018733
EVQLVESGGGLVKPGGSLRLSCAASGFTFSNYWMNWVRQAPGKGLEWVGEIRLKSNNYATHYAEPVKGRFTISRDDSKSTVYLQMNSLKTEDTAVYYCTRYYGNYGGHFDVWGAGTLVTVSS

SEQ ID NO: 8413 - protein, 107 aa, synthetic construct; identical to SEQ ID NO: 6247
  source 1..107: note = Description of Artificial Sequence: Synthetic polypeptide; note = VL of XENP018733

SEQ ID NO: 8414 - protein, 5 aa, synthetic construct
  source 1..5: note = Description of Artificial Sequence: Synthetic peptide; note = XENP018733 vhCDR1
NYWMN

SEQ ID NO: 8415 - protein, 19 aa, synthetic construct
  source 1..19: note = Description of Artificial Sequence: Synthetic peptide; note = XENP018733 vhCDR2
EIRLKSNNYATHYAEPVKG

SEQ ID NO: 8416 - protein, 11 aa, synthetic construct
  source 1..11: note = Description of Artificial Sequence: Synthetic peptide; note = XENP018733 vhCDR3
YYGNYGGHFDV

SEQ ID NO: 8417 - protein, 11 aa, synthetic construct
  source 1..11: note = Description of Artificial Sequence: Synthetic peptide; note = XENP018733 vlCDR1
RASQSVSNDVA

SEQ ID NO: 8418 - protein, 7 aa, synthetic construct
  source 1..7: note = Description of Artificial Sequence: Synthetic peptide; note = XENP018733 vlCDR2
YASHRYT

SEQ ID NO: 8419 - protein, 9 aa, synthetic construct
  source 1..9: note = Description of Artificial Sequence: Synthetic peptide; note = XENP018733 vlCDR3
QQDYSSPRT

SEQ ID NO: 8420 - protein, 249 aa, synthetic construct
  source 1..249: note = Description of Artificial Sequence: Synthetic polypeptide; note = XENP018734 1G6_H1.230_L1_scFv(GKPGS)4
EVQLVESGGGLVKPGGSLRLSCAASGFTFSNYWMNWVRQAPGKGLEWVGEIRLKSNNYATHYAEPVKGRFTISRDDSKSTVYLQMNSLKTEDTAVYYCTRYYGNYGGLFDVWGAGTLVTVSSGKPGSGKPGSGKPGSGKPGSSIVMTQSPATLSVSPGERATLSCRASQSVSNDVAWYQQKPGQSPRLLINYASHRYTGVPDRFTGSGYGTEFTLTISSLQSEDFAVYFCQQDYSSPRTFGGGTKVEIK

SEQ ID NO: 8421 - protein, 122 aa, synthetic construct
  source 1..122: note = Description of Artificial Sequence: Synthetic polypeptide; note = VH of XENP018734
EVQLVESGGGLVKPGGSLRLSCAASGFTFSNYWMNWVRQAPGKGLEWVGEIRLKSNNYATHYAEPVKGRFTISRDDSKSTVYLQMNSLKTEDTAVYYCTRYYGNYGGLFDVWGAGTLVTVSS

SEQ ID NO: 8422 - protein, 107 aa, synthetic construct; identical to SEQ ID NO: 6247
  source 1..107: note = Description of Artificial Sequence: Synthetic polypeptide; note = VL of XENP018734

SEQ ID NO: 8423 - protein, 5 aa, synthetic construct
  source 1..5: note = Description of Artificial Sequence: Synthetic peptide; note = XENP018734 vhCDR1
NYWMN

SEQ ID NO: 8424 - protein, 19 aa, synthetic construct
  source 1..19: note = Description of Artificial Sequence: Synthetic peptide; note = XENP018734 vhCDR2
EIRLKSNNYATHYAEPVKG

SEQ ID NO: 8425 - protein, 11 aa, synthetic construct
  source 1..11: note = Description of Artificial Sequence: Synthetic peptide; note = XENP018734 vhCDR3
YYGNYGGLFDV

SEQ ID NO: 8426 - protein, 11 aa, synthetic construct
  source 1..11: note = Description of Artificial Sequence: Synthetic peptide; note = XENP018734 vlCDR1
RASQSVSNDVA

SEQ ID NO: 8427 - protein, 7 aa, synthetic construct
  source 1..7: note = Description of Artificial Sequence: Synthetic peptide; note = XENP018734 vlCDR2
YASHRYT

SEQ ID NO: 8428 - protein, 9 aa, synthetic construct
  source 1..9: note = Description of Artificial Sequence: Synthetic peptide; note = XENP018734 vlCDR3
QQDYSSPRT

SEQ ID NO: 8429 - protein, 249 aa, synthetic construct
  source 1..249: note = Description of Artificial Sequence: Synthetic polypeptide; note = XENP018735 1G6_H1.231_L1_scFv(GKPGS)4
EVQLVESGGGLVKPGGSLRLSCAASGFTFSNYWMNWVRQAPGKGLEWVGEIRLKSNNYATHYAEPVKGRFTISRDDSKSTVYLQMNSLKTEDTAVYYCTRYYGNYGGWFDVWGAGTLVTVSSGKPGSGKPGSGKPGSGKPGSSIVMTQSPATLSVSPGERATLSCRASQSVSNDVAWYQQKPGQSPRLLINYASHRYTGVPDRFTGSGYGTEFTLTISSLQSEDFAVYFCQQDYSSPRTFGGGTKVEIK

SEQ ID NO: 8430 - protein, 122 aa, synthetic construct
  source 1..122: note = Description of Artificial Sequence: Synthetic polypeptide; note = VH of XENP018735
EVQLVESGGGLVKPGGSLRLSCAASGFTFSNYWMNWVRQAPGKGLEWVGEIRLKSNNYATHYAEPVKGRFTISRDDSKSTVYLQMNSLKTEDTAVYYCTRYYGNYGGWFDVWGAGTLVTVSS

SEQ ID NO: 8431 - protein, 107 aa, synthetic construct; identical to SEQ ID NO: 6247
  source 1..107: note = Description of Artificial Sequence: Synthetic polypeptide; note = VL of XENP018735

SEQ ID NO: 8432 - protein, 5 aa, synthetic construct
  source 1..5: note = Description of Artificial Sequence: Synthetic peptide; note = XENP018735 vhCDR1
NYWMN

SEQ ID NO: 8433 - protein, 19 aa, synthetic construct
  source 1..19: note = Description of Artificial Sequence: Synthetic peptide; note = XENP018735 vhCDR2
EIRLKSNNYATHYAEPVKG

SEQ ID NO: 8434 - protein, 11 aa, synthetic construct
  source 1..11: note = Description of Artificial Sequence: Synthetic peptide; note = XENP018735 vhCDR3
YYGNYGGWFDV

SEQ ID NO: 8435 - protein, 11 aa, synthetic construct
  source 1..11: note = Description of Artificial Sequence: Synthetic peptide; note = XENP018735 vlCDR1
RASQSVSNDVA

SEQ ID NO: 8436 - protein, 7 aa, synthetic construct
  source 1..7: note = Description of Artificial Sequence: Synthetic peptide; note = XENP018735 vlCDR2
YASHRYT

SEQ ID NO: 8437 - protein, 9 aa, synthetic construct
  source 1..9: note = Description of Artificial Sequence: Synthetic peptide; note = XENP018735 vlCDR3
QQDYSSPRT

SEQ ID NO: 8438 - protein, 249 aa, synthetic construct
  source 1..249: note = Description of Artificial Sequence: Synthetic polypeptide; note = XENP018736 1G6_H1.232_L1_scFv(GKPGS)4
EVQLVESGGGLVKPGGSLRLSCAASGFTFSNYWMNWVRQAPGKGLEWVGEIRLKSNNYATHYAEPVKGRFTISRDDSKSTVYLQMNSLKTEDTAVYYCTRYYGNYGGVFDVWGAGTLVTVSSGKPGSGKPGSGKPGSGKPGSSIVMTQSPATLSVSPGERATLSCRASQSVSNDVAWYQQKPGQSPRLLINYASHRYTGVPDRFTGSGYGTEFTLTISSLQSEDFAVYFCQQDYSSPRTFGGGTKVEIK

SEQ ID NO: 8439 - protein, 122 aa, synthetic construct
  source 1..122: note = Description of Artificial Sequence: Synthetic polypeptide; note = VH of XENP018736
EVQLVESGGGLVKPGGSLRLSCAASGFTFSNYWMNWVRQAPGKGLEWVGEIRLKSNNYATHYAEPVKGRFTISRDDSKSTVYLQMNSLKTEDTAVYYCTRYYGNYGGVFDVWGAGTLVTVSS

SEQ ID NO: 8440 - protein, 107 aa, synthetic construct; identical to SEQ ID NO: 6247
  source 1..107: note = Description of Artificial Sequence: Synthetic polypeptide; note = VL of XENP018736

SEQ ID NO: 8441 - protein, 5 aa, synthetic construct
  source 1..5: note = Description of Artificial Sequence: Synthetic peptide; note = XENP018736 vhCDR1
NYWMN

SEQ ID NO: 8442 - protein, 19 aa, synthetic construct
  source 1..19: note = Description of Artificial Sequence: Synthetic peptide; note = XENP018736 vhCDR2
EIRLKSNNYATHYAEPVKG

SEQ ID NO: 8443 - protein, 11 aa, synthetic construct
  source 1..11: note = Description of Artificial Sequence: Synthetic peptide; note = XENP018736 vhCDR3
YYGNYGGVFDV

SEQ ID NO: 8444 - protein, 11 aa, synthetic construct
  source 1..11: note = Description of Artificial Sequence: Synthetic peptide; note = XENP018736 vlCDR1
RASQSVSNDVA

SEQ ID NO: 8445 - protein, 7 aa, synthetic construct
  source 1..7: note = Description of Artificial Sequence: Synthetic peptide; note = XENP018736 vlCDR2
YASHRYT

SEQ ID NO: 8446 - protein, 9 aa, synthetic construct
  source 1..9: note = Description of Artificial Sequence: Synthetic peptide; note = XENP018736 vlCDR3
QQDYSSPRT

SEQ ID NO: 8447 - protein, 249 aa, synthetic construct
  source 1..249: note = Description of Artificial Sequence: Synthetic polypeptide; note = XENP018737 1G6_H1.233_L1_scFv(GKPGS)4
EVQLVESGGGLVKPGGSLRLSCAASGFTFSNYWMNWVRQAPGKGLEWVGEIRLKSNNYATHYAEPVKGRFTISRDDSKSTVYLQMNSLKTEDTAVYYCTRYYGNYGGAFDVWGAGTLVTVSSGKPGSGKPGSGKPGSGKPGSSIVMTQSPATLSVSPGERATLSCRASQSVSNDVAWYQQKPGQSPRLLINYASHRYTGVPDRFTGSGYGTEFTLTISSLQSEDFAVYFCQQDYSSPRTFGGGTKVEIK

SEQ ID NO: 8448 - protein, 122 aa, synthetic construct
  source 1..122: note = Description of Artificial Sequence: Synthetic polypeptide; note = VH of XENP018737
EVQLVESGGGLVKPGGSLRLSCAASGFTFSNYWMNWVRQAPGKGLEWVGEIRLKSNNYATHYAEPVKGRFTISRDDSKSTVYLQMNSLKTEDTAVYYCTRYYGNYGGAFDVWGAGTLVTVSS

SEQ ID NO: 8449 - protein, 107 aa, synthetic construct; identical to SEQ ID NO: 6247
  source 1..107: note = Description of Artificial Sequence: Synthetic polypeptide; note = VL of XENP018737

SEQ ID NO: 8450 - protein, 5 aa, synthetic construct
  source 1..5: note = Description of Artificial Sequence: Synthetic peptide; note = XENP018737 vhCDR1
NYWMN

SEQ ID NO: 8451 - protein, 19 aa, synthetic construct
  source 1..19: note = Description of Artificial Sequence: Synthetic peptide; note = XENP018737 vhCDR2
EIRLKSNNYATHYAEPVKG

SEQ ID NO: 8452 - protein, 11 aa, synthetic construct
  source 1..11: note = Description of Artificial Sequence: Synthetic peptide; note = XENP018737 vhCDR3
YYGNYGGAFDV

SEQ ID NO: 8453 - protein, 11 aa, synthetic construct
  source 1..11: note = Description of Artificial Sequence: Synthetic peptide; note = XENP018737 vlCDR1
RASQSVSNDVA

SEQ ID NO: 8454 - protein, 7 aa, synthetic construct
  source 1..7: note = Description of Artificial Sequence: Synthetic peptide; note = XENP018737 vlCDR2
YASHRYT

SEQ ID NO: 8455 - protein, 9 aa, synthetic construct
  source 1..9: note = Description of Artificial Sequence: Synthetic peptide; note = XENP018737 vlCDR3
QQDYSSPRT

SEQ ID NO: 8456 - protein, 249 aa, synthetic construct
  source 1..249: note = Description of Artificial Sequence: Synthetic polypeptide; note = XENP018738 1G6_H1.234_L1_scFv(GKPGS)4
EVQLVESGGGLVKPGGSLRLSCAASGFTFSNYWMNWVRQAPGKGLEWVGEIRLKSNNYATHYAEPVKGRFTISRDDSKSTVYLQMNSLKTEDTAVYYCTRYYGNYGGQFDVWGAGTLVTVSSGKPGSGKPGSGKPGSGKPGSSIVMTQSPATLSVSPGERATLSCRASQSVSNDVAWYQQKPGQSPRLLINYASHRYTGVPDRFTGSGYGTEFTLTISSLQSEDFAVYFCQQDYSSPRTFGGGTKVEIK

SEQ ID NO: 8457 - protein, 122 aa, synthetic construct
  source 1..122: note = Description of Artificial Sequence: Synthetic polypeptide; note = VH of XENP018738
EVQLVESGGGLVKPGGSLRLSCAASGFTFSNYWMNWVRQAPGKGLEWVGEIRLKSNNYATHYAEPVKGRFTISRDDSKSTVYLQMNSLKTEDTAVYYCTRYYGNYGGQFDVWGAGTLVTVSS

SEQ ID NO: 8458 - protein, 107 aa, synthetic construct; identical to SEQ ID NO: 6247
  source 1..107: note = Description of Artificial Sequence: Synthetic polypeptide; note = VL of XENP018738

SEQ ID NO: 8459 - protein, 5 aa, synthetic construct
  source 1..5: note = Description of Artificial Sequence: Synthetic peptide; note = XENP018738 vhCDR1
NYWMN

SEQ ID NO: 8460 - protein, 19 aa, synthetic construct
  source 1..19: note = Description of Artificial Sequence: Synthetic peptide; note = XENP018738 vhCDR2
EIRLKSNNYATHYAEPVKG

SEQ ID NO: 8461 - protein, 11 aa, synthetic construct
  source 1..11: note = Description of Artificial Sequence: Synthetic peptide; note = XENP018738 vhCDR3
YYGNYGGQFDV

SEQ ID NO: 8462 - protein, 11 aa, synthetic construct
  source 1..11: note = Description of Artificial Sequence: Synthetic peptide; note = XENP018738 vlCDR1
RASQSVSNDVA

SEQ ID NO: 8463 - protein, 7 aa, synthetic construct
  source 1..7: note = Description of Artificial Sequence: Synthetic peptide; note = XENP018738 vlCDR2
YASHRYT

SEQ ID NO: 8464 - protein, 9 aa, synthetic construct
  source 1..9: note = Description of Artificial Sequence: Synthetic peptide; note = XENP018738 vlCDR3
QQDYSSPRT

SEQ ID NO: 8465 - protein, 249 aa, synthetic construct
  source 1..249: note = Description of Artificial Sequence: Synthetic polypeptide; note = XENP018739 1G6_H1.235_L1_scFv(GKPGS)4
EVQLVESGGGLVKPGGSLRLSCAASGFTFSNYWMNWVRQAPGKGLEWVGEIRLKSNNYATHYAEPVKGRFTISRDDSKSTVYLQMNSLKTEDTAVYYCTRYYGNYGGDFDVWGAGTLVTVSSGKPGSGKPGSGKPGSGKPGSSIVMTQSPATLSVSPGERATLSCRASQSVSNDVAWYQQKPGQSPRLLINYASHRYTGVPDRFTGSGYGTEFTLTISSLQSEDFAVYFCQQDYSSPRTFGGGTKVEIK

SEQ ID NO: 8466 - protein, 122 aa, synthetic construct
  source 1..122: note = Description of Artificial Sequence: Synthetic polypeptide; note = VH of XENP018739
EVQLVESGGGLVKPGGSLRLSCAASGFTFSNYWMNWVRQAPGKGLEWVGEIRLKSNNYATHYAEPVKGRFTISRDDSKSTVYLQMNSLKTEDTAVYYCTRYYGNYGGDFDVWGAGTLVTVSS

SEQ ID NO: 8467 - protein, 107 aa, synthetic construct; identical to SEQ ID NO: 6247
  source 1..107: note = Description of Artificial Sequence: Synthetic polypeptide; note = VL of XENP018739

SEQ ID NO: 8468 - protein, 5 aa, synthetic construct
  source 1..5: note = Description of Artificial Sequence: Synthetic peptide; note = XENP018739 vhCDR1
NYWMN

SEQ ID NO: 8469 - protein, 19 aa, synthetic construct
  source 1..19: note = Description of Artificial Sequence: Synthetic peptide; note = XENP018739 vhCDR2
EIRLKSNNYATHYAEPVKG

SEQ ID NO: 8470 - protein, 11 aa, synthetic construct
  source 1..11: note = Description of Artificial Sequence: Synthetic peptide; note = XENP018739 vhCDR3
YYGNYGGDFDV

SEQ ID NO: 8471 - protein, 11 aa, synthetic construct
  source 1..11: note = Description of Artificial Sequence: Synthetic peptide; note = XENP018739 vlCDR1
RASQSVSNDVA

SEQ ID NO: 8472 - protein, 7 aa, synthetic construct
  source 1..7: note = Description of Artificial Sequence: Synthetic peptide; note = XENP018739 vlCDR2
YASHRYT

SEQ ID NO: 8473 - protein, 9 aa, synthetic construct
  source 1..9: note = Description of Artificial Sequence: Synthetic peptide; note = XENP018739 vlCDR3
QQDYSSPRT

SEQ ID NO: 8474 - protein, 249 aa, synthetic construct
  source 1..249: note = Description of Artificial Sequence: Synthetic polypeptide; note = XENP018740 1G6_H1.236_L1_scFv(GKPGS)4
EVQLVESGGGLVKPGGSLRLSCAASGFTFSNYWMNWVRQAPGKGLEWVGEIRLKSNNYATHYAEPVKGRFTISRDDSKSTVYLQMNSLKTEDTAVYYCTRYYGNYGGKFDVWGAGTLVTVSSGKPGSGKPGSGKPGSGKPGSSIVMTQSPATLSVSPGERATLSCRASQSVSNDVAWYQQKPGQSPRLLINYASHRYTGVPDRFTGSGYGTEFTLTISSLQSEDFAVYFCQQDYSSPRTFGGGTKVEIK

SEQ ID NO: 8475 - protein, 122 aa, synthetic construct
  source 1..122: note = Description of Artificial Sequence: Synthetic polypeptide; note = VH of XENP018740
EVQLVESGGGLVKPGGSLRLSCAASGFTFSNYWMNWVRQAPGKGLEWVGEIRLKSNNYATHYAEPVKGRFTISRDDSKSTVYLQMNSLKTEDTAVYYCTRYYGNYGGKFDVWGAGTLVTVSS

SEQ ID NO: 8476 - protein, 107 aa, synthetic construct; identical to SEQ ID NO: 6247
  source 1..107: note = Description of Artificial Sequence: Synthetic polypeptide; note = VL of XENP018740

SEQ ID NO: 8477 - protein, 5 aa, synthetic construct
  source 1..5: note = Description of Artificial Sequence: Synthetic peptide; note = XENP018740 vhCDR1
NYWMN

SEQ ID NO: 8478 - protein, 19 aa, synthetic construct
  source 1..19: note = Description of Artificial Sequence: Synthetic peptide; note = XENP018740 vhCDR2
EIRLKSNNYATHYAEPVKG

SEQ ID NO: 8479 - protein, 11 aa, synthetic construct
  source 1..11: note = Description of Artificial Sequence: Synthetic peptide; note = XENP018740 vhCDR3
YYGNYGGKFDV

SEQ ID NO: 8480 - protein, 11 aa, synthetic construct
  source 1..11: note = Description of Artificial Sequence: Synthetic peptide; note = XENP018740 vlCDR1
RASQSVSNDVA

SEQ ID NO: 8481 - protein, 7 aa, synthetic construct
  source 1..7: note = Description of Artificial Sequence: Synthetic peptide; note = XENP018740 vlCDR2
YASHRYT

SEQ ID NO: 8482 - protein, 9 aa, synthetic construct
  source 1..9: note = Description of Artificial Sequence: Synthetic peptide; note = XENP018740 vlCDR3
QQDYSSPRT

SEQ ID NO: 8483 - protein, 249 aa, synthetic construct
  source 1..249: note = Description of Artificial Sequence: Synthetic polypeptide; note = XENP018741 1G6_H1.237_L1_scFv(GKPGS)4
EVQLVESGGGLVKPGGSLRLSCAASGFTFSNYWMNWVRQAPGKGLEWVGEIRLKSNNYATHYAEPVKGRFTISRDDSKSTVYLQMNSLKTEDTAVYYCTRYYGNYGGYFDYWGAGTLVTVSSGKPGSGKPGSGKPGSGKPGSSIVMTQSPATLSVSPGERATLSCRASQSVSNDVAWYQQKPGQSPRLLINYASHRYTGVPDRFTGSGYGTEFTLTISSLQSEDFAVYFCQQDYSSPRTFGGGTKVEIK

SEQ ID NO: 8484 - protein, 122 aa, synthetic construct
  source 1..122: note = Description of Artificial Sequence: Synthetic polypeptide; note = VH of XENP018741
EVQLVESGGGLVKPGGSLRLSCAASGFTFSNYWMNWVRQAPGKGLEWVGEIRLKSNNYATHYAEPVKGRFTISRDDSKSTVYLQMNSLKTEDTAVYYCTRYYGNYGGYFDYWGAGTLVTVSS

SEQ ID NO: 8485 - protein, 107 aa, synthetic construct; identical to SEQ ID NO: 6247
  source 1..107: note = Description of Artificial Sequence: Synthetic polypeptide; note = VL of XENP018741

SEQ ID NO: 8486 - protein, 5 aa, synthetic construct
  source 1..5: note = Description of Artificial Sequence: Synthetic peptide; note = XENP018741 vhCDR1
NYWMN

SEQ ID NO: 8487 - protein, 19 aa, synthetic construct
  source 1..19: note = Description of Artificial Sequence: Synthetic peptide; note = XENP018741 vhCDR2
EIRLKSNNYATHYAEPVKG

SEQ ID NO: 8488 - protein, 11 aa, synthetic construct
  source 1..11: note = Description of Artificial Sequence: Synthetic peptide; note = XENP018741 vhCDR3
YYGNYGGYFDY

SEQ ID NO: 8489 - protein, 11 aa, synthetic construct
  source 1..11: note = Description of Artificial Sequence: Synthetic peptide; note = XENP018741 vlCDR1
RASQSVSNDVA

SEQ ID NO: 8490 - protein, 7 aa, synthetic construct
  source 1..7: note = Description of Artificial Sequence: Synthetic peptide; note = XENP018741 vlCDR2
YASHRYT

SEQ ID NO: 8491 - protein, 9 aa, synthetic construct
  source 1..9: note = Description of Artificial Sequence: Synthetic peptide; note = XENP018741 vlCDR3
QQDYSSPRT

SEQ ID NO: 8492 - protein, 249 aa, synthetic construct
  source 1..249: note = Description of Artificial Sequence: Synthetic polypeptide; note = XENP018742 1G6_H1.238_L1_scFv(GKPGS)4
EVQLVESGGGLVKPGGSLRLSCAASGFTFSNYWMNWVRQAPGKGLEWVGEIRLKSNNYATHYAEPVKGRFTISRDDSKSTVYLQMNSLKTEDTAVYYCTRYYGNYGGYFDVWGQGTLVTVSSGKPGSGKPGSGKPGSGKPGSSIVMTQSPATLSVSPGERATLSCRASQSVSNDVAWYQQKPGQSPRLLINYASHRYTGVPDRFTGSGYGTEFTLTISSLQSEDFAVYFCQQDYSSPRTFGGGTKVEIK

SEQ ID NO: 8493 - protein, 122 aa, synthetic construct
  source 1..122: note = Description of Artificial Sequence: Synthetic polypeptide; note = VH of XENP018742
EVQLVESGGGLVKPGGSLRLSCAASGFTFSNYWMNWVRQAPGKGLEWVGEIRLKSNNYATHYAEPVKGRFTISRDDSKSTVYLQMNSLKTEDTAVYYCTRYYGNYGGYFDVWGQGTLVTVSS

SEQ ID NO: 8494 - protein, 107 aa, synthetic construct; identical to SEQ ID NO: 6247
  source 1..107: note = Description of Artificial Sequence: Synthetic polypeptide; note = VL of XENP018742

SEQ ID NO: 8495 - protein, 5 aa, synthetic construct
  source 1..5: note = Description of Artificial Sequence: Synthetic peptide; note = XENP018742 vhCDR1
NYWMN

SEQ ID NO: 8496 - protein, 19 aa, synthetic construct
  source 1..19: note = Description of Artificial Sequence: Synthetic peptide; note = XENP018742 vhCDR2
EIRLKSNNYATHYAEPVKG

SEQ ID NO: 8497 - protein, 11 aa, synthetic construct
  source 1..11: note = Description of Artificial Sequence: Synthetic peptide; note = XENP018742 vhCDR3
YYGNYGGYFDV

SEQ ID NO: 8498 - protein, 11 aa, synthetic construct
  source 1..11: note = Description of Artificial Sequence: Synthetic peptide; note = XENP018742 vlCDR1
RASQSVSNDVA

SEQ ID NO: 8499 - protein, 7 aa, synthetic construct
  source 1..7: note = Description of Artificial Sequence: Synthetic peptide; note = XENP018742 vlCDR2
YASHRYT

SEQ ID NO: 8500 - protein, 9 aa, synthetic construct
  source 1..9: note = Description of Artificial Sequence: Synthetic peptide; note = XENP018742 vlCDR3
QQDYSSPRT

SEQ ID NO: 8501 - protein, 249 aa, synthetic construct
  source 1..249: note = Description of Artificial Sequence: Synthetic polypeptide; note = XENP018743 1G6_H1_L1.1_scFv(GKPGS)4
EVQLVESGGGLVKPGGSLRLSCAASGFTFSNYWMNWVRQAPGKGLEWVGEIRLKSNNYATHYAEPVKGRFTISRDDSKSTVYLQMNSLKTEDTAVYYCTRYYGNYGGYFDVWGAGTLVTVSSGKPGSGKPGSGKPGSGKPGSEIVMTQSPATLSVSPGERATLSCRASQSVSNDVAWYQQKPGQSPRLLINYASHRYTGVPDRFTGSGYGTEFTLTISSLQSEDFAVYFCQQDYSSPRTFGGGTKVEIK

SEQ ID NO: 8502 - protein, 122 aa, synthetic construct; identical to SEQ ID NO: 6246
  source 1..122: note = Description of Artificial Sequence: Synthetic polypeptide; note = VH of XENP018743

SEQ ID NO: 8503 - protein, 107 aa, synthetic construct
  source 1..107: note = Description of Artificial Sequence: Synthetic polypeptide; note = VL of XENP018743
EIVMTQSPATLSVSPGERATLSCRASQSVSNDVAWYQQKPGQSPRLLINYASHRYTGVPDRFTGSGYGTEFTLTISSLQSEDFAVYFCQQDYSSPRTFGGGTKVEIK

SEQ ID NO: 8504 - protein, 5 aa, synthetic construct
  source 1..5: note = Description of Artificial Sequence: Synthetic peptide; note = XENP018743 vhCDR1
NYWMN

SEQ ID NO: 8505 - protein, 19 aa, synthetic construct
  source 1..19: note = Description of Artificial Sequence: Synthetic peptide; note = XENP018743 vhCDR2
EIRLKSNNYATHYAEPVKG

SEQ ID NO: 8506 - protein, 11 aa, synthetic construct
  source 1..11: note = Description of Artificial Sequence: Synthetic peptide; note = XENP018743 vhCDR3
YYGNYGGYFDV

SEQ ID NO: 8507 - protein, 11 aa, synthetic construct
  source 1..11: note = Description of Artificial Sequence: Synthetic peptide; note = XENP018743 vlCDR1
RASQSVSNDVA

SEQ ID NO: 8508 - protein, 7 aa, synthetic construct
  source 1..7: note = Description of Artificial Sequence: Synthetic peptide; note = XENP018743 vlCDR2
YASHRYT

SEQ ID NO: 8509 - protein, 9 aa, synthetic construct
  source 1..9: note = Description of Artificial Sequence: Synthetic peptide; note = XENP018743 vlCDR3
QQDYSSPRT

SEQ ID NO: 8510 - protein, 249 aa, synthetic construct
  source 1..249: note = Description of Artificial Sequence: Synthetic polypeptide; note = XENP018744 1G6_H1_L1.2_scFv(GKPGS)4
EVQLVESGGGLVKPGGSLRLSCAASGFTFSNYWMNWVRQAPGKGLEWVGEIRLKSNNYATHYAEPVKGRFTISRDDSKSTVYLQMNSLKTEDTAVYYCTRYYGNYGGYFDVWGAGTLVTVSSGKPGSGKPGSGKPGSGKPGSDIVMTQSPATLSVSPGERATLSCRASQSVSNDVAWYQQKPGQSPRLLINYASHRYTGVPDRFTGSGYGTEFTLTISSLQSEDFAVYFCQQDYSSPRTFGGGTKVEIK

SEQ ID NO: 8511 - protein, 122 aa, synthetic construct; identical to SEQ ID NO: 6246
  source 1..122: note = Description of Artificial Sequence: Synthetic polypeptide; note = VH of XENP018744

SEQ ID NO: 8512 - protein, 107 aa, synthetic construct
  source 1..107: note = Description of Artificial Sequence: Synthetic polypeptide; note = VL of XENP018744
DIVMTQSPATLSVSPGERATLSCRASQSVSNDVAWYQQKPGQSPRLLINYASHRYTGVPDRFTGSGYGTEFTLTISSLQSEDFAVYFCQQDYSSPRTFGGGTKVEIK

SEQ ID NO: 8513 - protein, 5 aa, synthetic construct
  source 1..5: note = Description of Artificial Sequence: Synthetic peptide; note = XENP018744 vhCDR1
NYWMN

SEQ ID NO: 8514 - protein, 19 aa, synthetic construct
  source 1..19: note = Description of Artificial Sequence: Synthetic peptide; note = XENP018744 vhCDR2
EIRLKSNNYATHYAEPVKG

SEQ ID NO: 8515 - protein, 11 aa, synthetic construct
  source 1..11: note = Description of Artificial Sequence: Synthetic peptide; note = XENP018744 vhCDR3
YYGNYGGYFDV

SEQ ID NO: 8516 - protein, 11 aa, synthetic construct
  source 1..11: note = Description of Artificial Sequence: Synthetic peptide; note = XENP018744 vlCDR1
RASQSVSNDVA

SEQ ID NO: 8517 - protein, 7 aa, synthetic construct
  source 1..7: note = Description of Artificial Sequence: Synthetic peptide; note = XENP018744 vlCDR2
YASHRYT

SEQ ID NO: 8518 - protein, 9 aa, synthetic construct
  source 1..9: note = Description of Artificial Sequence: Synthetic peptide; note = XENP018744 vlCDR3
QQDYSSPRT

SEQ ID NO: 8519 - protein, 249 aa, synthetic construct
  source 1..249: note = Description of Artificial Sequence: Synthetic polypeptide; note = XENP018745 1G6_H1_L1.3_scFv(GKPGS)4
EVQLVESGGGLVKPGGSLRLSCAASGFTFSNYWMNWVRQAPGKGLEWVGEIRLKSNNYATHYAEPVKGRFTISRDDSKSTVYLQMNSLKTEDTAVYYCTRYYGNYGGYFDVWGAGTLVTVSSGKPGSGKPGSGKPGSGKPGSSVVMTQSPATLSVSPGERATLSCRASQSVSNDVAWYQQKPGQSPRLLINYASHRYTGVPDRFTGSGYGTEFTLTISSLQSEDFAVYFCQQDYSSPRTFGGGTKVEIK

SEQ ID NO: 8520 - protein, 122 aa, synthetic construct; identical to SEQ ID NO: 6246
  source 1..122: note = Description of Artificial Sequence: Synthetic polypeptide; note = VH of XENP018745

SEQ ID NO: 8521 - protein, 107 aa, synthetic construct
  source 1..107: note = Description of Artificial Sequence: Synthetic polypeptide; note = VL of XENP018745
SVVMTQSPATLSVSPGERATLSCRASQSVSNDVAWYQQKPGQSPRLLINYASHRYTGVPDRFTGSGYGTEFTLTISSLQSEDFAVYFCQQDYSSPRTFGGGTKVEIK

SEQ ID NO: 8522 - protein, 5 aa, synthetic construct
  source 1..5: note = Description of Artificial Sequence: Synthetic peptide; note = XENP018745 vhCDR1
NYWMN

SEQ ID NO: 8523 - protein, 19 aa, synthetic construct
  source 1..19: note = Description of Artificial Sequence: Synthetic peptide; note = XENP018745 vhCDR2
EIRLKSNNYATHYAEPVKG

SEQ ID NO: 8524 - protein, 11 aa, synthetic construct
  source 1..11: note = Description of Artificial Sequence: Synthetic peptide; note = XENP018745 vhCDR3
YYGNYGGYFDV

SEQ ID NO: 8525 - protein, 11 aa, synthetic construct
  source 1..11: note = Description of Artificial Sequence: Synthetic peptide; note = XENP018745 vlCDR1
RASQSVSNDVA

SEQ ID NO: 8526 - protein, 7 aa, synthetic construct
  source 1..7: note = Description of Artificial Sequence: Synthetic peptide; note = XENP018745 vlCDR2
YASHRYT

SEQ ID NO: 8527 - protein, 9 aa, synthetic construct
  source 1..9: note = Description of Artificial Sequence: Synthetic peptide; note = XENP018745 vlCDR3
QQDYSSPRT

SEQ ID NO: 8528 - protein, 249 aa, synthetic construct
  source 1..249: note = Description of Artificial Sequence: Synthetic polypeptide; note = XENP018746 1G6_H1_L1.4_scFv(GKPGS)4
EVQLVESGGGLVKPGGSLRLSCAASGFTFSNYWMNWVRQAPGKGLEWVGEIRLKSNNYATHYAEPVKGRFTISRDDSKSTVYLQMNSLKTEDTAVYYCTRYYGNYGGYFDVWGAGTLVTVSSGKPGSGKPGSGKPGSGKPGSSIVLTQSPATLSVSPGERATLSCRASQSVSNDVAWYQQKPGQSPRLLINYASHRYTGVPDRFTGSGYGTEFTLTISSLQSEDFAVYFCQQDYSSPRTFGGGTKVEIK

SEQ ID NO: 8529 - protein, 122 aa, synthetic construct; identical to SEQ ID NO: 6246
  source 1..122: note = Description of Artificial Sequence: Synthetic polypeptide; note = VH of XENP018746

SEQ ID NO: 8530 - protein, 107 aa, synthetic construct
  source 1..107: note = Description of Artificial Sequence: Synthetic polypeptide; note = VL of XENP018746
SIVLTQSPATLSVSPGERATLSCRASQSVSNDVAWYQQKPGQSPRLLINYASHRYTGVPDRFTGSGYGTEFTLTISSLQSEDFAVYFCQQDYSSPRTFGGGTKVEIK

SEQ ID NO: 8531 - protein, 5 aa, synthetic construct
  source 1..5: note = Description of Artificial Sequence: Synthetic peptide; note = XENP018746 vhCDR1
NYWMN

SEQ ID NO: 8532 - protein, 19 aa, synthetic construct
  source 1..19: note = Description of Artificial Sequence: Synthetic peptide; note = XENP018746 vhCDR2
EIRLKSNNYATHYAEPVKG

SEQ ID NO: 8533 - protein, 11 aa, synthetic construct
  source 1..11: note = Description of Artificial Sequence: Synthetic peptide; note = XENP018746 vhCDR3
YYGNYGGYFDV

SEQ ID NO: 8534 - protein, 11 aa, synthetic construct
  source 1..11: note = Description of Artificial Sequence: Synthetic peptide; note = XENP018746 vlCDR1
RASQSVSNDVA

SEQ ID NO: 8535 - protein, 7 aa, synthetic construct
  source 1..7: note = Description of Artificial Sequence: Synthetic peptide; note = XENP018746 vlCDR2
YASHRYT

SEQ ID NO: 8536 - protein, 9 aa, synthetic construct
  source 1..9: note = Description of Artificial Sequence: Synthetic peptide; note = XENP018746 vlCDR3
QQDYSSPRT

SEQ ID NO: 8537 - protein, 249 aa, synthetic construct
  source 1..249: note = Description of Artificial Sequence: Synthetic polypeptide; note = XENP018747 1G6_H1_L1.5_scFv(GKPGS)4
EVQLVESGGGLVKPGGSLRLSCAASGFTFSNYWMNWVRQAPGKGLEWVGEIRLKSNNYATHYAEPVKGRFTISRDDSKSTVYLQMNSLKTEDTAVYYCTRYYGNYGGYFDVWGAGTLVTVSSGKPGSGKPGSGKPGSGKPGSSIVMTQTPATLSVSPGERATLSCRASQSVSNDVAWYQQKPGQSPRLLINYASHRYTGVPDRFTGSGYGTEFTLTISSLQSEDFAVYFCQQDYSSPRTFGGGTKVEIK

SEQ ID NO: 8538 - protein, 122 aa, synthetic construct; identical to SEQ ID NO: 6246
  source 1..122: note = Description of Artificial Sequence: Synthetic polypeptide; note = VH of XENP018747

SEQ ID NO: 8539 - protein, 107 aa, synthetic construct
  source 1..107: note = Description of Artificial Sequence: Synthetic polypeptide; note = VL of XENP018747
SIVMTQTPATLSVSPGERATLSCRASQSVSNDVAWYQQKPGQSPRLLINYASHRYTGVPDRFTGSGYGTEFTLTISSLQSEDFAVYFCQQDYSSPRTFGGGTKVEIK

SEQ ID NO: 8540 - protein, 5 aa, synthetic construct
  source 1..5: note = Description of Artificial Sequence: Synthetic peptide; note = XENP018747 vhCDR1
NYWMN

SEQ ID NO: 8541 - protein, 19 aa, synthetic construct
  source 1..19: note = Description of Artificial Sequence: Synthetic peptide; note = XENP018747 vhCDR2
EIRLKSNNYATHYAEPVKG

SEQ ID NO: 8542 - protein, 11 aa, synthetic construct
  source 1..11: note = Description of Artificial Sequence: Synthetic peptide; note = XENP018747 vhCDR3
YYGNYGGYFDV

SEQ ID NO: 8543 - protein, 11 aa, synthetic construct
  source 1..11: note = Description of Artificial Sequence: Synthetic peptide; note = XENP018747 vlCDR1
RASQSVSNDVA

SEQ ID NO: 8544 - protein, 7 aa, synthetic construct
  source 1..7: note = Description of Artificial Sequence: Synthetic peptide; note = XENP018747 vlCDR2
YASHRYT

SEQ ID NO: 8545 - protein, 9 aa, synthetic construct
  source 1..9: note = Description of Artificial Sequence: Synthetic peptide; note = XENP018747 vlCDR3
QQDYSSPRT

SEQ ID NO: 8546 - protein, 249 aa, synthetic construct
  source 1..249: note = Description of Artificial Sequence: Synthetic polypeptide; note = XENP018748 1G6_H1_L1.6_scFv(GKPGS)4
EVQLVESGGGLVKPGGSLRLSCAASGFTFSNYWMNWVRQAPGKGLEWVGEIRLKSNNYATHYAEPVKGRFTISRDDSKSTVYLQMNSLKTEDTAVYYCTRYYGNYGGYFDVWGAGTLVTVSSGKPGSGKPGSGKPGSGKPGSSIVMTQSPKTLSVSPGERATLSCRASQSVSNDVAWYQQKPGQSPRLLINYASHRYTGVPDRFTGSGYGTEFTLTISSLQSEDFAVYFCQQDYSSPRTFGGGTKVEIK

SEQ ID NO: 8547 - protein, 122 aa, synthetic construct; identical to SEQ ID NO: 6246
  source 1..122: note = Description of Artificial Sequence: Synthetic polypeptide; note = VH of XENP018748

SEQ ID NO: 8548 - protein, 107 aa, synthetic construct
  source 1..107: note = Description of Artificial Sequence: Synthetic polypeptide; note = VL of XENP018748
SIVMTQSPKTLSVSPGERATLSCRASQSVSNDVAWYQQKPGQSPRLLINYASHRYTGVPDRFTGSGYGTEFTLTISSLQSEDFAVYFCQQDYSSPRTFGGGTKVEIK

SEQ ID NO: 8549 - protein, 5 aa, synthetic construct
  source 1..5: note = Description of Artificial Sequence: Synthetic peptide; note = XENP018748 vhCDR1
NYWMN

SEQ ID NO: 8550 - protein, 19 aa, synthetic construct
  source 1..19: note = Description of Artificial Sequence: Synthetic peptide; note = XENP018748 vhCDR2
EIRLKSNNYATHYAEPVKG

SEQ ID NO: 8551 - protein, 11 aa, synthetic construct
  source 1..11: note = Description of Artificial Sequence: Synthetic peptide; note = XENP018748 vhCDR3
YYGNYGGYFDV

SEQ ID NO: 8552 - protein, 11 aa, synthetic construct
  source 1..11: note = Description of Artificial Sequence: Synthetic peptide; note = XENP018748 vlCDR1
RASQSVSNDVA

SEQ ID NO: 8553 - protein, 7 aa, synthetic construct
  source 1..7: note = Description of Artificial Sequence: Synthetic peptide; note = XENP018748 vlCDR2
YASHRYT

SEQ ID NO: 8554 - protein, 9 aa, synthetic construct
  source 1..9: note = Description of Artificial Sequence: Synthetic peptide; note = XENP018748 vlCDR3
QQDYSSPRT

SEQ ID NO: 8555 - protein, 249 aa, synthetic construct
  source 1..249: note = Description of Artificial Sequence: Synthetic polypeptide; note = XENP018749 1G6_H1_L1.7_scFv(GKPGS)4
EVQLVESGGGLVKPGGSLRLSCAASGFTFSNYWMNWVRQAPGKGLEWVGEIRLKSNNYATHYAEPVKGRFTISRDDSKSTVYLQMNSLKTEDTAVYYCTRYYGNYGGYFDVWGAGTLVTVSSGKPGSGKPGSGKPGSGKPGSSIVMTQSPASLSVSPGERATLSCRASQSVSNDVAWYQQKPGQSPRLLINYASHRYTGVPDRFTGSGYGTEFTLTISSLQSEDFAVYFCQQDYSSPRTFGGGTKVEIK

SEQ ID NO: 8556 - protein, 122 aa, synthetic construct; identical to SEQ ID NO: 6246
  source 1..122: note = Description of Artificial Sequence: Synthetic polypeptide; note = VH of XENP018749

SEQ ID NO: 8557 - protein, 107 aa, synthetic construct
  source 1..107: note = Description of Artificial Sequence: Synthetic polypeptide; note = VL of XENP018749
SIVMTQSPASLSVSPGERATLSCRASQSVSNDVAWYQQKPGQSPRLLINYASHRYTGVPDRFTGSGYGTEFTLTISSLQSEDFAVYFCQQDYSSPRTFGGGTKVEIK

SEQ ID NO: 8558 - protein, 5 aa, synthetic construct
  source 1..5: note = Description of Artificial Sequence: Synthetic peptide; note = XENP018749 vhCDR1
NYWMN

SEQ ID NO: 8559 - protein, 19 aa, synthetic construct
  source 1..19: note = Description of Artificial Sequence: Synthetic peptide; note = XENP018749 vhCDR2
EIRLKSNNYATHYAEPVKG

SEQ ID NO: 8560 - protein, 11 aa, synthetic construct
  source 1..11: note = Description of Artificial Sequence: Synthetic peptide; note = XENP018749 vhCDR3
YYGNYGGYFDV

SEQ ID NO: 8561 - protein, 11 aa, synthetic construct
  source 1..11: note = Description of Artificial Sequence: Synthetic peptide; note = XENP018749 vlCDR1
RASQSVSNDVA

SEQ ID NO: 8562 - protein, 7 aa, synthetic construct
  source 1..7: note = Description of Artificial Sequence: Synthetic peptide; note = XENP018749 vlCDR2
YASHRYT

SEQ ID NO: 8563 - protein, 9 aa, synthetic construct
  source 1..9: note = Description of Artificial Sequence: Synthetic peptide; note = XENP018749 vlCDR3
QQDYSSPRT

SEQ ID NO: 8564 - protein, 249 aa, synthetic construct
  source 1..249: note = Description of Artificial Sequence: Synthetic polypeptide; note = XENP018750 1G6_H1_L1.8_scFv(GKPGS)4
EVQLVESGGGLVKPGGSLRLSCAASGFTFSNYWMNWVRQAPGKGLEWVGEIRLKSNNYATHYAEPVKGRFTISRDDSKSTVYLQMNSLKTEDTAVYYCTRYYGNYGGYFDVWGAGTLVTVSSGKPGSGKPGSGKPGSGKPGSSIVMTQSPAFLSVSPGERATLSCRASQSVSNDVAWYQQKPGQSPRLLINYASHRYTGVPDRFTGSGYGTEFTLTISSLQSEDFAVYFCQQDYSSPRTFGGGTKVEIK

SEQ ID NO: 8565 - protein, 122 aa, synthetic construct; identical to SEQ ID NO: 6246
  source 1..122: note = Description of Artificial Sequence: Synthetic polypeptide; note = VH of XENP018750

SEQ ID NO: 8566 - protein, 107 aa, synthetic construct
  source 1..107: note = Description of Artificial Sequence: Synthetic polypeptide; note = VL of XENP018750
SIVMTQSPAFLSVSPGERATLSCRASQSVSNDVAWYQQKPGQSPRLLINYASHRYTGVPDRFTGSGYGTEFTLTISSLQSEDFAVYFCQQDYSSPRTFGGGTKVEIK

SEQ ID NO: 8567 - protein, 5 aa, synthetic construct
  source 1..5: note = Description of Artificial Sequence: Synthetic peptide; note = XENP018750 vhCDR1
NYWMN

SEQ ID NO: 8568 - protein, 19 aa, synthetic construct
  source 1..19: note = Description of Artificial Sequence: Synthetic peptide; note = XENP018750 vhCDR2
EIRLKSNNYATHYAEPVKG

SEQ ID NO: 8569 - protein, 11 aa, synthetic construct
  source 1..11: note = Description of Artificial Sequence: Synthetic peptide; note = XENP018750 vhCDR3
YYGNYGGYFDV

SEQ ID NO: 8570 - protein, 11 aa, synthetic construct
  source 1..11: note = Description of Artificial Sequence: Synthetic peptide; note = XENP018750 vlCDR1
RASQSVSNDVA

SEQ ID NO: 8571 - protein, 7 aa, synthetic construct
  source 1..7: note = Description of Artificial Sequence: Synthetic peptide; note = XENP018750 vlCDR2
YASHRYT

SEQ ID NO: 8572 - protein, 9 aa, synthetic construct
  source 1..9: note = Description of Artificial Sequence: Synthetic peptide; note = XENP018750 vlCDR3
QQDYSSPRT

SEQ ID NO: 8573 - protein, 249 aa, synthetic construct
  source 1..249: note = Description of Artificial Sequence: Synthetic polypeptide; note = XENP018751 1G6_H1_L1.9_scFv(GKPGS)4
EVQLVESGGGLVKPGGSLRLSCAASGFTFSNYWMNWVRQAPGKGLEWVGEIRLKSNNYATHYAEPVKGRFTISRDDSKSTVYLQMNSLKTEDTAVYYCTRYYGNYGGYFDVWGAGTLVTVSSGKPGSGKPGSGKPGSGKPGSSIVMTQSPATLLVSPGERATLSCRASQSVSNDVAWYQQKPGQSPRLLINYASHRYTGVPDRFTGSGYGTEFTLTISSLQSEDFAVYFCQQDYSSPRTFGGGTKVEIK

SEQ ID NO: 8574 - protein, 122 aa, synthetic construct; identical to SEQ ID NO: 6246
  source 1..122: note = Description of Artificial Sequence: Synthetic polypeptide; note = VH of XENP018751

SEQ ID NO: 8575 - protein, 107 aa, synthetic construct
  source 1..107: note = Description of Artificial Sequence: Synthetic polypeptide; note = VL of XENP018751
SIVMTQSPATLLVSPGERATLSCRASQSVSNDVAWYQQKPGQSPRLLINYASHRYTGVPDRFTGSGYGTEFTLTISSLQSEDFAVYFCQQDYSSPRTFGGGTKVEIK

SEQ ID NO: 8576 - protein, 5 aa, synthetic construct
  source 1..5: note = Description of Artificial Sequence: Synthetic peptide; note = XENP018751 vhCDR1
NYWMN

SEQ ID NO: 8577 - protein, 19 aa, synthetic construct
  source 1..19: note = Description of Artificial Sequence: Synthetic peptide; note = XENP018751 vhCDR2
EIRLKSNNYATHYAEPVKG

SEQ ID NO: 8578 - protein, 11 aa, synthetic construct
  source 1..11: note = Description of Artificial Sequence: Synthetic peptide; note = XENP018751 vhCDR3
YYGNYGGYFDV

SEQ ID NO: 8579 - protein, 11 aa, synthetic construct
  source 1..11: note = Description of Artificial Sequence: Synthetic peptide; note = XENP018751 vlCDR1
RASQSVSNDVA

SEQ ID NO: 8580 - protein, 7 aa, synthetic construct
  source 1..7: note = Description of Artificial Sequence: Synthetic peptide; note = XENP018751 vlCDR2
YASHRYT

SEQ ID NO: 8581 - protein, 9 aa, synthetic construct
  source 1..9: note = Description of Artificial Sequence: Synthetic peptide; note = XENP018751 vlCDR3
QQDYSSPRT

SEQ ID NO: 8582 - protein, 249 aa, synthetic construct
  source 1..249: note = Description of Artificial Sequence: Synthetic polypeptide; note = XENP018752 1G6_H1_L1.10_scFv(GKPGS)4
EVQLVESGGGLVKPGGSLRLSCAASGFTFSNYWMNWVRQAPGKGLEWVGEIRLKSNNYATHYAEPVKGRFTISRDDSKSTVYLQMNSLKTEDTAVYYCTRYYGNYGGYFDVWGAGTLVTVSSGKPGSGKPGSGKPGSGKPGSSIVMTQSPATLSVSAGERATLSCRASQSVSNDVAWYQQKPGQSPRLLINYASHRYTGVPDRFTGSGYGTEFTLTISSLQSEDFAVYFCQQDYSSPRTFGGGTKVEIK

SEQ ID NO: 8583 - protein, 122 aa, synthetic construct; identical to SEQ ID NO: 6246
  source 1..122: note = Description of Artificial Sequence: Synthetic polypeptide; note = VH of XENP018752

SEQ ID NO: 8584 - protein, 107 aa, synthetic construct
  source 1..107: note = Description of Artificial Sequence: Synthetic polypeptide; note = VL of XENP018752
SIVMTQSPATLSVSAGERATLSCRASQSVSNDVAWYQQKPGQSPRLLINYASHRYTGVPDRFTGSGYGTEFTLTISSLQSEDFAVYFCQQDYSSPRTFGGGTKVEIK

SEQ ID NO: 8585 - protein, 5 aa, synthetic construct
  source 1..5: note = Description of Artificial Sequence: Synthetic peptide; note = XENP018752 vhCDR1
NYWMN

SEQ ID NO: 8586 - protein, 19 aa, synthetic construct
  source 1..19: note = Description of Artificial Sequence: Synthetic peptide; note = XENP018752 vhCDR2
EIRLKSNNYATHYAEPVKG

SEQ ID NO: 8587 - protein, 11 aa, synthetic construct
  source 1..11: note = Description of Artificial Sequence: Synthetic peptide; note = XENP018752 vhCDR3
YYGNYGGYFDV

SEQ ID NO: 8588 - protein, 11 aa, synthetic construct
  source 1..11: note = Description of Artificial Sequence: Synthetic peptide; note = XENP018752 vlCDR1
RASQSVSNDVA

SEQ ID NO: 8589 - protein, 7 aa, synthetic construct
  source 1..7: note = Description of Artificial Sequence: Synthetic peptide; note = XENP018752 vlCDR2
YASHRYT

SEQ ID NO: 8590 - protein, 9 aa, synthetic construct
  source 1..9: note = Description of Artificial Sequence: Synthetic peptide; note = XENP018752 vlCDR3
QQDYSSPRT

SEQ ID NO: 8591 - protein, 249 aa, synthetic construct
  source 1..249: note = Description of Artificial Sequence: Synthetic polypeptide; note = XENP018753 1G6_H1_L1.11_scFv(GKPGS)4
EVQLVESGGGLVKPGGSLRLSCAASGFTFSNYWMNWVRQAPGKGLEWVGEIRLKSNNYATHYAEPVKGRFTISRDDSKSTVYLQMNSLKTEDTAVYYCTRYYGNYGGYFDVWGAGTLVTVSSGKPGSGKPGSGKPGSGKPGSSIVMTQSPATLSVSPGDRATLSCRASQSVSNDVAWYQQKPGQSPRLLINYASHRYTGVPDRFTGSGYGTEFTLTISSLQSEDFAVYFCQQDYSSPRTFGGGTKVEIK

SEQ ID NO: 8592 - protein, 122 aa, synthetic construct; identical to SEQ ID NO: 6246
  source 1..122: note = Description of Artificial Sequence: Synthetic polypeptide; note = VH of XENP018753

SEQ ID NO: 8593 - protein, 107 aa, synthetic construct
  source 1..107: note = Description of Artificial Sequence: Synthetic polypeptide; note = VL of XENP018753
SIVMTQSPATLSVSPGDRATLSCRASQSVSNDVAWYQQKPGQSPRLLINYASHRYTGVPDRFTGSGYGTEFTLTISSLQSEDFAVYFCQQDYSSPRTFGGGTKVEIK

SEQ ID NO: 8594 - protein, 5 aa, synthetic construct
  source 1..5: note = Description of Artificial Sequence: Synthetic peptide; note = XENP018753 vhCDR1
NYWMN

SEQ ID NO: 8595 - protein, 19 aa, synthetic construct
  source 1..19: note = Description of Artificial Sequence: Synthetic peptide; note = XENP018753 vhCDR2
EIRLKSNNYATHYAEPVKG

SEQ ID NO: 8596 - protein, 11 aa, synthetic construct
  source 1..11: note = Description of Artificial Sequence: Synthetic peptide; note = XENP018753 vhCDR3
YYGNYGGYFDV

SEQ ID NO: 8597 - protein, 11 aa, synthetic construct
  source 1..11: note = Description of Artificial Sequence: Synthetic peptide; note = XENP018753 vlCDR1
RASQSVSNDVA

SEQ ID NO: 8598 - protein, 7 aa, synthetic construct
  source 1..7: note = Description of Artificial Sequence: Synthetic peptide; note = XENP018753 vlCDR2
YASHRYT

SEQ ID NO: 8599 - protein, 9 aa, synthetic construct
  source 1..9: note = Description of Artificial Sequence: Synthetic peptide; note = XENP018753 vlCDR3
QQDYSSPRT

SEQ ID NO: 8600 - protein, 249 aa, synthetic construct
  source 1..249: note = Description of Artificial Sequence: Synthetic polypeptide; note = XENP018754 1G6_H1_L1.12_scFv(GKPGS)4
EVQLVESGGGLVKPGGSLRLSCAASGFTFSNYWMNWVRQAPGKGLEWVGEIRLKSNNYATHYAEPVKGRFTISRDDSKSTVYLQMNSLKTEDTAVYYCTRYYGNYGGYFDVWGAGTLVTVSSGKPGSGKPGSGKPGSGKPGSSIVMTQSPATLSVSPGERVTLSCRASQSVSNDVAWYQQKPGQSPRLLINYASHRYTGVPDRFTGSGYGTEFTLTISSLQSEDFAVYFCQQDYSSPRTFGGGTKVEIK

SEQ ID NO: 8601 - protein, 122 aa, synthetic construct; identical to SEQ ID NO: 6246
  source 1..122: note = Description of Artificial Sequence: Synthetic polypeptide; note = VH of XENP018754

SEQ ID NO: 8602 - protein, 107 aa, synthetic construct
  source 1..107: note = Description of Artificial Sequence: Synthetic polypeptide; note = VL of XENP018754
SIVMTQSPATLSVSPGERVTLSCRASQSVSNDVAWYQQKPGQSPRLLINYASHRYTGVPDRFTGSGYGTEFTLTISSLQSEDFAVYFCQQDYSSPRTFGGGTKVEIK

SEQ ID NO: 8603 - protein, 5 aa, synthetic construct
  source 1..5: note = Description of Artificial Sequence: Synthetic peptide; note = XENP018754 vhCDR1
NYWMN

SEQ ID NO: 8604 - protein, 19 aa, synthetic construct
  source 1..19: note = Description of Artificial Sequence: Synthetic peptide; note = XENP018754 vhCDR2
EIRLKSNNYATHYAEPVKG

SEQ ID NO: 8605 - protein, 11 aa, synthetic construct
  source 1..11: note = Description of Artificial Sequence: Synthetic peptide; note = XENP018754 vhCDR3
YYGNYGGYFDV

SEQ ID NO: 8606 - protein, 11 aa, synthetic construct
  source 1..11: note = Description of Artificial Sequence: Synthetic peptide; note = XENP018754 vlCDR1
RASQSVSNDVA

SEQ ID NO: 8607 - protein, 7 aa, synthetic construct
  source 1..7: note = Description of Artificial Sequence: Synthetic peptide; note = XENP018754 vlCDR2
YASHRYT

SEQ ID NO: 8608 - protein, 9 aa, synthetic construct
  source 1..9: note = Description of Artificial Sequence: Synthetic peptide; note = XENP018754 vlCDR3
QQDYSSPRT

SEQ ID NO: 8609 - protein, 249 aa, synthetic construct
  source 1..249: note = Description of Artificial Sequence: Synthetic polypeptide; note = XENP018755 1G6_H1_L1.13_scFv(GKPGS)4
EVQLVESGGGLVKPGGSLRLSCAASGFTFSNYWMNWVRQAPGKGLEWVGEIRLKSNNYATHYAEPVKGRFTISRDDSKSTVYLQMNSLKTEDTAVYYCTRYYGNYGGYFDVWGAGTLVTVSSGKPGSGKPGSGKPGSGKPGSSIVMTQSPATLSVSPGERATISCRASQSVSNDVAWYQQKPGQSPRLLINYASHRYTGVPDRFTGSGYGTEFTLTISSLQSEDFAVYFCQQDYSSPRTFGGGTKVEIK

SEQ ID NO: 8610 - protein, 122 aa, synthetic construct; identical to SEQ ID NO: 6246
  source 1..122: note = Description of Artificial Sequence: Synthetic polypeptide; note = VH of XENP018755

SEQ ID NO: 8611 - protein, 107 aa, synthetic construct
  source 1..107: note = Description of Artificial Sequence: Synthetic polypeptide; note = VL of XENP018755
SIVMTQSPATLSVSPGERATISCRASQSVSNDVAWYQQKPGQSPRLLINYASHRYTGVPDRFTGSGYGTEFTLTISSLQSEDFAVYFCQQDYSSPRTFGGGTKVEIK

SEQ ID NO: 8612 - protein, 5 aa, synthetic construct
  source 1..5: note = Description of Artificial Sequence: Synthetic peptide; note = XENP018755 vhCDR1
NYWMN

SEQ ID NO: 8613 - protein, 19 aa, synthetic construct
  source 1..19: note = Description of Artificial Sequence: Synthetic peptide; note = XENP018755 vhCDR2
EIRLKSNNYATHYAEPVKG

SEQ ID NO: 8614 - protein, 11 aa, synthetic construct
  source 1..11: note = Description of Artificial Sequence: Synthetic peptide; note = XENP018755 vhCDR3
YYGNYGGYFDV

SEQ ID NO: 8615 - protein, 11 aa, synthetic construct
  source 1..11: note = Description of Artificial Sequence: Synthetic peptide; note = XENP018755 vlCDR1
RASQSVSNDVA

SEQ ID NO: 8616 - protein, 7 aa, synthetic construct
  source 1..7: note = Description of Artificial Sequence: Synthetic peptide; note = XENP018755 vlCDR2
YASHRYT

SEQ ID NO: 8617 - protein, 9 aa, synthetic construct
  source 1..9: note = Description of Artificial Sequence: Synthetic peptide; note = XENP018755 vlCDR3
QQDYSSPRT

SEQ ID NO: 8618 - protein, 249 aa, synthetic construct
  source 1..249: note = Description of Artificial Sequence: Synthetic polypeptide; note = XENP018756 1G6_H1_L1.14_scFv(GKPGS)4
EVQLVESGGGLVKPGGSLRLSCAASGFTFSNYWMNWVRQAPGKGLEWVGEIRLKSNNYATHYAEPVKGRFTISRDDSKSTVYLQMNSLKTEDTAVYYCTRYYGNYGGYFDVWGAGTLVTVSSGKPGSGKPGSGKPGSGKPGSSIVMTQSPATLSVSPGERATLTCRASQSVSNDVAWYQQKPGQSPRLLINYASHRYTGVPDRFTGSGYGTEFTLTISSLQSEDFAVYFCQQDYSSPRTFGGGTKVEIK

SEQ ID NO: 8619 - protein, 122 aa, synthetic construct; identical to SEQ ID NO: 6246
  source 1..122: note = Description of Artificial Sequence: Synthetic polypeptide; note = VH of XENP018756

SEQ ID NO: 8620 - protein, 107 aa, synthetic construct
  source 1..107: note = Description of Artificial Sequence: Synthetic polypeptide; note = VL of XENP018756
SIVMTQSPATLSVSPGERATLTCRASQSVSNDVAWYQQKPGQSPRLLINYASHRYTGVPDRFTGSGYGTEFTLTISSLQSEDFAVYFCQQDYSSPRTFGGGTKVEIK

SEQ ID NO: 8621 - protein, 5 aa, synthetic construct
  source 1..5: note = Description of Artificial Sequence: Synthetic peptide; note = XENP018756 vhCDR1
NYWMN

SEQ ID NO: 8622 - protein, 19 aa, synthetic construct
  source 1..19: note = Description of Artificial Sequence: Synthetic peptide; note = XENP018756 vhCDR2
EIRLKSNNYATHYAEPVKG

SEQ ID NO: 8623 - protein, 11 aa, synthetic construct
  source 1..11: note = Description of Artificial Sequence: Synthetic peptide; note = XENP018756 vhCDR3
YYGNYGGYFDV

SEQ ID NO: 8624 - protein, 11 aa, synthetic construct
  source 1..11: note = Description of Artificial Sequence: Synthetic peptide; note = XENP018756 vlCDR1
RASQSVSNDVA

SEQ ID NO: 8625 - protein, 7 aa, synthetic construct
  source 1..7: note = Description of Artificial Sequence: Synthetic peptide; note = XENP018756 vlCDR2
YASHRYT

SEQ ID NO: 8626 - protein, 9 aa, synthetic construct
  source 1..9: note = Description of Artificial Sequence: Synthetic peptide; note = XENP018756 vlCDR3
QQDYSSPRT

SEQ ID NO: 8627 - protein, 249 aa, synthetic construct
  source 1..249: note = Description of Artificial Sequence: Synthetic polypeptide; note = XENP018757 1G6_H1_L1.15_scFv(GKPGS)4
EVQLVESGGGLVKPGGSLRLSCAASGFTFSNYWMNWVRQAPGKGLEWVGEIRLKSNNYATHYAEPVKGRFTISRDDSKSTVYLQMNSLKTEDTAVYYCTRYYGNYGGYFDVWGAGTLVTVSSGKPGSGKPGSGKPGSGKPGSSIVMTQSPATLSVSPGERATLSCKASQSVSNDVAWYQQKPGQSPRLLINYASHRYTGVPDRFTGSGYGTEFTLTISSLQSEDFAVYFCQQDYSSPRTFGGGTKVEIK

SEQ ID NO: 8628 - protein, 122 aa, synthetic construct; identical to SEQ ID NO: 6246
  source 1..122: note = Description of Artificial Sequence: Synthetic polypeptide; note = VH of XENP018757

SEQ ID NO: 8629 - protein, 107 aa, synthetic construct
  source 1..107: note = Description of Artificial Sequence: Synthetic polypeptide; note = VL of XENP018757
SIVMTQSPATLSVSPGERATLSCKASQSVSNDVAWYQQKPGQSPRLLINYASHRYTGVPDRFTGSGYGTEFTLTISSLQSEDFAVYFCQQDYSSPRTFGGGTKVEIK

SEQ ID NO: 8630 - protein, 5 aa, synthetic construct
  source 1..5: note = Description of Artificial Sequence: Synthetic peptide; note = XENP018757 vhCDR1
NYWMN

SEQ ID NO: 8631 - protein, 19 aa, synthetic construct
  source 1..19: note = Description of Artificial Sequence: Synthetic peptide; note = XENP018757 vhCDR2
EIRLKSNNYATHYAEPVKG

SEQ ID NO: 8632 - protein, 11 aa, synthetic construct
  source 1..11: note = Description of Artificial Sequence: Synthetic peptide; note = XENP018757 vhCDR3
YYGNYGGYFDV

SEQ ID NO: 8633 - protein, 11 aa, synthetic construct
  source 1..11: note = Description of Artificial Sequence: Synthetic peptide; note = XENP018757 vlCDR1
KASQSVSNDVA

SEQ ID NO: 8634 - protein, 7 aa, synthetic construct
  source 1..7: note = Description of Artificial Sequence: Synthetic peptide; note = XENP018757 vlCDR2
YASHRYT

SEQ ID NO: 8635 - protein, 9 aa, synthetic construct
  source 1..9: note = Description of Artificial Sequence: Synthetic peptide; note = XENP018757 vlCDR3
QQDYSSPRT

SEQ ID NO: 8636 - protein, 249 aa, synthetic construct
  source 1..249: note = Description of Artificial Sequence: Synthetic polypeptide; note = XENP018758 1G6_H1_L1.16_scFv(GKPGS)4
EVQLVESGGGLVKPGGSLRLSCAASGFTFSNYWMNWVRQAPGKGLEWVGEIRLKSNNYATHYAEPVKGRFTISRDDSKSTVYLQMNSLKTEDTAVYYCTRYYGNYGGYFDVWGAGTLVTVSSGKPGSGKPGSGKPGSGKPGSSIVMTQSPATLSVSPGERATLSCRASQDVSNDVAWYQQKPGQSPRLLINYASHRYTGVPDRFTGSGYGTEFTLTISSLQSEDFAVYFCQQDYSSPRTFGGGTKVEIK

SEQ ID NO: 8637 - protein, 122 aa, synthetic construct; identical to SEQ ID NO: 6246
  source 1..122: note = Description of Artificial Sequence: Synthetic polypeptide; note = VH of XENP018758

SEQ ID NO: 8638 - protein, 107 aa, synthetic construct
  source 1..107: note = Description of Artificial Sequence: Synthetic polypeptide; note = VL of XENP018758
SIVMTQSPATLSVSPGERATLSCRASQDVSNDVAWYQQKPGQSPRLLINYASHRYTGVPDRFTGSGYGTEFTLTISSLQSEDFAVYFCQQDYSSPRTFGGGTKVEIK

SEQ ID NO: 8639 - protein, 5 aa, synthetic construct
  source 1..5: note = Description of Artificial Sequence: Synthetic peptide; note = XENP018758 vhCDR1
NYWMN

SEQ ID NO: 8640 - protein, 19 aa, synthetic construct
  source 1..19: note = Description of Artificial Sequence: Synthetic peptide; note = XENP018758 vhCDR2
EIRLKSNNYATHYAEPVKG

SEQ ID NO: 8641 - protein, 11 aa, synthetic construct
  source 1..11: note = Description of Artificial Sequence: Synthetic peptide; note = XENP018758 vhCDR3
YYGNYGGYFDV

SEQ ID NO: 8642 - protein, 11 aa, synthetic construct
  source 1..11: note = Description of Artificial Sequence: Synthetic peptide; note = XENP018758 vlCDR1
RASQDVSNDVA

SEQ ID NO: 8643 - protein, 7 aa, synthetic construct
  source 1..7: note = Description of Artificial Sequence: Synthetic peptide; note = XENP018758 vlCDR2
YASHRYT

SEQ ID NO: 8644 - protein, 9 aa, synthetic construct
  source 1..9: note = Description of Artificial Sequence: Synthetic peptide; note = XENP018758 vlCDR3
QQDYSSPRT

SEQ ID NO: 8645 - protein, 249 aa, synthetic construct
  source 1..249: note = Description of Artificial Sequence: Synthetic polypeptide; note = XENP018759 1G6_H1_L1.17_scFv(GKPGS)4
EVQLVESGGGLVKPGGSLRLSCAASGFTFSNYWMNWVRQAPGKGLEWVGEIRLKSNNYATHYAEPVKGRFTISRDDSKSTVYLQMNSLKTEDTAVYYCTRYYGNYGGYFDVWGAGTLVTVSSGKPGSGKPGSGKPGSGKPGSSIVMTQSPATLSVSPGERATLSCRASQGVSNDVAWYQQKPGQSPRLLINYASHRYTGVPDRFTGSGYGTEFTLTISSLQSEDFAVYFCQQDYSSPRTFGGGTKVEIK

SEQ ID NO: 8646 - protein, 122 aa, synthetic construct; identical to SEQ ID NO: 6246
  source 1..122: note = Description of Artificial Sequence: Synthetic polypeptide; note = VH of XENP018759

SEQ ID NO: 8647 - protein, 107 aa, synthetic construct
  source 1..107: note = Description of Artificial Sequence: Synthetic polypeptide; note = VL of XENP018759
SIVMTQSPATLSVSPGERATLSCRASQGVSNDVAWYQQKPGQSPRLLINYASHRYTGVPDRFTGSGYGTEFTLTISSLQSEDFAVYFCQQDYSSPRTFGGGTKVEIK

SEQ ID NO: 8648 - protein, 5 aa, synthetic construct
  source 1..5: note = Description of Artificial Sequence: Synthetic peptide; note = XENP018759 vhCDR1
NYWMN

SEQ ID NO: 8649 - protein, 19 aa, synthetic construct
  source 1..19: note = Description of Artificial Sequence: Synthetic peptide; note = XENP018759 vhCDR2
EIRLKSNNYATHYAEPVKG

SEQ ID NO: 8650 - protein, 11 aa, synthetic construct
  source 1..11: note = Description of Artificial Sequence: Synthetic peptide; note = XENP018759 vhCDR3
YYGNYGGYFDV

SEQ ID NO: 8651 - protein, 11 aa, synthetic construct
  source 1..11: note = Description of Artificial Sequence: Synthetic peptide; note = XENP018759 vlCDR1
RASQGVSNDVA

SEQ ID NO: 8652 - protein, 7 aa, synthetic construct
  source 1..7: note = Description of Artificial Sequence: Synthetic peptide; note = XENP018759 vlCDR2
YASHRYT

SEQ ID NO: 8653 - protein, 9 aa, synthetic construct
  source 1..9: note = Description of Artificial Sequence: Synthetic peptide; note = XENP018759 vlCDR3
QQDYSSPRT

SEQ ID NO: 8654 - protein, 249 aa, synthetic construct
  source 1..249: note = Description of Artificial Sequence: Synthetic polypeptide; note = XENP018760 1G6_H1_L1.18_scFv(GKPGS)4
EVQLVESGGGLVKPGGSLRLSCAASGFTFSNYWMNWVRQAPGKGLEWVGEIRLKSNNYATHYAEPVKGRFTISRDDSKSTVYLQMNSLKTEDTAVYYCTRYYGNYGGYFDVWGAGTLVTVSSGKPGSGKPGSGKPGSGKPGSSIVMTQSPATLSVSPGERATLSCRASQSISNDVAWYQQKPGQSPRLLINYASHRYTGVPDRFTGSGYGTEFTLTISSLQSEDFAVYFCQQDYSSPRTFGGGTKVEIK

SEQ ID NO: 8655 - protein, 122 aa, synthetic construct; identical to SEQ ID NO: 6246
  source 1..122: note = Description of Artificial Sequence: Synthetic polypeptide; note = VH of XENP018760

SEQ ID NO: 8656 - protein, 107 aa, synthetic construct
  source 1..107: note = Description of Artificial Sequence: Synthetic polypeptide; note = VL of XENP018760
SIVMTQSPATLSVSPGERATLSCRASQSISNDVAWYQQKPGQSPRLLINYASHRYTGVPDRFTGSGYGTEFTLTISSLQSEDFAVYFCQQDYSSPRTFGGGTKVEIK

SEQ ID NO: 8657 - protein, 5 aa, synthetic construct
  source 1..5: note = Description of Artificial Sequence: Synthetic peptide; note = XENP018760 vhCDR1
NYWMN

SEQ ID NO: 8658 - protein, 19 aa, synthetic construct
  source 1..19: note = Description of Artificial Sequence: Synthetic peptide; note = XENP018760 vhCDR2
EIRLKSNNYATHYAEPVKG

SEQ ID NO: 8659 - protein, 11 aa, synthetic construct
  source 1..11: note = Description of Artificial Sequence: Synthetic peptide; note = XENP018760 vhCDR3
YYGNYGGYFDV

SEQ ID NO: 8660 - protein, 11 aa, synthetic construct
  source 1..11: note = Description of Artificial Sequence: Synthetic peptide; note = XENP018760 vlCDR1
RASQSISNDVA

SEQ ID NO: 8661 - protein, 7 aa, synthetic construct
  source 1..7: note = Description of Artificial Sequence: Synthetic peptide; note = XENP018760 vlCDR2
YASHRYT

SEQ ID NO: 8662 - protein, 9 aa, synthetic construct
  source 1..9: note = Description of Artificial Sequence: Synthetic peptide; note = XENP018760 vlCDR3
QQDYSSPRT

SEQ ID NO: 8663 - protein, 249 aa, synthetic construct
  source 1..249: note = Description of Artificial Sequence: Synthetic polypeptide; note = XENP018761 1G6_H1_L1.19_scFv(GKPGS)4
EVQLVESGGGLVKPGGSLRLSCAASGFTFSNYWMNWVRQAPGKGLEWVGEIRLKSNNYATHYAEPVKGRFTISRDDSKSTVYLQMNSLKTEDTAVYYCTRYYGNYGGYFDVWGAGTLVTVSSGKPGSGKPGSGKPGSGKPGSSIVMTQSPATLSVSPGERATLSCRASQSLSNDVAWYQQKPGQSPRLLINYASHRYTGVPDRFTGSGYGTEFTLTISSLQSEDFAVYFCQQDYSSPRTFGGGTKVEIK

SEQ ID NO: 8664 - protein, 122 aa, synthetic construct; identical to SEQ ID NO: 6246
  source 1..122: note = Description of Artificial Sequence: Synthetic polypeptide; note = VH of XENP018761

SEQ ID NO: 8665 - protein, 107 aa, synthetic construct
  source 1..107: note = Description of Artificial Sequence: Synthetic polypeptide; note = VL of XENP018761
SIVMTQSPATLSVSPGERATLSCRASQSLSNDVAWYQQKPGQSPRLLINYASHRYTGVPDRFTGSGYGTEFTLTISSLQSEDFAVYFCQQDYSSPRTFGGGTKVEIK

SEQ ID NO: 8666 - protein, 5 aa, synthetic construct
  source 1..5: note = Description of Artificial Sequence: Synthetic peptide; note = XENP018761 vhCDR1
NYWMN

SEQ ID NO: 8667 - protein, 19 aa, synthetic construct
  source 1..19: note = Description of Artificial Sequence: Synthetic peptide; note = XENP018761 vhCDR2
EIRLKSNNYATHYAEPVKG

SEQ ID NO: 8668 - protein, 11 aa, synthetic construct
  source 1..11: note = Description of Artificial Sequence: Synthetic peptide; note = XENP018761 vhCDR3
YYGNYGGYFDV

SEQ ID NO: 8669 - protein, 11 aa, synthetic construct
  source 1..11: note = Description of Artificial Sequence: Synthetic peptide; note = XENP018761 vlCDR1
RASQSLSNDVA

SEQ ID NO: 8670 - protein, 7 aa, synthetic construct
  source 1..7: note = Description of Artificial Sequence: Synthetic peptide; note = XENP018761 vlCDR2
YASHRYT

SEQ ID NO: 8671 - protein, 9 aa, synthetic construct
  source 1..9: note = Description of Artificial Sequence: Synthetic peptide; note = XENP018761 vlCDR3
QQDYSSPRT

SEQ ID NO: 8672 - protein, 249 aa, synthetic construct
  source 1..249: note = Description of Artificial Sequence: Synthetic polypeptide; note = XENP018762 1G6_H1_L1.20_scFv(GKPGS)4
EVQLVESGGGLVKPGGSLRLSCAASGFTFSNYWMNWVRQAPGKGLEWVGEIRLKSNNYATHYAEPVKGRFTISRDDSKSTVYLQMNSLKTEDTAVYYCTRYYGNYGGYFDVWGAGTLVTVSSGKPGSGKPGSGKPGSGKPGSSIVMTQSPATLSVSPGERATLSCRASQSVTNDVAWYQQKPGQSPRLLINYASHRYTGVPDRFTGSGYGTEFTLTISSLQSEDFAVYFCQQDYSSPRTFGGGTKVEIK

SEQ ID NO: 8673 - protein, 122 aa, synthetic construct; identical to SEQ ID NO: 6246
  source 1..122: note = Description of Artificial Sequence: Synthetic polypeptide; note = VH of XENP018762

SEQ ID NO: 8674 - protein, 107 aa, synthetic construct
  source 1..107: note = Description of Artificial Sequence: Synthetic polypeptide; note = VL of XENP018762
SIVMTQSPATLSVSPGERATLSCRASQSVTNDVAWYQQKPGQSPRLLINYASHRYTGVPDRFTGSGYGTEFTLTISSLQSEDFAVYFCQQDYSSPRTFGGGTKVEIK

SEQ ID NO: 8675 - protein, 5 aa, synthetic construct
  source 1..5: note = Description of Artificial Sequence: Synthetic peptide; note = XENP018762 vhCDR1
NYWMN

SEQ ID NO: 8676 - protein, 19 aa, synthetic construct
  source 1..19: note = Description of Artificial Sequence: Synthetic peptide; note = XENP018762 vhCDR2
EIRLKSNNYATHYAEPVKG

SEQ ID NO: 8677 - protein, 11 aa, synthetic construct
  source 1..11: note = Description of Artificial Sequence: Synthetic peptide; note = XENP018762 vhCDR3
YYGNYGGYFDV

SEQ ID NO: 8678 - protein, 11 aa, synthetic construct
  source 1..11: note = Description of Artificial Sequence: Synthetic peptide; note = XENP018762 vlCDR1
RASQSVTNDVA

SEQ ID NO: 8679 - protein, 7 aa, synthetic construct
  source 1..7: note = Description of Artificial Sequence: Synthetic peptide; note = XENP018762 vlCDR2
YASHRYT

SEQ ID NO: 8680 - protein, 9 aa, synthetic construct
  source 1..9: note = Description of Artificial Sequence: Synthetic peptide; note = XENP018762 vlCDR3
QQDYSSPRT

SEQ ID NO: 8681 - protein, 249 aa, synthetic construct
  source 1..249: note = Description of Artificial Sequence: Synthetic polypeptide; note = XENP018763 1G6_H1_L1.21_scFv(GKPGS)4
EVQLVESGGGLVKPGGSLRLSCAASGFTFSNYWMNWVRQAPGKGLEWVGEIRLKSNNYATHYAEPVKGRFTISRDDSKSTVYLQMNSLKTEDTAVYYCTRYYGNYGGYFDVWGAGTLVTVSSGKPGSGKPGSGKPGSGKPGSSIVMTQSPATLSVSPGERATLSCRASQSVANDVAWYQQKPGQSPRLLINYASHRYTGVPDRFTGSGYGTEFTLTISSLQSEDFAVYFCQQDYSSPRTFGGGTKVEIK

SEQ ID NO: 8682 - protein, 122 aa, synthetic construct; identical to SEQ ID NO: 6246
  source 1..122: note = Description of Artificial Sequence: Synthetic polypeptide; note = VH of XENP018763

SEQ ID NO: 8683 - protein, 107 aa, synthetic construct
  source 1..107: note = Description of Artificial Sequence: Synthetic polypeptide; note = VL of XENP018763
SIVMTQSPATLSVSPGERATLSCRASQSVANDVAWYQQKPGQSPRLLINYASHRYTGVPDRFTGSGYGTEFTLTISSLQSEDFAVYFCQQDYSSPRTFGGGTKVEIK

SEQ ID NO: 8684 - protein, 5 aa, synthetic construct
  source 1..5: note = Description of Artificial Sequence: Synthetic peptide; note = XENP018763 vhCDR1
NYWMN

SEQ ID NO: 8685 - protein, 19 aa, synthetic construct
  source 1..19: note = Description of Artificial Sequence: Synthetic peptide; note = XENP018763 vhCDR2
EIRLKSNNYATHYAEPVKG

SEQ ID NO: 8686 - protein, 11 aa, synthetic construct
  source 1..11: note = Description of Artificial Sequence: Synthetic peptide; note = XENP018763 vhCDR3
YYGNYGGYFDV

SEQ ID NO: 8687 - protein, 11 aa, synthetic construct
  source 1..11: note = Description of Artificial Sequence: Synthetic peptide; note = XENP018763 vlCDR1
RASQSVANDVA

SEQ ID NO: 8688 - protein, 7 aa, synthetic construct
  source 1..7: note = Description of Artificial Sequence: Synthetic peptide; note = XENP018763 vlCDR2
YASHRYT

SEQ ID NO: 8689 - protein, 9 aa, synthetic construct
  source 1..9: note = Description of Artificial Sequence: Synthetic peptide; note = XENP018763 vlCDR3
QQDYSSPRT

SEQ ID NO: 8690 - protein, 249 aa, synthetic construct
  source 1..249: note = Description of Artificial Sequence: Synthetic polypeptide; note = XENP018764 1G6_H1_L1.22_scFv(GKPGS)4
EVQLVESGGGLVKPGGSLRLSCAASGFTFSNYWMNWVRQAPGKGLEWVGEIRLKSNNYATHYAEPVKGRFTISRDDSKSTVYLQMNSLKTEDTAVYYCTRYYGNYGGYFDVWGAGTLVTVSSGKPGSGKPGSGKPGSGKPGSSIVMTQSPATLSVSPGERATLSCRASQSVQNDVAWYQQKPGQSPRLLINYASHRYTGVPDRFTGSGYGTEFTLTISSLQSEDFAVYFCQQDYSSPRTFGGGTKVEIK

SEQ ID NO: 8691 - protein, 122 aa, synthetic construct; identical to SEQ ID NO: 6246
  source 1..122: note = Description of Artificial Sequence: Synthetic polypeptide; note = VH of XENP018764

SEQ ID NO: 8692 - protein, 107 aa, synthetic construct
  source 1..107: note = Description of Artificial Sequence: Synthetic polypeptide; note = VL of XENP018764
SIVMTQSPATLSVSPGERATLSCRASQSVQNDVAWYQQKPGQSPRLLINYASHRYTGVPDRFTGSGYGTEFTLTISSLQSEDFAVYFCQQDYSSPRTFGGGTKVEIK

SEQ ID NO: 8693 - protein, 5 aa, synthetic construct
  source 1..5: note = Description of Artificial Sequence: Synthetic peptide; note = XENP018764 vhCDR1
NYWMN

SEQ ID NO: 8694 - protein, 19 aa, synthetic construct
  source 1..19: note = Description of Artificial Sequence: Synthetic peptide; note = XENP018764 vhCDR2
EIRLKSNNYATHYAEPVKG

SEQ ID NO: 8695 - protein, 11 aa, synthetic construct
  source 1..11: note = Description of Artificial Sequence: Synthetic peptide; note = XENP018764 vhCDR3
YYGNYGGYFDV

SEQ ID NO: 8696 - protein, 11 aa, synthetic construct
  source 1..11: note = Description of Artificial Sequence: Synthetic peptide; note = XENP018764 vlCDR1
RASQSVQNDVA

SEQ ID NO: 8697 - protein, 7 aa, synthetic construct
  source 1..7: note = Description of Artificial Sequence: Synthetic peptide; note = XENP018764 vlCDR2
YASHRYT

SEQ ID NO: 8698 - protein, 9 aa, synthetic construct
  source 1..9: note = Description of Artificial Sequence: Synthetic peptide; note = XENP018764 vlCDR3
QQDYSSPRT

SEQ ID NO: 8699 - protein, 249 aa, synthetic construct
  source 1..249: note = Description of Artificial Sequence: Synthetic polypeptide; note = XENP018765 1G6_H1_L1.23_scFv(GKPGS)4
EVQLVESGGGLVKPGGSLRLSCAASGFTFSNYWMNWVRQAPGKGLEWVGEIRLKSNNYATHYAEPVKGRFTISRDDSKSTVYLQMNSLKTEDTAVYYCTRYYGNYGGYFDVWGAGTLVTVSSGKPGSGKPGSGKPGSGKPGSSIVMTQSPATLSVSPGERATLSCRASQSVGNDVAWYQQKPGQSPRLLINYASHRYTGVPDRFTGSGYGTEFTLTISSLQSEDFAVYFCQQDYSSPRTFGGGTKVEIK

SEQ ID NO: 8700 - protein, 122 aa, synthetic construct; identical to SEQ ID NO: 6246
  source 1..122: note = Description of Artificial Sequence: Synthetic polypeptide; note = VH of XENP018765

SEQ ID NO: 8701 - protein, 107 aa, synthetic construct
  source 1..107: note = Description of Artificial Sequence: Synthetic polypeptide; note = VL of XENP018765
SIVMTQSPATLSVSPGERATLSCRASQSVGNDVAWYQQKPGQSPRLLINYASHRYTGVPDRFTGSGYGTEFTLTISSLQSEDFAVYFCQQDYSSPRTFGGGTKVEIK

SEQ ID NO: 8702 - protein, 5 aa, synthetic construct
  source 1..5: note = Description of Artificial Sequence: Synthetic peptide; note = XENP018765 vhCDR1
NYWMN

SEQ ID NO: 8703 - protein, 19 aa, synthetic construct
  source 1..19: note = Description of Artificial Sequence: Synthetic peptide; note = XENP018765 vhCDR2
EIRLKSNNYATHYAEPVKG

SEQ ID NO: 8704 - protein, 11 aa, synthetic construct
  source 1..11: note = Description of Artificial Sequence: Synthetic peptide; note = XENP018765 vhCDR3
YYGNYGGYFDV

SEQ ID NO: 8705 - protein, 11 aa, synthetic construct
  source 1..11: note = Description of Artificial Sequence: Synthetic peptide; note = XENP018765 vlCDR1
RASQSVGNDVA

SEQ ID NO: 8706 - protein, 7 aa, synthetic construct
  source 1..7: note = Description of Artificial Sequence: Synthetic peptide; note = XENP018765 vlCDR2
YASHRYT

SEQ ID NO: 8707 - protein, 9 aa, synthetic construct
  source 1..9: note = Description of Artificial Sequence: Synthetic peptide; note = XENP018765 vlCDR3
QQDYSSPRT

SEQ ID NO: 8708 - protein, 249 aa, synthetic construct
  source 1..249: note = Description of Artificial Sequence: Synthetic polypeptide; note = XENP018766 1G6_H1_L1.24_scFv(GKPGS)4
EVQLVESGGGLVKPGGSLRLSCAASGFTFSNYWMNWVRQAPGKGLEWVGEIRLKSNNYATHYAEPVKGRFTISRDDSKSTVYLQMNSLKTEDTAVYYCTRYYGNYGGYFDVWGAGTLVTVSSGKPGSGKPGSGKPGSGKPGSSIVMTQSPATLSVSPGERATLSCRASQSVVNDVAWYQQKPGQSPRLLINYASHRYTGVPDRFTGSGYGTEFTLTISSLQSEDFAVYFCQQDYSSPRTFGGGTKVEIK

SEQ ID NO: 8709 - protein, 122 aa, synthetic construct; identical to SEQ ID NO: 6246
  source 1..122: note = Description of Artificial Sequence: Synthetic polypeptide; note = VH of XENP018766

SEQ ID NO: 8710 - protein, 107 aa, synthetic construct
  source 1..107: note = Description of Artificial Sequence: Synthetic polypeptide; note = VL of XENP018766
SIVMTQSPATLSVSPGERATLSCRASQSVVNDVAWYQQKPGQSPRLLINYASHRYTGVPDRFTGSGYGTEFTLTISSLQSEDFAVYFCQQDYSSPRTFGGGTKVEIK

SEQ ID NO: 8711 - protein, 5 aa, synthetic construct
  source 1..5: note = Description of Artificial Sequence: Synthetic peptide; note = XENP018766 vhCDR1
NYWMN

SEQ ID NO: 8712 - protein, 19 aa, synthetic construct
  source 1..19: note = Description of Artificial Sequence: Synthetic peptide; note = XENP018766 vhCDR2
EIRLKSNNYATHYAEPVKG

SEQ ID NO: 8713 - protein, 11 aa, synthetic construct
  source 1..11: note = Description of Artificial Sequence: Synthetic peptide; note = XENP018766 vhCDR3
YYGNYGGYFDV

SEQ ID NO: 8714 - protein, 11 aa, synthetic construct
  source 1..11: note = Description of Artificial Sequence: Synthetic peptide; note = XENP018766 vlCDR1
RASQSVVNDVA

SEQ ID NO: 8715 - protein, 7 aa, synthetic construct
  source 1..7: note = Description of Artificial Sequence: Synthetic peptide; note = XENP018766 vlCDR2
YASHRYT

SEQ ID NO: 8716 - protein, 9 aa, synthetic construct
  source 1..9: note = Description of Artificial Sequence: Synthetic peptide; note = XENP018766 vlCDR3
QQDYSSPRT

SEQ ID NO: 8717 - protein, 249 aa, synthetic construct
  source 1..249: note = Description of Artificial Sequence: Synthetic polypeptide; note = XENP018767 1G6_H1_L1.25_scFv(GKPGS)4
EVQLVESGGGLVKPGGSLRLSCAASGFTFSNYWMNWVRQAPGKGLEWVGEIRLKSNNYATHYAEPVKGRFTISRDDSKSTVYLQMNSLKTEDTAVYYCTRYYGNYGGYFDVWGAGTLVTVSSGKPGSGKPGSGKPGSGKPGSSIVMTQSPATLSVSPGERATLSCRASQSVHNDVAWYQQKPGQSPRLLINYASHRYTGVPDRFTGSGYGTEFTLTISSLQSEDFAVYFCQQDYSSPRTFGGGTKVEIK

SEQ ID NO: 8718 - protein, 122 aa, synthetic construct; identical to SEQ ID NO: 6246
  source 1..122: note = Description of Artificial Sequence: Synthetic polypeptide; note = VH of XENP018767

SEQ ID NO: 8719 - protein, 107 aa, synthetic construct
  source 1..107: note = Description of Artificial Sequence: Synthetic polypeptide; note = VL of XENP018767
SIVMTQSPATLSVSPGERATLSCRASQSVHNDVAWYQQKPGQSPRLLINYASHRYTGVPDRFTGSGYGTEFTLTISSLQSEDFAVYFCQQDYSSPRTFGGGTKVEIK

SEQ ID NO: 8720 - protein, 5 aa, synthetic construct
  source 1..5: note = Description of Artificial Sequence: Synthetic peptide; note = XENP018767 vhCDR1
NYWMN

SEQ ID NO: 8721 - protein, 19 aa, synthetic construct
  source 1..19: note = Description of Artificial Sequence: Synthetic peptide; note = XENP018767 vhCDR2
EIRLKSNNYATHYAEPVKG

SEQ ID NO: 8722 - protein, 11 aa, synthetic construct
  source 1..11: note = Description of Artificial Sequence: Synthetic peptide; note = XENP018767 vhCDR3
YYGNYGGYFDV

SEQ ID NO: 8723 - protein, 11 aa, synthetic construct
  source 1..11: note = Description of Artificial Sequence: Synthetic peptide; note = XENP018767 vlCDR1
RASQSVHNDVA

SEQ ID NO: 8724 - protein, 7 aa, synthetic construct
  source 1..7: note = Description of Artificial Sequence: Synthetic peptide; note = XENP018767 vlCDR2
YASHRYT

SEQ ID NO: 8725 - protein, 9 aa, synthetic construct
  source 1..9: note = Description of Artificial Sequence: Synthetic peptide; note = XENP018767 vlCDR3
QQDYSSPRT

SEQ ID NO: 8726 - protein, 249 aa, synthetic construct
  source 1..249: note = Description of Artificial Sequence: Synthetic polypeptide; note = XENP018768 1G6_H1_L1.26_scFv(GKPGS)4
EVQLVESGGGLVKPGGSLRLSCAASGFTFSNYWMNWVRQAPGKGLEWVGEIRLKSNNYATHYAEPVKGRFTISRDDSKSTVYLQMNSLKTEDTAVYYCTRYYGNYGGYFDVWGAGTLVTVSSGKPGSGKPGSGKPGSGKPGSSIVMTQSPATLSVSPGERATLSCRASQSVDNDVAWYQQKPGQSPRLLINYASHRYTGVPDRFTGSGYGTEFTLTISSLQSEDFAVYFCQQDYSSPRTFGGGTKVEIK

SEQ ID NO: 8727 - protein, 122 aa, synthetic construct; identical to SEQ ID NO: 6246
  source 1..122: note = Description of Artificial Sequence: Synthetic polypeptide; note = VH of XENP018768

SEQ ID NO: 8728 - protein, 107 aa, synthetic construct
  source 1..107: note = Description of Artificial Sequence: Synthetic polypeptide; note = VL of XENP018768
SIVMTQSPATLSVSPGERATLSCRASQSVDNDVAWYQQKPGQSPRLLINYASHRYTGVPDRFTGSGYGTEFTLTISSLQSEDFAVYFCQQDYSSPRTFGGGTKVEIK

SEQ ID NO: 8729 - protein, 5 aa, synthetic construct
  source 1..5: note = Description of Artificial Sequence: Synthetic peptide; note = XENP018768 vhCDR1
NYWMN

SEQ ID NO: 8730 - protein, 19 aa, synthetic construct
  source 1..19: note = Description of Artificial Sequence: Synthetic peptide; note = XENP018768 vhCDR2
EIRLKSNNYATHYAEPVKG

SEQ ID NO: 8731 - protein, 11 aa, synthetic construct
  source 1..11: note = Description of Artificial Sequence: Synthetic peptide; note = XENP018768 vhCDR3
YYGNYGGYFDV

SEQ ID NO: 8732 - protein, 11 aa, synthetic construct
  source 1..11: note = Description of Artificial Sequence: Synthetic peptide; note = XENP018768 vlCDR1
RASQSVDNDVA

SEQ ID NO: 8733 - protein, 7 aa, synthetic construct
  source 1..7: note = Description of Artificial Sequence: Synthetic peptide; note = XENP018768 vlCDR2
YASHRYT

SEQ ID NO: 8734 - protein, 9 aa, synthetic construct
  source 1..9: note = Description of Artificial Sequence: Synthetic peptide; note = XENP018768 vlCDR3
QQDYSSPRT

SEQ ID NO: 8735 - protein, 249 aa, synthetic construct
  source 1..249: note = Description of Artificial Sequence: Synthetic polypeptide; note = XENP018769 1G6_H1_L1.27_scFv(GKPGS)4
EVQLVESGGGLVKPGGSLRLSCAASGFTFSNYWMNWVRQAPGKGLEWVGEIRLKSNNYATHYAEPVKGRFTISRDDSKSTVYLQMNSLKTEDTAVYYCTRYYGNYGGYFDVWGAGTLVTVSSGKPGSGKPGSGKPGSGKPGSSIVMTQSPATLSVSPGERATLSCRASQSVKNDVAWYQQKPGQSPRLLINYASHRYTGVPDRFTGSGYGTEFTLTISSLQSEDFAVYFCQQDYSSPRTFGGGTKVEIK

SEQ ID NO: 8736 - protein, 122 aa, synthetic construct; identical to SEQ ID NO: 6246
  source 1..122: note = Description of Artificial Sequence: Synthetic polypeptide; note = VH of XENP018769

SEQ ID NO: 8737 - protein, 107 aa, synthetic construct
  source 1..107: note = Description of Artificial Sequence: Synthetic polypeptide; note = VL of XENP018769
SIVMTQSPATLSVSPGERATLSCRASQSVKNDVAWYQQKPGQSPRLLINYASHRYTGVPDRFTGSGYGTEFTLTISSLQSEDFAVYFCQQDYSSPRTFGGGTKVEIK

SEQ ID NO: 8738 - protein, 5 aa, synthetic construct
  source 1..5: note = Description of Artificial Sequence: Synthetic peptide; note = XENP018769 vhCDR1
NYWMN

SEQ ID NO: 8739 - protein, 19 aa, synthetic construct
  source 1..19: note = Description of Artificial Sequence: Synthetic peptide; note = XENP018769 vhCDR2
EIRLKSNNYATHYAEPVKG

SEQ ID NO: 8740 - protein, 11 aa, synthetic construct
  source 1..11: note = Description of Artificial Sequence: Synthetic peptide; note = XENP018769 vhCDR3
YYGNYGGYFDV

SEQ ID NO: 8741 - protein, 11 aa, synthetic construct
  source 1..11: note = Description of Artificial Sequence: Synthetic peptide; note = XENP018769 vlCDR1
RASQSVKNDVA

SEQ ID NO: 8742 - protein, 7 aa, synthetic construct
  source 1..7: note = Description of Artificial Sequence: Synthetic peptide; note = XENP018769 vlCDR2
YASHRYT

SEQ ID NO: 8743 - protein, 9 aa, synthetic construct
  source 1..9: note = Description of Artificial Sequence: Synthetic peptide; note = XENP018769 vlCDR3
QQDYSSPRT

SEQ ID NO: 8744 - protein, 249 aa, synthetic construct
  source 1..249: note = Description of Artificial Sequence: Synthetic polypeptide; note = XENP018770 1G6_H1_L1.28_scFv(GKPGS)4
EVQLVESGGGLVKPGGSLRLSCAASGFTFSNYWMNWVRQAPGKGLEWVGEIRLKSNNYATHYAEPVKGRFTISRDDSKSTVYLQMNSLKTEDTAVYYCTRYYGNYGGYFDVWGAGTLVTVSSGKPGSGKPGSGKPGSGKPGSSIVMTQSPATLSVSPGERATLSCRASQSVYNDVAWYQQKPGQSPRLLINYASHRYTGVPDRFTGSGYGTEFTLTISSLQSEDFAVYFCQQDYSSPRTFGGGTKVEIK

SEQ ID NO: 8745 - protein, 122 aa, synthetic construct; identical to SEQ ID NO: 6246
  source 1..122: note = Description of Artificial Sequence: Synthetic polypeptide; note = VH of XENP018770

SEQ ID NO: 8746 - protein, 107 aa, synthetic construct
  source 1..107: note = Description of Artificial Sequence: Synthetic polypeptide; note = VL of XENP018770
SIVMTQSPATLSVSPGERATLSCRASQSVYNDVAWYQQKPGQSPRLLINYASHRYTGVPDRFTGSGYGTEFTLTISSLQSEDFAVYFCQQDYSSPRTFGGGTKVEIK

SEQ ID NO: 8747 - protein, 5 aa, synthetic construct
  source 1..5: note = Description of Artificial Sequence: Synthetic peptide; note = XENP018770 vhCDR1
NYWMN

SEQ ID NO: 8748 - protein, 19 aa, synthetic construct
  source 1..19: note = Description of Artificial Sequence: Synthetic peptide; note = XENP018770 vhCDR2
EIRLKSNNYATHYAEPVKG

SEQ ID NO: 8749 - protein, 11 aa, synthetic construct
  source 1..11: note = Description of Artificial Sequence: Synthetic peptide; note = XENP018770 vhCDR3
YYGNYGGYFDV

SEQ ID NO: 8750 - protein, 11 aa, synthetic construct
  source 1..11: note = Description of Artificial Sequence: Synthetic peptide; note = XENP018770 vlCDR1
RASQSVYNDVA

SEQ ID NO: 8751 - protein, 7 aa, synthetic construct
  source 1..7: note = Description of Artificial Sequence: Synthetic peptide; note = XENP018770 vlCDR2
YASHRYT

SEQ ID NO: 8752 - protein, 9 aa, synthetic construct
  source 1..9: note = Description of Artificial Sequence: Synthetic peptide; note = XENP018770 vlCDR3
QQDYSSPRT

SEQ ID NO: 8753 - protein, 249 aa, synthetic construct
  source 1..249: note = Description of Artificial Sequence: Synthetic polypeptide; note = XENP018771 1G6_H1_L1.29_scFv(GKPGS)4
EVQLVESGGGLVKPGGSLRLSCAASGFTFSNYWMNWVRQAPGKGLEWVGEIRLKSNNYATHYAEPVKGRFTISRDDSKSTVYLQMNSLKTEDTAVYYCTRYYGNYGGYFDVWGAGTLVTVSSGKPGSGKPGSGKPGSGKPGSSIVMTQSPATLSVSPGERATLSCRASQSVSDDVAWYQQKPGQSPRLLINYASHRYTGVPDRFTGSGYGTEFTLTISSLQSEDFAVYFCQQDYSSPRTFGGGTKVEIK

SEQ ID NO: 8754 - protein, 122 aa, synthetic construct; identical to SEQ ID NO: 6246
  source 1..122: note = Description of Artificial Sequence: Synthetic polypeptide; note = VH of XENP018771

SEQ ID NO: 8755 - protein, 107 aa, synthetic construct
  source 1..107: note = Description of Artificial Sequence: Synthetic polypeptide; note = VL of XENP018771
SIVMTQSPATLSVSPGERATLSCRASQSVSDDVAWYQQKPGQSPRLLINYASHRYTGVPDRFTGSGYGTEFTLTISSLQSEDFAVYFCQQDYSSPRTFGGGTKVEIK

SEQ ID NO: 8756 - protein, 5 aa, synthetic construct
  source 1..5: note = Description of Artificial Sequence: Synthetic peptide; note = XENP018771 vhCDR1
NYWMN

SEQ ID NO: 8757 - protein, 19 aa, synthetic construct
  source 1..19: note = Description of Artificial Sequence: Synthetic peptide; note = XENP018771 vhCDR2
EIRLKSNNYATHYAEPVKG

SEQ ID NO: 8758 - protein, 11 aa, synthetic construct
  source 1..11: note = Description of Artificial Sequence: Synthetic peptide; note = XENP018771 vhCDR3
YYGNYGGYFDV

SEQ ID NO: 8759 - protein, 11 aa, synthetic construct
  source 1..11: note = Description of Artificial Sequence: Synthetic peptide; note = XENP018771 vlCDR1
RASQSVSDDVA

SEQ ID NO: 8760 - protein, 7 aa, synthetic construct
  source 1..7: note = Description of Artificial Sequence: Synthetic peptide; note = XENP018771 vlCDR2
YASHRYT

SEQ ID NO: 8761 - protein, 9 aa, synthetic construct
  source 1..9: note = Description of Artificial Sequence: Synthetic peptide; note = XENP018771 vlCDR3
QQDYSSPRT

SEQ ID NO: 8762 - protein, 249 aa, synthetic construct
  source 1..249: note = Description of Artificial Sequence: Synthetic polypeptide; note = XENP018772 1G6_H1_L1.30_scFv(GKPGS)4
EVQLVESGGGLVKPGGSLRLSCAASGFTFSNYWMNWVRQAPGKGLEWVGEIRLKSNNYATHYAEPVKGRFTISRDDSKSTVYLQMNSLKTEDTAVYYCTRYYGNYGGYFDVWGAGTLVTVSSGKPGSGKPGSGKPGSGKPGSSIVMTQSPATLSVSPGERATLSCRASQSVSHDVAWYQQKPGQSPRLLINYASHRYTGVPDRFTGSGYGTEFTLTISSLQSEDFAVYFCQQDYSSPRTFGGGTKVEIK

SEQ ID NO: 8763 - protein, 122 aa, synthetic construct; identical to SEQ ID NO: 6246
  source 1..122: note = Description of Artificial Sequence: Synthetic polypeptide; note = VH of XENP018772

SEQ ID NO: 8764 - protein, 107 aa, synthetic construct
  source 1..107: note = Description of Artificial Sequence: Synthetic polypeptide; note = VL of XENP018772
SIVMTQSPATLSVSPGERATLSCRASQSVSHDVAWYQQKPGQSPRLLINYASHRYTGVPDRFTGSGYGTEFTLTISSLQSEDFAVYFCQQDYSSPRTFGGGTKVEIK

SEQ ID NO: 8765 - protein, 5 aa, synthetic construct
  source 1..5: note = Description of Artificial Sequence: Synthetic peptide; note = XENP018772 vhCDR1
NYWMN

SEQ ID NO: 8766 - protein, 19 aa, synthetic construct
  source 1..19: note = Description of Artificial Sequence: Synthetic peptide; note = XENP018772 vhCDR2
EIRLKSNNYATHYAEPVKG

SEQ ID NO: 8767 - protein, 11 aa, synthetic construct
  source 1..11: note = Description of Artificial Sequence: Synthetic peptide; note = XENP018772 vhCDR3
YYGNYGGYFDV

SEQ ID NO: 8768 - protein, 11 aa, synthetic construct
  source 1..11: note = Description of Artificial Sequence: Synthetic peptide; note = XENP018772 vlCDR1
RASQSVSHDVA

SEQ ID NO: 8769 - protein, 7 aa, synthetic construct
  source 1..7: note = Description of Artificial Sequence: Synthetic peptide; note = XENP018772 vlCDR2
YASHRYT

SEQ ID NO: 8770 - protein, 9 aa, synthetic construct
  source 1..9: note = Description of Artificial Sequence: Synthetic peptide; note = XENP018772 vlCDR3
QQDYSSPRT

SEQ ID NO: 8771 - protein, 249 aa, synthetic construct
  source 1..249: note = Description of Artificial Sequence: Synthetic polypeptide; note = XENP018773 1G6_H1_L1.31_scFv(GKPGS)4
EVQLVESGGGLVKPGGSLRLSCAASGFTFSNYWMNWVRQAPGKGLEWVGEIRLKSNNYATHYAEPVKGRFTISRDDSKSTVYLQMNSLKTEDTAVYYCTRYYGNYGGYFDVWGAGTLVTVSSGKPGSGKPGSGKPGSGKPGSSIVMTQSPATLSVSPGERATLSCRASQSVSEDVAWYQQKPGQSPRLLINYASHRYTGVPDRFTGSGYGTEFTLTISSLQSEDFAVYFCQQDYSSPRTFGGGTKVEIK

SEQ ID NO: 8772 - protein, 122 aa, synthetic construct; identical to SEQ ID NO: 6246
  source 1..122: note = Description of Artificial Sequence: Synthetic polypeptide; note = VH of XENP018773

SEQ ID NO: 8773 - protein, 107 aa, synthetic construct
  source 1..107: note = Description of Artificial Sequence: Synthetic polypeptide; note = VL of XENP018773
SIVMTQSPATLSVSPGERATLSCRASQSVSEDVAWYQQKPGQSPRLLINYASHRYTGVPDRFTGSGYGTEFTLTISSLQSEDFAVYFCQQDYSSPRTFGGGTKVEIK

SEQ ID NO: 8774 - protein, 5 aa, synthetic construct
  source 1..5: note = Description of Artificial Sequence: Synthetic peptide; note = XENP018773 vhCDR1
NYWMN

SEQ ID NO: 8775 - protein, 19 aa, synthetic construct
  source 1..19: note = Description of Artificial Sequence: Synthetic peptide; note = XENP018773 vhCDR2
EIRLKSNNYATHYAEPVKG

SEQ ID NO: 8776 - protein, 11 aa, synthetic construct
  source 1..11: note = Description of Artificial Sequence: Synthetic peptide; note = XENP018773 vhCDR3
YYGNYGGYFDV

SEQ ID NO: 8777 - protein, 11 aa, synthetic construct
  source 1..11: note = Description of Artificial Sequence: Synthetic peptide; note = XENP018773 vlCDR1
RASQSVSEDVA

SEQ ID NO: 8778 - protein, 7 aa, synthetic construct
  source 1..7: note = Description of Artificial Sequence: Synthetic peptide; note = XENP018773 vlCDR2
YASHRYT

SEQ ID NO: 8779 - protein, 9 aa, synthetic construct
  source 1..9: note = Description of Artificial Sequence: Synthetic peptide; note = XENP018773 vlCDR3
QQDYSSPRT

SEQ ID NO: 8780 - protein, 249 aa, synthetic construct
  source 1..249: note = Description of Artificial Sequence: Synthetic polypeptide; note = XENP018774 1G6_H1_L1.32_scFv(GKPGS)4
EVQLVESGGGLVKPGGSLRLSCAASGFTFSNYWMNWVRQAPGKGLEWVGEIRLKSNNYATHYAEPVKGRFTISRDDSKSTVYLQMNSLKTEDTAVYYCTRYYGNYGGYFDVWGAGTLVTVSSGKPGSGKPGSGKPGSGKPGSSIVMTQSPATLSVSPGERATLSCRASQSVSSDVAWYQQKPGQSPRLLINYASHRYTGVPDRFTGSGYGTEFTLTISSLQSEDFAVYFCQQDYSSPRTFGGGTKVEIK

SEQ ID NO: 8781 - protein, 122 aa, synthetic construct; identical to SEQ ID NO: 6246
  source 1..122: note = Description of Artificial Sequence: Synthetic polypeptide; note = VH of XENP018774

SEQ ID NO: 8782 - protein, 107 aa, synthetic construct
  source 1..107: note = Description of Artificial Sequence: Synthetic polypeptide; note = VL of XENP018774
SIVMTQSPATLSVSPGERATLSCRASQSVSSDVAWYQQKPGQSPRLLINYASHRYTGVPDRFTGSGYGTEFTLTISSLQSEDFAVYFCQQDYSSPRTFGGGTKVEIK

SEQ ID NO: 8783 - protein, 5 aa, synthetic construct
  source 1..5: note = Description of Artificial Sequence: Synthetic peptide; note = XENP018774 vhCDR1
NYWMN

SEQ ID NO: 8784 - protein, 19 aa, synthetic construct
  source 1..19: note = Description of Artificial Sequence: Synthetic peptide; note = XENP018774 vhCDR2
EIRLKSNNYATHYAEPVKG

SEQ ID NO: 8785 - protein, 11 aa, synthetic construct
  source 1..11: note = Description of Artificial Sequence: Synthetic peptide; note = XENP018774 vhCDR3
YYGNYGGYFDV

SEQ ID NO: 8786 - protein, 11 aa, synthetic construct
  source 1..11: note = Description of Artificial Sequence: Synthetic peptide; note = XENP018774 vlCDR1
RASQSVSSDVA

SEQ ID NO: 8787 - protein, 7 aa, synthetic construct
  source 1..7: note = Description of Artificial Sequence: Synthetic peptide; note = XENP018774 vlCDR2
YASHRYT

SEQ ID NO: 8788 - protein, 9 aa, synthetic construct
  source 1..9: note = Description of Artificial Sequence: Synthetic peptide; note = XENP018774 vlCDR3
QQDYSSPRT

SEQ ID NO: 8789 - protein, 249 aa, synthetic construct
  source 1..249: note = Description of Artificial Sequence: Synthetic polypeptide; note = XENP018775 1G6_H1_L1.33_scFv(GKPGS)4
EVQLVESGGGLVKPGGSLRLSCAASGFTFSNYWMNWVRQAPGKGLEWVGEIRLKSNNYATHYAEPVKGRFTISRDDSKSTVYLQMNSLKTEDTAVYYCTRYYGNYGGYFDVWGAGTLVTVSSGKPGSGKPGSGKPGSGKPGSSIVMTQSPATLSVSPGERATLSCRASQSVSRDVAWYQQKPGQSPRLLINYASHRYTGVPDRFTGSGYGTEFTLTISSLQSEDFAVYFCQQDYSSPRTFGGGTKVEIK

SEQ ID NO: 8790 - protein, 122 aa, synthetic construct; identical to SEQ ID NO: 6246
  source 1..122: note = Description of Artificial Sequence: Synthetic polypeptide; note = VH of XENP018775

SEQ ID NO: 8791 - protein, 107 aa, synthetic construct
  source 1..107: note = Description of Artificial Sequence: Synthetic polypeptide; note = VL of XENP018775
SIVMTQSPATLSVSPGERATLSCRASQSVSRDVAWYQQKPGQSPRLLINYASHRYTGVPDRFTGSGYGTEFTLTISSLQSEDFAVYFCQQDYSSPRTFGGGTKVEIK

SEQ ID NO: 8792 - protein, 5 aa, synthetic construct
  source 1..5: note = Description of Artificial Sequence: Synthetic peptide; note = XENP018775 vhCDR1
NYWMN

SEQ ID NO: 8793 - protein, 19 aa, synthetic construct
  source 1..19: note = Description of Artificial Sequence: Synthetic peptide; note = XENP018775 vhCDR2
EIRLKSNNYATHYAEPVKG

SEQ ID NO: 8794 - protein, 11 aa, synthetic construct
  source 1..11: note = Description of Artificial Sequence: Synthetic peptide; note = XENP018775 vhCDR3
YYGNYGGYFDV

SEQ ID NO: 8795 - protein, 11 aa, synthetic construct
  source 1..11: note = Description of Artificial Sequence: Synthetic peptide; note = XENP018775 vlCDR1
RASQSVSRDVA

SEQ ID NO: 8796 - protein, 7 aa, synthetic construct
  source 1..7: note = Description of Artificial Sequence: Synthetic peptide; note = XENP018775 vlCDR2
YASHRYT

SEQ ID NO: 8797 - protein, 9 aa, synthetic construct
  source 1..9: note = Description of Artificial Sequence: Synthetic peptide; note = XENP018775 vlCDR3
QQDYSSPRT

SEQ ID NO: 8798 - protein, 249 aa, synthetic construct
  source 1..249: note = Description of Artificial Sequence: Synthetic polypeptide; note = XENP018776 1G6_H1_L1.34_scFv(GKPGS)4
EVQLVESGGGLVKPGGSLRLSCAASGFTFSNYWMNWVRQAPGKGLEWVGEIRLKSNNYATHYAEPVKGRFTISRDDSKSTVYLQMNSLKTEDTAVYYCTRYYGNYGGYFDVWGAGTLVTVSSGKPGSGKPGSGKPGSGKPGSSIVMTQSPATLSVSPGERATLSCRASQSVSLDVAWYQQKPGQSPRLLINYASHRYTGVPDRFTGSGYGTEFTLTISSLQSEDFAVYFCQQDYSSPRTFGGGTKVEIK

SEQ ID NO: 8799 - protein, 122 aa, synthetic construct; identical to SEQ ID NO: 6246
  source 1..122: note = Description of Artificial Sequence: Synthetic polypeptide; note = VH of XENP018776

SEQ ID NO: 8800 - protein, 107 aa, synthetic construct
  source 1..107: note = Description of Artificial Sequence: Synthetic polypeptide; note = VL of XENP018776
SIVMTQSPATLSVSPGERATLSCRASQSVSLDVAWYQQKPGQSPRLLINYASHRYTGVPDRFTGSGYGTEFTLTISSLQSEDFAVYFCQQDYSSPRTFGGGTKVEIK

SEQ ID NO: 8801 - protein, 5 aa, synthetic construct
  source 1..5: note = Description of Artificial Sequence: Synthetic peptide; note = XENP018776 vhCDR1
NYWMN

SEQ ID NO: 8802 - protein, 19 aa, synthetic construct
  source 1..19: note = Description of Artificial Sequence: Synthetic peptide; note = XENP018776 vhCDR2
EIRLKSNNYATHYAEPVKG

SEQ ID NO: 8803 - protein, 11 aa, synthetic construct
  source 1..11: note = Description of Artificial Sequence: Synthetic peptide; note = XENP018776 vhCDR3
YYGNYGGYFDV

SEQ ID NO: 8804 - protein, 11 aa, synthetic construct
  source 1..11: note = Description of Artificial Sequence: Synthetic peptide; note = XENP018776 vlCDR1
RASQSVSLDVA

SEQ ID NO: 8805 - protein, 7 aa, synthetic construct
  source 1..7: note = Description of Artificial Sequence: Synthetic peptide; note = XENP018776 vlCDR2
YASHRYT

SEQ ID NO: 8806 - protein, 9 aa, synthetic construct
  source 1..9: note = Description of Artificial Sequence: Synthetic peptide; note = XENP018776 vlCDR3
QQDYSSPRT

SEQ ID NO: 8807 - protein, 249 aa, synthetic construct
  source 1..249: note = Description of Artificial Sequence: Synthetic polypeptide; note = XENP018777 1G6_H1_L1.35_scFv(GKPGS)4
EVQLVESGGGLVKPGGSLRLSCAASGFTFSNYWMNWVRQAPGKGLEWVGEIRLKSNNYATHYAEPVKGRFTISRDDSKSTVYLQMNSLKTEDTAVYYCTRYYGNYGGYFDVWGAGTLVTVSSGKPGSGKPGSGKPGSGKPGSSIVMTQSPATLSVSPGERATLSCRASQSVSTDVAWYQQKPGQSPRLLINYASHRYTGVPDRFTGSGYGTEFTLTISSLQSEDFAVYFCQQDYSSPRTFGGGTKVEIK

SEQ ID NO: 8808 - protein, 122 aa, synthetic construct; identical to SEQ ID NO: 6246
  source 1..122: note = Description of Artificial Sequence: Synthetic polypeptide; note = VH of XENP018777

SEQ ID NO: 8809 - protein, 107 aa, synthetic construct
  source 1..107: note = Description of Artificial Sequence: Synthetic polypeptide; note = VL of XENP018777
SIVMTQSPATLSVSPGERATLSCRASQSVSTDVAWYQQKPGQSPRLLINYASHRYTGVPDRFTGSGYGTEFTLTISSLQSEDFAVYFCQQDYSSPRTFGGGTKVEIK

SEQ ID NO: 8810 - protein, 5 aa, synthetic construct
  source 1..5: note = Description of Artificial Sequence: Synthetic peptide; note = XENP018777 vhCDR1
NYWMN

SEQ ID NO: 8811 - protein, 19 aa, synthetic construct
  source 1..19: note = Description of Artificial Sequence: Synthetic peptide; note = XENP018777 vhCDR2
EIRLKSNNYATHYAEPVKG

SEQ ID NO: 8812 - protein, 11 aa, synthetic construct
  source 1..11: note = Description of Artificial Sequence: Synthetic peptide; note = XENP018777 vhCDR3
YYGNYGGYFDV

SEQ ID NO: 8813 - protein, 11 aa, synthetic construct
  source 1..11: note = Description of Artificial Sequence: Synthetic peptide; note = XENP018777 vlCDR1
RASQSVSTDVA

SEQ ID NO: 8814 - protein, 7 aa, synthetic construct
  source 1..7: note = Description of Artificial Sequence: Synthetic peptide; note = XENP018777 vlCDR2
YASHRYT

SEQ ID NO: 8815 - protein, 9 aa, synthetic construct
  source 1..9: note = Description of Artificial Sequence: Synthetic peptide; note = XENP018777 vlCDR3
QQDYSSPRT

SEQ ID NO: 8816 - protein, 249 aa, synthetic construct
  source 1..249: note = Description of Artificial Sequence: Synthetic polypeptide; note = XENP018778 1G6_H1_L1.36_scFv(GKPGS)4
EVQLVESGGGLVKPGGSLRLSCAASGFTFSNYWMNWVRQAPGKGLEWVGEIRLKSNNYATHYAEPVKGRFTISRDDSKSTVYLQMNSLKTEDTAVYYCTRYYGNYGGYFDVWGAGTLVTVSSGKPGSGKPGSGKPGSGKPGSSIVMTQSPATLSVSPGERATLSCRASQSVSGDVAWYQQKPGQSPRLLINYASHRYTGVPDRFTGSGYGTEFTLTISSLQSEDFAVYFCQQDYSSPRTFGGGTKVEIK

SEQ ID NO: 8817 - protein, 122 aa, synthetic construct; identical to SEQ ID NO: 6246
  source 1..122: note = Description of Artificial Sequence: Synthetic polypeptide; note = VH of XENP018778

SEQ ID NO: 8818 - protein, 107 aa, synthetic construct
  source 1..107: note = Description of Artificial Sequence: Synthetic polypeptide; note = VL of XENP018778
SIVMTQSPATLSVSPGERATLSCRASQSVSGDVAWYQQKPGQSPRLLINYASHRYTGVPDRFTGSGYGTEFTLTISSLQSEDFAVYFCQQDYSSPRTFGGGTKVEIK

SEQ ID NO: 8819 - protein, 5 aa, synthetic construct
  source 1..5: note = Description of Artificial Sequence: Synthetic peptide; note = XENP018778 vhCDR1
NYWMN

SEQ ID NO: 8820 - protein, 19 aa, synthetic construct
  source 1..19: note = Description of Artificial Sequence: Synthetic peptide; note = XENP018778 vhCDR2
EIRLKSNNYATHYAEPVKG

SEQ ID NO: 8821 - protein, 11 aa, synthetic construct
  source 1..11: note = Description of Artificial Sequence: Synthetic peptide; note = XENP018778 vhCDR3
YYGNYGGYFDV

SEQ ID NO: 8822 - protein, 11 aa, synthetic construct
  source 1..11: note = Description of Artificial Sequence: Synthetic peptide; note = XENP018778 vlCDR1
RASQSVSGDVA

SEQ ID NO: 8823 - protein, 7 aa, synthetic construct
  source 1..7: note = Description of Artificial Sequence: Synthetic peptide; note = XENP018778 vlCDR2
YASHRYT

SEQ ID NO: 8824 - protein, 9 aa, synthetic construct
  source 1..9: note = Description of Artificial Sequence: Synthetic peptide; note = XENP018778 vlCDR3
QQDYSSPRT

SEQ ID NO: 8825 - protein, 249 aa, synthetic construct
  source 1..249: note = Description of Artificial Sequence: Synthetic polypeptide; note = XENP018779 1G6_H1_L1.37_scFv(GKPGS)4
EVQLVESGGGLVKPGGSLRLSCAASGFTFSNYWMNWVRQAPGKGLEWVGEIRLKSNNYATHYAEPVKGRFTISRDDSKSTVYLQMNSLKTEDTAVYYCTRYYGNYGGYFDVWGAGTLVTVSSGKPGSGKPGSGKPGSGKPGSSIVMTQSPATLSVSPGERATLSCRASQSVSYDVAWYQQKPGQSPRLLINYASHRYTGVPDRFTGSGYGTEFTLTISSLQSEDFAVYFCQQDYSSPRTFGGGTKVEIK

SEQ ID NO: 8826 - protein, 122 aa, synthetic construct; identical to SEQ ID NO: 6246
  source 1..122: note = Description of Artificial Sequence: Synthetic polypeptide; note = VH of XENP018779

SEQ ID NO: 8827 - protein, 107 aa, synthetic construct
  source 1..107: note = Description of Artificial Sequence: Synthetic polypeptide; note = VL of XENP018779
SIVMTQSPATLSVSPGERATLSCRASQSVSYDVAWYQQKPGQSPRLLINYASHRYTGVPDRFTGSGYGTEFTLTISSLQSEDFAVYFCQQDYSSPRTFGGGTKVEIK

SEQ ID NO: 8828 - protein, 5 aa, synthetic construct
  source 1..5: note = Description of Artificial Sequence: Synthetic peptide; note = XENP018779 vhCDR1
NYWMN

SEQ ID NO: 8829 - protein, 19 aa, synthetic construct
  source 1..19: note = Description of Artificial Sequence: Synthetic peptide; note = XENP018779 vhCDR2
EIRLKSNNYATHYAEPVKG

SEQ ID NO: 8830 - protein, 11 aa, synthetic construct
  source 1..11: note = Description of Artificial Sequence: Synthetic peptide; note = XENP018779 vhCDR3
YYGNYGGYFDV

SEQ ID NO: 8831 - protein, 11 aa, synthetic construct
  source 1..11: note = Description of Artificial Sequence: Synthetic peptide; note = XENP018779 vlCDR1
RASQSVSYDVA

SEQ ID NO: 8832 - protein, 7 aa, synthetic construct
  source 1..7: note = Description of Artificial Sequence: Synthetic peptide; note = XENP018779 vlCDR2
YASHRYT

SEQ ID NO: 8833 - protein, 9 aa, synthetic construct
  source 1..9: note = Description of Artificial Sequence: Synthetic peptide; note = XENP018779 vlCDR3
QQDYSSPRT

SEQ ID NO: 8834 - protein, 249 aa, synthetic construct
  source 1..249: note = Description of Artificial Sequence: Synthetic polypeptide; note = XENP018780 1G6_H1_L1.38_scFv(GKPGS)4
EVQLVESGGGLVKPGGSLRLSCAASGFTFSNYWMNWVRQAPGKGLEWVGEIRLKSNNYATHYAEPVKGRFTISRDDSKSTVYLQMNSLKTEDTAVYYCTRYYGNYGGYFDVWGAGTLVTVSSGKPGSGKPGSGKPGSGKPGSSIVMTQSPATLSVSPGERATLSCRASQSVSNNVAWYQQKPGQSPRLLINYASHRYTGVPDRFTGSGYGTEFTLTISSLQSEDFAVYFCQQDYSSPRTFGGGTKVEIK

SEQ ID NO: 8835 - protein, 122 aa, synthetic construct; identical to SEQ ID NO: 6246
  source 1..122: note = Description of Artificial Sequence: Synthetic polypeptide; note = VH of XENP018780

SEQ ID NO: 8836 - protein, 107 aa, synthetic construct
  source 1..107: note = Description of Artificial Sequence: Synthetic polypeptide; note = VL of XENP018780
SIVMTQSPATLSVSPGERATLSCRASQSVSNNVAWYQQKPGQSPRLLINYASHRYTGVPDRFTGSGYGTEFTLTISSLQSEDFAVYFCQQDYSSPRTFGGGTKVEIK

SEQ ID NO: 8837 - protein, 5 aa, synthetic construct
  source 1..5: note = Description of Artificial Sequence: Synthetic peptide; note = XENP018780 vhCDR1
NYWMN

SEQ ID NO: 8838 - protein, 19 aa, synthetic construct
  source 1..19: note = Description of Artificial Sequence: Synthetic peptide; note = XENP018780 vhCDR2
EIRLKSNNYATHYAEPVKG

SEQ ID NO: 8839 - protein, 11 aa, synthetic construct
  source 1..11: note = Description of Artificial Sequence: Synthetic peptide; note = XENP018780 vhCDR3
YYGNYGGYFDV

SEQ ID NO: 8840 - protein, 11 aa, synthetic construct
  source 1..11: note = Description of Artificial Sequence: Synthetic peptide; note = XENP018780 vlCDR1
RASQSVSNNVA

SEQ ID NO: 8841 - protein, 7 aa, synthetic construct
  source 1..7: note = Description of Artificial Sequence: Synthetic peptide; note = XENP018780 vlCDR2
YASHRYT

SEQ ID NO: 8842 - protein, 9 aa, synthetic construct
  source 1..9: note = Description of Artificial Sequence: Synthetic peptide; note = XENP018780 vlCDR3
QQDYSSPRT

SEQ ID NO: 8843 - protein, 249 aa, synthetic construct
  source 1..249: note = Description of Artificial Sequence: Synthetic polypeptide; note = XENP018781 1G6_H1_L1.39_scFv(GKPGS)4
EVQLVESGGGLVKPGGSLRLSCAASGFTFSNYWMNWVRQAPGKGLEWVGEIRLKSNNYATHYAEPVKGRFTISRDDSKSTVYLQMNSLKTEDTAVYYCTRYYGNYGGYFDVWGAGTLVTVSSGKPGSGKPGSGKPGSGKPGSSIVMTQSPATLSVSPGERATLSCRASQSVSNEVAWYQQKPGQSPRLLINYASHRYTGVPDRFTGSGYGTEFTLTISSLQSEDFAVYFCQQDYSSPRTFGGGTKVEIK

SEQ ID NO: 8844 - protein, 122 aa, synthetic construct; identical to SEQ ID NO: 6246
  source 1..122: note = Description of Artificial Sequence: Synthetic polypeptide; note = VH of XENP018781

SEQ ID NO: 8845 - protein, 107 aa, synthetic construct
  source 1..107: note = Description of Artificial Sequence: Synthetic polypeptide; note = VL of XENP018781
SIVMTQSPATLSVSPGERATLSCRASQSVSNEVAWYQQKPGQSPRLLINYASHRYTGVPDRFTGSGYGTEFTLTISSLQSEDFAVYFCQQDYSSPRTFGGGTKVEIK

SEQ ID NO: 8846 - protein, 5 aa, synthetic construct
  source 1..5: note = Description of Artificial Sequence: Synthetic peptide; note = XENP018781 vhCDR1
NYWMN

SEQ ID NO: 8847 - protein, 19 aa, synthetic construct
  source 1..19: note = Description of Artificial Sequence: Synthetic peptide; note = XENP018781 vhCDR2
EIRLKSNNYATHYAEPVKG

SEQ ID NO: 8848 - protein, 11 aa, synthetic construct
  source 1..11: note = Description of Artificial Sequence: Synthetic peptide; note = XENP018781 vhCDR3
YYGNYGGYFDV

SEQ ID NO: 8849 - protein, 11 aa, synthetic construct
  source 1..11: note = Description of Artificial Sequence: Synthetic peptide; note = XENP018781 vlCDR1
RASQSVSNEVA

SEQ ID NO: 8850 - protein, 7 aa, synthetic construct
  source 1..7: note = Description of Artificial Sequence: Synthetic peptide; note = XENP018781 vlCDR2
YASHRYT

SEQ ID NO: 8851 - protein, 9 aa, synthetic construct
  source 1..9: note = Description of Artificial Sequence: Synthetic peptide; note = XENP018781 vlCDR3
QQDYSSPRT

SEQ ID NO: 8852 - protein, 249 aa, synthetic construct
  source 1..249: note = Description of Artificial Sequence: Synthetic polypeptide; note = XENP018782 1G6_H1_L1.40_scFv(GKPGS)4
EVQLVESGGGLVKPGGSLRLSCAASGFTFSNYWMNWVRQAPGKGLEWVGEIRLKSNNYATHYAEPVKGRFTISRDDSKSTVYLQMNSLKTEDTAVYYCTRYYGNYGGYFDVWGAGTLVTVSSGKPGSGKPGSGKPGSGKPGSSIVMTQSPATLSVSPGERATLSCRASQSVSNHVAWYQQKPGQSPRLLINYASHRYTGVPDRFTGSGYGTEFTLTISSLQSEDFAVYFCQQDYSSPRTFGGGTKVEIK

SEQ ID NO: 8853 - protein, 122 aa, synthetic construct; identical to SEQ ID NO: 6246
  source 1..122: note = Description of Artificial Sequence: Synthetic polypeptide; note = VH of XENP018782

SEQ ID NO: 8854 - protein, 107 aa, synthetic construct
  source 1..107: note = Description of Artificial Sequence: Synthetic polypeptide; note = VL of XENP018782
SIVMTQSPATLSVSPGERATLSCRASQSVSNHVAWYQQKPGQSPRLLINYASHRYTGVPDRFTGSGYGTEFTLTISSLQSEDFAVYFCQQDYSSPRTFGGGTKVEIK

SEQ ID NO: 8855 - protein, 5 aa, synthetic construct
  source 1..5: note = Description of Artificial Sequence: Synthetic peptide; note = XENP018782 vhCDR1
NYWMN

SEQ ID NO: 8856 - protein, 19 aa, synthetic construct
  source 1..19: note = Description of Artificial Sequence: Synthetic peptide; note = XENP018782 vhCDR2
EIRLKSNNYATHYAEPVKG

SEQ ID NO: 8857 - protein, 11 aa, synthetic construct
  source 1..11: note = Description of Artificial Sequence: Synthetic peptide; note = XENP018782 vhCDR3
YYGNYGGYFDV

SEQ ID NO: 8858 - protein, 11 aa, synthetic construct
  source 1..11: note = Description of Artificial Sequence: Synthetic peptide; note = XENP018782 vlCDR1
RASQSVSNHVA

SEQ ID NO: 8859 - protein, 7 aa, synthetic construct
  source 1..7: note = Description of Artificial Sequence: Synthetic peptide; note = XENP018782 vlCDR2
YASHRYT

SEQ ID NO: 8860 - protein, 9 aa, synthetic construct
  source 1..9: note = Description of Artificial Sequence: Synthetic peptide; note = XENP018782 vlCDR3
QQDYSSPRT

SEQ ID NO: 8861 - protein, 249 aa, synthetic construct
  source 1..249: note = Description of Artificial Sequence: Synthetic polypeptide; note = XENP018783 1G6_H1_L1.41_scFv(GKPGS)4
EVQLVESGGGLVKPGGSLRLSCAASGFTFSNYWMNWVRQAPGKGLEWVGEIRLKSNNYATHYAEPVKGRFTISRDDSKSTVYLQMNSLKTEDTAVYYCTRYYGNYGGYFDVWGAGTLVTVSSGKPGSGKPGSGKPGSGKPGSSIVMTQSPATLSVSPGERATLSCRASQSVSNSVAWYQQKPGQSPRLLINYASHRYTGVPDRFTGSGYGTEFTLTISSLQSEDFAVYFCQQDYSSPRTFGGGTKVEIK

SEQ ID NO: 8862 - protein, 122 aa, synthetic construct; identical to SEQ ID NO: 6246
  source 1..122: note = Description of Artificial Sequence: Synthetic polypeptide; note = VH of XENP018783

SEQ ID NO: 8863 - protein, 107 aa, synthetic construct
  source 1..107: note = Description of Artificial Sequence: Synthetic polypeptide; note = VL of XENP018783
SIVMTQSPATLSVSPGERATLSCRASQSVSNSVAWYQQKPGQSPRLLINYASHRYTGVPDRFTGSGYGTEFTLTISSLQSEDFAVYFCQQDYSSPRTFGGGTKVEIK

SEQ ID NO: 8864 - protein, 5 aa, synthetic construct
  source 1..5: note = Description of Artificial Sequence: Synthetic peptide; note = XENP018783 vhCDR1
NYWMN

SEQ ID NO: 8865 - protein, 19 aa, synthetic construct
  source 1..19: note = Description of Artificial Sequence: Synthetic peptide; note = XENP018783 vhCDR2
EIRLKSNNYATHYAEPVKG

SEQ ID NO: 8866 - protein, 11 aa, synthetic construct
  source 1..11: note = Description of Artificial Sequence: Synthetic peptide; note = XENP018783 vhCDR3
YYGNYGGYFDV

SEQ ID NO: 8867 - protein, 11 aa, synthetic construct
  source 1..11: note = Description of Artificial Sequence: Synthetic peptide; note = XENP018783 vlCDR1
RASQSVSNSVA

SEQ ID NO: 8868 - protein, 7 aa, synthetic construct
  source 1..7: note = Description of Artificial Sequence: Synthetic peptide; note = XENP018783 vlCDR2
YASHRYT

SEQ ID NO: 8869 - protein, 9 aa, synthetic construct
  source 1..9: note = Description of Artificial Sequence: Synthetic peptide; note = XENP018783 vlCDR3
QQDYSSPRT

SEQ ID NO: 8870 - protein, 249 aa, synthetic construct
  source 1..249: note = Description of Artificial Sequence: Synthetic polypeptide; note = XENP018784 1G6_H1_L1.42_scFv(GKPGS)4
EVQLVESGGGLVKPGGSLRLSCAASGFTFSNYWMNWVRQAPGKGLEWVGEIRLKSNNYATHYAEPVKGRFTISRDDSKSTVYLQMNSLKTEDTAVYYCTRYYGNYGGYFDVWGAGTLVTVSSGKPGSGKPGSGKPGSGKPGSSIVMTQSPATLSVSPGERATLSCRASQSVSNRVAWYQQKPGQSPRLLINYASHRYTGVPDRFTGSGYGTEFTLTISSLQSEDFAVYFCQQDYSSPRTFGGGTKVEIK

SEQ ID NO: 8871 - protein, 122 aa, synthetic construct; identical to SEQ ID NO: 6246
  source 1..122: note = Description of Artificial Sequence: Synthetic polypeptide; note = VH of XENP018784

SEQ ID NO: 8872 - protein, 107 aa, synthetic construct
  source 1..107: note = Description of Artificial Sequence: Synthetic polypeptide; note = VL of XENP018784
SIVMTQSPATLSVSPGERATLSCRASQSVSNRVAWYQQKPGQSPRLLINYASHRYTGVPDRFTGSGYGTEFTLTISSLQSEDFAVYFCQQDYSSPRTFGGGTKVEIK

SEQ ID NO: 8873 - protein, 5 aa, synthetic construct
  source 1..5: note = Description of Artificial Sequence: Synthetic peptide; note = XENP018784 vhCDR1
NYWMN

SEQ ID NO: 8874 - protein, 19 aa, synthetic construct
  source 1..19: note = Description of Artificial Sequence: Synthetic peptide; note = XENP018784 vhCDR2
EIRLKSNNYATHYAEPVKG

SEQ ID NO: 8875 - protein, 11 aa, synthetic construct
  source 1..11: note = Description of Artificial Sequence: Synthetic peptide; note = XENP018784 vhCDR3
YYGNYGGYFDV

SEQ ID NO: 8876 - protein, 11 aa, synthetic construct
  source 1..11: note = Description of Artificial Sequence: Synthetic peptide; note = XENP018784 vlCDR1
RASQSVSNRVA

SEQ ID NO: 8877 - protein, 7 aa, synthetic construct
  source 1..7: note = Description of Artificial Sequence: Synthetic peptide; note = XENP018784 vlCDR2
YASHRYT

SEQ ID NO: 8878 - protein, 9 aa, synthetic construct
  source 1..9: note = Description of Artificial Sequence: Synthetic peptide; note = XENP018784 vlCDR3
QQDYSSPRT

SEQ ID NO: 8879 - protein, 249 aa, synthetic construct
  source 1..249: note = Description of Artificial Sequence: Synthetic polypeptide; note = XENP018785 1G6_H1_L1.43_scFv(GKPGS)4
EVQLVESGGGLVKPGGSLRLSCAASGFTFSNYWMNWVRQAPGKGLEWVGEIRLKSNNYATHYAEPVKGRFTISRDDSKSTVYLQMNSLKTEDTAVYYCTRYYGNYGGYFDVWGAGTLVTVSSGKPGSGKPGSGKPGSGKPGSSIVMTQSPATLSVSPGERATLSCRASQSVSNLVAWYQQKPGQSPRLLINYASHRYTGVPDRFTGSGYGTEFTLTISSLQSEDFAVYFCQQDYSSPRTFGGGTKVEIK

SEQ ID NO: 8880 - protein, 122 aa, synthetic construct; identical to SEQ ID NO: 6246
  source 1..122: note = Description of Artificial Sequence: Synthetic polypeptide; note = VH of XENP018785

SEQ ID NO: 8881 - protein, 107 aa, synthetic construct
  source 1..107: note = Description of Artificial Sequence: Synthetic polypeptide; note = VL of XENP018785
SIVMTQSPATLSVSPGERATLSCRASQSVSNLVAWYQQKPGQSPRLLINYASHRYTGVPDRFTGSGYGTEFTLTISSLQSEDFAVYFCQQDYSSPRTFGGGTKVEIK

SEQ ID NO: 8882 - protein, 5 aa, synthetic construct
  source 1..5: note = Description of Artificial Sequence: Synthetic peptide; note = XENP018785 vhCDR1
NYWMN

SEQ ID NO: 8883 - protein, 19 aa, synthetic construct
  source 1..19: note = Description of Artificial Sequence: Synthetic peptide; note = XENP018785 vhCDR2
EIRLKSNNYATHYAEPVKG

SEQ ID NO: 8884 - protein, 11 aa, synthetic construct
  source 1..11: note = Description of Artificial Sequence: Synthetic peptide; note = XENP018785 vhCDR3
YYGNYGGYFDV

SEQ ID NO: 8885 - protein, 11 aa, synthetic construct
  source 1..11: note = Description of Artificial Sequence: Synthetic peptide; note = XENP018785 vlCDR1
RASQSVSNLVA

SEQ ID NO: 8886 - protein, 7 aa, synthetic construct
  source 1..7: note = Description of Artificial Sequence: Synthetic peptide; note = XENP018785 vlCDR2
YASHRYT

SEQ ID NO: 8887 - protein, 9 aa, synthetic construct
  source 1..9: note = Description of Artificial Sequence: Synthetic peptide; note = XENP018785 vlCDR3
QQDYSSPRT

SEQ ID NO: 8888 - protein, 249 aa, synthetic construct
  source 1..249: note = Description of Artificial Sequence: Synthetic polypeptide; note = XENP018786 1G6_H1_L1.44_scFv(GKPGS)4
EVQLVESGGGLVKPGGSLRLSCAASGFTFSNYWMNWVRQAPGKGLEWVGEIRLKSNNYATHYAEPVKGRFTISRDDSKSTVYLQMNSLKTEDTAVYYCTRYYGNYGGYFDVWGAGTLVTVSSGKPGSGKPGSGKPGSGKPGSSIVMTQSPATLSVSPGERATLSCRASQSVSNTVAWYQQKPGQSPRLLINYASHRYTGVPDRFTGSGYGTEFTLTISSLQSEDFAVYFCQQDYSSPRTFGGGTKVEIK

SEQ ID NO: 8889 - protein, 122 aa, synthetic construct; identical to SEQ ID NO: 6246
  source 1..122: note = Description of Artificial Sequence: Synthetic polypeptide; note = VH of XENP018786

SEQ ID NO: 8890 - protein, 107 aa, synthetic construct
  source 1..107: note = Description of Artificial Sequence: Synthetic polypeptide; note = VL of XENP018786
SIVMTQSPATLSVSPGERATLSCRASQSVSNTVAWYQQKPGQSPRLLINYASHRYTGVPDRFTGSGYGTEFTLTISSLQSEDFAVYFCQQDYSSPRTFGGGTKVEIK

SEQ ID NO: 8891 - protein, 5 aa, synthetic construct
  source 1..5: note = Description of Artificial Sequence: Synthetic peptide; note = XENP018786 vhCDR1
NYWMN

SEQ ID NO: 8892 - protein, 19 aa, synthetic construct
  source 1..19: note = Description of Artificial Sequence: Synthetic peptide; note = XENP018786 vhCDR2
EIRLKSNNYATHYAEPVKG

SEQ ID NO: 8893 - protein, 11 aa, synthetic construct
  source 1..11: note = Description of Artificial Sequence: Synthetic peptide; note = XENP018786 vhCDR3
YYGNYGGYFDV

SEQ ID NO: 8894 - protein, 11 aa, synthetic construct
  source 1..11: note = Description of Artificial Sequence: Synthetic peptide; note = XENP018786 vlCDR1
RASQSVSNTVA

SEQ ID NO: 8895 - protein, 7 aa, synthetic construct
  source 1..7: note = Description of Artificial Sequence: Synthetic peptide; note = XENP018786 vlCDR2
YASHRYT

SEQ ID NO: 8896 - protein, 9 aa, synthetic construct
  source 1..9: note = Description of Artificial Sequence: Synthetic peptide; note = XENP018786 vlCDR3
QQDYSSPRT

SEQ ID NO: 8897 - protein, 249 aa, synthetic construct
  source 1..249: note = Description of Artificial Sequence: Synthetic polypeptide; note = XENP018787 1G6_H1_L1.45_scFv(GKPGS)4
EVQLVESGGGLVKPGGSLRLSCAASGFTFSNYWMNWVRQAPGKGLEWVGEIRLKSNNYATHYAEPVKGRFTISRDDSKSTVYLQMNSLKTEDTAVYYCTRYYGNYGGYFDVWGAGTLVTVSSGKPGSGKPGSGKPGSGKPGSSIVMTQSPATLSVSPGERATLSCRASQSVSNGVAWYQQKPGQSPRLLINYASHRYTGVPDRFTGSGYGTEFTLTISSLQSEDFAVYFCQQDYSSPRTFGGGTKVEIK

SEQ ID NO: 8898 - protein, 122 aa, synthetic construct; identical to SEQ ID NO: 6246
  source 1..122: note = Description of Artificial Sequence: Synthetic polypeptide; note = VH of XENP018787

SEQ ID NO: 8899 - protein, 107 aa, synthetic construct
  source 1..107: note = Description of Artificial Sequence: Synthetic polypeptide; note = VL of XENP018787
SIVMTQSPATLSVSPGERATLSCRASQSVSNGVAWYQQKPGQSPRLLINYASHRYTGVPDRFTGSGYGTEFTLTISSLQSEDFAVYFCQQDYSSPRTFGGGTKVEIK

SEQ ID NO: 8900 - protein, 5 aa, synthetic construct
  source 1..5: note = Description of Artificial Sequence: Synthetic peptide; note = XENP018787 vhCDR1
NYWMN

SEQ ID NO: 8901 - protein, 19 aa, synthetic construct
  source 1..19: note = Description of Artificial Sequence: Synthetic peptide; note = XENP018787 vhCDR2
EIRLKSNNYATHYAEPVKG

SEQ ID NO: 8902 - protein, 11 aa, synthetic construct
  source 1..11: note = Description of Artificial Sequence: Synthetic peptide; note = XENP018787 vhCDR3
YYGNYGGYFDV

SEQ ID NO: 8903 - protein, 11 aa, synthetic construct
  source 1..11: note = Description of Artificial Sequence: Synthetic peptide; note = XENP018787 vlCDR1
RASQSVSNGVA

SEQ ID NO: 8904 - protein, 7 aa, synthetic construct
  source 1..7: note = Description of Artificial Sequence: Synthetic peptide; note = XENP018787 vlCDR2
YASHRYT

SEQ ID NO: 8905 - protein, 9 aa, synthetic construct
  source 1..9: note = Description of Artificial Sequence: Synthetic peptide; note = XENP018787 vlCDR3
QQDYSSPRT

SEQ ID NO: 8906 - protein, 249 aa, synthetic construct
  source 1..249: note = Description of Artificial Sequence: Synthetic polypeptide; note = XENP018788 1G6_H1_L1.46_scFv(GKPGS)4
EVQLVESGGGLVKPGGSLRLSCAASGFTFSNYWMNWVRQAPGKGLEWVGEIRLKSNNYATHYAEPVKGRFTISRDDSKSTVYLQMNSLKTEDTAVYYCTRYYGNYGGYFDVWGAGTLVTVSSGKPGSGKPGSGKPGSGKPGSSIVMTQSPATLSVSPGERATLSCRASQSVSNYVAWYQQKPGQSPRLLINYASHRYTGVPDRFTGSGYGTEFTLTISSLQSEDFAVYFCQQDYSSPRTFGGGTKVEIK

SEQ ID NO: 8907 - protein, 122 aa, synthetic construct; identical to SEQ ID NO: 6246
  source 1..122: note = Description of Artificial Sequence: Synthetic polypeptide; note = VH of XENP018788

SEQ ID NO: 8908 - protein, 107 aa, synthetic construct
  source 1..107: note = Description of Artificial Sequence: Synthetic polypeptide; note = VL of XENP018788
SIVMTQSPATLSVSPGERATLSCRASQSVSNYVAWYQQKPGQSPRLLINYASHRYTGVPDRFTGSGYGTEFTLTISSLQSEDFAVYFCQQDYSSPRTFGGGTKVEIK

SEQ ID NO: 8909 - protein, 5 aa, synthetic construct
  source 1..5: note = Description of Artificial Sequence: Synthetic peptide; note = XENP018788 vhCDR1
NYWMN

SEQ ID NO: 8910 - protein, 19 aa, synthetic construct
  source 1..19: note = Description of Artificial Sequence: Synthetic peptide; note = XENP018788 vhCDR2
EIRLKSNNYATHYAEPVKG

SEQ ID NO: 8911 - protein, 11 aa, synthetic construct
  source 1..11: note = Description of Artificial Sequence: Synthetic peptide; note = XENP018788 vhCDR3
YYGNYGGYFDV

SEQ ID NO: 8912 - protein, 11 aa, synthetic construct
  source 1..11: note = Description of Artificial Sequence: Synthetic peptide; note = XENP018788 vlCDR1
RASQSVSNYVA

SEQ ID NO: 8913 - protein, 7 aa, synthetic construct
  source 1..7: note = Description of Artificial Sequence: Synthetic peptide; note = XENP018788 vlCDR2
YASHRYT

SEQ ID NO: 8914 - protein, 9 aa, synthetic construct
  source 1..9: note = Description of Artificial Sequence: Synthetic peptide; note = XENP018788 vlCDR3
QQDYSSPRT

SEQ ID NO: 8915 - protein, 249 aa, synthetic construct
  source 1..249: note = Description of Artificial Sequence: Synthetic polypeptide; note = XENP018789 1G6_H1_L1.47_scFv(GKPGS)4
EVQLVESGGGLVKPGGSLRLSCAASGFTFSNYWMNWVRQAPGKGLEWVGEIRLKSNNYATHYAEPVKGRFTISRDDSKSTVYLQMNSLKTEDTAVYYCTRYYGNYGGYFDVWGAGTLVTVSSGKPGSGKPGSGKPGSGKPGSSIVMTQSPATLSVSPGERATLSCRASQSVSNDLAWYQQKPGQSPRLLINYASHRYTGVPDRFTGSGYGTEFTLTISSLQSEDFAVYFCQQDYSSPRTFGGGTKVEIK

SEQ ID NO: 8916 - protein, 122 aa, synthetic construct; identical to SEQ ID NO: 6246
  source 1..122: note = Description of Artificial Sequence: Synthetic polypeptide; note = VH of XENP018789

SEQ ID NO: 8917 - protein, 107 aa, synthetic construct
  source 1..107: note = Description of Artificial Sequence: Synthetic polypeptide; note = VL of XENP018789
SIVMTQSPATLSVSPGERATLSCRASQSVSNDLAWYQQKPGQSPRLLINYASHRYTGVPDRFTGSGYGTEFTLTISSLQSEDFAVYFCQQDYSSPRTFGGGTKVEIK

SEQ ID NO: 8918 - protein, 5 aa, synthetic construct
  source 1..5: note = Description of Artificial Sequence: Synthetic peptide; note = XENP018789 vhCDR1
NYWMN

SEQ ID NO: 8919 - protein, 19 aa, synthetic construct
  source 1..19: note = Description of Artificial Sequence: Synthetic peptide; note = XENP018789 vhCDR2
EIRLKSNNYATHYAEPVKG

SEQ ID NO: 8920 - protein, 11 aa, synthetic construct
  source 1..11: note = Description of Artificial Sequence: Synthetic peptide; note = XENP018789 vhCDR3
YYGNYGGYFDV

SEQ ID NO: 8921 - protein, 11 aa, synthetic construct
  source 1..11: note = Description of Artificial Sequence: Synthetic peptide; note = XENP018789 vlCDR1
RASQSVSNDLA

SEQ ID NO: 8922 - protein, 7 aa, synthetic construct
  source 1..7: note = Description of Artificial Sequence: Synthetic peptide; note = XENP018789 vlCDR2
YASHRYT

SEQ ID NO: 8923 - protein, 9 aa, synthetic construct
  source 1..9: note = Description of Artificial Sequence: Synthetic peptide; note = XENP018789 vlCDR3
QQDYSSPRT

SEQ ID NO: 8924 - protein, 249 aa, synthetic construct
  source 1..249: note = Description of Artificial Sequence: Synthetic polypeptide; note = XENP018790 1G6_H1_L1.48_scFv(GKPGS)4
EVQLVESGGGLVKPGGSLRLSCAASGFTFSNYWMNWVRQAPGKGLEWVGEIRLKSNNYATHYAEPVKGRFTISRDDSKSTVYLQMNSLKTEDTAVYYCTRYYGNYGGYFDVWGAGTLVTVSSGKPGSGKPGSGKPGSGKPGSSIVMTQSPATLSVSPGERATLSCRASQSVSNDVSWYQQKPGQSPRLLINYASHRYTGVPDRFTGSGYGTEFTLTISSLQSEDFAVYFCQQDYSSPRTFGGGTKVEIK

SEQ ID NO: 8925 - protein, 122 aa, synthetic construct; identical to SEQ ID NO: 6246
  source 1..122: note = Description of Artificial Sequence: Synthetic polypeptide; note = VH of XENP018790

SEQ ID NO: 8926 - protein, 107 aa, synthetic construct
  source 1..107: note = Description of Artificial Sequence: Synthetic polypeptide; note = VL of XENP018790
SIVMTQSPATLSVSPGERATLSCRASQSVSNDVSWYQQKPGQSPRLLINYASHRYTGVPDRFTGSGYGTEFTLTISSLQSEDFAVYFCQQDYSSPRTFGGGTKVEIK

SEQ ID NO: 8927 - protein, 5 aa, synthetic construct
  source 1..5: note = Description of Artificial Sequence: Synthetic peptide; note = XENP018790 vhCDR1
NYWMN

SEQ ID NO: 8928 - protein, 19 aa, synthetic construct
  source 1..19: note = Description of Artificial Sequence: Synthetic peptide; note = XENP018790 vhCDR2
EIRLKSNNYATHYAEPVKG

SEQ ID NO: 8929 - protein, 11 aa, synthetic construct
  source 1..11: note = Description of Artificial Sequence: Synthetic peptide; note = XENP018790 vhCDR3
YYGNYGGYFDV

SEQ ID NO: 8930 - protein, 11 aa, synthetic construct
  source 1..11: note = Description of Artificial Sequence: Synthetic peptide; note = XENP018790 vlCDR1
RASQSVSNDVS

SEQ ID NO: 8931 - protein, 7 aa, synthetic construct
  source 1..7: note = Description of Artificial Sequence: Synthetic peptide; note = XENP018790 vlCDR2
YASHRYT

SEQ ID NO: 8932 - protein, 9 aa, synthetic construct
  source 1..9: note = Description of Artificial Sequence: Synthetic peptide; note = XENP018790 vlCDR3
QQDYSSPRT

SEQ ID NO: 8933 - protein, 249 aa, synthetic construct
  source 1..249: note = Description of Artificial Sequence: Synthetic polypeptide; note = XENP018791 1G6_H1_L1.49_scFv(GKPGS)4
EVQLVESGGGLVKPGGSLRLSCAASGFTFSNYWMNWVRQAPGKGLEWVGEIRLKSNNYATHYAEPVKGRFTISRDDSKSTVYLQMNSLKTEDTAVYYCTRYYGNYGGYFDVWGAGTLVTVSSGKPGSGKPGSGKPGSGKPGSSIVMTQSPATLSVSPGERATLSCRASQSVSNDVTWYQQKPGQSPRLLINYASHRYTGVPDRFTGSGYGTEFTLTISSLQSEDFAVYFCQQDYSSPRTFGGGTKVEIK

SEQ ID NO: 8934 - protein, 122 aa, synthetic construct; identical to SEQ ID NO: 6246
  source 1..122: note = Description of Artificial Sequence: Synthetic polypeptide; note = VH of XENP018791

SEQ ID NO: 8935 - protein, 107 aa, synthetic construct
  source 1..107: note = Description of Artificial Sequence: Synthetic polypeptide; note = VL of XENP018791
SIVMTQSPATLSVSPGERATLSCRASQSVSNDVTWYQQKPGQSPRLLINYASHRYTGVPDRFTGSGYGTEFTLTISSLQSEDFAVYFCQQDYSSPRTFGGGTKVEIK

SEQ ID NO: 8936 - protein, 5 aa, synthetic construct
  source 1..5: note = Description of Artificial Sequence: Synthetic peptide; note = XENP018791 vhCDR1
NYWMN

SEQ ID NO: 8937 - protein, 19 aa, synthetic construct
  source 1..19: note = Description of Artificial Sequence: Synthetic peptide; note = XENP018791 vhCDR2
EIRLKSNNYATHYAEPVKG

SEQ ID NO: 8938 - protein, 11 aa, synthetic construct
  source 1..11: note = Description of Artificial Sequence: Synthetic peptide; note = XENP018791 vhCDR3
YYGNYGGYFDV

SEQ ID NO: 8939 - protein, 11 aa, synthetic construct
  source 1..11: note = Description of Artificial Sequence: Synthetic peptide; note = XENP018791 vlCDR1
RASQSVSNDVT

SEQ ID NO: 8940 - protein, 7 aa, synthetic construct
  source 1..7: note = Description of Artificial Sequence: Synthetic peptide; note = XENP018791 vlCDR2
YASHRYT

SEQ ID NO: 8941 - protein, 9 aa, synthetic construct
  source 1..9: note = Description of Artificial Sequence: Synthetic peptide; note = XENP018791 vlCDR3
QQDYSSPRT

SEQ ID NO: 8942 - protein, 249 aa, synthetic construct
  source 1..249: note = Description of Artificial Sequence: Synthetic polypeptide; note = XENP018792 1G6_H1_L1.50_scFv(GKPGS)4
EVQLVESGGGLVKPGGSLRLSCAASGFTFSNYWMNWVRQAPGKGLEWVGEIRLKSNNYATHYAEPVKGRFTISRDDSKSTVYLQMNSLKTEDTAVYYCTRYYGNYGGYFDVWGAGTLVTVSSGKPGSGKPGSGKPGSGKPGSSIVMTQSPATLSVSPGERATLSCRASQSVSNDVAWYQQKPGQAPRLLINYASHRYTGVPDRFTGSGYGTEFTLTISSLQSEDFAVYFCQQDYSSPRTFGGGTKVEIK

SEQ ID NO: 8943 - protein, 122 aa, synthetic construct; identical to SEQ ID NO: 6246
  source 1..122: note = Description of Artificial Sequence: Synthetic polypeptide; note = VH of XENP018792

SEQ ID NO: 8944 - protein, 107 aa, synthetic construct
  source 1..107: note = Description of Artificial Sequence: Synthetic polypeptide; note = VL of XENP018792
SIVMTQSPATLSVSPGERATLSCRASQSVSNDVAWYQQKPGQAPRLLINYASHRYTGVPDRFTGSGYGTEFTLTISSLQSEDFAVYFCQQDYSSPRTFGGGTKVEIK

SEQ ID NO: 8945 - protein, 5 aa, synthetic construct
  source 1..5: note = Description of Artificial Sequence: Synthetic peptide; note = XENP018792 vhCDR1
NYWMN

SEQ ID NO: 8946 - protein, 19 aa, synthetic construct
  source 1..19: note = Description of Artificial Sequence: Synthetic peptide; note = XENP018792 vhCDR2
EIRLKSNNYATHYAEPVKG

SEQ ID NO: 8947 - protein, 11 aa, synthetic construct
  source 1..11: note = Description of Artificial Sequence: Synthetic peptide; note = XENP018792 vhCDR3
YYGNYGGYFDV

SEQ ID NO: 8948 - protein, 11 aa, synthetic construct
  source 1..11: note = Description of Artificial Sequence: Synthetic peptide; note = XENP018792 vlCDR1
RASQSVSNDVA

SEQ ID NO: 8949 - protein, 7 aa, synthetic construct
  source 1..7: note = Description of Artificial Sequence: Synthetic peptide; note = XENP018792 vlCDR2
YASHRYT

SEQ ID NO: 8950 - protein, 9 aa, synthetic construct
  source 1..9: note = Description of Artificial Sequence: Synthetic peptide; note = XENP018792 vlCDR3
QQDYSSPRT

SEQ ID NO: 8951 - protein, 249 aa, synthetic construct
  source 1..249: note = Description of Artificial Sequence: Synthetic polypeptide; note = XENP018793 1G6_H1_L1.51_scFv(GKPGS)4
EVQLVESGGGLVKPGGSLRLSCAASGFTFSNYWMNWVRQAPGKGLEWVGEIRLKSNNYATHYAEPVKGRFTISRDDSKSTVYLQMNSLKTEDTAVYYCTRYYGNYGGYFDVWGAGTLVTVSSGKPGSGKPGSGKPGSGKPGSSIVMTQSPATLSVSPGERATLSCRASQSVSNDVAWYQQKPGQSPKLLINYASHRYTGVPDRFTGSGYGTEFTLTISSLQSEDFAVYFCQQDYSSPRTFGGGTKVEIK

SEQ ID NO: 8952 - protein, 122 aa, synthetic construct; identical to SEQ ID NO: 6246
  source 1..122: note = Description of Artificial Sequence: Synthetic polypeptide; note = VH of XENP018793

SEQ ID NO: 8953 - protein, 107 aa, synthetic construct
  source 1..107: note = Description of Artificial Sequence: Synthetic polypeptide; note = VL of XENP018793
SIVMTQSPATLSVSPGERATLSCRASQSVSNDVAWYQQKPGQSPKLLINYASHRYTGVPDRFTGSGYGTEFTLTISSLQSEDFAVYFCQQDYSSPRTFGGGTKVEIK

SEQ ID NO: 8954 - protein, 5 aa, synthetic construct
  source 1..5: note = Description of Artificial Sequence: Synthetic peptide; note = XENP018793 vhCDR1
NYWMN

SEQ ID NO: 8955 - protein, 19 aa, synthetic construct
  source 1..19: note = Description of Artificial Sequence: Synthetic peptide; note = XENP018793 vhCDR2
EIRLKSNNYATHYAEPVKG

SEQ ID NO: 8956 - protein, 11 aa, synthetic construct
  source 1..11: note = Description of Artificial Sequence: Synthetic peptide; note = XENP018793 vhCDR3
YYGNYGGYFDV

SEQ ID NO: 8957 - protein, 11 aa, synthetic construct
  source 1..11: note = Description of Artificial Sequence: Synthetic peptide; note = XENP018793 vlCDR1
RASQSVSNDVA

SEQ ID NO: 8958 - protein, 7 aa, synthetic construct
  source 1..7: note = Description of Artificial Sequence: Synthetic peptide; note = XENP018793 vlCDR2
YASHRYT

SEQ ID NO: 8959 - protein, 9 aa, synthetic construct
  source 1..9: note = Description of Artificial Sequence: Synthetic peptide; note = XENP018793 vlCDR3
QQDYSSPRT

SEQ ID NO: 8960 - protein, 249 aa, synthetic construct
  source 1..249: note = Description of Artificial Sequence: Synthetic polypeptide; note = XENP018794 1G6_H1_L1.52_scFv(GKPGS)4
EVQLVESGGGLVKPGGSLRLSCAASGFTFSNYWMNWVRQAPGKGLEWVGEIRLKSNNYATHYAEPVKGRFTISRDDSKSTVYLQMNSLKTEDTAVYYCTRYYGNYGGYFDVWGAGTLVTVSSGKPGSGKPGSGKPGSGKPGSSIVMTQSPATLSVSPGERATLSCRASQSVSNDVAWYQQKPGQSPQLLINYASHRYTGVPDRFTGSGYGTEFTLTISSLQSEDFAVYFCQQDYSSPRTFGGGTKVEIK

SEQ ID NO: 8961 - protein, 122 aa, synthetic construct; identical to SEQ ID NO: 6246
  source 1..122: note = Description of Artificial Sequence: Synthetic polypeptide; note = VH of XENP018794

SEQ ID NO: 8962 - protein, 107 aa, synthetic construct
  source 1..107: note = Description of Artificial Sequence: Synthetic polypeptide; note = VL of XENP018794
SIVMTQSPATLSVSPGERATLSCRASQSVSNDVAWYQQKPGQSPQLLINYASHRYTGVPDRFTGSGYGTEFTLTISSLQSEDFAVYFCQQDYSSPRTFGGGTKVEIK

SEQ ID NO: 8963 - protein, 5 aa, synthetic construct
  source 1..5: note = Description of Artificial Sequence: Synthetic peptide; note = XENP018794 vhCDR1
NYWMN

SEQ ID NO: 8964 - protein, 19 aa, synthetic construct
  source 1..19: note = Description of Artificial Sequence: Synthetic peptide; note = XENP018794 vhCDR2
EIRLKSNNYATHYAEPVKG

SEQ ID NO: 8965 - protein, 11 aa, synthetic construct
  source 1..11: note = Description of Artificial Sequence: Synthetic peptide; note = XENP018794 vhCDR3
YYGNYGGYFDV

SEQ ID NO: 8966 - protein, 11 aa, synthetic construct
  source 1..11: note = Description of Artificial Sequence: Synthetic peptide; note = XENP018794 vlCDR1
RASQSVSNDVA

SEQ ID NO: 8967 - protein, 7 aa, synthetic construct
  source 1..7: note = Description of Artificial Sequence: Synthetic peptide; note = XENP018794 vlCDR2
YASHRYT

SEQ ID NO: 8968 - protein, 9 aa, synthetic construct
  source 1..9: note = Description of Artificial Sequence: Synthetic peptide; note = XENP018794 vlCDR3
QQDYSSPRT

SEQ ID NO: 8969 - protein, 249 aa, synthetic construct
  source 1..249: note = Description of Artificial Sequence: Synthetic polypeptide; note = XENP018795 1G6_H1_L1.53_scFv(GKPGS)4
EVQLVESGGGLVKPGGSLRLSCAASGFTFSNYWMNWVRQAPGKGLEWVGEIRLKSNNYATHYAEPVKGRFTISRDDSKSTVYLQMNSLKTEDTAVYYCTRYYGNYGGYFDVWGAGTLVTVSSGKPGSGKPGSGKPGSGKPGSSIVMTQSPATLSVSPGERATLSCRASQSVSNDVAWYQQKPGQSPILLINYASHRYTGVPDRFTGSGYGTEFTLTISSLQSEDFAVYFCQQDYSSPRTFGGGTKVEIK

SEQ ID NO: 8970 - protein, 122 aa, synthetic construct; identical to SEQ ID NO: 6246
  source 1..122: note = Description of Artificial Sequence: Synthetic polypeptide; note = VH of XENP018795

SEQ ID NO: 8971 - protein, 107 aa, synthetic construct
  source 1..107: note = Description of Artificial Sequence: Synthetic polypeptide; note = VL of XENP018795
SIVMTQSPATLSVSPGERATLSCRASQSVSNDVAWYQQKPGQSPILLINYASHRYTGVPDRFTGSGYGTEFTLTISSLQSEDFAVYFCQQDYSSPRTFGGGTKVEIK

SEQ ID NO: 8972 - protein, 5 aa, synthetic construct
  source 1..5: note = Description of Artificial Sequence: Synthetic peptide; note = XENP018795 vhCDR1
NYWMN

SEQ ID NO: 8973 - protein, 19 aa, synthetic construct
  source 1..19: note = Description of Artificial Sequence: Synthetic peptide; note = XENP018795 vhCDR2
EIRLKSNNYATHYAEPVKG

SEQ ID NO: 8974 - protein, 11 aa, synthetic construct
  source 1..11: note = Description of Artificial Sequence: Synthetic peptide; note = XENP018795 vhCDR3
YYGNYGGYFDV

SEQ ID NO: 8975 - protein, 11 aa, synthetic construct
  source 1..11: note = Description of Artificial Sequence: Synthetic peptide; note = XENP018795 vlCDR1
RASQSVSNDVA

SEQ ID NO: 8976 - protein, 7 aa, synthetic construct
  source 1..7: note = Description of Artificial Sequence: Synthetic peptide; note = XENP018795 vlCDR2
YASHRYT

SEQ ID NO: 8977 - protein, 9 aa, synthetic construct
  source 1..9: note = Description of Artificial Sequence: Synthetic peptide; note = XENP018795 vlCDR3
QQDYSSPRT

SEQ ID NO: 8978 - protein, 249 aa, synthetic construct
  source 1..249: note = Description of Artificial Sequence: Synthetic polypeptide; note = XENP018796 1G6_H1_L1.54_scFv(GKPGS)4
EVQLVESGGGLVKPGGSLRLSCAASGFTFSNYWMNWVRQAPGKGLEWVGEIRLKSNNYATHYAEPVKGRFTISRDDSKSTVYLQMNSLKTEDTAVYYCTRYYGNYGGYFDVWGAGTLVTVSSGKPGSGKPGSGKPGSGKPGSSIVMTQSPATLSVSPGERATLSCRASQSVSNDVAWYQQKPGQSPRLLIYYASHRYTGVPDRFTGSGYGTEFTLTISSLQSEDFAVYFCQQDYSSPRTFGGGTKVEIK

SEQ ID NO: 8979 - protein, 122 aa, synthetic construct; identical to SEQ ID NO: 6246
  source 1..122: note = Description of Artificial Sequence: Synthetic polypeptide; note = VH of XENP018796

SEQ ID NO: 8980 - protein, 107 aa, synthetic construct
  source 1..107: note = Description of Artificial Sequence: Synthetic polypeptide; note = VL of XENP018796
SIVMTQSPATLSVSPGERATLSCRASQSVSNDVAWYQQKPGQSPRLLIYYASHRYTGVPDRFTGSGYGTEFTLTISSLQSEDFAVYFCQQDYSSPRTFGGGTKVEIK

SEQ ID NO: 8981 - protein, 5 aa, synthetic construct
  source 1..5: note = Description of Artificial Sequence: Synthetic peptide; note = XENP018796 vhCDR1
NYWMN

SEQ ID NO: 8982 - protein, 19 aa, synthetic construct
  source 1..19: note = Description of Artificial Sequence: Synthetic peptide; note = XENP018796 vhCDR2
EIRLKSNNYATHYAEPVKG

SEQ ID NO: 8983 - protein, 11 aa, synthetic construct
  source 1..11: note = Description of Artificial Sequence: Synthetic peptide; note = XENP018796 vhCDR3
YYGNYGGYFDV

SEQ ID NO: 8984 - protein, 11 aa, synthetic construct
  source 1..11: note = Description of Artificial Sequence: Synthetic peptide; note = XENP018796 vlCDR1
RASQSVSNDVA

SEQ ID NO: 8985 - protein, 7 aa, synthetic construct
  source 1..7: note = Description of Artificial Sequence: Synthetic peptide; note = XENP018796 vlCDR2
YASHRYT

SEQ ID NO: 8986 - protein, 9 aa, synthetic construct
  source 1..9: note = Description of Artificial Sequence: Synthetic peptide; note = XENP018796 vlCDR3
QQDYSSPRT

SEQ ID NO: 8987 - protein, 249 aa, synthetic construct
  source 1..249: note = Description of Artificial Sequence: Synthetic polypeptide; note = XENP018801 1G6_H1_L1.55_scFv(GKPGS)4
EVQLVESGGGLVKPGGSLRLSCAASGFTFSNYWMNWVRQAPGKGLEWVGEIRLKSNNYATHYAEPVKGRFTISRDDSKSTVYLQMNSLKTEDTAVYYCTRYYGNYGGYFDVWGAGTLVTVSSGKPGSGKPGSGKPGSGKPGSSIVMTQSPATLSVSPGERATLSCRASQSVSNDVAWYQQKPGQSPRLLINFASHRYTGVPDRFTGSGYGTEFTLTISSLQSEDFAVYFCQQDYSSPRTFGGGTKVEIK

SEQ ID NO: 8988 - protein, 122 aa, synthetic construct; identical to SEQ ID NO: 6246
  source 1..122: note = Description of Artificial Sequence: Synthetic polypeptide; note = VH of XENP018801

SEQ ID NO: 8989 - protein, 107 aa, synthetic construct
  source 1..107: note = Description of Artificial Sequence: Synthetic polypeptide; note = VL of XENP018801
SIVMTQSPATLSVSPGERATLSCRASQSVSNDVAWYQQKPGQSPRLLINFASHRYTGVPDRFTGSGYGTEFTLTISSLQSEDFAVYFCQQDYSSPRTFGGGTKVEIK

SEQ ID NO: 8990 - protein, 5 aa, synthetic construct
  source 1..5: note = Description of Artificial Sequence: Synthetic peptide; note = XENP018801 vhCDR1
NYWMN

SEQ ID NO: 8991 - protein, 19 aa, synthetic construct
  source 1..19: note = Description of Artificial Sequence: Synthetic peptide; note = XENP018801 vhCDR2
EIRLKSNNYATHYAEPVKG

SEQ ID NO: 8992 - protein, 11 aa, synthetic construct
  source 1..11: note = Description of Artificial Sequence: Synthetic peptide; note = XENP018801 vhCDR3
YYGNYGGYFDV

SEQ ID NO: 8993 - protein, 11 aa, synthetic construct
  source 1..11: note = Description of Artificial Sequence: Synthetic peptide; note = XENP018801 vlCDR1
RASQSVSNDVA

SEQ ID NO: 8994 - protein, 7 aa, synthetic construct
  source 1..7: note = Description of Artificial Sequence: Synthetic peptide; note = XENP018801 vlCDR2
FASHRYT

SEQ ID NO: 8995 - protein, 9 aa, synthetic construct
  source 1..9: note = Description of Artificial Sequence: Synthetic peptide; note = XENP018801 vlCDR3
QQDYSSPRT

SEQ ID NO: 8996 - protein, 249 aa, synthetic construct
  source 1..249: note = Description of Artificial Sequence: Synthetic polypeptide; note = XENP018802 1G6_H1_L1.56_scFv(GKPGS)4
EVQLVESGGGLVKPGGSLRLSCAASGFTFSNYWMNWVRQAPGKGLEWVGEIRLKSNNYATHYAEPVKGRFTISRDDSKSTVYLQMNSLKTEDTAVYYCTRYYGNYGGYFDVWGAGTLVTVSSGKPGSGKPGSGKPGSGKPGSSIVMTQSPATLSVSPGERATLSCRASQSVSNDVAWYQQKPGQSPRLLINHASHRYTGVPDRFTGSGYGTEFTLTISSLQSEDFAVYFCQQDYSSPRTFGGGTKVEIK

SEQ ID NO: 8997 - protein, 122 aa, synthetic construct; identical to SEQ ID NO: 6246
  source 1..122: note = Description of Artificial Sequence: Synthetic polypeptide; note = VH of XENP018802

SEQ ID NO: 8998 - protein, 107 aa, synthetic construct
  source 1..107: note = Description of Artificial Sequence: Synthetic polypeptide; note = VL of XENP018802
SIVMTQSPATLSVSPGERATLSCRASQSVSNDVAWYQQKPGQSPRLLINHASHRYTGVPDRFTGSGYGTEFTLTISSLQSEDFAVYFCQQDYSSPRTFGGGTKVEIK

SEQ ID NO: 8999 - protein, 5 aa, synthetic construct
  source 1..5: note = Description of Artificial Sequence: Synthetic peptide; note = XENP018802 vhCDR1
NYWMN

SEQ ID NO: 9000 - protein, 19 aa, synthetic construct
  source 1..19: note = Description of Artificial Sequence: Synthetic peptide; note = XENP018802 vhCDR2
EIRLKSNNYATHYAEPVKG

SEQ ID NO: 9001 - protein, 11 aa, synthetic construct
  source 1..11: note = Description of Artificial Sequence: Synthetic peptide; note = XENP018802 vhCDR3
YYGNYGGYFDV

SEQ ID NO: 9002 - protein, 11 aa, synthetic construct
  source 1..11: note = Description of Artificial Sequence: Synthetic peptide; note = XENP018802 vlCDR1
RASQSVSNDVA

SEQ ID NO: 9003 - protein, 7 aa, synthetic construct
  source 1..7: note = Description of Artificial Sequence: Synthetic peptide; note = XENP018802 vlCDR2
HASHRYT

SEQ ID NO: 9004 - protein, 9 aa, synthetic construct
  source 1..9: note = Description of Artificial Sequence: Synthetic peptide; note = XENP018802 vlCDR3
QQDYSSPRT

SEQ ID NO: 9005 - protein, 249 aa, synthetic construct
  source 1..249: note = Description of Artificial Sequence: Synthetic polypeptide; note = XENP018803 1G6_H1_L1.57_scFv(GKPGS)4
EVQLVESGGGLVKPGGSLRLSCAASGFTFSNYWMNWVRQAPGKGLEWVGEIRLKSNNYATHYAEPVKGRFTISRDDSKSTVYLQMNSLKTEDTAVYYCTRYYGNYGGYFDVWGAGTLVTVSSGKPGSGKPGSGKPGSGKPGSSIVMTQSPATLSVSPGERATLSCRASQSVSNDVAWYQQKPGQSPRLLINLASHRYTGVPDRFTGSGYGTEFTLTISSLQSEDFAVYFCQQDYSSPRTFGGGTKVEIK

SEQ ID NO: 9006 - protein, 122 aa, synthetic construct; identical to SEQ ID NO: 6246
  source 1..122: note = Description of Artificial Sequence: Synthetic polypeptide; note = VH of XENP018803

SEQ ID NO: 9007 - protein, 107 aa, synthetic construct
  source 1..107: note = Description of Artificial Sequence: Synthetic polypeptide; note = VL of XENP018803
SIVMTQSPATLSVSPGERATLSCRASQSVSNDVAWYQQKPGQSPRLLINLASHRYTGVPDRFTGSGYGTEFTLTISSLQSEDFAVYFCQQDYSSPRTFGGGTKVEIK

SEQ ID NO: 9008 - protein, 5 aa, synthetic construct
  source 1..5: note = Description of Artificial Sequence: Synthetic peptide; note = XENP018803 vhCDR1
NYWMN

SEQ ID NO: 9009 - protein, 19 aa, synthetic construct
  source 1..19: note = Description of Artificial Sequence: Synthetic peptide; note = XENP018803 vhCDR2
EIRLKSNNYATHYAEPVKG

SEQ ID NO: 9010 - protein, 11 aa, synthetic construct
  source 1..11: note = Description of Artificial Sequence: Synthetic peptide; note = XENP018803 vhCDR3
YYGNYGGYFDV

SEQ ID NO: 9011 - protein, 11 aa, synthetic construct
  source 1..11: note = Description of Artificial Sequence: Synthetic peptide; note = XENP018803 vlCDR1
RASQSVSNDVA

SEQ ID NO: 9012 - protein, 7 aa, synthetic construct
  source 1..7: note = Description of Artificial Sequence: Synthetic peptide; note = XENP018803 vlCDR2
LASHRYT

SEQ ID NO: 9013 - protein, 9 aa, synthetic construct
  source 1..9: note = Description of Artificial Sequence: Synthetic peptide; note = XENP018803 vlCDR3
QQDYSSPRT

SEQ ID NO: 9014 - protein, 249 aa, synthetic construct
  source 1..249: note = Description of Artificial Sequence: Synthetic polypeptide; note = XENP018804 1G6_H1_L1.58_scFv(GKPGS)4
EVQLVESGGGLVKPGGSLRLSCAASGFTFSNYWMNWVRQAPGKGLEWVGEIRLKSNNYATHYAEPVKGRFTISRDDSKSTVYLQMNSLKTEDTAVYYCTRYYGNYGGYFDVWGAGTLVTVSSGKPGSGKPGSGKPGSGKPGSSIVMTQSPATLSVSPGERATLSCRASQSVSNDVAWYQQKPGQSPRLLINWASHRYTGVPDRFTGSGYGTEFTLTISSLQSEDFAVYFCQQDYSSPRTFGGGTKVEIK

SEQ ID NO: 9015 - protein, 122 aa, synthetic construct; identical to SEQ ID NO: 6246
  source 1..122: note = Description of Artificial Sequence: Synthetic polypeptide; note = VH of XENP018804

SEQ ID NO: 9016 - protein, 107 aa, synthetic construct
  source 1..107: note = Description of Artificial Sequence: Synthetic polypeptide; note = VL of XENP018804
SIVMTQSPATLSVSPGERATLSCRASQSVSNDVAWYQQKPGQSPRLLINWASHRYTGVPDRFTGSGYGTEFTLTISSLQSEDFAVYFCQQDYSSPRTFGGGTKVEIK

SEQ ID NO: 9017 - protein, 5 aa, synthetic construct
  source 1..5: note = Description of Artificial Sequence: Synthetic peptide; note = XENP018804 vhCDR1
NYWMN

SEQ ID NO: 9018 - protein, 19 aa, synthetic construct
  source 1..19: note = Description of Artificial Sequence: Synthetic peptide; note = XENP018804 vhCDR2
EIRLKSNNYATHYAEPVKG

SEQ ID NO: 9019 - protein, 11 aa, synthetic construct
  source 1..11: note = Description of Artificial Sequence: Synthetic peptide; note = XENP018804 vhCDR3
YYGNYGGYFDV

SEQ ID NO: 9020 - protein, 11 aa, synthetic construct
  source 1..11: note = Description of Artificial Sequence: Synthetic peptide; note = XENP018804 vlCDR1
RASQSVSNDVA

SEQ ID NO: 9021 - protein, 7 aa, synthetic construct
  source 1..7: note = Description of Artificial Sequence: Synthetic peptide; note = XENP018804 vlCDR2
WASHRYT

SEQ ID NO: 9022 - protein, 9 aa, synthetic construct
  source 1..9: note = Description of Artificial Sequence: Synthetic peptide; note = XENP018804 vlCDR3
QQDYSSPRT

SEQ ID NO: 9023 - protein, 249 aa, synthetic construct
  source 1..249: note = Description of Artificial Sequence: Synthetic polypeptide; note = XENP018805 1G6_H1_L1.59_scFv(GKPGS)4
EVQLVESGGGLVKPGGSLRLSCAASGFTFSNYWMNWVRQAPGKGLEWVGEIRLKSNNYATHYAEPVKGRFTISRDDSKSTVYLQMNSLKTEDTAVYYCTRYYGNYGGYFDVWGAGTLVTVSSGKPGSGKPGSGKPGSGKPGSSIVMTQSPATLSVSPGERATLSCRASQSVSNDVAWYQQKPGQSPRLLINVASHRYTGVPDRFTGSGYGTEFTLTISSLQSEDFAVYFCQQDYSSPRTFGGGTKVEIK

SEQ ID NO: 9024 - protein, 122 aa, synthetic construct; identical to SEQ ID NO: 6246
  source 1..122: note = Description of Artificial Sequence: Synthetic polypeptide; note = VH of XENP018805

SEQ ID NO: 9025 - protein, 107 aa, synthetic construct
  source 1..107: note = Description of Artificial Sequence: Synthetic polypeptide; note = VL of XENP018805
SIVMTQSPATLSVSPGERATLSCRASQSVSNDVAWYQQKPGQSPRLLINVASHRYTGVPDRFTGSGYGTEFTLTISSLQSEDFAVYFCQQDYSSPRTFGGGTKVEIK

SEQ ID NO: 9026 - protein, 5 aa, synthetic construct
  source 1..5: note = Description of Artificial Sequence: Synthetic peptide; note = XENP018805 vhCDR1
NYWMN

SEQ ID NO: 9027 - protein, 19 aa, synthetic construct
  source 1..19: note = Description of Artificial Sequence: Synthetic peptide; note = XENP018805 vhCDR2
EIRLKSNNYATHYAEPVKG

SEQ ID NO: 9028 - protein, 11 aa, synthetic construct
  source 1..11: note = Description of Artificial Sequence: Synthetic peptide; note = XENP018805 vhCDR3
YYGNYGGYFDV

SEQ ID NO: 9029 - protein, 11 aa, synthetic construct
  source 1..11: note = Description of Artificial Sequence: Synthetic peptide; note = XENP018805 vlCDR1
RASQSVSNDVA

SEQ ID NO: 9030 - protein, 7 aa, synthetic construct
  source 1..7: note = Description of Artificial Sequence: Synthetic peptide; note = XENP018805 vlCDR2
VASHRYT

SEQ ID NO: 9031 - protein, 9 aa, synthetic construct
  source 1..9: note = Description of Artificial Sequence: Synthetic peptide; note = XENP018805 vlCDR3
QQDYSSPRT

SEQ ID NO: 9032 - protein, 249 aa, synthetic construct
  source 1..249: note = Description of Artificial Sequence: Synthetic polypeptide; note = XENP018806 1G6_H1_L1.60_scFv(GKPGS)4
EVQLVESGGGLVKPGGSLRLSCAASGFTFSNYWMNWVRQAPGKGLEWVGEIRLKSNNYATHYAEPVKGRFTISRDDSKSTVYLQMNSLKTEDTAVYYCTRYYGNYGGYFDVWGAGTLVTVSSGKPGSGKPGSGKPGSGKPGSSIVMTQSPATLSVSPGERATLSCRASQSVSNDVAWYQQKPGQSPRLLINAASHRYTGVPDRFTGSGYGTEFTLTISSLQSEDFAVYFCQQDYSSPRTFGGGTKVEIK

SEQ ID NO: 9033 - protein, 122 aa, synthetic construct; identical to SEQ ID NO: 6246
  source 1..122: note = Description of Artificial Sequence: Synthetic polypeptide; note = VH of XENP018806

SEQ ID NO: 9034 - protein, 107 aa, synthetic construct
  source 1..107: note = Description of Artificial Sequence: Synthetic polypeptide; note = VL of XENP018806
SIVMTQSPATLSVSPGERATLSCRASQSVSNDVAWYQQKPGQSPRLLINAASHRYTGVPDRFTGSGYGTEFTLTISSLQSEDFAVYFCQQDYSSPRTFGGGTKVEIK

SEQ ID NO: 9035 - protein, 5 aa, synthetic construct
  source 1..5: note = Description of Artificial Sequence: Synthetic peptide; note = XENP018806 vhCDR1
NYWMN

SEQ ID NO: 9036 - protein, 19 aa, synthetic construct
  source 1..19: note = Description of Artificial Sequence: Synthetic peptide; note = XENP018806 vhCDR2
EIRLKSNNYATHYAEPVKG

SEQ ID NO: 9037 - protein, 11 aa, synthetic construct
  source 1..11: note = Description of Artificial Sequence: Synthetic peptide; note = XENP018806 vhCDR3
YYGNYGGYFDV

SEQ ID NO: 9038 - protein, 11 aa, synthetic construct
  source 1..11: note = Description of Artificial Sequence: Synthetic peptide; note = XENP018806 vlCDR1
RASQSVSNDVA

SEQ ID NO: 9039 - protein, 7 aa, synthetic construct
  source 1..7: note = Description of Artificial Sequence: Synthetic peptide; note = XENP018806 vlCDR2
AASHRYT

SEQ ID NO: 9040 - protein, 9 aa, synthetic construct
  source 1..9: note = Description of Artificial Sequence: Synthetic peptide; note = XENP018806 vlCDR3
QQDYSSPRT

SEQ ID NO: 9041 - protein, 249 aa, synthetic construct
  source 1..249: note = Description of Artificial Sequence: Synthetic polypeptide; note = XENP018807 1G6_H1_L1.61_scFv(GKPGS)4
EVQLVESGGGLVKPGGSLRLSCAASGFTFSNYWMNWVRQAPGKGLEWVGEIRLKSNNYATHYAEPVKGRFTISRDDSKSTVYLQMNSLKTEDTAVYYCTRYYGNYGGYFDVWGAGTLVTVSSGKPGSGKPGSGKPGSGKPGSSIVMTQSPATLSVSPGERATLSCRASQSVSNDVAWYQQKPGQSPRLLINQASHRYTGVPDRFTGSGYGTEFTLTISSLQSEDFAVYFCQQDYSSPRTFGGGTKVEIK

SEQ ID NO: 9042 - protein, 122 aa, synthetic construct; identical to SEQ ID NO: 6246
  source 1..122: note = Description of Artificial Sequence: Synthetic polypeptide; note = VH of XENP018807

SEQ ID NO: 9043 - protein, 107 aa, synthetic construct
  source 1..107: note = Description of Artificial Sequence: Synthetic polypeptide; note = VL of XENP018807
SIVMTQSPATLSVSPGERATLSCRASQSVSNDVAWYQQKPGQSPRLLINQASHRYTGVPDRFTGSGYGTEFTLTISSLQSEDFAVYFCQQDYSSPRTFGGGTKVEIK

SEQ ID NO: 9044 - protein, 5 aa, synthetic construct
  source 1..5: note = Description of Artificial Sequence: Synthetic peptide; note = XENP018807 vhCDR1
NYWMN

SEQ ID NO: 9045 - protein, 19 aa, synthetic construct
  source 1..19: note = Description of Artificial Sequence: Synthetic peptide; note = XENP018807 vhCDR2
EIRLKSNNYATHYAEPVKG

SEQ ID NO: 9046 - protein, 11 aa, synthetic construct
  source 1..11: note = Description of Artificial Sequence: Synthetic peptide; note = XENP018807 vhCDR3
YYGNYGGYFDV

SEQ ID NO: 9047 - protein, 11 aa, synthetic construct
  source 1..11: note = Description of Artificial Sequence: Synthetic peptide; note = XENP018807 vlCDR1
RASQSVSNDVA

SEQ ID NO: 9048 - protein, 7 aa, synthetic construct
  source 1..7: note = Description of Artificial Sequence: Synthetic peptide; note = XENP018807 vlCDR2
QASHRYT

SEQ ID NO: 9049 - protein, 9 aa, synthetic construct
  source 1..9: note = Description of Artificial Sequence: Synthetic peptide; note = XENP018807 vlCDR3
QQDYSSPRT

SEQ ID NO: 9050 - protein, 249 aa, synthetic construct
  source 1..249: note = Description of Artificial Sequence: Synthetic polypeptide; note = XENP018808 1G6_H1_L1.62_scFv(GKPGS)4
EVQLVESGGGLVKPGGSLRLSCAASGFTFSNYWMNWVRQAPGKGLEWVGEIRLKSNNYATHYAEPVKGRFTISRDDSKSTVYLQMNSLKTEDTAVYYCTRYYGNYGGYFDVWGAGTLVTVSSGKPGSGKPGSGKPGSGKPGSSIVMTQSPATLSVSPGERATLSCRASQSVSNDVAWYQQKPGQSPRLLINDASHRYTGVPDRFTGSGYGTEFTLTISSLQSEDFAVYFCQQDYSSPRTFGGGTKVEIK

SEQ ID NO: 9051 - protein, 122 aa, synthetic construct; identical to SEQ ID NO: 6246
  source 1..122: note = Description of Artificial Sequence: Synthetic polypeptide; note = VH of XENP018808

SEQ ID NO: 9052 - protein, 107 aa, synthetic construct
  source 1..107: note = Description of Artificial Sequence: Synthetic polypeptide; note = VL of XENP018808
SIVMTQSPATLSVSPGERATLSCRASQSVSNDVAWYQQKPGQSPRLLINDASHRYTGVPDRFTGSGYGTEFTLTISSLQSEDFAVYFCQQDYSSPRTFGGGTKVEIK

SEQ ID NO: 9053 - protein, 5 aa, synthetic construct
  source 1..5: note = Description of Artificial Sequence: Synthetic peptide; note = XENP018808 vhCDR1
NYWMN

SEQ ID NO: 9054 - protein, 19 aa, synthetic construct
  source 1..19: note = Description of Artificial Sequence: Synthetic peptide; note = XENP018808 vhCDR2
EIRLKSNNYATHYAEPVKG

SEQ ID NO: 9055 - protein, 11 aa, synthetic construct
  source 1..11: note = Description of Artificial Sequence: Synthetic peptide; note = XENP018808 vhCDR3
YYGNYGGYFDV

SEQ ID NO: 9056 - protein, 11 aa, synthetic construct
  source 1..11: note = Description of Artificial Sequence: Synthetic peptide; note = XENP018808 vlCDR1
RASQSVSNDVA

SEQ ID NO: 9057 - protein, 7 aa, synthetic construct
  source 1..7: note = Description of Artificial Sequence: Synthetic peptide; note = XENP018808 vlCDR2
DASHRYT

SEQ ID NO: 9058 - protein, 9 aa, synthetic construct
  source 1..9: note = Description of Artificial Sequence: Synthetic peptide; note = XENP018808 vlCDR3
QQDYSSPRT

SEQ ID NO: 9059 - protein, 249 aa, synthetic construct
  source 1..249: note = Description of Artificial Sequence: Synthetic polypeptide; note = XENP018809 1G6_H1_L1.63_scFv(GKPGS)4
EVQLVESGGGLVKPGGSLRLSCAASGFTFSNYWMNWVRQAPGKGLEWVGEIRLKSNNYATHYAEPVKGRFTISRDDSKSTVYLQMNSLKTEDTAVYYCTRYYGNYGGYFDVWGAGTLVTVSSGKPGSGKPGSGKPGSGKPGSSIVMTQSPATLSVSPGERATLSCRASQSVSNDVAWYQQKPGQSPRLLINKASHRYTGVPDRFTGSGYGTEFTLTISSLQSEDFAVYFCQQDYSSPRTFGGGTKVEIK

SEQ ID NO: 9060 - protein, 122 aa, synthetic construct; identical to SEQ ID NO: 6246
  source 1..122: note = Description of Artificial Sequence: Synthetic polypeptide; note = VH of XENP018809

SEQ ID NO: 9061 - protein, 107 aa, synthetic construct
  source 1..107: note = Description of Artificial Sequence: Synthetic polypeptide; note = VL of XENP018809
SIVMTQSPATLSVSPGERATLSCRASQSVSNDVAWYQQKPGQSPRLLINKASHRYTGVPDRFTGSGYGTEFTLTISSLQSEDFAVYFCQQDYSSPRTFGGGTKVEIK

SEQ ID NO: 9062 - protein, 5 aa, synthetic construct
  source 1..5: note = Description of Artificial Sequence: Synthetic peptide; note = XENP018809 vhCDR1
NYWMN

SEQ ID NO: 9063 - protein, 19 aa, synthetic construct
  source 1..19: note = Description of Artificial Sequence: Synthetic peptide; note = XENP018809 vhCDR2
EIRLKSNNYATHYAEPVKG

SEQ ID NO: 9064 - protein, 11 aa, synthetic construct
  source 1..11: note = Description of Artificial Sequence: Synthetic peptide; note = XENP018809 vhCDR3
YYGNYGGYFDV

SEQ ID NO: 9065 - protein, 11 aa, synthetic construct
  source 1..11: note = Description of Artificial Sequence: Synthetic peptide; note = XENP018809 vlCDR1
RASQSVSNDVA

SEQ ID NO: 9066 - protein, 7 aa, synthetic construct
  source 1..7: note = Description of Artificial Sequence: Synthetic peptide; note = XENP018809 vlCDR2
KASHRYT

SEQ ID NO: 9067 - protein, 9 aa, synthetic construct
  source 1..9: note = Description of Artificial Sequence: Synthetic peptide; note = XENP018809 vlCDR3
QQDYSSPRT

SEQ ID NO: 9068 - protein, 249 aa, synthetic construct
  source 1..249: note = Description of Artificial Sequence: Synthetic polypeptide; note = XENP018810 1G6_H1_L1.64_scFv(GKPGS)4
EVQLVESGGGLVKPGGSLRLSCAASGFTFSNYWMNWVRQAPGKGLEWVGEIRLKSNNYATHYAEPVKGRFTISRDDSKSTVYLQMNSLKTEDTAVYYCTRYYGNYGGYFDVWGAGTLVTVSSGKPGSGKPGSGKPGSGKPGSSIVMTQSPATLSVSPGERATLSCRASQSVSNDVAWYQQKPGQSPRLLINYASYRYTGVPDRFTGSGYGTEFTLTISSLQSEDFAVYFCQQDYSSPRTFGGGTKVEIK

SEQ ID NO: 9069 - protein, 122 aa, synthetic construct; identical to SEQ ID NO: 6246
  source 1..122: note = Description of Artificial Sequence: Synthetic polypeptide; note = VH of XENP018810

SEQ ID NO: 9070 - protein, 107 aa, synthetic construct
  source 1..107: note = Description of Artificial Sequence: Synthetic polypeptide; note = VL of XENP018810
SIVMTQSPATLSVSPGERATLSCRASQSVSNDVAWYQQKPGQSPRLLINYASYRYTGVPDRFTGSGYGTEFTLTISSLQSEDFAVYFCQQDYSSPRTFGGGTKVEIK

SEQ ID NO: 9071 - protein, 5 aa, synthetic construct
  source 1..5: note = Description of Artificial Sequence: Synthetic peptide; note = XENP018810 vhCDR1
NYWMN

SEQ ID NO: 9072 - protein, 19 aa, synthetic construct
  source 1..19: note = Description of Artificial Sequence: Synthetic peptide; note = XENP018810 vhCDR2
EIRLKSNNYATHYAEPVKG

SEQ ID NO: 9073 - protein, 11 aa, synthetic construct
  source 1..11: note = Description of Artificial Sequence: Synthetic peptide; note = XENP018810 vhCDR3
YYGNYGGYFDV

SEQ ID NO: 9074 - protein, 11 aa, synthetic construct
  source 1..11: note = Description of Artificial Sequence: Synthetic peptide; note = XENP018810 vlCDR1
RASQSVSNDVA

SEQ ID NO: 9075 - protein, 7 aa, synthetic construct
  source 1..7: note = Description of Artificial Sequence: Synthetic peptide; note = XENP018810 vlCDR2
YASYRYT

SEQ ID NO: 9076 - protein, 9 aa, synthetic construct
  source 1..9: note = Description of Artificial Sequence: Synthetic peptide; note = XENP018810 vlCDR3
QQDYSSPRT

SEQ ID NO: 9077 - protein, 249 aa, synthetic construct
  source 1..249: note = Description of Artificial Sequence: Synthetic polypeptide; note = XENP018811 1G6_H1_L1.65_scFv(GKPGS)4
EVQLVESGGGLVKPGGSLRLSCAASGFTFSNYWMNWVRQAPGKGLEWVGEIRLKSNNYATHYAEPVKGRFTISRDDSKSTVYLQMNSLKTEDTAVYYCTRYYGNYGGYFDVWGAGTLVTVSSGKPGSGKPGSGKPGSGKPGSSIVMTQSPATLSVSPGERATLSCRASQSVSNDVAWYQQKPGQSPRLLINYASQRYTGVPDRFTGSGYGTEFTLTISSLQSEDFAVYFCQQDYSSPRTFGGGTKVEIK

SEQ ID NO: 9078 - protein, 122 aa, synthetic construct; identical to SEQ ID NO: 6246
  source 1..122: note = Description of Artificial Sequence: Synthetic polypeptide; note = VH of XENP018811

SEQ ID NO: 9079 - protein, 107 aa, synthetic construct
  source 1..107: note = Description of Artificial Sequence: Synthetic polypeptide; note = VL of XENP018811
SIVMTQSPATLSVSPGERATLSCRASQSVSNDVAWYQQKPGQSPRLLINYASQRYTGVPDRFTGSGYGTEFTLTISSLQSEDFAVYFCQQDYSSPRTFGGGTKVEIK

SEQ ID NO: 9080 - protein, 5 aa, synthetic construct
  source 1..5: note = Description of Artificial Sequence: Synthetic peptide; note = XENP018811 vhCDR1
NYWMN

SEQ ID NO: 9081 - protein, 19 aa, synthetic construct
  source 1..19: note = Description of Artificial Sequence: Synthetic peptide; note = XENP018811 vhCDR2
EIRLKSNNYATHYAEPVKG

SEQ ID NO: 9082 - protein, 11 aa, synthetic construct
  source 1..11: note = Description of Artificial Sequence: Synthetic peptide; note = XENP018811 vhCDR3
YYGNYGGYFDV

SEQ ID NO: 9083 - protein, 11 aa, synthetic construct
  source 1..11: note = Description of Artificial Sequence: Synthetic peptide; note = XENP018811 vlCDR1
RASQSVSNDVA

SEQ ID NO: 9084 - protein, 7 aa, synthetic construct
  source 1..7: note = Description of Artificial Sequence: Synthetic peptide; note = XENP018811 vlCDR2
YASQRYT

SEQ ID NO: 9085 - protein, 9 aa, synthetic construct
  source 1..9: note = Description of Artificial Sequence: Synthetic peptide; note = XENP018811 vlCDR3
QQDYSSPRT

SEQ ID NO: 9086 - protein, 249 aa, synthetic construct
  source 1..249: note = Description of Artificial Sequence: Synthetic polypeptide; note = XENP018812 1G6_H1_L1.66_scFv(GKPGS)4
EVQLVESGGGLVKPGGSLRLSCAASGFTFSNYWMNWVRQAPGKGLEWVGEIRLKSNNYATHYAEPVKGRFTISRDDSKSTVYLQMNSLKTEDTAVYYCTRYYGNYGGYFDVWGAGTLVTVSSGKPGSGKPGSGKPGSGKPGSSIVMTQSPATLSVSPGERATLSCRASQSVSNDVAWYQQKPGQSPRLLINYASDRYTGVPDRFTGSGYGTEFTLTISSLQSEDFAVYFCQQDYSSPRTFGGGTKVEIK

SEQ ID NO: 9087 - protein, 122 aa, synthetic construct; identical to SEQ ID NO: 6246
  source 1..122: note = Description of Artificial Sequence: Synthetic polypeptide; note = VH of XENP018812

SEQ ID NO: 9088 - protein, 107 aa, synthetic construct
  source 1..107: note = Description of Artificial Sequence: Synthetic polypeptide; note = VL of XENP018812
SIVMTQSPATLSVSPGERATLSCRASQSVSNDVAWYQQKPGQSPRLLINYASDRYTGVPDRFTGSGYGTEFTLTISSLQSEDFAVYFCQQDYSSPRTFGGGTKVEIK

SEQ ID NO: 9089 - protein, 5 aa, synthetic construct
  source 1..5: note = Description of Artificial Sequence: Synthetic peptide; note = XENP018812 vhCDR1
NYWMN

SEQ ID NO: 9090 - protein, 19 aa, synthetic construct
  source 1..19: note = Description of Artificial Sequence: Synthetic peptide; note = XENP018812 vhCDR2
EIRLKSNNYATHYAEPVKG

SEQ ID NO: 9091 - protein, 11 aa, synthetic construct
  source 1..11: note = Description of Artificial Sequence: Synthetic peptide; note = XENP018812 vhCDR3
YYGNYGGYFDV

SEQ ID NO: 9092 - protein, 11 aa, synthetic construct
  source 1..11: note = Description of Artificial Sequence: Synthetic peptide; note = XENP018812 vlCDR1
RASQSVSNDVA

SEQ ID NO: 9093 - protein, 7 aa, synthetic construct
  source 1..7: note = Description of Artificial Sequence: Synthetic peptide; note = XENP018812 vlCDR2
YASDRYT

SEQ ID NO: 9094 - protein, 9 aa, synthetic construct
  source 1..9: note = Description of Artificial Sequence: Synthetic peptide; note = XENP018812 vlCDR3
QQDYSSPRT

SEQ ID NO: 9095 - protein, 249 aa, synthetic construct
  source 1..249: note = Description of Artificial Sequence: Synthetic polypeptide; note = XENP018813 1G6_H1_L1.67_scFv(GKPGS)4
EVQLVESGGGLVKPGGSLRLSCAASGFTFSNYWMNWVRQAPGKGLEWVGEIRLKSNNYATHYAEPVKGRFTISRDDSKSTVYLQMNSLKTEDTAVYYCTRYYGNYGGYFDVWGAGTLVTVSSGKPGSGKPGSGKPGSGKPGSSIVMTQSPATLSVSPGERATLSCRASQSVSNDVAWYQQKPGQSPRLLINYASWRYTGVPDRFTGSGYGTEFTLTISSLQSEDFAVYFCQQDYSSPRTFGGGTKVEIK

SEQ ID NO: 9096 - protein, 122 aa, synthetic construct; identical to SEQ ID NO: 6246
  source 1..122: note = Description of Artificial Sequence: Synthetic polypeptide; note = VH of XENP018813

SEQ ID NO: 9097 - protein, 107 aa, synthetic construct
  source 1..107: note = Description of Artificial Sequence: Synthetic polypeptide; note = VL of XENP018813
SIVMTQSPATLSVSPGERATLSCRASQSVSNDVAWYQQKPGQSPRLLINYASWRYTGVPDRFTGSGYGTEFTLTISSLQSEDFAVYFCQQDYSSPRTFGGGTKVEIK

SEQ ID NO: 9098 - protein, 5 aa, synthetic construct
  source 1..5: note = Description of Artificial Sequence: Synthetic peptide; note = XENP018813 vhCDR1
NYWMN

SEQ ID NO: 9099 - protein, 19 aa, synthetic construct
  source 1..19: note = Description of Artificial Sequence: Synthetic peptide; note = XENP018813 vhCDR2
EIRLKSNNYATHYAEPVKG

SEQ ID NO: 9100 - protein, 11 aa, synthetic construct
  source 1..11: note = Description of Artificial Sequence: Synthetic peptide; note = XENP018813 vhCDR3
YYGNYGGYFDV

SEQ ID NO: 9101 - protein, 11 aa, synthetic construct
  source 1..11: note = Description of Artificial Sequence: Synthetic peptide; note = XENP018813 vlCDR1
RASQSVSNDVA

SEQ ID NO: 9102 - protein, 7 aa, synthetic construct
  source 1..7: note = Description of Artificial Sequence: Synthetic peptide; note = XENP018813 vlCDR2
YASWRYT

SEQ ID NO: 9103 - protein, 9 aa, synthetic construct
  source 1..9: note = Description of Artificial Sequence: Synthetic peptide; note = XENP018813 vlCDR3
QQDYSSPRT

SEQ ID NO: 9104 - protein, 249 aa, synthetic construct
  source 1..249: note = Description of Artificial Sequence: Synthetic polypeptide; note = XENP018814 1G6_H1_L1.68_scFv(GKPGS)4
EVQLVESGGGLVKPGGSLRLSCAASGFTFSNYWMNWVRQAPGKGLEWVGEIRLKSNNYATHYAEPVKGRFTISRDDSKSTVYLQMNSLKTEDTAVYYCTRYYGNYGGYFDVWGAGTLVTVSSGKPGSGKPGSGKPGSGKPGSSIVMTQSPATLSVSPGERATLSCRASQSVSNDVAWYQQKPGQSPRLLINYASARYTGVPDRFTGSGYGTEFTLTISSLQSEDFAVYFCQQDYSSPRTFGGGTKVEIK

SEQ ID NO: 9105 - protein, 122 aa, synthetic construct; identical to SEQ ID NO: 6246
  source 1..122: note = Description of Artificial Sequence: Synthetic polypeptide; note = VH of XENP018814

SEQ ID NO: 9106 - protein, 107 aa, synthetic construct
  source 1..107: note = Description of Artificial Sequence: Synthetic polypeptide; note = VL of XENP018814
SIVMTQSPATLSVSPGERATLSCRASQSVSNDVAWYQQKPGQSPRLLINYASARYTGVPDRFTGSGYGTEFTLTISSLQSEDFAVYFCQQDYSSPRTFGGGTKVEIK

SEQ ID NO: 9107 - protein, 5 aa, synthetic construct
  source 1..5: note = Description of Artificial Sequence: Synthetic peptide; note = XENP018814 vhCDR1
NYWMN

SEQ ID NO: 9108 - protein, 19 aa, synthetic construct
  source 1..19: note = Description of Artificial Sequence: Synthetic peptide; note = XENP018814 vhCDR2
EIRLKSNNYATHYAEPVKG

SEQ ID NO: 9109 - protein, 11 aa, synthetic construct
  source 1..11: note = Description of Artificial Sequence: Synthetic peptide; note = XENP018814 vhCDR3
YYGNYGGYFDV

SEQ ID NO: 9110 - protein, 11 aa, synthetic construct
  source 1..11: note = Description of Artificial Sequence: Synthetic peptide; note = XENP018814 vlCDR1
RASQSVSNDVA

SEQ ID NO: 9111 - protein, 7 aa, synthetic construct
  source 1..7: note = Description of Artificial Sequence: Synthetic peptide; note = XENP018814 vlCDR2
YASARYT

SEQ ID NO: 9112 - protein, 9 aa, synthetic construct
  source 1..9: note = Description of Artificial Sequence: Synthetic peptide; note = XENP018814 vlCDR3
QQDYSSPRT

SEQ ID NO: 9113 - protein, 249 aa, synthetic construct
  source 1..249: note = Description of Artificial Sequence: Synthetic polypeptide; note = XENP018815 1G6_H1_L1.69_scFv(GKPGS)4
EVQLVESGGGLVKPGGSLRLSCAASGFTFSNYWMNWVRQAPGKGLEWVGEIRLKSNNYATHYAEPVKGRFTISRDDSKSTVYLQMNSLKTEDTAVYYCTRYYGNYGGYFDVWGAGTLVTVSSGKPGSGKPGSGKPGSGKPGSSIVMTQSPATLSVSPGERATLSCRASQSVSNDVAWYQQKPGQSPRLLINYASTRYTGVPDRFTGSGYGTEFTLTISSLQSEDFAVYFCQQDYSSPRTFGGGTKVEIK

SEQ ID NO: 9114 - protein, 122 aa, synthetic construct; identical to SEQ ID NO: 6246
  source 1..122: note = Description of Artificial Sequence: Synthetic polypeptide; note = VH of XENP018815

SEQ ID NO: 9115 - protein, 107 aa, synthetic construct
  source 1..107: note = Description of Artificial Sequence: Synthetic polypeptide; note = VL of XENP018815
SIVMTQSPATLSVSPGERATLSCRASQSVSNDVAWYQQKPGQSPRLLINYASTRYTGVPDRFTGSGYGTEFTLTISSLQSEDFAVYFCQQDYSSPRTFGGGTKVEIK

SEQ ID NO: 9116 - protein, 5 aa, synthetic construct
  source 1..5: note = Description of Artificial Sequence: Synthetic peptide; note = XENP018815 vhCDR1
NYWMN

SEQ ID NO: 9117 - protein, 19 aa, synthetic construct
  source 1..19: note = Description of Artificial Sequence: Synthetic peptide; note = XENP018815 vhCDR2
EIRLKSNNYATHYAEPVKG

SEQ ID NO: 9118 - protein, 11 aa, synthetic construct
  source 1..11: note = Description of Artificial Sequence: Synthetic peptide; note = XENP018815 vhCDR3
YYGNYGGYFDV

SEQ ID NO: 9119 - protein, 11 aa, synthetic construct
  source 1..11: note = Description of Artificial Sequence: Synthetic peptide; note = XENP018815 vlCDR1
RASQSVSNDVA

SEQ ID NO: 9120 - protein, 7 aa, synthetic construct
  source 1..7: note = Description of Artificial Sequence: Synthetic peptide; note = XENP018815 vlCDR2
YASTRYT

SEQ ID NO: 9121 - protein, 9 aa, synthetic construct
  source 1..9: note = Description of Artificial Sequence: Synthetic peptide; note = XENP018815 vlCDR3
QQDYSSPRT

SEQ ID NO: 9122 - protein, 249 aa, synthetic construct
  source 1..249: note = Description of Artificial Sequence: Synthetic polypeptide; note = XENP018816 1G6_H1_L1.70_scFv(GKPGS)4
EVQLVESGGGLVKPGGSLRLSCAASGFTFSNYWMNWVRQAPGKGLEWVGEIRLKSNNYATHYAEPVKGRFTISRDDSKSTVYLQMNSLKTEDTAVYYCTRYYGNYGGYFDVWGAGTLVTVSSGKPGSGKPGSGKPGSGKPGSSIVMTQSPATLSVSPGERATLSCRASQSVSNDVAWYQQKPGQSPRLLINYASKRYTGVPDRFTGSGYGTEFTLTISSLQSEDFAVYFCQQDYSSPRTFGGGTKVEIK

SEQ ID NO: 9123 - protein, 122 aa, synthetic construct; identical to SEQ ID NO: 6246
  source 1..122: note = Description of Artificial Sequence: Synthetic polypeptide; note = VH of XENP018816

SEQ ID NO: 9124 - protein, 107 aa, synthetic construct
  source 1..107: note = Description of Artificial Sequence: Synthetic polypeptide; note = VL of XENP018816
SIVMTQSPATLSVSPGERATLSCRASQSVSNDVAWYQQKPGQSPRLLINYASKRYTGVPDRFTGSGYGTEFTLTISSLQSEDFAVYFCQQDYSSPRTFGGGTKVEIK

SEQ ID NO: 9125 - protein, 5 aa, synthetic construct
  source 1..5: note = Description of Artificial Sequence: Synthetic peptide; note = XENP018816 vhCDR1
NYWMN

SEQ ID NO: 9126 - protein, 19 aa, synthetic construct
  source 1..19: note = Description of Artificial Sequence: Synthetic peptide; note = XENP018816 vhCDR2
EIRLKSNNYATHYAEPVKG

SEQ ID NO: 9127 - protein, 11 aa, synthetic construct
  source 1..11: note = Description of Artificial Sequence: Synthetic peptide; note = XENP018816 vhCDR3
YYGNYGGYFDV

SEQ ID NO: 9128 - protein, 11 aa, synthetic construct
  source 1..11: note = Description of Artificial Sequence: Synthetic peptide; note = XENP018816 vlCDR1
RASQSVSNDVA

SEQ ID NO: 9129 - protein, 7 aa, synthetic construct
  source 1..7: note = Description of Artificial Sequence: Synthetic peptide; note = XENP018816 vlCDR2
YASKRYT

SEQ ID NO: 9130 - protein, 9 aa, synthetic construct
  source 1..9: note = Description of Artificial Sequence: Synthetic peptide; note = XENP018816 vlCDR3
QQDYSSPRT

SEQ ID NO: 9131 - protein, 249 aa, synthetic construct
  source 1..249: note = Description of Artificial Sequence: Synthetic polypeptide; note = XENP018817 1G6_H1_L1.71_scFv(GKPGS)4
EVQLVESGGGLVKPGGSLRLSCAASGFTFSNYWMNWVRQAPGKGLEWVGEIRLKSNNYATHYAEPVKGRFTISRDDSKSTVYLQMNSLKTEDTAVYYCTRYYGNYGGYFDVWGAGTLVTVSSGKPGSGKPGSGKPGSGKPGSSIVMTQSPATLSVSPGERATLSCRASQSVSNDVAWYQQKPGQSPRLLINYASGRYTGVPDRFTGSGYGTEFTLTISSLQSEDFAVYFCQQDYSSPRTFGGGTKVEIK

SEQ ID NO: 9132 - protein, 122 aa, synthetic construct; identical to SEQ ID NO: 6246
  source 1..122: note = Description of Artificial Sequence: Synthetic polypeptide; note = VH of XENP018817

SEQ ID NO: 9133 - protein, 107 aa, synthetic construct
  source 1..107: note = Description of Artificial Sequence: Synthetic polypeptide; note = VL of XENP018817
SIVMTQSPATLSVSPGERATLSCRASQSVSNDVAWYQQKPGQSPRLLINYASGRYTGVPDRFTGSGYGTEFTLTISSLQSEDFAVYFCQQDYSSPRTFGGGTKVEIK

SEQ ID NO: 9134 - protein, 5 aa, synthetic construct
  source 1..5: note = Description of Artificial Sequence: Synthetic peptide; note = XENP018817 vhCDR1
NYWMN

SEQ ID NO: 9135 - protein, 19 aa, synthetic construct
  source 1..19: note = Description of Artificial Sequence: Synthetic peptide; note = XENP018817 vhCDR2
EIRLKSNNYATHYAEPVKG

SEQ ID NO: 9136 - protein, 11 aa, synthetic construct
  source 1..11: note = Description of Artificial Sequence: Synthetic peptide; note = XENP018817 vhCDR3
YYGNYGGYFDV

SEQ ID NO: 9137 - protein, 11 aa, synthetic construct
  source 1..11: note = Description of Artificial Sequence: Synthetic peptide; note = XENP018817 vlCDR1
RASQSVSNDVA

SEQ ID NO: 9138 - protein, 7 aa, synthetic construct
  source 1..7: note = Description of Artificial Sequence: Synthetic peptide; note = XENP018817 vlCDR2
YASGRYT

SEQ ID NO: 9139 - protein, 9 aa, synthetic construct
  source 1..9: note = Description of Artificial Sequence: Synthetic peptide; note = XENP018817 vlCDR3
QQDYSSPRT

SEQ ID NO: 9140 - protein, 249 aa, synthetic construct
  source 1..249: note = Description of Artificial Sequence: Synthetic polypeptide; note = XENP018818 1G6_H1_L1.72_scFv(GKPGS)4
EVQLVESGGGLVKPGGSLRLSCAASGFTFSNYWMNWVRQAPGKGLEWVGEIRLKSNNYATHYAEPVKGRFTISRDDSKSTVYLQMNSLKTEDTAVYYCTRYYGNYGGYFDVWGAGTLVTVSSGKPGSGKPGSGKPGSGKPGSSIVMTQSPATLSVSPGERATLSCRASQSVSNDVAWYQQKPGQSPRLLINYASLRYTGVPDRFTGSGYGTEFTLTISSLQSEDFAVYFCQQDYSSPRTFGGGTKVEIK

SEQ ID NO: 9141 - protein, 122 aa, synthetic construct; identical to SEQ ID NO: 6246
  source 1..122: note = Description of Artificial Sequence: Synthetic polypeptide; note = VH of XENP018818

SEQ ID NO: 9142 - protein, 107 aa, synthetic construct
  source 1..107: note = Description of Artificial Sequence: Synthetic polypeptide; note = VL of XENP018818
SIVMTQSPATLSVSPGERATLSCRASQSVSNDVAWYQQKPGQSPRLLINYASLRYTGVPDRFTGSGYGTEFTLTISSLQSEDFAVYFCQQDYSSPRTFGGGTKVEIK

SEQ ID NO: 9143 - protein, 5 aa, synthetic construct
  source 1..5: note = Description of Artificial Sequence: Synthetic peptide; note = XENP018818 vhCDR1
NYWMN

SEQ ID NO: 9144 - protein, 19 aa, synthetic construct
  source 1..19: note = Description of Artificial Sequence: Synthetic peptide; note = XENP018818 vhCDR2
EIRLKSNNYATHYAEPVKG

SEQ ID NO: 9145 - protein, 11 aa, synthetic construct
  source 1..11: note = Description of Artificial Sequence: Synthetic peptide; note = XENP018818 vhCDR3
YYGNYGGYFDV

SEQ ID NO: 9146 - protein, 11 aa, synthetic construct
  source 1..11: note = Description of Artificial Sequence: Synthetic peptide; note = XENP018818 vlCDR1
RASQSVSNDVA

SEQ ID NO: 9147 - protein, 7 aa, synthetic construct
  source 1..7: note = Description of Artificial Sequence: Synthetic peptide; note = XENP018818 vlCDR2
YASLRYT

SEQ ID NO: 9148 - protein, 9 aa, synthetic construct
  source 1..9: note = Description of Artificial Sequence: Synthetic peptide; note = XENP018818 vlCDR3
QQDYSSPRT

SEQ ID NO: 9149 - protein, 249 aa, synthetic construct
  source 1..249: note = Description of Artificial Sequence: Synthetic polypeptide; note = XENP018819 1G6_H1_L1.73_scFv(GKPGS)4
EVQLVESGGGLVKPGGSLRLSCAASGFTFSNYWMNWVRQAPGKGLEWVGEIRLKSNNYATHYAEPVKGRFTISRDDSKSTVYLQMNSLKTEDTAVYYCTRYYGNYGGYFDVWGAGTLVTVSSGKPGSGKPGSGKPGSGKPGSSIVMTQSPATLSVSPGERATLSCRASQSVSNDVAWYQQKPGQSPRLLINYASHLYTGVPDRFTGSGYGTEFTLTISSLQSEDFAVYFCQQDYSSPRTFGGGTKVEIK

SEQ ID NO: 9150 - protein, 122 aa, synthetic construct; identical to SEQ ID NO: 6246
  source 1..122: note = Description of Artificial Sequence: Synthetic polypeptide; note = VH of XENP018819

SEQ ID NO: 9151 - protein, 107 aa, synthetic construct
  source 1..107: note = Description of Artificial Sequence: Synthetic polypeptide; note = VL of XENP018819
SIVMTQSPATLSVSPGERATLSCRASQSVSNDVAWYQQKPGQSPRLLINYASHLYTGVPDRFTGSGYGTEFTLTISSLQSEDFAVYFCQQDYSSPRTFGGGTKVEIK

SEQ ID NO: 9152 - protein, 5 aa, synthetic construct
  source 1..5: note = Description of Artificial Sequence: Synthetic peptide; note = XENP018819 vhCDR1
NYWMN

SEQ ID NO: 9153 - protein, 19 aa, synthetic construct
  source 1..19: note = Description of Artificial Sequence: Synthetic peptide; note = XENP018819 vhCDR2
EIRLKSNNYATHYAEPVKG

SEQ ID NO: 9154 - protein, 11 aa, synthetic construct
  source 1..11: note = Description of Artificial Sequence: Synthetic peptide; note = XENP018819 vhCDR3
YYGNYGGYFDV

SEQ ID NO: 9155 - protein, 11 aa, synthetic construct
  source 1..11: note = Description of Artificial Sequence: Synthetic peptide; note = XENP018819 vlCDR1
RASQSVSNDVA

SEQ ID NO: 9156 - protein, 7 aa, synthetic construct
  source 1..7: note = Description of Artificial Sequence: Synthetic peptide; note = XENP018819 vlCDR2
YASHLYT

SEQ ID NO: 9157 - protein, 9 aa, synthetic construct
  source 1..9: note = Description of Artificial Sequence: Synthetic peptide; note = XENP018819 vlCDR3
QQDYSSPRT

SEQ ID NO: 9158 - protein, 249 aa, synthetic construct
  source 1..249: note = Description of Artificial Sequence: Synthetic polypeptide; note = XENP018820 1G6_H1_L1.74_scFv(GKPGS)4
EVQLVESGGGLVKPGGSLRLSCAASGFTFSNYWMNWVRQAPGKGLEWVGEIRLKSNNYATHYAEPVKGRFTISRDDSKSTVYLQMNSLKTEDTAVYYCTRYYGNYGGYFDVWGAGTLVTVSSGKPGSGKPGSGKPGSGKPGSSIVMTQSPATLSVSPGERATLSCRASQSVSNDVAWYQQKPGQSPRLLINYASHWYTGVPDRFTGSGYGTEFTLTISSLQSEDFAVYFCQQDYSSPRTFGGGTKVEIK

SEQ ID NO: 9159 - protein, 122 aa, synthetic construct; identical to SEQ ID NO: 6246
  source 1..122: note = Description of Artificial Sequence: Synthetic polypeptide; note = VH of XENP018820

SEQ ID NO: 9160 - protein, 107 aa, synthetic construct
  source 1..107: note = Description of Artificial Sequence: Synthetic polypeptide; note = VL of XENP018820
SIVMTQSPATLSVSPGERATLSCRASQSVSNDVAWYQQKPGQSPRLLINYASHWYTGVPDRFTGSGYGTEFTLTISSLQSEDFAVYFCQQDYSSPRTFGGGTKVEIK

SEQ ID NO: 9161 - protein, 5 aa, synthetic construct
  source 1..5: note = Description of Artificial Sequence: Synthetic peptide; note = XENP018820 vhCDR1
NYWMN

SEQ ID NO: 9162 - protein, 19 aa, synthetic construct
  source 1..19: note = Description of Artificial Sequence: Synthetic peptide; note = XENP018820 vhCDR2
EIRLKSNNYATHYAEPVKG

SEQ ID NO: 9163 - protein, 11 aa, synthetic construct
  source 1..11: note = Description of Artificial Sequence: Synthetic peptide; note = XENP018820 vhCDR3
YYGNYGGYFDV

SEQ ID NO: 9164 - protein, 11 aa, synthetic construct
  source 1..11: note = Description of Artificial Sequence: Synthetic peptide; note = XENP018820 vlCDR1
RASQSVSNDVA

SEQ ID NO: 9165 - protein, 7 aa, synthetic construct
  source 1..7: note = Description of Artificial Sequence: Synthetic peptide; note = XENP018820 vlCDR2
YASHWYT

SEQ ID NO: 9166 - protein, 9 aa, synthetic construct
  source 1..9: note = Description of Artificial Sequence: Synthetic peptide; note = XENP018820 vlCDR3
QQDYSSPRT

SEQ ID NO: 9167 - protein, 249 aa, synthetic construct
  source 1..249: note = Description of Artificial Sequence: Synthetic polypeptide; note = XENP018821 1G6_H1_L1.75_scFv(GKPGS)4
EVQLVESGGGLVKPGGSLRLSCAASGFTFSNYWMNWVRQAPGKGLEWVGEIRLKSNNYATHYAEPVKGRFTISRDDSKSTVYLQMNSLKTEDTAVYYCTRYYGNYGGYFDVWGAGTLVTVSSGKPGSGKPGSGKPGSGKPGSSIVMTQSPATLSVSPGERATLSCRASQSVSNDVAWYQQKPGQSPRLLINYASHSYTGVPDRFTGSGYGTEFTLTISSLQSEDFAVYFCQQDYSSPRTFGGGTKVEIK

SEQ ID NO: 9168 - protein, 122 aa, synthetic construct; identical to SEQ ID NO: 6246
  source 1..122: note = Description of Artificial Sequence: Synthetic polypeptide; note = VH of XENP018821

SEQ ID NO: 9169 - protein, 107 aa, synthetic construct
  source 1..107: note = Description of Artificial Sequence: Synthetic polypeptide; note = VL of XENP018821
SIVMTQSPATLSVSPGERATLSCRASQSVSNDVAWYQQKPGQSPRLLINYASHSYTGVPDRFTGSGYGTEFTLTISSLQSEDFAVYFCQQDYSSPRTFGGGTKVEIK

SEQ ID NO: 9170 - protein, 5 aa, synthetic construct
  source 1..5: note = Description of Artificial Sequence: Synthetic peptide; note = XENP018821 vhCDR1
NYWMN

SEQ ID NO: 9171 - protein, 19 aa, synthetic construct
  source 1..19: note = Description of Artificial Sequence: Synthetic peptide; note = XENP018821 vhCDR2
EIRLKSNNYATHYAEPVKG

SEQ ID NO: 9172 - protein, 11 aa, synthetic construct
  source 1..11: note = Description of Artificial Sequence: Synthetic peptide; note = XENP018821 vhCDR3
YYGNYGGYFDV

SEQ ID NO: 9173 - protein, 11 aa, synthetic construct
  source 1..11: note = Description of Artificial Sequence: Synthetic peptide; note = XENP018821 vlCDR1
RASQSVSNDVA

SEQ ID NO: 9174 - protein, 7 aa, synthetic construct
  source 1..7: note = Description of Artificial Sequence: Synthetic peptide; note = XENP018821 vlCDR2
YASHSYT

SEQ ID NO: 9175 - protein, 9 aa, synthetic construct
  source 1..9: note = Description of Artificial Sequence: Synthetic peptide; note = XENP018821 vlCDR3
QQDYSSPRT

SEQ ID NO: 9176 - protein, 249 aa, synthetic construct
  source 1..249: note = Description of Artificial Sequence: Synthetic polypeptide; note = XENP018822 1G6_H1_L1.76_scFv(GKPGS)4
EVQLVESGGGLVKPGGSLRLSCAASGFTFSNYWMNWVRQAPGKGLEWVGEIRLKSNNYATHYAEPVKGRFTISRDDSKSTVYLQMNSLKTEDTAVYYCTRYYGNYGGYFDVWGAGTLVTVSSGKPGSGKPGSGKPGSGKPGSSIVMTQSPATLSVSPGERATLSCRASQSVSNDVAWYQQKPGQSPRLLINYASHRFTGVPDRFTGSGYGTEFTLTISSLQSEDFAVYFCQQDYSSPRTFGGGTKVEIK

SEQ ID NO: 9177 - protein, 122 aa, synthetic construct; identical to SEQ ID NO: 6246
  source 1..122: note = Description of Artificial Sequence: Synthetic polypeptide; note = VH of XENP018822

SEQ ID NO: 9178 - protein, 107 aa, synthetic construct
  source 1..107: note = Description of Artificial Sequence: Synthetic polypeptide; note = VL of XENP018822
SIVMTQSPATLSVSPGERATLSCRASQSVSNDVAWYQQKPGQSPRLLINYASHRFTGVPDRFTGSGYGTEFTLTISSLQSEDFAVYFCQQDYSSPRTFGGGTKVEIK

SEQ ID NO: 9179 - protein, 5 aa, synthetic construct
  source 1..5: note = Description of Artificial Sequence: Synthetic peptide; note = XENP018822 vhCDR1
NYWMN

SEQ ID NO: 9180 - protein, 19 aa, synthetic construct
  source 1..19: note = Description of Artificial Sequence: Synthetic peptide; note = XENP018822 vhCDR2
EIRLKSNNYATHYAEPVKG

SEQ ID NO: 9181 - protein, 11 aa, synthetic construct
  source 1..11: note = Description of Artificial Sequence: Synthetic peptide; note = XENP018822 vhCDR3
YYGNYGGYFDV

SEQ ID NO: 9182 - protein, 11 aa, synthetic construct
  source 1..11: note = Description of Artificial Sequence: Synthetic peptide; note = XENP018822 vlCDR1
RASQSVSNDVA

SEQ ID NO: 9183 - protein, 7 aa, synthetic construct
  source 1..7: note = Description of Artificial Sequence: Synthetic peptide; note = XENP018822 vlCDR2
YASHRFT

SEQ ID NO: 9184 - protein, 9 aa, synthetic construct
  source 1..9: note = Description of Artificial Sequence: Synthetic peptide; note = XENP018822 vlCDR3
QQDYSSPRT

SEQ ID NO: 9185 - protein, 249 aa, synthetic construct
  source 1..249: note = Description of Artificial Sequence: Synthetic polypeptide; note = XENP018823 1G6_H1_L1.77_scFv(GKPGS)4
EVQLVESGGGLVKPGGSLRLSCAASGFTFSNYWMNWVRQAPGKGLEWVGEIRLKSNNYATHYAEPVKGRFTISRDDSKSTVYLQMNSLKTEDTAVYYCTRYYGNYGGYFDVWGAGTLVTVSSGKPGSGKPGSGKPGSGKPGSSIVMTQSPATLSVSPGERATLSCRASQSVSNDVAWYQQKPGQSPRLLINYASHRHTGVPDRFTGSGYGTEFTLTISSLQSEDFAVYFCQQDYSSPRTFGGGTKVEIK

SEQ ID NO: 9186 - protein, 122 aa, synthetic construct; identical to SEQ ID NO: 6246
  source 1..122: note = Description of Artificial Sequence: Synthetic polypeptide; note = VH of XENP018823

SEQ ID NO: 9187 - protein, 107 aa, synthetic construct
  source 1..107: note = Description of Artificial Sequence: Synthetic polypeptide; note = VL of XENP018823
SIVMTQSPATLSVSPGERATLSCRASQSVSNDVAWYQQKPGQSPRLLINYASHRHTGVPDRFTGSGYGTEFTLTISSLQSEDFAVYFCQQDYSSPRTFGGGTKVEIK

SEQ ID NO: 9188 - protein, 5 aa, synthetic construct
  source 1..5: note = Description of Artificial Sequence: Synthetic peptide; note = XENP018823 vhCDR1
NYWMN

SEQ ID NO: 9189 - protein, 19 aa, synthetic construct
  source 1..19: note = Description of Artificial Sequence: Synthetic peptide; note = XENP018823 vhCDR2
EIRLKSNNYATHYAEPVKG

SEQ ID NO: 9190 - protein, 11 aa, synthetic construct
  source 1..11: note = Description of Artificial Sequence: Synthetic peptide; note = XENP018823 vhCDR3
YYGNYGGYFDV

SEQ ID NO: 9191 - protein, 11 aa, synthetic construct
  source 1..11: note = Description of Artificial Sequence: Synthetic peptide; note = XENP018823 vlCDR1
RASQSVSNDVA

SEQ ID NO: 9192 - protein, 7 aa, synthetic construct
  source 1..7: note = Description of Artificial Sequence: Synthetic peptide; note = XENP018823 vlCDR2
YASHRHT

SEQ ID NO: 9193 - protein, 9 aa, synthetic construct
  source 1..9: note = Description of Artificial Sequence: Synthetic peptide; note = XENP018823 vlCDR3
QQDYSSPRT

SEQ ID NO: 9194 - protein, 249 aa, synthetic construct
  source 1..249: note = Description of Artificial Sequence: Synthetic polypeptide; note = XENP018824 1G6_H1_L1.78_scFv(GKPGS)4
EVQLVESGGGLVKPGGSLRLSCAASGFTFSNYWMNWVRQAPGKGLEWVGEIRLKSNNYATHYAEPVKGRFTISRDDSKSTVYLQMNSLKTEDTAVYYCTRYYGNYGGYFDVWGAGTLVTVSSGKPGSGKPGSGKPGSGKPGSSIVMTQSPATLSVSPGERATLSCRASQSVSNDVAWYQQKPGQSPRLLINYASHRLTGVPDRFTGSGYGTEFTLTISSLQSEDFAVYFCQQDYSSPRTFGGGTKVEIK

SEQ ID NO: 9195 - protein, 122 aa, synthetic construct; identical to SEQ ID NO: 6246
  source 1..122: note = Description of Artificial Sequence: Synthetic polypeptide; note = VH of XENP018824

SEQ ID NO: 9196 - protein, 107 aa, synthetic construct
  source 1..107: note = Description of Artificial Sequence: Synthetic polypeptide; note = VL of XENP018824
SIVMTQSPATLSVSPGERATLSCRASQSVSNDVAWYQQKPGQSPRLLINYASHRLTGVPDRFTGSGYGTEFTLTISSLQSEDFAVYFCQQDYSSPRTFGGGTKVEIK

SEQ ID NO: 9197 - protein, 5 aa, synthetic construct
  source 1..5: note = Description of Artificial Sequence: Synthetic peptide; note = XENP018824 vhCDR1
NYWMN

SEQ ID NO: 9198 - protein, 19 aa, synthetic construct
  source 1..19: note = Description of Artificial Sequence: Synthetic peptide; note = XENP018824 vhCDR2
EIRLKSNNYATHYAEPVKG

SEQ ID NO: 9199 - protein, 11 aa, synthetic construct
  source 1..11: note = Description of Artificial Sequence: Synthetic peptide; note = XENP018824 vhCDR3
YYGNYGGYFDV

SEQ ID NO: 9200 - protein, 11 aa, synthetic construct
  source 1..11: note = Description of Artificial Sequence: Synthetic peptide; note = XENP018824 vlCDR1
RASQSVSNDVA

SEQ ID NO: 9201 - protein, 7 aa, synthetic construct
  source 1..7: note = Description of Artificial Sequence: Synthetic peptide; note = XENP018824 vlCDR2
YASHRLT

SEQ ID NO: 9202 - protein, 9 aa, synthetic construct
  source 1..9: note = Description of Artificial Sequence: Synthetic peptide; note = XENP018824 vlCDR3
QQDYSSPRT

SEQ ID NO: 9203 - protein, 249 aa, synthetic construct
  source 1..249: note = Description of Artificial Sequence: Synthetic polypeptide; note = XENP018825 1G6_H1_L1.79_scFv(GKPGS)4
EVQLVESGGGLVKPGGSLRLSCAASGFTFSNYWMNWVRQAPGKGLEWVGEIRLKSNNYATHYAEPVKGRFTISRDDSKSTVYLQMNSLKTEDTAVYYCTRYYGNYGGYFDVWGAGTLVTVSSGKPGSGKPGSGKPGSGKPGSSIVMTQSPATLSVSPGERATLSCRASQSVSNDVAWYQQKPGQSPRLLINYASHRWTGVPDRFTGSGYGTEFTLTISSLQSEDFAVYFCQQDYSSPRTFGGGTKVEIK

SEQ ID NO: 9204 - protein, 122 aa, synthetic construct; identical to SEQ ID NO: 6246
  source 1..122: note = Description of Artificial Sequence: Synthetic polypeptide; note = VH of XENP018825

SEQ ID NO: 9205 - protein, 107 aa, synthetic construct
  source 1..107: note = Description of Artificial Sequence: Synthetic polypeptide; note = VL of XENP018825
SIVMTQSPATLSVSPGERATLSCRASQSVSNDVAWYQQKPGQSPRLLINYASHRWTGVPDRFTGSGYGTEFTLTISSLQSEDFAVYFCQQDYSSPRTFGGGTKVEIK

SEQ ID NO: 9206 - protein, 5 aa, synthetic construct
  source 1..5: note = Description of Artificial Sequence: Synthetic peptide; note = XENP018825 vhCDR1
NYWMN

SEQ ID NO: 9207 - protein, 19 aa, synthetic construct
  source 1..19: note = Description of Artificial Sequence: Synthetic peptide; note = XENP018825 vhCDR2
EIRLKSNNYATHYAEPVKG

SEQ ID NO: 9208 - protein, 11 aa, synthetic construct
  source 1..11: note = Description of Artificial Sequence: Synthetic peptide; note = XENP018825 vhCDR3
YYGNYGGYFDV

SEQ ID NO: 9209 - protein, 11 aa, synthetic construct
  source 1..11: note = Description of Artificial Sequence: Synthetic peptide; note = XENP018825 vlCDR1
RASQSVSNDVA

SEQ ID NO: 9210 - protein, 7 aa, synthetic construct
  source 1..7: note = Description of Artificial Sequence: Synthetic peptide; note = XENP018825 vlCDR2
YASHRWT

SEQ ID NO: 9211 - protein, 9 aa, synthetic construct
  source 1..9: note = Description of Artificial Sequence: Synthetic peptide; note = XENP018825 vlCDR3
QQDYSSPRT

SEQ ID NO: 9212 - protein, 249 aa, synthetic construct
  source 1..249: note = Description of Artificial Sequence: Synthetic polypeptide; note = XENP018826 1G6_H1_L1.80_scFv(GKPGS)4
EVQLVESGGGLVKPGGSLRLSCAASGFTFSNYWMNWVRQAPGKGLEWVGEIRLKSNNYATHYAEPVKGRFTISRDDSKSTVYLQMNSLKTEDTAVYYCTRYYGNYGGYFDVWGAGTLVTVSSGKPGSGKPGSGKPGSGKPGSSIVMTQSPATLSVSPGERATLSCRASQSVSNDVAWYQQKPGQSPRLLINYASHRVTGVPDRFTGSGYGTEFTLTISSLQSEDFAVYFCQQDYSSPRTFGGGTKVEIK

SEQ ID NO: 9213 - protein, 122 aa, synthetic construct; identical to SEQ ID NO: 6246
  source 1..122: note = Description of Artificial Sequence: Synthetic polypeptide; note = VH of XENP018826

SEQ ID NO: 9214 - protein, 107 aa, synthetic construct
  source 1..107: note = Description of Artificial Sequence: Synthetic polypeptide; note = VL of XENP018826
SIVMTQSPATLSVSPGERATLSCRASQSVSNDVAWYQQKPGQSPRLLINYASHRVTGVPDRFTGSGYGTEFTLTISSLQSEDFAVYFCQQDYSSPRTFGGGTKVEIK

SEQ ID NO: 9215 - protein, 5 aa, synthetic construct
  source 1..5: note = Description of Artificial Sequence: Synthetic peptide; note = XENP018826 vhCDR1
NYWMN

SEQ ID NO: 9216 - protein, 19 aa, synthetic construct
  source 1..19: note = Description of Artificial Sequence: Synthetic peptide; note = XENP018826 vhCDR2
EIRLKSNNYATHYAEPVKG

SEQ ID NO: 9217 - protein, 11 aa, synthetic construct
  source 1..11: note = Description of Artificial Sequence: Synthetic peptide; note = XENP018826 vhCDR3
YYGNYGGYFDV

SEQ ID NO: 9218 - protein, 11 aa, synthetic construct
  source 1..11: note = Description of Artificial Sequence: Synthetic peptide; note = XENP018826 vlCDR1
RASQSVSNDVA

SEQ ID NO: 9219 - protein, 7 aa, synthetic construct
  source 1..7: note = Description of Artificial Sequence: Synthetic peptide; note = XENP018826 vlCDR2
YASHRVT

SEQ ID NO: 9220 - protein, 9 aa, synthetic construct
  source 1..9: note = Description of Artificial Sequence: Synthetic peptide; note = XENP018826 vlCDR3
QQDYSSPRT

SEQ ID NO: 9221 - protein, 249 aa, synthetic construct
  source 1..249: note = Description of Artificial Sequence: Synthetic polypeptide; note = XENP018827 1G6_H1_L1.81_scFv(GKPGS)4
EVQLVESGGGLVKPGGSLRLSCAASGFTFSNYWMNWVRQAPGKGLEWVGEIRLKSNNYATHYAEPVKGRFTISRDDSKSTVYLQMNSLKTEDTAVYYCTRYYGNYGGYFDVWGAGTLVTVSSGKPGSGKPGSGKPGSGKPGSSIVMTQSPATLSVSPGERATLSCRASQSVSNDVAWYQQKPGQSPRLLINYASHRATGVPDRFTGSGYGTEFTLTISSLQSEDFAVYFCQQDYSSPRTFGGGTKVEIK

SEQ ID NO: 9222 - protein, 122 aa, synthetic construct; identical to SEQ ID NO: 6246
  source 1..122: note = Description of Artificial Sequence: Synthetic polypeptide; note = VH of XENP018827

SEQ ID NO: 9223 - protein, 107 aa, synthetic construct
  source 1..107: note = Description of Artificial Sequence: Synthetic polypeptide; note = VL of XENP018827
SIVMTQSPATLSVSPGERATLSCRASQSVSNDVAWYQQKPGQSPRLLINYASHRATGVPDRFTGSGYGTEFTLTISSLQSEDFAVYFCQQDYSSPRTFGGGTKVEIK

SEQ ID NO: 9224 - protein, 5 aa, synthetic construct
  source 1..5: note = Description of Artificial Sequence: Synthetic peptide; note = XENP018827 vhCDR1
NYWMN

SEQ ID NO: 9225 - protein, 19 aa, synthetic construct
  source 1..19: note = Description of Artificial Sequence: Synthetic peptide; note = XENP018827 vhCDR2
EIRLKSNNYATHYAEPVKG

SEQ ID NO: 9226 - protein, 11 aa, synthetic construct
  source 1..11: note = Description of Artificial Sequence: Synthetic peptide; note = XENP018827 vhCDR3
YYGNYGGYFDV

SEQ ID NO: 9227 - protein, 11 aa, synthetic construct
  source 1..11: note = Description of Artificial Sequence: Synthetic peptide; note = XENP018827 vlCDR1
RASQSVSNDVA

SEQ ID NO: 9228 - protein, 7 aa, synthetic construct
  source 1..7: note = Description of Artificial Sequence: Synthetic peptide; note = XENP018827 vlCDR2
YASHRAT

SEQ ID NO: 9229 - protein, 9 aa, synthetic construct
  source 1..9: note = Description of Artificial Sequence: Synthetic peptide; note = XENP018827 vlCDR3
QQDYSSPRT

SEQ ID NO: 9230 - protein, 249 aa, synthetic construct
  source 1..249: note = Description of Artificial Sequence: Synthetic polypeptide; note = XENP018828 1G6_H1_L1.82_scFv(GKPGS)4
EVQLVESGGGLVKPGGSLRLSCAASGFTFSNYWMNWVRQAPGKGLEWVGEIRLKSNNYATHYAEPVKGRFTISRDDSKSTVYLQMNSLKTEDTAVYYCTRYYGNYGGYFDVWGAGTLVTVSSGKPGSGKPGSGKPGSGKPGSSIVMTQSPATLSVSPGERATLSCRASQSVSNDVAWYQQKPGQSPRLLINYASHRQTGVPDRFTGSGYGTEFTLTISSLQSEDFAVYFCQQDYSSPRTFGGGTKVEIK

SEQ ID NO: 9231 - protein, 122 aa, synthetic construct; identical to SEQ ID NO: 6246
  source 1..122: note = Description of Artificial Sequence: Synthetic polypeptide; note = VH of XENP018828

SEQ ID NO: 9232 - protein, 107 aa, synthetic construct
  source 1..107: note = Description of Artificial Sequence: Synthetic polypeptide; note = VL of XENP018828
SIVMTQSPATLSVSPGERATLSCRASQSVSNDVAWYQQKPGQSPRLLINYASHRQTGVPDRFTGSGYGTEFTLTISSLQSEDFAVYFCQQDYSSPRTFGGGTKVEIK

SEQ ID NO: 9233 - protein, 5 aa, synthetic construct
  source 1..5: note = Description of Artificial Sequence: Synthetic peptide; note = XENP018828 vhCDR1
NYWMN

SEQ ID NO: 9234 - protein, 19 aa, synthetic construct
  source 1..19: note = Description of Artificial Sequence: Synthetic peptide; note = XENP018828 vhCDR2
EIRLKSNNYATHYAEPVKG

SEQ ID NO: 9235 - protein, 11 aa, synthetic construct
  source 1..11: note = Description of Artificial Sequence: Synthetic peptide; note = XENP018828 vhCDR3
YYGNYGGYFDV

SEQ ID NO: 9236 - protein, 11 aa, synthetic construct
  source 1..11: note = Description of Artificial Sequence: Synthetic peptide; note = XENP018828 vlCDR1
RASQSVSNDVA

SEQ ID NO: 9237 - protein, 7 aa, synthetic construct
  source 1..7: note = Description of Artificial Sequence: Synthetic peptide; note = XENP018828 vlCDR2
YASHRQT

SEQ ID NO: 9238 - protein, 9 aa, synthetic construct
  source 1..9: note = Description of Artificial Sequence: Synthetic peptide; note = XENP018828 vlCDR3
QQDYSSPRT

SEQ ID NO: 9239 - protein, 249 aa, synthetic construct
  source 1..249: note = Description of Artificial Sequence: Synthetic polypeptide; note = XENP018829 1G6_H1_L1.83_scFv(GKPGS)4
EVQLVESGGGLVKPGGSLRLSCAASGFTFSNYWMNWVRQAPGKGLEWVGEIRLKSNNYATHYAEPVKGRFTISRDDSKSTVYLQMNSLKTEDTAVYYCTRYYGNYGGYFDVWGAGTLVTVSSGKPGSGKPGSGKPGSGKPGSSIVMTQSPATLSVSPGERATLSCRASQSVSNDVAWYQQKPGQSPRLLINYASHRDTGVPDRFTGSGYGTEFTLTISSLQSEDFAVYFCQQDYSSPRTFGGGTKVEIK

SEQ ID NO: 9240 - protein, 122 aa, synthetic construct; identical to SEQ ID NO: 6246
  source 1..122: note = Description of Artificial Sequence: Synthetic polypeptide; note = VH of XENP018829

SEQ ID NO: 9241 - protein, 107 aa, synthetic construct
  source 1..107: note = Description of Artificial Sequence: Synthetic polypeptide; note = VL of XENP018829
SIVMTQSPATLSVSPGERATLSCRASQSVSNDVAWYQQKPGQSPRLLINYASHRDTGVPDRFTGSGYGTEFTLTISSLQSEDFAVYFCQQDYSSPRTFGGGTKVEIK

SEQ ID NO: 9242 - protein, 5 aa, synthetic construct
  source 1..5: note = Description of Artificial Sequence: Synthetic peptide; note = XENP018829 vhCDR1
NYWMN

SEQ ID NO: 9243 - protein, 19 aa, synthetic construct
  source 1..19: note = Description of Artificial Sequence: Synthetic peptide; note = XENP018829 vhCDR2
EIRLKSNNYATHYAEPVKG

SEQ ID NO: 9244 - protein, 11 aa, synthetic construct
  source 1..11: note = Description of Artificial Sequence: Synthetic peptide; note = XENP018829 vhCDR3
YYGNYGGYFDV

SEQ ID NO: 9245 - protein, 11 aa, synthetic construct
  source 1..11: note = Description of Artificial Sequence: Synthetic peptide; note = XENP018829 vlCDR1
RASQSVSNDVA

SEQ ID NO: 9246 - protein, 7 aa, synthetic construct
  source 1..7: note = Description of Artificial Sequence: Synthetic peptide; note = XENP018829 vlCDR2
YASHRDT

SEQ ID NO: 9247 - protein, 9 aa, synthetic construct
  source 1..9: note = Description of Artificial Sequence: Synthetic peptide; note = XENP018829 vlCDR3
QQDYSSPRT

SEQ ID NO: 9248 - protein, 249 aa, synthetic construct
  source 1..249: note = Description of Artificial Sequence: Synthetic polypeptide; note = XENP018830 1G6_H1_L1.84_scFv(GKPGS)4
EVQLVESGGGLVKPGGSLRLSCAASGFTFSNYWMNWVRQAPGKGLEWVGEIRLKSNNYATHYAEPVKGRFTISRDDSKSTVYLQMNSLKTEDTAVYYCTRYYGNYGGYFDVWGAGTLVTVSSGKPGSGKPGSGKPGSGKPGSSIVMTQSPATLSVSPGERATLSCRASQSVSNDVAWYQQKPGQSPRLLINYASHRKTGVPDRFTGSGYGTEFTLTISSLQSEDFAVYFCQQDYSSPRTFGGGTKVEIK

SEQ ID NO: 9249 - protein, 122 aa, synthetic construct; identical to SEQ ID NO: 6246
  source 1..122: note = Description of Artificial Sequence: Synthetic polypeptide; note = VH of XENP018830

SEQ ID NO: 9250 - protein, 107 aa, synthetic construct
  source 1..107: note = Description of Artificial Sequence: Synthetic polypeptide; note = VL of XENP018830
SIVMTQSPATLSVSPGERATLSCRASQSVSNDVAWYQQKPGQSPRLLINYASHRKTGVPDRFTGSGYGTEFTLTISSLQSEDFAVYFCQQDYSSPRTFGGGTKVEIK

SEQ ID NO: 9251 - protein, 5 aa, synthetic construct
  source 1..5: note = Description of Artificial Sequence: Synthetic peptide; note = XENP018830 vhCDR1
NYWMN

SEQ ID NO: 9252 - protein, 19 aa, synthetic construct
  source 1..19: note = Description of Artificial Sequence: Synthetic peptide; note = XENP018830 vhCDR2
EIRLKSNNYATHYAEPVKG

SEQ ID NO: 9253 - protein, 11 aa, synthetic construct
  source 1..11: note = Description of Artificial Sequence: Synthetic peptide; note = XENP018830 vhCDR3
YYGNYGGYFDV

SEQ ID NO: 9254 - protein, 11 aa, synthetic construct
  source 1..11: note = Description of Artificial Sequence: Synthetic peptide; note = XENP018830 vlCDR1
RASQSVSNDVA

SEQ ID NO: 9255 - protein, 7 aa, synthetic construct
  source 1..7: note = Description of Artificial Sequence: Synthetic peptide; note = XENP018830 vlCDR2
YASHRKT

SEQ ID NO: 9256 - protein, 9 aa, synthetic construct
  source 1..9: note = Description of Artificial Sequence: Synthetic peptide; note = XENP018830 vlCDR3
QQDYSSPRT

SEQ ID NO: 9257 - protein, 249 aa, synthetic construct
  source 1..249: note = Description of Artificial Sequence: Synthetic polypeptide; note = XENP018831 1G6_H1_L1.85_scFv(GKPGS)4
EVQLVESGGGLVKPGGSLRLSCAASGFTFSNYWMNWVRQAPGKGLEWVGEIRLKSNNYATHYAEPVKGRFTISRDDSKSTVYLQMNSLKTEDTAVYYCTRYYGNYGGYFDVWGAGTLVTVSSGKPGSGKPGSGKPGSGKPGSSIVMTQSPATLSVSPGERATLSCRASQSVSNDVAWYQQKPGQSPRLLINYASHRYVGVPDRFTGSGYGTEFTLTISSLQSEDFAVYFCQQDYSSPRTFGGGTKVEIK

SEQ ID NO: 9258 - protein, 122 aa, synthetic construct; identical to SEQ ID NO: 6246
  source 1..122: note = Description of Artificial Sequence: Synthetic polypeptide; note = VH of XENP018831

SEQ ID NO: 9259 - protein, 107 aa, synthetic construct
  source 1..107: note = Description of Artificial Sequence: Synthetic polypeptide; note = VL of XENP018831
SIVMTQSPATLSVSPGERATLSCRASQSVSNDVAWYQQKPGQSPRLLINYASHRYVGVPDRFTGSGYGTEFTLTISSLQSEDFAVYFCQQDYSSPRTFGGGTKVEIK

SEQ ID NO: 9260 - protein, 5 aa, synthetic construct
  source 1..5: note = Description of Artificial Sequence: Synthetic peptide; note = XENP018831 vhCDR1
NYWMN

SEQ ID NO: 9261 - protein, 19 aa, synthetic construct
  source 1..19: note = Description of Artificial Sequence: Synthetic peptide; note = XENP018831 vhCDR2
EIRLKSNNYATHYAEPVKG

SEQ ID NO: 9262 - protein, 11 aa, synthetic construct
  source 1..11: note = Description of Artificial Sequence: Synthetic peptide; note = XENP018831 vhCDR3
YYGNYGGYFDV

SEQ ID NO: 9263 - protein, 11 aa, synthetic construct
  source 1..11: note = Description of Artificial Sequence: Synthetic peptide; note = XENP018831 vlCDR1
RASQSVSNDVA

SEQ ID NO: 9264 - protein, 7 aa, synthetic construct
  source 1..7: note = Description of Artificial Sequence: Synthetic peptide; note = XENP018831 vlCDR2
YASHRYV

SEQ ID NO: 9265 - protein, 9 aa, synthetic construct
  source 1..9: note = Description of Artificial Sequence: Synthetic peptide; note = XENP018831 vlCDR3
QQDYSSPRT

SEQ ID NO: 9266 - protein, 249 aa, synthetic construct
  source 1..249: note = Description of Artificial Sequence: Synthetic polypeptide; note = XENP018832 1G6_H1_L1.86_scFv(GKPGS)4
EVQLVESGGGLVKPGGSLRLSCAASGFTFSNYWMNWVRQAPGKGLEWVGEIRLKSNNYATHYAEPVKGRFTISRDDSKSTVYLQMNSLKTEDTAVYYCTRYYGNYGGYFDVWGAGTLVTVSSGKPGSGKPGSGKPGSGKPGSSIVMTQSPATLSVSPGERATLSCRASQSVSNDVAWYQQKPGQSPRLLINYASHRYSGVPDRFTGSGYGTEFTLTISSLQSEDFAVYFCQQDYSSPRTFGGGTKVEIK

SEQ ID NO: 9267 - protein, 122 aa, synthetic construct; identical to SEQ ID NO: 6246
  source 1..122: note = Description of Artificial Sequence: Synthetic polypeptide; note = VH of XENP018832

SEQ ID NO: 9268 - protein, 107 aa, synthetic construct
  source 1..107: note = Description of Artificial Sequence: Synthetic polypeptide; note = VL of XENP018832
SIVMTQSPATLSVSPGERATLSCRASQSVSNDVAWYQQKPGQSPRLLINYASHRYSGVPDRFTGSGYGTEFTLTISSLQSEDFAVYFCQQDYSSPRTFGGGTKVEIK

SEQ ID NO: 9269 - protein, 5 aa, synthetic construct
  source 1..5: note = Description of Artificial Sequence: Synthetic peptide; note = XENP018832 vhCDR1
NYWMN

SEQ ID NO: 9270 - protein, 19 aa, synthetic construct
  source 1..19: note = Description of Artificial Sequence: Synthetic peptide; note = XENP018832 vhCDR2
EIRLKSNNYATHYAEPVKG

SEQ ID NO: 9271 - protein, 11 aa, synthetic construct
  source 1..11: note = Description of Artificial Sequence: Synthetic peptide; note = XENP018832 vhCDR3
YYGNYGGYFDV

SEQ ID NO: 9272 - protein, 11 aa, synthetic construct
  source 1..11: note = Description of Artificial Sequence: Synthetic peptide; note = XENP018832 vlCDR1
RASQSVSNDVA

SEQ ID NO: 9273 - protein, 7 aa, synthetic construct
  source 1..7: note = Description of Artificial Sequence: Synthetic peptide; note = XENP018832 vlCDR2
YASHRYS

SEQ ID NO: 9274 - protein, 9 aa, synthetic construct
  source 1..9: note = Description of Artificial Sequence: Synthetic peptide; note = XENP018832 vlCDR3
QQDYSSPRT

SEQ ID NO: 9275 - protein, 249 aa, synthetic construct
  source 1..249: note = Description of Artificial Sequence: Synthetic polypeptide; note = XENP018833 1G6_H1_L1.87_scFv(GKPGS)4
EVQLVESGGGLVKPGGSLRLSCAASGFTFSNYWMNWVRQAPGKGLEWVGEIRLKSNNYATHYAEPVKGRFTISRDDSKSTVYLQMNSLKTEDTAVYYCTRYYGNYGGYFDVWGAGTLVTVSSGKPGSGKPGSGKPGSGKPGSSIVMTQSPATLSVSPGERATLSCRASQSVSNDVAWYQQKPGQSPRLLINYASHRYAGVPDRFTGSGYGTEFTLTISSLQSEDFAVYFCQQDYSSPRTFGGGTKVEIK

SEQ ID NO: 9276 - protein, 122 aa, synthetic construct; identical to SEQ ID NO: 6246
  source 1..122: note = Description of Artificial Sequence: Synthetic polypeptide; note = VH of XENP018833

SEQ ID NO: 9277 - protein, 107 aa, synthetic construct
  source 1..107: note = Description of Artificial Sequence: Synthetic polypeptide; note = VL of XENP018833
SIVMTQSPATLSVSPGERATLSCRASQSVSNDVAWYQQKPGQSPRLLINYASHRYAGVPDRFTGSGYGTEFTLTISSLQSEDFAVYFCQQDYSSPRTFGGGTKVEIK

SEQ ID NO: 9278 - protein, 5 aa, synthetic construct
  source 1..5: note = Description of Artificial Sequence: Synthetic peptide; note = XENP018833 vhCDR1
NYWMN

SEQ ID NO: 9279 - protein, 19 aa, synthetic construct
  source 1..19: note = Description of Artificial Sequence: Synthetic peptide; note = XENP018833 vhCDR2
EIRLKSNNYATHYAEPVKG

SEQ ID NO: 9280 - protein, 11 aa, synthetic construct
  source 1..11: note = Description of Artificial Sequence: Synthetic peptide; note = XENP018833 vhCDR3
YYGNYGGYFDV

SEQ ID NO: 9281 - protein, 11 aa, synthetic construct
  source 1..11: note = Description of Artificial Sequence: Synthetic peptide; note = XENP018833 vlCDR1
RASQSVSNDVA

SEQ ID NO: 9282 - protein, 7 aa, synthetic construct
  source 1..7: note = Description of Artificial Sequence: Synthetic peptide; note = XENP018833 vlCDR2
YASHRYA

SEQ ID NO: 9283 - protein, 9 aa, synthetic construct
  source 1..9: note = Description of Artificial Sequence: Synthetic peptide; note = XENP018833 vlCDR3
QQDYSSPRT

SEQ ID NO: 9284 - protein, 249 aa, synthetic construct
  source 1..249: note = Description of Artificial Sequence: Synthetic polypeptide; note = XENP018834 1G6_H1_L1.88_scFv(GKPGS)4
EVQLVESGGGLVKPGGSLRLSCAASGFTFSNYWMNWVRQAPGKGLEWVGEIRLKSNNYATHYAEPVKGRFTISRDDSKSTVYLQMNSLKTEDTAVYYCTRYYGNYGGYFDVWGAGTLVTVSSGKPGSGKPGSGKPGSGKPGSSIVMTQSPATLSVSPGERATLSCRASQSVSNDVAWYQQKPGQSPRLLINYASHRYIGVPDRFTGSGYGTEFTLTISSLQSEDFAVYFCQQDYSSPRTFGGGTKVEIK

SEQ ID NO: 9285 - protein, 122 aa, synthetic construct; identical to SEQ ID NO: 6246
  source 1..122: note = Description of Artificial Sequence: Synthetic polypeptide; note = VH of XENP018834

SEQ ID NO: 9286 - protein, 107 aa, synthetic construct
  source 1..107: note = Description of Artificial Sequence: Synthetic polypeptide; note = VL of XENP018834
SIVMTQSPATLSVSPGERATLSCRASQSVSNDVAWYQQKPGQSPRLLINYASHRYIGVPDRFTGSGYGTEFTLTISSLQSEDFAVYFCQQDYSSPRTFGGGTKVEIK

SEQ ID NO: 9287 - protein, 5 aa, synthetic construct
  source 1..5: note = Description of Artificial Sequence: Synthetic peptide; note = XENP018834 vhCDR1
NYWMN

SEQ ID NO: 9288 - protein, 19 aa, synthetic construct
  source 1..19: note = Description of Artificial Sequence: Synthetic peptide; note = XENP018834 vhCDR2
EIRLKSNNYATHYAEPVKG

SEQ ID NO: 9289 - protein, 11 aa, synthetic construct
  source 1..11: note = Description of Artificial Sequence: Synthetic peptide; note = XENP018834 vhCDR3
YYGNYGGYFDV

SEQ ID NO: 9290 - protein, 11 aa, synthetic construct
  source 1..11: note = Description of Artificial Sequence: Synthetic peptide; note = XENP018834 vlCDR1
RASQSVSNDVA

SEQ ID NO: 9291 - protein, 7 aa, synthetic construct
  source 1..7: note = Description of Artificial Sequence: Synthetic peptide; note = XENP018834 vlCDR2
YASHRYI

SEQ ID NO: 9292 - protein, 9 aa, synthetic construct
  source 1..9: note = Description of Artificial Sequence: Synthetic peptide; note = XENP018834 vlCDR3
QQDYSSPRT

SEQ ID NO: 9293 - protein, 249 aa, synthetic construct
  source 1..249: note = Description of Artificial Sequence: Synthetic polypeptide; note = XENP018835 1G6_H1_L1.89_scFv(GKPGS)4
EVQLVESGGGLVKPGGSLRLSCAASGFTFSNYWMNWVRQAPGKGLEWVGEIRLKSNNYATHYAEPVKGRFTISRDDSKSTVYLQMNSLKTEDTAVYYCTRYYGNYGGYFDVWGAGTLVTVSSGKPGSGKPGSGKPGSGKPGSSIVMTQSPATLSVSPGERATLSCRASQSVSNDVAWYQQKPGQSPRLLINYASHRYQGVPDRFTGSGYGTEFTLTISSLQSEDFAVYFCQQDYSSPRTFGGGTKVEIK

SEQ ID NO: 9294 - protein, 122 aa, synthetic construct; identical to SEQ ID NO: 6246
  source 1..122: note = Description of Artificial Sequence: Synthetic polypeptide; note = VH of XENP018835

SEQ ID NO: 9295 - protein, 107 aa, synthetic construct
  source 1..107: note = Description of Artificial Sequence: Synthetic polypeptide; note = VL of XENP018835
SIVMTQSPATLSVSPGERATLSCRASQSVSNDVAWYQQKPGQSPRLLINYASHRYQGVPDRFTGSGYGTEFTLTISSLQSEDFAVYFCQQDYSSPRTFGGGTKVEIK

SEQ ID NO: 9296 - protein, 5 aa, synthetic construct
  source 1..5: note = Description of Artificial Sequence: Synthetic peptide; note = XENP018835 vhCDR1
NYWMN

SEQ ID NO: 9297 - protein, 19 aa, synthetic construct
  source 1..19: note = Description of Artificial Sequence: Synthetic peptide; note = XENP018835 vhCDR2
EIRLKSNNYATHYAEPVKG

SEQ ID NO: 9298 - protein, 11 aa, synthetic construct
  source 1..11: note = Description of Artificial Sequence: Synthetic peptide; note = XENP018835 vhCDR3
YYGNYGGYFDV

SEQ ID NO: 9299 - protein, 11 aa, synthetic construct
  source 1..11: note = Description of Artificial Sequence: Synthetic peptide; note = XENP018835 vlCDR1
RASQSVSNDVA

SEQ ID NO: 9300 - protein, 7 aa, synthetic construct
  source 1..7: note = Description of Artificial Sequence: Synthetic peptide; note = XENP018835 vlCDR2
YASHRYQ

SEQ ID NO: 9301 - protein, 9 aa, synthetic construct
  source 1..9: note = Description of Artificial Sequence: Synthetic peptide; note = XENP018835 vlCDR3
QQDYSSPRT

SEQ ID NO: 9302 - protein, 249 aa, synthetic construct
  source 1..249: note = Description of Artificial Sequence: Synthetic polypeptide; note = XENP018836 1G6_H1_L1.90_scFv(GKPGS)4
EVQLVESGGGLVKPGGSLRLSCAASGFTFSNYWMNWVRQAPGKGLEWVGEIRLKSNNYATHYAEPVKGRFTISRDDSKSTVYLQMNSLKTEDTAVYYCTRYYGNYGGYFDVWGAGTLVTVSSGKPGSGKPGSGKPGSGKPGSSIVMTQSPATLSVSPGERATLSCRASQSVSNDVAWYQQKPGQSPRLLINYASHRYHGVPDRFTGSGYGTEFTLTISSLQSEDFAVYFCQQDYSSPRTFGGGTKVEIK

SEQ ID NO: 9303 - protein, 122 aa, synthetic construct; identical to SEQ ID NO: 6246
  source 1..122: note = Description of Artificial Sequence: Synthetic polypeptide; note = VH of XENP018836

SEQ ID NO: 9304 - protein, 107 aa, synthetic construct
  source 1..107: note = Description of Artificial Sequence: Synthetic polypeptide; note = VL of XENP018836
SIVMTQSPATLSVSPGERATLSCRASQSVSNDVAWYQQKPGQSPRLLINYASHRYHGVPDRFTGSGYGTEFTLTISSLQSEDFAVYFCQQDYSSPRTFGGGTKVEIK

SEQ ID NO: 9305 - protein, 5 aa, synthetic construct
  source 1..5: note = Description of Artificial Sequence: Synthetic peptide; note = XENP018836 vhCDR1
NYWMN

SEQ ID NO: 9306 - protein, 19 aa, synthetic construct
  source 1..19: note = Description of Artificial Sequence: Synthetic peptide; note = XENP018836 vhCDR2
EIRLKSNNYATHYAEPVKG

SEQ ID NO: 9307 - protein, 11 aa, synthetic construct
  source 1..11: note = Description of Artificial Sequence: Synthetic peptide; note = XENP018836 vhCDR3
YYGNYGGYFDV

SEQ ID NO: 9308 - protein, 11 aa, synthetic construct
  source 1..11: note = Description of Artificial Sequence: Synthetic peptide; note = XENP018836 vlCDR1
RASQSVSNDVA

SEQ ID NO: 9309 - protein, 7 aa, synthetic construct
  source 1..7: note = Description of Artificial Sequence: Synthetic peptide; note = XENP018836 vlCDR2
YASHRYH

SEQ ID NO: 9310 - protein, 9 aa, synthetic construct
  source 1..9: note = Description of Artificial Sequence: Synthetic peptide; note = XENP018836 vlCDR3
QQDYSSPRT

SEQ ID NO: 9311 - protein, 249 aa, synthetic construct
  source 1..249: note = Description of Artificial Sequence: Synthetic polypeptide; note = XENP018837 1G6_H1_L1.91_scFv(GKPGS)4
EVQLVESGGGLVKPGGSLRLSCAASGFTFSNYWMNWVRQAPGKGLEWVGEIRLKSNNYATHYAEPVKGRFTISRDDSKSTVYLQMNSLKTEDTAVYYCTRYYGNYGGYFDVWGAGTLVTVSSGKPGSGKPGSGKPGSGKPGSSIVMTQSPATLSVSPGERATLSCRASQSVSNDVAWYQQKPGQSPRLLINYASHRYDGVPDRFTGSGYGTEFTLTISSLQSEDFAVYFCQQDYSSPRTFGGGTKVEIK

SEQ ID NO: 9312 - protein, 122 aa, synthetic construct; identical to SEQ ID NO: 6246
  source 1..122: note = Description of Artificial Sequence: Synthetic polypeptide; note = VH of XENP018837

SEQ ID NO: 9313 - protein, 107 aa, synthetic construct
  source 1..107: note = Description of Artificial Sequence: Synthetic polypeptide; note = VL of XENP018837
SIVMTQSPATLSVSPGERATLSCRASQSVSNDVAWYQQKPGQSPRLLINYASHRYDGVPDRFTGSGYGTEFTLTISSLQSEDFAVYFCQQDYSSPRTFGGGTKVEIK

SEQ ID NO: 9314 - protein, 5 aa, synthetic construct
  source 1..5: note = Description of Artificial Sequence: Synthetic peptide; note = XENP018837 vhCDR1
NYWMN

SEQ ID NO: 9315 - protein, 19 aa, synthetic construct
  source 1..19: note = Description of Artificial Sequence: Synthetic peptide; note = XENP018837 vhCDR2
EIRLKSNNYATHYAEPVKG

SEQ ID NO: 9316 - protein, 11 aa, synthetic construct
  source 1..11: note = Description of Artificial Sequence: Synthetic peptide; note = XENP018837 vhCDR3
YYGNYGGYFDV

SEQ ID NO: 9317 - protein, 11 aa, synthetic construct
  source 1..11: note = Description of Artificial Sequence: Synthetic peptide; note = XENP018837 vlCDR1
RASQSVSNDVA

SEQ ID NO: 9318 - protein, 7 aa, synthetic construct
  source 1..7: note = Description of Artificial Sequence: Synthetic peptide; note = XENP018837 vlCDR2
YASHRYD

SEQ ID NO: 9319 - protein, 9 aa, synthetic construct
  source 1..9: note = Description of Artificial Sequence: Synthetic peptide; note = XENP018837 vlCDR3
QQDYSSPRT

SEQ ID NO: 9320 - protein, 249 aa, synthetic construct
  source 1..249: note = Description of Artificial Sequence: Synthetic polypeptide; note = XENP018838 1G6_H1_L1.92_scFv(GKPGS)4
EVQLVESGGGLVKPGGSLRLSCAASGFTFSNYWMNWVRQAPGKGLEWVGEIRLKSNNYATHYAEPVKGRFTISRDDSKSTVYLQMNSLKTEDTAVYYCTRYYGNYGGYFDVWGAGTLVTVSSGKPGSGKPGSGKPGSGKPGSSIVMTQSPATLSVSPGERATLSCRASQSVSNDVAWYQQKPGQSPRLLINYASHRYKGVPDRFTGSGYGTEFTLTISSLQSEDFAVYFCQQDYSSPRTFGGGTKVEIK

SEQ ID NO: 9321 - protein, 122 aa, synthetic construct; identical to SEQ ID NO: 6246
  source 1..122: note = Description of Artificial Sequence: Synthetic polypeptide; note = VH of XENP018838

SEQ ID NO: 9322 - protein, 107 aa, synthetic construct
  source 1..107: note = Description of Artificial Sequence: Synthetic polypeptide; note = VL of XENP018838
SIVMTQSPATLSVSPGERATLSCRASQSVSNDVAWYQQKPGQSPRLLINYASHRYKGVPDRFTGSGYGTEFTLTISSLQSEDFAVYFCQQDYSSPRTFGGGTKVEIK

SEQ ID NO: 9323 - protein, 5 aa, synthetic construct
  source 1..5: note = Description of Artificial Sequence: Synthetic peptide; note = XENP018838 vhCDR1
NYWMN

SEQ ID NO: 9324 - protein, 19 aa, synthetic construct
  source 1..19: note = Description of Artificial Sequence: Synthetic peptide; note = XENP018838 vhCDR2
EIRLKSNNYATHYAEPVKG

SEQ ID NO: 9325 - protein, 11 aa, synthetic construct
  source 1..11: note = Description of Artificial Sequence: Synthetic peptide; note = XENP018838 vhCDR3
YYGNYGGYFDV

SEQ ID NO: 9326 - protein, 11 aa, synthetic construct
  source 1..11: note = Description of Artificial Sequence: Synthetic peptide; note = XENP018838 vlCDR1
RASQSVSNDVA

SEQ ID NO: 9327 - protein, 7 aa, synthetic construct
  source 1..7: note = Description of Artificial Sequence: Synthetic peptide; note = XENP018838 vlCDR2
YASHRYK

SEQ ID NO: 9328 - protein, 9 aa, synthetic construct
  source 1..9: note = Description of Artificial Sequence: Synthetic peptide; note = XENP018838 vlCDR3
QQDYSSPRT

SEQ ID NO: 9329 - protein, 249 aa, synthetic construct
  source 1..249: note = Description of Artificial Sequence: Synthetic polypeptide; note = XENP018839 1G6_H1_L1.93_scFv(GKPGS)4
EVQLVESGGGLVKPGGSLRLSCAASGFTFSNYWMNWVRQAPGKGLEWVGEIRLKSNNYATHYAEPVKGRFTISRDDSKSTVYLQMNSLKTEDTAVYYCTRYYGNYGGYFDVWGAGTLVTVSSGKPGSGKPGSGKPGSGKPGSSIVMTQSPATLSVSPGERATLSCRASQSVSNDVAWYQQKPGQSPRLLINYASHRYYGVPDRFTGSGYGTEFTLTISSLQSEDFAVYFCQQDYSSPRTFGGGTKVEIK

SEQ ID NO: 9330 - protein, 122 aa, synthetic construct; identical to SEQ ID NO: 6246
  source 1..122: note = Description of Artificial Sequence: Synthetic polypeptide; note = VH of XENP018839

SEQ ID NO: 9331 - protein, 107 aa, synthetic construct
  source 1..107: note = Description of Artificial Sequence: Synthetic polypeptide; note = VL of XENP018839
SIVMTQSPATLSVSPGERATLSCRASQSVSNDVAWYQQKPGQSPRLLINYASHRYYGVPDRFTGSGYGTEFTLTISSLQSEDFAVYFCQQDYSSPRTFGGGTKVEIK

SEQ ID NO: 9332 - protein, 5 aa, synthetic construct
  source 1..5: note = Description of Artificial Sequence: Synthetic peptide; note = XENP018839 vhCDR1
NYWMN

SEQ ID NO: 9333 - protein, 19 aa, synthetic construct
  source 1..19: note = Description of Artificial Sequence: Synthetic peptide; note = XENP018839 vhCDR2
EIRLKSNNYATHYAEPVKG

SEQ ID NO: 9334 - protein, 11 aa, synthetic construct
  source 1..11: note = Description of Artificial Sequence: Synthetic peptide; note = XENP018839 vhCDR3
YYGNYGGYFDV

SEQ ID NO: 9335 - protein, 11 aa, synthetic construct
  source 1..11: note = Description of Artificial Sequence: Synthetic peptide; note = XENP018839 vlCDR1
RASQSVSNDVA

SEQ ID NO: 9336 - protein, 7 aa, synthetic construct
  source 1..7: note = Description of Artificial Sequence: Synthetic peptide; note = XENP018839 vlCDR2
YASHRYY

SEQ ID NO: 9337 - protein, 9 aa, synthetic construct
  source 1..9: note = Description of Artificial Sequence: Synthetic peptide; note = XENP018839 vlCDR3
QQDYSSPRT

SEQ ID NO: 9338 - protein, 249 aa, synthetic construct
  source 1..249: note = Description of Artificial Sequence: Synthetic polypeptide; note = XENP018840 1G6_H1_L1.94_scFv(GKPGS)4
EVQLVESGGGLVKPGGSLRLSCAASGFTFSNYWMNWVRQAPGKGLEWVGEIRLKSNNYATHYAEPVKGRFTISRDDSKSTVYLQMNSLKTEDTAVYYCTRYYGNYGGYFDVWGAGTLVTVSSGKPGSGKPGSGKPGSGKPGSSIVMTQSPATLSVSPGERATLSCRASQSVSNDVAWYQQKPGQSPRLLINYASHRYTSVPDRFTGSGYGTEFTLTISSLQSEDFAVYFCQQDYSSPRTFGGGTKVEIK

SEQ ID NO: 9339 - protein, 122 aa, synthetic construct; identical to SEQ ID NO: 6246
  source 1..122: note = Description of Artificial Sequence: Synthetic polypeptide; note = VH of XENP018840

SEQ ID NO: 9340 - protein, 107 aa, synthetic construct
  source 1..107: note = Description of Artificial Sequence: Synthetic polypeptide; note = VL of XENP018840
SIVMTQSPATLSVSPGERATLSCRASQSVSNDVAWYQQKPGQSPRLLINYASHRYTSVPDRFTGSGYGTEFTLTISSLQSEDFAVYFCQQDYSSPRTFGGGTKVEIK

SEQ ID NO: 9341 - protein, 5 aa, synthetic construct
  source 1..5: note = Description of Artificial Sequence: Synthetic peptide; note = XENP018840 vhCDR1
NYWMN

SEQ ID NO: 9342 - protein, 19 aa, synthetic construct
  source 1..19: note = Description of Artificial Sequence: Synthetic peptide; note = XENP018840 vhCDR2
EIRLKSNNYATHYAEPVKG

SEQ ID NO: 9343 - protein, 11 aa, synthetic construct
  source 1..11: note = Description of Artificial Sequence: Synthetic peptide; note = XENP018840 vhCDR3
YYGNYGGYFDV

SEQ ID NO: 9344 - protein, 11 aa, synthetic construct
  source 1..11: note = Description of Artificial Sequence: Synthetic peptide; note = XENP018840 vlCDR1
RASQSVSNDVA

SEQ ID NO: 9345 - protein, 7 aa, synthetic construct
  source 1..7: note = Description of Artificial Sequence: Synthetic peptide; note = XENP018840 vlCDR2
YASHRYT

SEQ ID NO: 9346 - protein, 9 aa, synthetic construct
  source 1..9: note = Description of Artificial Sequence: Synthetic peptide; note = XENP018840 vlCDR3
QQDYSSPRT

SEQ ID NO: 9347 - protein, 249 aa, synthetic construct
  source 1..249: note = Description of Artificial Sequence: Synthetic polypeptide; note = XENP018841 1G6_H1_L1.95_scFv(GKPGS)4
EVQLVESGGGLVKPGGSLRLSCAASGFTFSNYWMNWVRQAPGKGLEWVGEIRLKSNNYATHYAEPVKGRFTISRDDSKSTVYLQMNSLKTEDTAVYYCTRYYGNYGGYFDVWGAGTLVTVSSGKPGSGKPGSGKPGSGKPGSSIVMTQSPATLSVSPGERATLSCRASQSVSNDVAWYQQKPGQSPRLLINYASHRYTGIPDRFTGSGYGTEFTLTISSLQSEDFAVYFCQQDYSSPRTFGGGTKVEIK

SEQ ID NO: 9348 - protein, 122 aa, synthetic construct; identical to SEQ ID NO: 6246
  source 1..122: note = Description of Artificial Sequence: Synthetic polypeptide; note = VH of XENP018841

SEQ ID NO: 9349 - protein, 107 aa, synthetic construct
  source 1..107: note = Description of Artificial Sequence: Synthetic polypeptide; note = VL of XENP018841
SIVMTQSPATLSVSPGERATLSCRASQSVSNDVAWYQQKPGQSPRLLINYASHRYTGIPDRFTGSGYGTEFTLTISSLQSEDFAVYFCQQDYSSPRTFGGGTKVEIK

SEQ ID NO: 9350 - protein, 5 aa, synthetic construct
  source 1..5: note = Description of Artificial Sequence: Synthetic peptide; note = XENP018841 vhCDR1
NYWMN

SEQ ID NO: 9351 - protein, 19 aa, synthetic construct
  source 1..19: note = Description of Artificial Sequence: Synthetic peptide; note = XENP018841 vhCDR2
EIRLKSNNYATHYAEPVKG

SEQ ID NO: 9352 - protein, 11 aa, synthetic construct
  source 1..11: note = Description of Artificial Sequence: Synthetic peptide; note = XENP018841 vhCDR3
YYGNYGGYFDV

SEQ ID NO: 9353 - protein, 11 aa, synthetic construct
  source 1..11: note = Description of Artificial Sequence: Synthetic peptide; note = XENP018841 vlCDR1
RASQSVSNDVA

SEQ ID NO: 9354 - protein, 7 aa, synthetic construct
  source 1..7: note = Description of Artificial Sequence: Synthetic peptide; note = XENP018841 vlCDR2
YASHRYT

SEQ ID NO: 9355 - protein, 9 aa, synthetic construct
  source 1..9: note = Description of Artificial Sequence: Synthetic peptide; note = XENP018841 vlCDR3
QQDYSSPRT

SEQ ID NO: 9356 - protein, 249 aa, synthetic construct
  source 1..249: note = Description of Artificial Sequence: Synthetic polypeptide; note = XENP018842 1G6_H1_L1.96_scFv(GKPGS)4
EVQLVESGGGLVKPGGSLRLSCAASGFTFSNYWMNWVRQAPGKGLEWVGEIRLKSNNYATHYAEPVKGRFTISRDDSKSTVYLQMNSLKTEDTAVYYCTRYYGNYGGYFDVWGAGTLVTVSSGKPGSGKPGSGKPGSGKPGSSIVMTQSPATLSVSPGERATLSCRASQSVSNDVAWYQQKPGQSPRLLINYASHRYTGVPARFTGSGYGTEFTLTISSLQSEDFAVYFCQQDYSSPRTFGGGTKVEIK

SEQ ID NO: 9357 - protein, 122 aa, synthetic construct; identical to SEQ ID NO: 6246
  source 1..122: note = Description of Artificial Sequence: Synthetic polypeptide; note = VH of XENP018842

SEQ ID NO: 9358 - protein, 107 aa, synthetic construct
  source 1..107: note = Description of Artificial Sequence: Synthetic polypeptide; note = VL of XENP018842
SIVMTQSPATLSVSPGERATLSCRASQSVSNDVAWYQQKPGQSPRLLINYASHRYTGVPARFTGSGYGTEFTLTISSLQSEDFAVYFCQQDYSSPRTFGGGTKVEIK

SEQ ID NO: 9359 - protein, 5 aa, synthetic construct
  source 1..5: note = Description of Artificial Sequence: Synthetic peptide; note = XENP018842 vhCDR1
NYWMN

SEQ ID NO: 9360 - protein, 19 aa, synthetic construct
  source 1..19: note = Description of Artificial Sequence: Synthetic peptide; note = XENP018842 vhCDR2
EIRLKSNNYATHYAEPVKG

SEQ ID NO: 9361 - protein, 11 aa, synthetic construct
  source 1..11: note = Description of Artificial Sequence: Synthetic peptide; note = XENP018842 vhCDR3
YYGNYGGYFDV

SEQ ID NO: 9362 - protein, 11 aa, synthetic construct
  source 1..11: note = Description of Artificial Sequence: Synthetic peptide; note = XENP018842 vlCDR1
RASQSVSNDVA

SEQ ID NO: 9363 - protein, 7 aa, synthetic construct
  source 1..7: note = Description of Artificial Sequence: Synthetic peptide; note = XENP018842 vlCDR2
YASHRYT

SEQ ID NO: 9364 - protein, 9 aa, synthetic construct
  source 1..9: note = Description of Artificial Sequence: Synthetic peptide; note = XENP018842 vlCDR3
QQDYSSPRT

SEQ ID NO: 9365 - protein, 249 aa, synthetic construct
  source 1..249: note = Description of Artificial Sequence: Synthetic polypeptide; note = XENP018843 1G6_H1_L1.97_scFv(GKPGS)4
EVQLVESGGGLVKPGGSLRLSCAASGFTFSNYWMNWVRQAPGKGLEWVGEIRLKSNNYATHYAEPVKGRFTISRDDSKSTVYLQMNSLKTEDTAVYYCTRYYGNYGGYFDVWGAGTLVTVSSGKPGSGKPGSGKPGSGKPGSSIVMTQSPATLSVSPGERATLSCRASQSVSNDVAWYQQKPGQSPRLLINYASHRYTGVPDRFSGSGYGTEFTLTISSLQSEDFAVYFCQQDYSSPRTFGGGTKVEIK

SEQ ID NO: 9366 - protein, 122 aa, synthetic construct; identical to SEQ ID NO: 6246
  source 1..122: note = Description of Artificial Sequence: Synthetic polypeptide; note = VH of XENP018843

SEQ ID NO: 9367 - protein, 107 aa, synthetic construct
  source 1..107: note = Description of Artificial Sequence: Synthetic polypeptide; note = VL of XENP018843
SIVMTQSPATLSVSPGERATLSCRASQSVSNDVAWYQQKPGQSPRLLINYASHRYTGVPDRFSGSGYGTEFTLTISSLQSEDFAVYFCQQDYSSPRTFGGGTKVEIK

SEQ ID NO: 9368 - protein, 5 aa, synthetic construct
  source 1..5: note = Description of Artificial Sequence: Synthetic peptide; note = XENP018843 vhCDR1
NYWMN

SEQ ID NO: 9369 - protein, 19 aa, synthetic construct
  source 1..19: note = Description of Artificial Sequence: Synthetic peptide; note = XENP018843 vhCDR2
EIRLKSNNYATHYAEPVKG

SEQ ID NO: 9370 - protein, 11 aa, synthetic construct
  source 1..11: note = Description of Artificial Sequence: Synthetic peptide; note = XENP018843 vhCDR3
YYGNYGGYFDV

SEQ ID NO: 9371 - protein, 11 aa, synthetic construct
  source 1..11: note = Description of Artificial Sequence: Synthetic peptide; note = XENP018843 vlCDR1
RASQSVSNDVA

SEQ ID NO: 9372 - protein, 7 aa, synthetic construct
  source 1..7: note = Description of Artificial Sequence: Synthetic peptide; note = XENP018843 vlCDR2
YASHRYT

SEQ ID NO: 9373 - protein, 9 aa, synthetic construct
  source 1..9: note = Description of Artificial Sequence: Synthetic peptide; note = XENP018843 vlCDR3
QQDYSSPRT

SEQ ID NO: 9374 - protein, 249 aa, synthetic construct
  source 1..249: note = Description of Artificial Sequence: Synthetic polypeptide; note = XENP018844 1G6_H1_L1.98_scFv(GKPGS)4
EVQLVESGGGLVKPGGSLRLSCAASGFTFSNYWMNWVRQAPGKGLEWVGEIRLKSNNYATHYAEPVKGRFTISRDDSKSTVYLQMNSLKTEDTAVYYCTRYYGNYGGYFDVWGAGTLVTVSSGKPGSGKPGSGKPGSGKPGSSIVMTQSPATLSVSPGERATLSCRASQSVSNDVAWYQQKPGQSPRLLINYASHRYTGVPDRFTGSGSGTEFTLTISSLQSEDFAVYFCQQDYSSPRTFGGGTKVEIK

SEQ ID NO: 9375 - protein, 122 aa, synthetic construct; identical to SEQ ID NO: 6246
  source 1..122: note = Description of Artificial Sequence: Synthetic polypeptide; note = VH of XENP018844

SEQ ID NO: 9376 - protein, 107 aa, synthetic construct
  source 1..107: note = Description of Artificial Sequence: Synthetic polypeptide; note = VL of XENP018844
SIVMTQSPATLSVSPGERATLSCRASQSVSNDVAWYQQKPGQSPRLLINYASHRYTGVPDRFTGSGSGTEFTLTISSLQSEDFAVYFCQQDYSSPRTFGGGTKVEIK

SEQ ID NO: 9377 - protein, 5 aa, synthetic construct
  source 1..5: note = Description of Artificial Sequence: Synthetic peptide; note = XENP018844 vhCDR1
NYWMN

SEQ ID NO: 9378 - protein, 19 aa, synthetic construct
  source 1..19: note = Description of Artificial Sequence: Synthetic peptide; note = XENP018844 vhCDR2
EIRLKSNNYATHYAEPVKG

SEQ ID NO: 9379 - protein, 11 aa, synthetic construct
  source 1..11: note = Description of Artificial Sequence: Synthetic peptide; note = XENP018844 vhCDR3
YYGNYGGYFDV

SEQ ID NO: 9380 - protein, 11 aa, synthetic construct
  source 1..11: note = Description of Artificial Sequence: Synthetic peptide; note = XENP018844 vlCDR1
RASQSVSNDVA

SEQ ID NO: 9381 - protein, 7 aa, synthetic construct
  source 1..7: note = Description of Artificial Sequence: Synthetic peptide; note = XENP018844 vlCDR2
YASHRYT

SEQ ID NO: 9382 - protein, 9 aa, synthetic construct
  source 1..9: note = Description of Artificial Sequence: Synthetic peptide; note = XENP018844 vlCDR3
QQDYSSPRT

SEQ ID NO: 9383 - protein, 249 aa, synthetic construct
  source 1..249: note = Description of Artificial Sequence: Synthetic polypeptide; note = XENP018845 1G6_H1_L1.99_scFv(GKPGS)4
EVQLVESGGGLVKPGGSLRLSCAASGFTFSNYWMNWVRQAPGKGLEWVGEIRLKSNNYATHYAEPVKGRFTISRDDSKSTVYLQMNSLKTEDTAVYYCTRYYGNYGGYFDVWGAGTLVTVSSGKPGSGKPGSGKPGSGKPGSSIVMTQSPATLSVSPGERATLSCRASQSVSNDVAWYQQKPGQSPRLLINYASHRYTGVPDRFTGSGPGTEFTLTISSLQSEDFAVYFCQQDYSSPRTFGGGTKVEIK

SEQ ID NO: 9384 - protein, 122 aa, synthetic construct; identical to SEQ ID NO: 6246
  source 1..122: note = Description of Artificial Sequence: Synthetic polypeptide; note = VH of XENP018845

SEQ ID NO: 9385 - protein, 107 aa, synthetic construct
  source 1..107: note = Description of Artificial Sequence: Synthetic polypeptide; note = VL of XENP018845
SIVMTQSPATLSVSPGERATLSCRASQSVSNDVAWYQQKPGQSPRLLINYASHRYTGVPDRFTGSGPGTEFTLTISSLQSEDFAVYFCQQDYSSPRTFGGGTKVEIK

SEQ ID NO: 9386 - protein, 5 aa, synthetic construct
  source 1..5: note = Description of Artificial Sequence: Synthetic peptide; note = XENP018845 vhCDR1
NYWMN

SEQ ID NO: 9387 - protein, 19 aa, synthetic construct
  source 1..19: note = Description of Artificial Sequence: Synthetic peptide; note = XENP018845 vhCDR2
EIRLKSNNYATHYAEPVKG

SEQ ID NO: 9388 - protein, 11 aa, synthetic construct
  source 1..11: note = Description of Artificial Sequence: Synthetic peptide; note = XENP018845 vhCDR3
YYGNYGGYFDV

SEQ ID NO: 9389 - protein, 11 aa, synthetic construct
  source 1..11: note = Description of Artificial Sequence: Synthetic peptide; note = XENP018845 vlCDR1
RASQSVSNDVA

SEQ ID NO: 9390 - protein, 7 aa, synthetic construct
  source 1..7: note = Description of Artificial Sequence: Synthetic peptide; note = XENP018845 vlCDR2
YASHRYT

SEQ ID NO: 9391 - protein, 9 aa, synthetic construct
  source 1..9: note = Description of Artificial Sequence: Synthetic peptide; note = XENP018845 vlCDR3
QQDYSSPRT

SEQ ID NO: 9392 - protein, 249 aa, synthetic construct
  source 1..249: note = Description of Artificial Sequence: Synthetic polypeptide; note = XENP018846 1G6_H1_L1.100_scFv(GKPGS)4
EVQLVESGGGLVKPGGSLRLSCAASGFTFSNYWMNWVRQAPGKGLEWVGEIRLKSNNYATHYAEPVKGRFTISRDDSKSTVYLQMNSLKTEDTAVYYCTRYYGNYGGYFDVWGAGTLVTVSSGKPGSGKPGSGKPGSGKPGSSIVMTQSPATLSVSPGERATLSCRASQSVSNDVAWYQQKPGQSPRLLINYASHRYTGVPDRFTGSGYGTDFTLTISSLQSEDFAVYFCQQDYSSPRTFGGGTKVEIK

SEQ ID NO: 9393 - protein, 122 aa, synthetic construct; identical to SEQ ID NO: 6246
  source 1..122: note = Description of Artificial Sequence: Synthetic polypeptide; note = VH of XENP018846

SEQ ID NO: 9394 - protein, 107 aa, synthetic construct
  source 1..107: note = Description of Artificial Sequence: Synthetic polypeptide; note = VL of XENP018846
SIVMTQSPATLSVSPGERATLSCRASQSVSNDVAWYQQKPGQSPRLLINYASHRYTGVPDRFTGSGYGTDFTLTISSLQSEDFAVYFCQQDYSSPRTFGGGTKVEIK

SEQ ID NO: 9395 - protein, 5 aa, synthetic construct
  source 1..5: note = Description of Artificial Sequence: Synthetic peptide; note = XENP018846 vhCDR1
NYWMN

SEQ ID NO: 9396 - protein, 19 aa, synthetic construct
  source 1..19: note = Description of Artificial Sequence: Synthetic peptide; note = XENP018846 vhCDR2
EIRLKSNNYATHYAEPVKG

SEQ ID NO: 9397 - protein, 11 aa, synthetic construct
  source 1..11: note = Description of Artificial Sequence: Synthetic peptide; note = XENP018846 vhCDR3
YYGNYGGYFDV

SEQ ID NO: 9398 - protein, 11 aa, synthetic construct
  source 1..11: note = Description of Artificial Sequence: Synthetic peptide; note = XENP018846 vlCDR1
RASQSVSNDVA

SEQ ID NO: 9399 - protein, 7 aa, synthetic construct
  source 1..7: note = Description of Artificial Sequence: Synthetic peptide; note = XENP018846 vlCDR2
YASHRYT

SEQ ID NO: 9400 - protein, 9 aa, synthetic construct
  source 1..9: note = Description of Artificial Sequence: Synthetic peptide; note = XENP018846 vlCDR3
QQDYSSPRT

SEQ ID NO: 9401 - protein, 249 aa, synthetic construct
  source 1..249: note = Description of Artificial Sequence: Synthetic polypeptide; note = XENP018847 1G6_H1_L1.101_scFv(GKPGS)4
EVQLVESGGGLVKPGGSLRLSCAASGFTFSNYWMNWVRQAPGKGLEWVGEIRLKSNNYATHYAEPVKGRFTISRDDSKSTVYLQMNSLKTEDTAVYYCTRYYGNYGGYFDVWGAGTLVTVSSGKPGSGKPGSGKPGSGKPGSSIVMTQSPATLSVSPGERATLSCRASQSVSNDVAWYQQKPGQSPRLLINYASHRYTGVPDRFTGSGYGTEFTFTISSLQSEDFAVYFCQQDYSSPRTFGGGTKVEIK

SEQ ID NO: 9402 - protein, 122 aa, synthetic construct; identical to SEQ ID NO: 6246
  source 1..122: note = Description of Artificial Sequence: Synthetic polypeptide; note = VH of XENP018847

SEQ ID NO: 9403 - protein, 107 aa, synthetic construct
  source 1..107: note = Description of Artificial Sequence: Synthetic polypeptide; note = VL of XENP018847
SIVMTQSPATLSVSPGERATLSCRASQSVSNDVAWYQQKPGQSPRLLINYASHRYTGVPDRFTGSGYGTEFTFTISSLQSEDFAVYFCQQDYSSPRTFGGGTKVEIK

SEQ ID NO: 9404 - protein, 5 aa, synthetic construct
  source 1..5: note = Description of Artificial Sequence: Synthetic peptide; note = XENP018847 vhCDR1
NYWMN

SEQ ID NO: 9405 - protein, 19 aa, synthetic construct
  source 1..19: note = Description of Artificial Sequence: Synthetic peptide; note = XENP018847 vhCDR2
EIRLKSNNYATHYAEPVKG

SEQ ID NO: 9406 - protein, 11 aa, synthetic construct
  source 1..11: note = Description of Artificial Sequence: Synthetic peptide; note = XENP018847 vhCDR3
YYGNYGGYFDV

SEQ ID NO: 9407 - protein, 11 aa, synthetic construct
  source 1..11: note = Description of Artificial Sequence: Synthetic peptide; note = XENP018847 vlCDR1
RASQSVSNDVA

SEQ ID NO: 9408 - protein, 7 aa, synthetic construct
  source 1..7: note = Description of Artificial Sequence: Synthetic peptide; note = XENP018847 vlCDR2
YASHRYT

SEQ ID NO: 9409 - protein, 9 aa, synthetic construct
  source 1..9: note = Description of Artificial Sequence: Synthetic peptide; note = XENP018847 vlCDR3
QQDYSSPRT

SEQ ID NO: 9410 - protein, 249 aa, synthetic construct
  source 1..249: note = Description of Artificial Sequence: Synthetic polypeptide; note = XENP018848 1G6_H1_L1.102_scFv(GKPGS)4
EVQLVESGGGLVKPGGSLRLSCAASGFTFSNYWMNWVRQAPGKGLEWVGEIRLKSNNYATHYAEPVKGRFTISRDDSKSTVYLQMNSLKTEDTAVYYCTRYYGNYGGYFDVWGAGTLVTVSSGKPGSGKPGSGKPGSGKPGSSIVMTQSPATLSVSPGERATLSCRASQSVSNDVAWYQQKPGQSPRLLINYASHRYTGVPDRFTGSGYGTEFTLTISTLQSEDFAVYFCQQDYSSPRTFGGGTKVEIK

SEQ ID NO: 9411 - protein, 122 aa, synthetic construct; identical to SEQ ID NO: 6246
  source 1..122: note = Description of Artificial Sequence: Synthetic polypeptide; note = VH of XENP018848

SEQ ID NO: 9412 - protein, 107 aa, synthetic construct
  source 1..107: note = Description of Artificial Sequence: Synthetic polypeptide; note = VL of XENP018848
SIVMTQSPATLSVSPGERATLSCRASQSVSNDVAWYQQKPGQSPRLLINYASHRYTGVPDRFTGSGYGTEFTLTISTLQSEDFAVYFCQQDYSSPRTFGGGTKVEIK

SEQ ID NO: 9413 - protein, 5 aa, synthetic construct
  source 1..5: note = Description of Artificial Sequence: Synthetic peptide; note = XENP018848 vhCDR1
NYWMN

SEQ ID NO: 9414 - protein, 19 aa, synthetic construct
  source 1..19: note = Description of Artificial Sequence: Synthetic peptide; note = XENP018848 vhCDR2
EIRLKSNNYATHYAEPVKG

SEQ ID NO: 9415 - protein, 11 aa, synthetic construct
  source 1..11: note = Description of Artificial Sequence: Synthetic peptide; note = XENP018848 vhCDR3
YYGNYGGYFDV

SEQ ID NO: 9416 - protein, 11 aa, synthetic construct
  source 1..11: note = Description of Artificial Sequence: Synthetic peptide; note = XENP018848 vlCDR1
RASQSVSNDVA

SEQ ID NO: 9417 - protein, 7 aa, synthetic construct
  source 1..7: note = Description of Artificial Sequence: Synthetic peptide; note = XENP018848 vlCDR2
YASHRYT

SEQ ID NO: 9418 - protein, 9 aa, synthetic construct
  source 1..9: note = Description of Artificial Sequence: Synthetic peptide; note = XENP018848 vlCDR3
QQDYSSPRT

SEQ ID NO: 9419 - protein, 249 aa, synthetic construct
  source 1..249: note = Description of Artificial Sequence: Synthetic polypeptide; note = XENP018849 1G6_H1_L1.103_scFv(GKPGS)4
EVQLVESGGGLVKPGGSLRLSCAASGFTFSNYWMNWVRQAPGKGLEWVGEIRLKSNNYATHYAEPVKGRFTISRDDSKSTVYLQMNSLKTEDTAVYYCTRYYGNYGGYFDVWGAGTLVTVSSGKPGSGKPGSGKPGSGKPGSSIVMTQSPATLSVSPGERATLSCRASQSVSNDVAWYQQKPGQSPRLLINYASHRYTGVPDRFTGSGYGTEFTLTISSVQSEDFAVYFCQQDYSSPRTFGGGTKVEIK

SEQ ID NO: 9420 - protein, 122 aa, synthetic construct; identical to SEQ ID NO: 6246
  source 1..122: note = Description of Artificial Sequence: Synthetic polypeptide; note = VH of XENP018849

SEQ ID NO: 9421 - protein, 107 aa, synthetic construct
  source 1..107: note = Description of Artificial Sequence: Synthetic polypeptide; note = VL of XENP018849
SIVMTQSPATLSVSPGERATLSCRASQSVSNDVAWYQQKPGQSPRLLINYASHRYTGVPDRFTGSGYGTEFTLTISSVQSEDFAVYFCQQDYSSPRTFGGGTKVEIK

SEQ ID NO: 9422 - protein, 5 aa, synthetic construct
  source 1..5: note = Description of Artificial Sequence: Synthetic peptide; note = XENP018849 vhCDR1
NYWMN

SEQ ID NO: 9423 - protein, 19 aa, synthetic construct
  source 1..19: note = Description of Artificial Sequence: Synthetic peptide; note = XENP018849 vhCDR2
EIRLKSNNYATHYAEPVKG

SEQ ID NO: 9424 - protein, 11 aa, synthetic construct
  source 1..11: note = Description of Artificial Sequence: Synthetic peptide; note = XENP018849 vhCDR3
YYGNYGGYFDV

SEQ ID NO: 9425 - protein, 11 aa, synthetic construct
  source 1..11: note = Description of Artificial Sequence: Synthetic peptide; note = XENP018849 vlCDR1
RASQSVSNDVA

SEQ ID NO: 9426 - protein, 7 aa, synthetic construct
  source 1..7: note = Description of Artificial Sequence: Synthetic peptide; note = XENP018849 vlCDR2
YASHRYT

SEQ ID NO: 9427 - protein, 9 aa, synthetic construct
  source 1..9: note = Description of Artificial Sequence: Synthetic peptide; note = XENP018849 vlCDR3
QQDYSSPRT

SEQ ID NO: 9428 - protein, 249 aa, synthetic construct
  source 1..249: note = Description of Artificial Sequence: Synthetic polypeptide; note = XENP018850 1G6_H1_L1.104_scFv(GKPGS)4
EVQLVESGGGLVKPGGSLRLSCAASGFTFSNYWMNWVRQAPGKGLEWVGEIRLKSNNYATHYAEPVKGRFTISRDDSKSTVYLQMNSLKTEDTAVYYCTRYYGNYGGYFDVWGAGTLVTVSSGKPGSGKPGSGKPGSGKPGSSIVMTQSPATLSVSPGERATLSCRASQSVSNDVAWYQQKPGQSPRLLINYASHRYTGVPDRFTGSGYGTEFTLTISSLQAEDFAVYFCQQDYSSPRTFGGGTKVEIK

SEQ ID NO: 9429 - protein, 122 aa, synthetic construct; identical to SEQ ID NO: 6246
  source 1..122: note = Description of Artificial Sequence: Synthetic polypeptide; note = VH of XENP018850

SEQ ID NO: 9430 - protein, 107 aa, synthetic construct
  source 1..107: note = Description of Artificial Sequence: Synthetic polypeptide; note = VL of XENP018850
SIVMTQSPATLSVSPGERATLSCRASQSVSNDVAWYQQKPGQSPRLLINYASHRYTGVPDRFTGSGYGTEFTLTISSLQAEDFAVYFCQQDYSSPRTFGGGTKVEIK

SEQ ID NO: 9431 - protein, 5 aa, synthetic construct
  source 1..5: note = Description of Artificial Sequence: Synthetic peptide; note = XENP018850 vhCDR1
NYWMN

SEQ ID NO: 9432 - protein, 19 aa, synthetic construct
  source 1..19: note = Description of Artificial Sequence: Synthetic peptide; note = XENP018850 vhCDR2
EIRLKSNNYATHYAEPVKG

SEQ ID NO: 9433 - protein, 11 aa, synthetic construct
  source 1..11: note = Description of Artificial Sequence: Synthetic peptide; note = XENP018850 vhCDR3
YYGNYGGYFDV

SEQ ID NO: 9434 - protein, 11 aa, synthetic construct
  source 1..11: note = Description of Artificial Sequence: Synthetic peptide; note = XENP018850 vlCDR1
RASQSVSNDVA

SEQ ID NO: 9435 - protein, 7 aa, synthetic construct
  source 1..7: note = Description of Artificial Sequence: Synthetic peptide; note = XENP018850 vlCDR2
YASHRYT

SEQ ID NO: 9436 - protein, 9 aa, synthetic construct
  source 1..9: note = Description of Artificial Sequence: Synthetic peptide; note = XENP018850 vlCDR3
QQDYSSPRT

SEQ ID NO: 9437 - protein, 249 aa, synthetic construct
  source 1..249: note = Description of Artificial Sequence: Synthetic polypeptide; note = XENP018851 1G6_H1_L1.105_scFv(GKPGS)4
EVQLVESGGGLVKPGGSLRLSCAASGFTFSNYWMNWVRQAPGKGLEWVGEIRLKSNNYATHYAEPVKGRFTISRDDSKSTVYLQMNSLKTEDTAVYYCTRYYGNYGGYFDVWGAGTLVTVSSGKPGSGKPGSGKPGSGKPGSSIVMTQSPATLSVSPGERATLSCRASQSVSNDVAWYQQKPGQSPRLLINYASHRYTGVPDRFTGSGYGTEFTLTISSLQSEDLAVYFCQQDYSSPRTFGGGTKVEIK

SEQ ID NO: 9438 - protein, 122 aa, synthetic construct; identical to SEQ ID NO: 6246
  source 1..122: note = Description of Artificial Sequence: Synthetic polypeptide; note = VH of XENP018851

SEQ ID NO: 9439 - protein, 107 aa, synthetic construct
  source 1..107: note = Description of Artificial Sequence: Synthetic polypeptide; note = VL of XENP018851
SIVMTQSPATLSVSPGERATLSCRASQSVSNDVAWYQQKPGQSPRLLINYASHRYTGVPDRFTGSGYGTEFTLTISSLQSEDLAVYFCQQDYSSPRTFGGGTKVEIK

SEQ ID NO: 9440 - protein, 5 aa, synthetic construct
  source 1..5: note = Description of Artificial Sequence: Synthetic peptide; note = XENP018851 vhCDR1
NYWMN

SEQ ID NO: 9441 - protein, 19 aa, synthetic construct
  source 1..19: note = Description of Artificial Sequence: Synthetic peptide; note = XENP018851 vhCDR2
EIRLKSNNYATHYAEPVKG

SEQ ID NO: 9442 - protein, 11 aa, synthetic construct
  source 1..11: note = Description of Artificial Sequence: Synthetic peptide; note = XENP018851 vhCDR3
YYGNYGGYFDV

SEQ ID NO: 9443 - protein, 11 aa, synthetic construct
  source 1..11: note = Description of Artificial Sequence: Synthetic peptide; note = XENP018851 vlCDR1
RASQSVSNDVA

SEQ ID NO: 9444 - protein, 7 aa, synthetic construct
  source 1..7: note = Description of Artificial Sequence: Synthetic peptide; note = XENP018851 vlCDR2
YASHRYT

SEQ ID NO: 9445 - protein, 9 aa, synthetic construct
  source 1..9: note = Description of Artificial Sequence: Synthetic peptide; note = XENP018851 vlCDR3
QQDYSSPRT

SEQ ID NO: 9446 - protein, 249 aa, synthetic construct
  source 1..249: note = Description of Artificial Sequence: Synthetic polypeptide; note = XENP018852 1G6_H1_L1.106_scFv(GKPGS)4
EVQLVESGGGLVKPGGSLRLSCAASGFTFSNYWMNWVRQAPGKGLEWVGEIRLKSNNYATHYAEPVKGRFTISRDDSKSTVYLQMNSLKTEDTAVYYCTRYYGNYGGYFDVWGAGTLVTVSSGKPGSGKPGSGKPGSGKPGSSIVMTQSPATLSVSPGERATLSCRASQSVSNDVAWYQQKPGQSPRLLINYASHRYTGVPDRFTGSGYGTEFTLTISSLQSEDFAVYYCQQDYSSPRTFGGGTKVEIK

SEQ ID NO: 9447 - protein, 122 aa, synthetic construct; identical to SEQ ID NO: 6246
  source 1..122: note = Description of Artificial Sequence: Synthetic polypeptide; note = VH of XENP018852

SEQ ID NO: 9448 - protein, 107 aa, synthetic construct
  source 1..107: note = Description of Artificial Sequence: Synthetic polypeptide; note = VL of XENP018852
SIVMTQSPATLSVSPGERATLSCRASQSVSNDVAWYQQKPGQSPRLLINYASHRYTGVPDRFTGSGYGTEFTLTISSLQSEDFAVYYCQQDYSSPRTFGGGTKVEIK

SEQ ID NO: 9449 - protein, 5 aa, synthetic construct
  source 1..5: note = Description of Artificial Sequence: Synthetic peptide; note = XENP018852 vhCDR1
NYWMN

SEQ ID NO: 9450 - protein, 19 aa, synthetic construct
  source 1..19: note = Description of Artificial Sequence: Synthetic peptide; note = XENP018852 vhCDR2
EIRLKSNNYATHYAEPVKG

SEQ ID NO: 9451 - protein, 11 aa, synthetic construct
  source 1..11: note = Description of Artificial Sequence: Synthetic peptide; note = XENP018852 vhCDR3
YYGNYGGYFDV

SEQ ID NO: 9452 - protein, 11 aa, synthetic construct
  source 1..11: note = Description of Artificial Sequence: Synthetic peptide; note = XENP018852 vlCDR1
RASQSVSNDVA

SEQ ID NO: 9453 - protein, 7 aa, synthetic construct
  source 1..7: note = Description of Artificial Sequence: Synthetic peptide; note = XENP018852 vlCDR2
YASHRYT

SEQ ID NO: 9454 - protein, 9 aa, synthetic construct
  source 1..9: note = Description of Artificial Sequence: Synthetic peptide; note = XENP018852 vlCDR3
QQDYSSPRT

SEQ ID NO: 9455 - protein, 249 aa, synthetic construct
  source 1..249: note = Description of Artificial Sequence: Synthetic polypeptide; note = XENP018853 1G6_H1_L1.107_scFv(GKPGS)4
EVQLVESGGGLVKPGGSLRLSCAASGFTFSNYWMNWVRQAPGKGLEWVGEIRLKSNNYATHYAEPVKGRFTISRDDSKSTVYLQMNSLKTEDTAVYYCTRYYGNYGGYFDVWGAGTLVTVSSGKPGSGKPGSGKPGSGKPGSSIVMTQSPATLSVSPGERATLSCRASQSVSNDVAWYQQKPGQSPRLLINYASHRYTGVPDRFTGSGYGTEFTLTISSLQSEDFAVYFCQQQYSSPRTFGGGTKVEIK

SEQ ID NO: 9456 - protein, 122 aa, synthetic construct; identical to SEQ ID NO: 6246
  source 1..122: note = Description of Artificial Sequence: Synthetic polypeptide; note = VH of XENP018853

SEQ ID NO: 9457 - protein, 107 aa, synthetic construct
  source 1..107: note = Description of Artificial Sequence: Synthetic polypeptide; note = VL of XENP018853
SIVMTQSPATLSVSPGERATLSCRASQSVSNDVAWYQQKPGQSPRLLINYASHRYTGVPDRFTGSGYGTEFTLTISSLQSEDFAVYFCQQQYSSPRTFGGGTKVEIK

SEQ ID NO: 9458 - protein, 5 aa, synthetic construct
  source 1..5: note = Description of Artificial Sequence: Synthetic peptide; note = XENP018853 vhCDR1
NYWMN

SEQ ID NO: 9459 - protein, 19 aa, synthetic construct
  source 1..19: note = Description of Artificial Sequence: Synthetic peptide; note = XENP018853 vhCDR2
EIRLKSNNYATHYAEPVKG

SEQ ID NO: 9460 - protein, 11 aa, synthetic construct
  source 1..11: note = Description of Artificial Sequence: Synthetic peptide; note = XENP018853 vhCDR3
YYGNYGGYFDV

SEQ ID NO: 9461 - protein, 11 aa, synthetic construct
  source 1..11: note = Description of Artificial Sequence: Synthetic peptide; note = XENP018853 vlCDR1
RASQSVSNDVA

SEQ ID NO: 9462 - protein, 7 aa, synthetic construct
  source 1..7: note = Description of Artificial Sequence: Synthetic peptide; note = XENP018853 vlCDR2
YASHRYT

SEQ ID NO: 9463 - protein, 9 aa, synthetic construct
  source 1..9: note = Description of Artificial Sequence: Synthetic peptide; note = XENP018853 vlCDR3
QQQYSSPRT

SEQ ID NO: 9464 - protein, 249 aa, synthetic construct
  source 1..249: note = Description of Artificial Sequence: Synthetic polypeptide; note = XENP018854 1G6_H1_L1.108_scFv(GKPGS)4
EVQLVESGGGLVKPGGSLRLSCAASGFTFSNYWMNWVRQAPGKGLEWVGEIRLKSNNYATHYAEPVKGRFTISRDDSKSTVYLQMNSLKTEDTAVYYCTRYYGNYGGYFDVWGAGTLVTVSSGKPGSGKPGSGKPGSGKPGSSIVMTQSPATLSVSPGERATLSCRASQSVSNDVAWYQQKPGQSPRLLINYASHRYTGVPDRFTGSGYGTEFTLTISSLQSEDFAVYFCQQEYSSPRTFGGGTKVEIK

SEQ ID NO: 9465 - protein, 122 aa, synthetic construct; identical to SEQ ID NO: 6246
  source 1..122: note = Description of Artificial Sequence: Synthetic polypeptide; note = VH of XENP018854

SEQ ID NO: 9466 - protein, 107 aa, synthetic construct
  source 1..107: note = Description of Artificial Sequence: Synthetic polypeptide; note = VL of XENP018854
SIVMTQSPATLSVSPGERATLSCRASQSVSNDVAWYQQKPGQSPRLLINYASHRYTGVPDRFTGSGYGTEFTLTISSLQSEDFAVYFCQQEYSSPRTFGGGTKVEIK

SEQ ID NO: 9467 - protein, 5 aa, synthetic construct
  source 1..5: note = Description of Artificial Sequence: Synthetic peptide; note = XENP018854 vhCDR1
NYWMN

SEQ ID NO: 9468 - protein, 19 aa, synthetic construct
  source 1..19: note = Description of Artificial Sequence: Synthetic peptide; note = XENP018854 vhCDR2
EIRLKSNNYATHYAEPVKG

SEQ ID NO: 9469 - protein, 11 aa, synthetic construct
  source 1..11: note = Description of Artificial Sequence: Synthetic peptide; note = XENP018854 vhCDR3
YYGNYGGYFDV

SEQ ID NO: 9470 - protein, 11 aa, synthetic construct
  source 1..11: note = Description of Artificial Sequence: Synthetic peptide; note = XENP018854 vlCDR1
RASQSVSNDVA

SEQ ID NO: 9471 - protein, 7 aa, synthetic construct
  source 1..7: note = Description of Artificial Sequence: Synthetic peptide; note = XENP018854 vlCDR2
YASHRYT

SEQ ID NO: 9472 - protein, 9 aa, synthetic construct
  source 1..9: note = Description of Artificial Sequence: Synthetic peptide; note = XENP018854 vlCDR3
QQEYSSPRT

SEQ ID NO: 9473 - protein, 249 aa, synthetic construct
  source 1..249: note = Description of Artificial Sequence: Synthetic polypeptide; note = XENP018855 1G6_H1_L1.109_scFv(GKPGS)4
EVQLVESGGGLVKPGGSLRLSCAASGFTFSNYWMNWVRQAPGKGLEWVGEIRLKSNNYATHYAEPVKGRFTISRDDSKSTVYLQMNSLKTEDTAVYYCTRYYGNYGGYFDVWGAGTLVTVSSGKPGSGKPGSGKPGSGKPGSSIVMTQSPATLSVSPGERATLSCRASQSVSNDVAWYQQKPGQSPRLLINYASHRYTGVPDRFTGSGYGTEFTLTISSLQSEDFAVYFCQQHYSSPRTFGGGTKVEIK

SEQ ID NO: 9474 - protein, 122 aa, synthetic construct; identical to SEQ ID NO: 6246
  source 1..122: note = Description of Artificial Sequence: Synthetic polypeptide; note = VH of XENP018855

SEQ ID NO: 9475 - protein, 107 aa, synthetic construct
  source 1..107: note = Description of Artificial Sequence: Synthetic polypeptide; note = VL of XENP018855
SIVMTQSPATLSVSPGERATLSCRASQSVSNDVAWYQQKPGQSPRLLINYASHRYTGVPDRFTGSGYGTEFTLTISSLQSEDFAVYFCQQHYSSPRTFGGGTKVEIK

SEQ ID NO: 9476 - protein, 5 aa, synthetic construct
  source 1..5: note = Description of Artificial Sequence: Synthetic peptide; note = XENP018855 vhCDR1
NYWMN

SEQ ID NO: 9477 - protein, 19 aa, synthetic construct
  source 1..19: note = Description of Artificial Sequence: Synthetic peptide; note = XENP018855 vhCDR2
EIRLKSNNYATHYAEPVKG

SEQ ID NO: 9478 - protein, 11 aa, synthetic construct
  source 1..11: note = Description of Artificial Sequence: Synthetic peptide; note = XENP018855 vhCDR3
YYGNYGGYFDV

SEQ ID NO: 9479 - protein, 11 aa, synthetic construct
  source 1..11: note = Description of Artificial Sequence: Synthetic peptide; note = XENP018855 vlCDR1
RASQSVSNDVA

SEQ ID NO: 9480 - protein, 7 aa, synthetic construct
  source 1..7: note = Description of Artificial Sequence: Synthetic peptide; note = XENP018855 vlCDR2
YASHRYT

SEQ ID NO: 9481 - protein, 9 aa, synthetic construct
  source 1..9: note = Description of Artificial Sequence: Synthetic peptide; note = XENP018855 vlCDR3
QQHYSSPRT

SEQ ID NO: 9482 - protein, 249 aa, synthetic construct
  source 1..249: note = Description of Artificial Sequence: Synthetic polypeptide; note = XENP018856 1G6_H1_L1.110_scFv(GKPGS)4
EVQLVESGGGLVKPGGSLRLSCAASGFTFSNYWMNWVRQAPGKGLEWVGEIRLKSNNYATHYAEPVKGRFTISRDDSKSTVYLQMNSLKTEDTAVYYCTRYYGNYGGYFDVWGAGTLVTVSSGKPGSGKPGSGKPGSGKPGSSIVMTQSPATLSVSPGERATLSCRASQSVSNDVAWYQQKPGQSPRLLINYASHRYTGVPDRFTGSGYGTEFTLTISSLQSEDFAVYFCQQSYSSPRTFGGGTKVEIK

SEQ ID NO: 9483 - protein, 122 aa, synthetic construct; identical to SEQ ID NO: 6246
  source 1..122: note = Description of Artificial Sequence: Synthetic polypeptide; note = VH of XENP018856

SEQ ID NO: 9484 - protein, 107 aa, synthetic construct
  source 1..107: note = Description of Artificial Sequence: Synthetic polypeptide; note = VL of XENP018856
SIVMTQSPATLSVSPGERATLSCRASQSVSNDVAWYQQKPGQSPRLLINYASHRYTGVPDRFTGSGYGTEFTLTISSLQSEDFAVYFCQQSYSSPRTFGGGTKVEIK

SEQ ID NO: 9485 - protein, 5 aa, synthetic construct
  source 1..5: note = Description of Artificial Sequence: Synthetic peptide; note = XENP018856 vhCDR1
NYWMN

SEQ ID NO: 9486 - protein, 19 aa, synthetic construct
  source 1..19: note = Description of Artificial Sequence: Synthetic peptide; note = XENP018856 vhCDR2
EIRLKSNNYATHYAEPVKG

SEQ ID NO: 9487 - protein, 11 aa, synthetic construct
  source 1..11: note = Description of Artificial Sequence: Synthetic peptide; note = XENP018856 vhCDR3
YYGNYGGYFDV

SEQ ID NO: 9488 - protein, 11 aa, synthetic construct
  source 1..11: note = Description of Artificial Sequence: Synthetic peptide; note = XENP018856 vlCDR1
RASQSVSNDVA

SEQ ID NO: 9489 - protein, 7 aa, synthetic construct
  source 1..7: note = Description of Artificial Sequence: Synthetic peptide; note = XENP018856 vlCDR2
YASHRYT

SEQ ID NO: 9490 - protein, 9 aa, synthetic construct
  source 1..9: note = Description of Artificial Sequence: Synthetic peptide; note = XENP018856 vlCDR3
QQSYSSPRT

SEQ ID NO: 9491 - protein, 249 aa, synthetic construct
  source 1..249: note = Description of Artificial Sequence: Synthetic polypeptide; note = XENP018857 1G6_H1_L1.111_scFv(GKPGS)4
EVQLVESGGGLVKPGGSLRLSCAASGFTFSNYWMNWVRQAPGKGLEWVGEIRLKSNNYATHYAEPVKGRFTISRDDSKSTVYLQMNSLKTEDTAVYYCTRYYGNYGGYFDVWGAGTLVTVSSGKPGSGKPGSGKPGSGKPGSSIVMTQSPATLSVSPGERATLSCRASQSVSNDVAWYQQKPGQSPRLLINYASHRYTGVPDRFTGSGYGTEFTLTISSLQSEDFAVYFCQQRYSSPRTFGGGTKVEIK

SEQ ID NO: 9492 - protein, 122 aa, synthetic construct; identical to SEQ ID NO: 6246
  source 1..122: note = Description of Artificial Sequence: Synthetic polypeptide; note = VH of XENP018857

SEQ ID NO: 9493 - protein, 107 aa, synthetic construct
  source 1..107: note = Description of Artificial Sequence: Synthetic polypeptide; note = VL of XENP018857
SIVMTQSPATLSVSPGERATLSCRASQSVSNDVAWYQQKPGQSPRLLINYASHRYTGVPDRFTGSGYGTEFTLTISSLQSEDFAVYFCQQRYSSPRTFGGGTKVEIK

SEQ ID NO: 9494 - protein, 5 aa, synthetic construct
  source 1..5: note = Description of Artificial Sequence: Synthetic peptide; note = XENP018857 vhCDR1
NYWMN

SEQ ID NO: 9495 - protein, 19 aa, synthetic construct
  source 1..19: note = Description of Artificial Sequence: Synthetic peptide; note = XENP018857 vhCDR2
EIRLKSNNYATHYAEPVKG

SEQ ID NO: 9496 - protein, 11 aa, synthetic construct
  source 1..11: note = Description of Artificial Sequence: Synthetic peptide; note = XENP018857 vhCDR3
YYGNYGGYFDV

SEQ ID NO: 9497 - protein, 11 aa, synthetic construct
  source 1..11: note = Description of Artificial Sequence: Synthetic peptide; note = XENP018857 vlCDR1
RASQSVSNDVA

SEQ ID NO: 9498 - protein, 7 aa, synthetic construct
  source 1..7: note = Description of Artificial Sequence: Synthetic peptide; note = XENP018857 vlCDR2
YASHRYT

SEQ ID NO: 9499 - protein, 9 aa, synthetic construct
  source 1..9: note = Description of Artificial Sequence: Synthetic peptide; note = XENP018857 vlCDR3
QQRYSSPRT

SEQ ID NO: 9500 - protein, 249 aa, synthetic construct
  source 1..249: note = Description of Artificial Sequence: Synthetic polypeptide; note = XENP018858 1G6_H1_L1.112_scFv(GKPGS)4
EVQLVESGGGLVKPGGSLRLSCAASGFTFSNYWMNWVRQAPGKGLEWVGEIRLKSNNYATHYAEPVKGRFTISRDDSKSTVYLQMNSLKTEDTAVYYCTRYYGNYGGYFDVWGAGTLVTVSSGKPGSGKPGSGKPGSGKPGSSIVMTQSPATLSVSPGERATLSCRASQSVSNDVAWYQQKPGQSPRLLINYASHRYTGVPDRFTGSGYGTEFTLTISSLQSEDFAVYFCQQLYSSPRTFGGGTKVEIK

SEQ ID NO: 9501 - protein, 122 aa, synthetic construct; identical to SEQ ID NO: 6246
  source 1..122: note = Description of Artificial Sequence: Synthetic polypeptide; note = VH of XENP018858

SEQ ID NO: 9502 - protein, 107 aa, synthetic construct
  source 1..107: note = Description of Artificial Sequence: Synthetic polypeptide; note = VL of XENP018858
SIVMTQSPATLSVSPGERATLSCRASQSVSNDVAWYQQKPGQSPRLLINYASHRYTGVPDRFTGSGYGTEFTLTISSLQSEDFAVYFCQQLYSSPRTFGGGTKVEIK

SEQ ID NO: 9503 - protein, 5 aa, synthetic construct
  source 1..5: note = Description of Artificial Sequence: Synthetic peptide; note = XENP018858 vhCDR1
NYWMN

SEQ ID NO: 9504 - protein, 19 aa, synthetic construct
  source 1..19: note = Description of Artificial Sequence: Synthetic peptide; note = XENP018858 vhCDR2
EIRLKSNNYATHYAEPVKG

SEQ ID NO: 9505 - protein, 11 aa, synthetic construct
  source 1..11: note = Description of Artificial Sequence: Synthetic peptide; note = XENP018858 vhCDR3
YYGNYGGYFDV

SEQ ID NO: 9506 - protein, 11 aa, synthetic construct
  source 1..11: note = Description of Artificial Sequence: Synthetic peptide; note = XENP018858 vlCDR1
RASQSVSNDVA

SEQ ID NO: 9507 - protein, 7 aa, synthetic construct
  source 1..7: note = Description of Artificial Sequence: Synthetic peptide; note = XENP018858 vlCDR2
YASHRYT

SEQ ID NO: 9508 - protein, 9 aa, synthetic construct
  source 1..9: note = Description of Artificial Sequence: Synthetic peptide; note = XENP018858 vlCDR3
QQLYSSPRT

SEQ ID NO: 9509 - protein, 249 aa, synthetic construct
  source 1..249: note = Description of Artificial Sequence: Synthetic polypeptide; note = XENP018859 1G6_H1_L1.113_scFv(GKPGS)4
EVQLVESGGGLVKPGGSLRLSCAASGFTFSNYWMNWVRQAPGKGLEWVGEIRLKSNNYATHYAEPVKGRFTISRDDSKSTVYLQMNSLKTEDTAVYYCTRYYGNYGGYFDVWGAGTLVTVSSGKPGSGKPGSGKPGSGKPGSSIVMTQSPATLSVSPGERATLSCRASQSVSNDVAWYQQKPGQSPRLLINYASHRYTGVPDRFTGSGYGTEFTLTISSLQSEDFAVYFCQQTYSSPRTFGGGTKVEIK

SEQ ID NO: 9510 - protein, 122 aa, synthetic construct; identical to SEQ ID NO: 6246
  source 1..122: note = Description of Artificial Sequence: Synthetic polypeptide; note = VH of XENP018859

SEQ ID NO: 9511 - protein, 107 aa, synthetic construct
  source 1..107: note = Description of Artificial Sequence: Synthetic polypeptide; note = VL of XENP018859
SIVMTQSPATLSVSPGERATLSCRASQSVSNDVAWYQQKPGQSPRLLINYASHRYTGVPDRFTGSGYGTEFTLTISSLQSEDFAVYFCQQTYSSPRTFGGGTKVEIK

SEQ ID NO: 9512 - protein, 5 aa, synthetic construct
  source 1..5: note = Description of Artificial Sequence: Synthetic peptide; note = XENP018859 vhCDR1
NYWMN

SEQ ID NO: 9513 - protein, 19 aa, synthetic construct
  source 1..19: note = Description of Artificial Sequence: Synthetic peptide; note = XENP018859 vhCDR2
EIRLKSNNYATHYAEPVKG

SEQ ID NO: 9514 - protein, 11 aa, synthetic construct
  source 1..11: note = Description of Artificial Sequence: Synthetic peptide; note = XENP018859 vhCDR3
YYGNYGGYFDV

SEQ ID NO: 9515 - protein, 11 aa, synthetic construct
  source 1..11: note = Description of Artificial Sequence: Synthetic peptide; note = XENP018859 vlCDR1
RASQSVSNDVA

SEQ ID NO: 9516 - protein, 7 aa, synthetic construct
  source 1..7: note = Description of Artificial Sequence: Synthetic peptide; note = XENP018859 vlCDR2
YASHRYT

SEQ ID NO: 9517 - protein, 9 aa, synthetic construct
  source 1..9: note = Description of Artificial Sequence: Synthetic peptide; note = XENP018859 vlCDR3
QQTYSSPRT

SEQ ID NO: 9518 - protein, 249 aa, synthetic construct
  source 1..249: note = Description of Artificial Sequence: Synthetic polypeptide; note = XENP018860 1G6_H1_L1.114_scFv(GKPGS)4
EVQLVESGGGLVKPGGSLRLSCAASGFTFSNYWMNWVRQAPGKGLEWVGEIRLKSNNYATHYAEPVKGRFTISRDDSKSTVYLQMNSLKTEDTAVYYCTRYYGNYGGYFDVWGAGTLVTVSSGKPGSGKPGSGKPGSGKPGSSIVMTQSPATLSVSPGERATLSCRASQSVSNDVAWYQQKPGQSPRLLINYASHRYTGVPDRFTGSGYGTEFTLTISSLQSEDFAVYFCQQGYSSPRTFGGGTKVEIK

SEQ ID NO: 9519 - protein, 122 aa, synthetic construct; identical to SEQ ID NO: 6246
  source 1..122: note = Description of Artificial Sequence: Synthetic polypeptide; note = VH of XENP018860

SEQ ID NO: 9520 - protein, 107 aa, synthetic construct
  source 1..107: note = Description of Artificial Sequence: Synthetic polypeptide; note = VL of XENP018860
SIVMTQSPATLSVSPGERATLSCRASQSVSNDVAWYQQKPGQSPRLLINYASHRYTGVPDRFTGSGYGTEFTLTISSLQSEDFAVYFCQQGYSSPRTFGGGTKVEIK

SEQ ID NO: 9521 - protein, 5 aa, synthetic construct
  source 1..5: note = Description of Artificial Sequence: Synthetic peptide; note = XENP018860 vhCDR1
NYWMN

SEQ ID NO: 9522 - protein, 19 aa, synthetic construct
  source 1..19: note = Description of Artificial Sequence: Synthetic peptide; note = XENP018860 vhCDR2
EIRLKSNNYATHYAEPVKG

SEQ ID NO: 9523 - protein, 11 aa, synthetic construct
  source 1..11: note = Description of Artificial Sequence: Synthetic peptide; note = XENP018860 vhCDR3
YYGNYGGYFDV

SEQ ID NO: 9524 - protein, 11 aa, synthetic construct
  source 1..11: note = Description of Artificial Sequence: Synthetic peptide; note = XENP018860 vlCDR1
RASQSVSNDVA

SEQ ID NO: 9525 - protein, 7 aa, synthetic construct
  source 1..7: note = Description of Artificial Sequence: Synthetic peptide; note = XENP018860 vlCDR2
YASHRYT

SEQ ID NO: 9526 - protein, 9 aa, synthetic construct
  source 1..9: note = Description of Artificial Sequence: Synthetic peptide; note = XENP018860 vlCDR3
QQGYSSPRT

SEQ ID NO: 9527 - protein, 249 aa, synthetic construct
  source 1..249: note = Description of Artificial Sequence: Synthetic polypeptide; note = XENP018861 1G6_H1_L1.115_scFv(GKPGS)4
EVQLVESGGGLVKPGGSLRLSCAASGFTFSNYWMNWVRQAPGKGLEWVGEIRLKSNNYATHYAEPVKGRFTISRDDSKSTVYLQMNSLKTEDTAVYYCTRYYGNYGGYFDVWGAGTLVTVSSGKPGSGKPGSGKPGSGKPGSSIVMTQSPATLSVSPGERATLSCRASQSVSNDVAWYQQKPGQSPRLLINYASHRYTGVPDRFTGSGYGTEFTLTISSLQSEDFAVYFCQQYYSSPRTFGGGTKVEIK

SEQ ID NO: 9528 - protein, 122 aa, synthetic construct; identical to SEQ ID NO: 6246
  source 1..122: note = Description of Artificial Sequence: Synthetic polypeptide; note = VH of XENP018861

SEQ ID NO: 9529 - protein, 107 aa, synthetic construct
  source 1..107: note = Description of Artificial Sequence: Synthetic polypeptide; note = VL of XENP018861
SIVMTQSPATLSVSPGERATLSCRASQSVSNDVAWYQQKPGQSPRLLINYASHRYTGVPDRFTGSGYGTEFTLTISSLQSEDFAVYFCQQYYSSPRTFGGGTKVEIK

SEQ ID NO: 9530 - protein, 5 aa, synthetic construct
  source 1..5: note = Description of Artificial Sequence: Synthetic peptide; note = XENP018861 vhCDR1
NYWMN

SEQ ID NO: 9531 - protein, 19 aa, synthetic construct
  source 1..19: note = Description of Artificial Sequence: Synthetic peptide; note = XENP018861 vhCDR2
EIRLKSNNYATHYAEPVKG

SEQ ID NO: 9532 - protein, 11 aa, synthetic construct
  source 1..11: note = Description of Artificial Sequence: Synthetic peptide; note = XENP018861 vhCDR3
YYGNYGGYFDV

SEQ ID NO: 9533 - protein, 11 aa, synthetic construct
  source 1..11: note = Description of Artificial Sequence: Synthetic peptide; note = XENP018861 vlCDR1
RASQSVSNDVA

SEQ ID NO: 9534 - protein, 7 aa, synthetic construct
  source 1..7: note = Description of Artificial Sequence: Synthetic peptide; note = XENP018861 vlCDR2
YASHRYT

SEQ ID NO: 9535 - protein, 9 aa, synthetic construct
  source 1..9: note = Description of Artificial Sequence: Synthetic peptide; note = XENP018861 vlCDR3
QQYYSSPRT

SEQ ID NO: 9536 - protein, 249 aa, synthetic construct
  source 1..249: note = Description of Artificial Sequence: Synthetic polypeptide; note = XENP018862 1G6_H1_L1.116_scFv(GKPGS)4
EVQLVESGGGLVKPGGSLRLSCAASGFTFSNYWMNWVRQAPGKGLEWVGEIRLKSNNYATHYAEPVKGRFTISRDDSKSTVYLQMNSLKTEDTAVYYCTRYYGNYGGYFDVWGAGTLVTVSSGKPGSGKPGSGKPGSGKPGSSIVMTQSPATLSVSPGERATLSCRASQSVSNDVAWYQQKPGQSPRLLINYASHRYTGVPDRFTGSGYGTEFTLTISSLQSEDFAVYFCQQDFSSPRTFGGGTKVEIK

SEQ ID NO: 9537 - protein, 122 aa, synthetic construct; identical to SEQ ID NO: 6246
  source 1..122: note = Description of Artificial Sequence: Synthetic polypeptide; note = VH of XENP018862

SEQ ID NO: 9538 - protein, 107 aa, synthetic construct
  source 1..107: note = Description of Artificial Sequence: Synthetic polypeptide; note = VL of XENP018862
SIVMTQSPATLSVSPGERATLSCRASQSVSNDVAWYQQKPGQSPRLLINYASHRYTGVPDRFTGSGYGTEFTLTISSLQSEDFAVYFCQQDFSSPRTFGGGTKVEIK

SEQ ID NO: 9539 - protein, 5 aa, synthetic construct
  source 1..5: note = Description of Artificial Sequence: Synthetic peptide; note = XENP018862 vhCDR1
NYWMN

SEQ ID NO: 9540 - protein, 19 aa, synthetic construct
  source 1..19: note = Description of Artificial Sequence: Synthetic peptide; note = XENP018862 vhCDR2
EIRLKSNNYATHYAEPVKG

SEQ ID NO: 9541 - protein, 11 aa, synthetic construct
  source 1..11: note = Description of Artificial Sequence: Synthetic peptide; note = XENP018862 vhCDR3
YYGNYGGYFDV

SEQ ID NO: 9542 - protein, 11 aa, synthetic construct
  source 1..11: note = Description of Artificial Sequence: Synthetic peptide; note = XENP018862 vlCDR1
RASQSVSNDVA

SEQ ID NO: 9543 - protein, 7 aa, synthetic construct
  source 1..7: note = Description of Artificial Sequence: Synthetic peptide; note = XENP018862 vlCDR2
YASHRYT

SEQ ID NO: 9544 - protein, 9 aa, synthetic construct
  source 1..9: note = Description of Artificial Sequence: Synthetic peptide; note = XENP018862 vlCDR3
QQDFSSPRT

SEQ ID NO: 9545 - protein, 249 aa, synthetic construct
  source 1..249: note = Description of Artificial Sequence: Synthetic polypeptide; note = XENP018863 1G6_H1_L1.117_scFv(GKPGS)4
EVQLVESGGGLVKPGGSLRLSCAASGFTFSNYWMNWVRQAPGKGLEWVGEIRLKSNNYATHYAEPVKGRFTISRDDSKSTVYLQMNSLKTEDTAVYYCTRYYGNYGGYFDVWGAGTLVTVSSGKPGSGKPGSGKPGSGKPGSSIVMTQSPATLSVSPGERATLSCRASQSVSNDVAWYQQKPGQSPRLLINYASHRYTGVPDRFTGSGYGTEFTLTISSLQSEDFAVYFCQQDHSSPRTFGGGTKVEIK

SEQ ID NO: 9546 - protein, 122 aa, synthetic construct; identical to SEQ ID NO: 6246
  source 1..122: note = Description of Artificial Sequence: Synthetic polypeptide; note = VH of XENP018863

SEQ ID NO: 9547 - protein, 107 aa, synthetic construct
  source 1..107: note = Description of Artificial Sequence: Synthetic polypeptide; note = VL of XENP018863
SIVMTQSPATLSVSPGERATLSCRASQSVSNDVAWYQQKPGQSPRLLINYASHRYTGVPDRFTGSGYGTEFTLTISSLQSEDFAVYFCQQDHSSPRTFGGGTKVEIK

SEQ ID NO: 9548 - protein, 5 aa, synthetic construct
  source 1..5: note = Description of Artificial Sequence: Synthetic peptide; note = XENP018863 vhCDR1
NYWMN

SEQ ID NO: 9549 - protein, 19 aa, synthetic construct
  source 1..19: note = Description of Artificial Sequence: Synthetic peptide; note = XENP018863 vhCDR2
EIRLKSNNYATHYAEPVKG

SEQ ID NO: 9550 - protein, 11 aa, synthetic construct
  source 1..11: note = Description of Artificial Sequence: Synthetic peptide; note = XENP018863 vhCDR3
YYGNYGGYFDV

SEQ ID NO: 9551 - protein, 11 aa, synthetic construct
  source 1..11: note = Description of Artificial Sequence: Synthetic peptide; note = XENP018863 vlCDR1
RASQSVSNDVA

SEQ ID NO: 9552 - protein, 7 aa, synthetic construct
  source 1..7: note = Description of Artificial Sequence: Synthetic peptide; note = XENP018863 vlCDR2
YASHRYT

SEQ ID NO: 9553 - protein, 9 aa, synthetic construct
  source 1..9: note = Description of Artificial Sequence: Synthetic peptide; note = XENP018863 vlCDR3
QQDHSSPRT

SEQ ID NO: 9554 - protein, 249 aa, synthetic construct
  source 1..249: note = Description of Artificial Sequence: Synthetic polypeptide; note = XENP018864 1G6_H1_L1.118_scFv(GKPGS)4
EVQLVESGGGLVKPGGSLRLSCAASGFTFSNYWMNWVRQAPGKGLEWVGEIRLKSNNYATHYAEPVKGRFTISRDDSKSTVYLQMNSLKTEDTAVYYCTRYYGNYGGYFDVWGAGTLVTVSSGKPGSGKPGSGKPGSGKPGSSIVMTQSPATLSVSPGERATLSCRASQSVSNDVAWYQQKPGQSPRLLINYASHRYTGVPDRFTGSGYGTEFTLTISSLQSEDFAVYFCQQDLSSPRTFGGGTKVEIK

SEQ ID NO: 9555 - protein, 122 aa, synthetic construct; identical to SEQ ID NO: 6246
  source 1..122: note = Description of Artificial Sequence: Synthetic polypeptide; note = VH of XENP018864

SEQ ID NO: 9556 - protein, 107 aa, synthetic construct
  source 1..107: note = Description of Artificial Sequence: Synthetic polypeptide; note = VL of XENP018864
SIVMTQSPATLSVSPGERATLSCRASQSVSNDVAWYQQKPGQSPRLLINYASHRYTGVPDRFTGSGYGTEFTLTISSLQSEDFAVYFCQQDLSSPRTFGGGTKVEIK

SEQ ID NO: 9557 - protein, 5 aa, synthetic construct
  source 1..5: note = Description of Artificial Sequence: Synthetic peptide; note = XENP018864 vhCDR1
NYWMN

SEQ ID NO: 9558 - protein, 19 aa, synthetic construct
  source 1..19: note = Description of Artificial Sequence: Synthetic peptide; note = XENP018864 vhCDR2
EIRLKSNNYATHYAEPVKG

SEQ ID NO: 9559 - protein, 11 aa, synthetic construct
  source 1..11: note = Description of Artificial Sequence: Synthetic peptide; note = XENP018864 vhCDR3
YYGNYGGYFDV

SEQ ID NO: 9560 - protein, 11 aa, synthetic construct
  source 1..11: note = Description of Artificial Sequence: Synthetic peptide; note = XENP018864 vlCDR1
RASQSVSNDVA

SEQ ID NO: 9561 - protein, 7 aa, synthetic construct
  source 1..7: note = Description of Artificial Sequence: Synthetic peptide; note = XENP018864 vlCDR2
YASHRYT

SEQ ID NO: 9562 - protein, 9 aa, synthetic construct
  source 1..9: note = Description of Artificial Sequence: Synthetic peptide; note = XENP018864 vlCDR3
QQDLSSPRT

SEQ ID NO: 9563 - protein, 249 aa, synthetic construct
  source 1..249: note = Description of Artificial Sequence: Synthetic polypeptide; note = XENP018865 1G6_H1_L1.119_scFv(GKPGS)4
EVQLVESGGGLVKPGGSLRLSCAASGFTFSNYWMNWVRQAPGKGLEWVGEIRLKSNNYATHYAEPVKGRFTISRDDSKSTVYLQMNSLKTEDTAVYYCTRYYGNYGGYFDVWGAGTLVTVSSGKPGSGKPGSGKPGSGKPGSSIVMTQSPATLSVSPGERATLSCRASQSVSNDVAWYQQKPGQSPRLLINYASHRYTGVPDRFTGSGYGTEFTLTISSLQSEDFAVYFCQQDWSSPRTFGGGTKVEIK

SEQ ID NO: 9564 - protein, 122 aa, synthetic construct; identical to SEQ ID NO: 6246
  source 1..122: note = Description of Artificial Sequence: Synthetic polypeptide; note = VH of XENP018865

SEQ ID NO: 9565 - protein, 107 aa, synthetic construct
  source 1..107: note = Description of Artificial Sequence: Synthetic polypeptide; note = VL of XENP018865
SIVMTQSPATLSVSPGERATLSCRASQSVSNDVAWYQQKPGQSPRLLINYASHRYTGVPDRFTGSGYGTEFTLTISSLQSEDFAVYFCQQDWSSPRTFGGGTKVEIK

SEQ ID NO: 9566 - protein, 5 aa, synthetic construct
  source 1..5: note = Description of Artificial Sequence: Synthetic peptide; note = XENP018865 vhCDR1
NYWMN

SEQ ID NO: 9567 - protein, 19 aa, synthetic construct
  source 1..19: note = Description of Artificial Sequence: Synthetic peptide; note = XENP018865 vhCDR2
EIRLKSNNYATHYAEPVKG

SEQ ID NO: 9568 - protein, 11 aa, synthetic construct
  source 1..11: note = Description of Artificial Sequence: Synthetic peptide; note = XENP018865 vhCDR3
YYGNYGGYFDV

SEQ ID NO: 9569 - protein, 11 aa, synthetic construct
  source 1..11: note = Description of Artificial Sequence: Synthetic peptide; note = XENP018865 vlCDR1
RASQSVSNDVA

SEQ ID NO: 9570 - protein, 7 aa, synthetic construct
  source 1..7: note = Description of Artificial Sequence: Synthetic peptide; note = XENP018865 vlCDR2
YASHRYT

SEQ ID NO: 9571 - protein, 9 aa, synthetic construct
  source 1..9: note = Description of Artificial Sequence: Synthetic peptide; note = XENP018865 vlCDR3
QQDWSSPRT

SEQ ID NO: 9572 - protein, 249 aa, synthetic construct
  source 1..249: note = Description of Artificial Sequence: Synthetic polypeptide; note = XENP018866 1G6_H1_L1.120_scFv(GKPGS)4
EVQLVESGGGLVKPGGSLRLSCAASGFTFSNYWMNWVRQAPGKGLEWVGEIRLKSNNYATHYAEPVKGRFTISRDDSKSTVYLQMNSLKTEDTAVYYCTRYYGNYGGYFDVWGAGTLVTVSSGKPGSGKPGSGKPGSGKPGSSIVMTQSPATLSVSPGERATLSCRASQSVSNDVAWYQQKPGQSPRLLINYASHRYTGVPDRFTGSGYGTEFTLTISSLQSEDFAVYFCQQDVSSPRTFGGGTKVEIK

SEQ ID NO: 9573 - protein, 122 aa, synthetic construct; identical to SEQ ID NO: 6246
  source 1..122: note = Description of Artificial Sequence: Synthetic polypeptide; note = VH of XENP018866

SEQ ID NO: 9574 - protein, 107 aa, synthetic construct
  source 1..107: note = Description of Artificial Sequence: Synthetic polypeptide; note = VL of XENP018866
SIVMTQSPATLSVSPGERATLSCRASQSVSNDVAWYQQKPGQSPRLLINYASHRYTGVPDRFTGSGYGTEFTLTISSLQSEDFAVYFCQQDVSSPRTFGGGTKVEIK

SEQ ID NO: 9575 - protein, 5 aa, synthetic construct
  source 1..5: note = Description of Artificial Sequence: Synthetic peptide; note = XENP018866 vhCDR1
NYWMN

SEQ ID NO: 9576 - protein, 19 aa, synthetic construct
  source 1..19: note = Description of Artificial Sequence: Synthetic peptide; note = XENP018866 vhCDR2
EIRLKSNNYATHYAEPVKG

SEQ ID NO: 9577 - protein, 11 aa, synthetic construct
  source 1..11: note = Description of Artificial Sequence: Synthetic peptide; note = XENP018866 vhCDR3
YYGNYGGYFDV

SEQ ID NO: 9578 - protein, 11 aa, synthetic construct
  source 1..11: note = Description of Artificial Sequence: Synthetic peptide; note = XENP018866 vlCDR1
RASQSVSNDVA

SEQ ID NO: 9579 - protein, 7 aa, synthetic construct
  source 1..7: note = Description of Artificial Sequence: Synthetic peptide; note = XENP018866 vlCDR2
YASHRYT

SEQ ID NO: 9580 - protein, 9 aa, synthetic construct
  source 1..9: note = Description of Artificial Sequence: Synthetic peptide; note = XENP018866 vlCDR3
QQDVSSPRT

SEQ ID NO: 9581 - protein, 249 aa, synthetic construct
  source 1..249: note = Description of Artificial Sequence: Synthetic polypeptide; note = XENP018867 1G6_H1_L1.121_scFv(GKPGS)4
EVQLVESGGGLVKPGGSLRLSCAASGFTFSNYWMNWVRQAPGKGLEWVGEIRLKSNNYATHYAEPVKGRFTISRDDSKSTVYLQMNSLKTEDTAVYYCTRYYGNYGGYFDVWGAGTLVTVSSGKPGSGKPGSGKPGSGKPGSSIVMTQSPATLSVSPGERATLSCRASQSVSNDVAWYQQKPGQSPRLLINYASHRYTGVPDRFTGSGYGTEFTLTISSLQSEDFAVYFCQQDASSPRTFGGGTKVEIK

SEQ ID NO: 9582 - protein, 122 aa, synthetic construct; identical to SEQ ID NO: 6246
  source 1..122: note = Description of Artificial Sequence: Synthetic polypeptide; note = VH of XENP018867

SEQ ID NO: 9583 - protein, 107 aa, synthetic construct
  source 1..107: note = Description of Artificial Sequence: Synthetic polypeptide; note = VL of XENP018867
SIVMTQSPATLSVSPGERATLSCRASQSVSNDVAWYQQKPGQSPRLLINYASHRYTGVPDRFTGSGYGTEFTLTISSLQSEDFAVYFCQQDASSPRTFGGGTKVEIK

SEQ ID NO: 9584 - protein, 5 aa, synthetic construct
  source 1..5: note = Description of Artificial Sequence: Synthetic peptide; note = XENP018867 vhCDR1
NYWMN

SEQ ID NO: 9585 - protein, 19 aa, synthetic construct
  source 1..19: note = Description of Artificial Sequence: Synthetic peptide; note = XENP018867 vhCDR2
EIRLKSNNYATHYAEPVKG

SEQ ID NO: 9586 - protein, 11 aa, synthetic construct
  source 1..11: note = Description of Artificial Sequence: Synthetic peptide; note = XENP018867 vhCDR3
YYGNYGGYFDV

SEQ ID NO: 9587 - protein, 11 aa, synthetic construct
  source 1..11: note = Description of Artificial Sequence: Synthetic peptide; note = XENP018867 vlCDR1
RASQSVSNDVA

SEQ ID NO: 9588 - protein, 7 aa, synthetic construct
  source 1..7: note = Description of Artificial Sequence: Synthetic peptide; note = XENP018867 vlCDR2
YASHRYT

SEQ ID NO: 9589 - protein, 9 aa, synthetic construct
  source 1..9: note = Description of Artificial Sequence: Synthetic peptide; note = XENP018867 vlCDR3
QQDASSPRT

SEQ ID NO: 9590 - protein, 249 aa, synthetic construct
  source 1..249: note = Description of Artificial Sequence: Synthetic polypeptide; note = XENP018868 1G6_H1_L1.122_scFv(GKPGS)4
EVQLVESGGGLVKPGGSLRLSCAASGFTFSNYWMNWVRQAPGKGLEWVGEIRLKSNNYATHYAEPVKGRFTISRDDSKSTVYLQMNSLKTEDTAVYYCTRYYGNYGGYFDVWGAGTLVTVSSGKPGSGKPGSGKPGSGKPGSSIVMTQSPATLSVSPGERATLSCRASQSVSNDVAWYQQKPGQSPRLLINYASHRYTGVPDRFTGSGYGTEFTLTISSLQSEDFAVYFCQQDQSSPRTFGGGTKVEIK

SEQ ID NO: 9591 - protein, 122 aa, synthetic construct; identical to SEQ ID NO: 6246
  source 1..122: note = Description of Artificial Sequence: Synthetic polypeptide; note = VH of XENP018868

SEQ ID NO: 9592 - protein, 107 aa, synthetic construct
  source 1..107: note = Description of Artificial Sequence: Synthetic polypeptide; note = VL of XENP018868
SIVMTQSPATLSVSPGERATLSCRASQSVSNDVAWYQQKPGQSPRLLINYASHRYTGVPDRFTGSGYGTEFTLTISSLQSEDFAVYFCQQDQSSPRTFGGGTKVEIK

SEQ ID NO: 9593 - protein, 5 aa, synthetic construct
  source 1..5: note = Description of Artificial Sequence: Synthetic peptide; note = XENP018868 vhCDR1
NYWMN

SEQ ID NO: 9594 - protein, 19 aa, synthetic construct
  source 1..19: note = Description of Artificial Sequence: Synthetic peptide; note = XENP018868 vhCDR2
EIRLKSNNYATHYAEPVKG

SEQ ID NO: 9595 - protein, 11 aa, synthetic construct
  source 1..11: note = Description of Artificial Sequence: Synthetic peptide; note = XENP018868 vhCDR3
YYGNYGGYFDV

SEQ ID NO: 9596 - protein, 11 aa, synthetic construct
  source 1..11: note = Description of Artificial Sequence: Synthetic peptide; note = XENP018868 vlCDR1
RASQSVSNDVA

SEQ ID NO: 9597 - protein, 7 aa, synthetic construct
  source 1..7: note = Description of Artificial Sequence: Synthetic peptide; note = XENP018868 vlCDR2
YASHRYT

SEQ ID NO: 9598 - protein, 9 aa, synthetic construct
  source 1..9: note = Description of Artificial Sequence: Synthetic peptide; note = XENP018868 vlCDR3
QQDQSSPRT

SEQ ID NO: 9599 - protein, 249 aa, synthetic construct
  source 1..249: note = Description of Artificial Sequence: Synthetic polypeptide; note = XENP018869 1G6_H1_L1.123_scFv(GKPGS)4
EVQLVESGGGLVKPGGSLRLSCAASGFTFSNYWMNWVRQAPGKGLEWVGEIRLKSNNYATHYAEPVKGRFTISRDDSKSTVYLQMNSLKTEDTAVYYCTRYYGNYGGYFDVWGAGTLVTVSSGKPGSGKPGSGKPGSGKPGSSIVMTQSPATLSVSPGERATLSCRASQSVSNDVAWYQQKPGQSPRLLINYASHRYTGVPDRFTGSGYGTEFTLTISSLQSEDFAVYFCQQDDSSPRTFGGGTKVEIK

SEQ ID NO: 9600 - protein, 122 aa, synthetic construct; identical to SEQ ID NO: 6246
  source 1..122: note = Description of Artificial Sequence: Synthetic polypeptide; note = VH of XENP018869

SEQ ID NO: 9601 - protein, 107 aa, synthetic construct
  source 1..107: note = Description of Artificial Sequence: Synthetic polypeptide; note = VL of XENP018869
SIVMTQSPATLSVSPGERATLSCRASQSVSNDVAWYQQKPGQSPRLLINYASHRYTGVPDRFTGSGYGTEFTLTISSLQSEDFAVYFCQQDDSSPRTFGGGTKVEIK

SEQ ID NO: 9602 - protein, 5 aa, synthetic construct
  source 1..5: note = Description of Artificial Sequence: Synthetic peptide; note = XENP018869 vhCDR1
NYWMN

SEQ ID NO: 9603 - protein, 19 aa, synthetic construct
  source 1..19: note = Description of Artificial Sequence: Synthetic peptide; note = XENP018869 vhCDR2
EIRLKSNNYATHYAEPVKG

SEQ ID NO: 9604 - protein, 11 aa, synthetic construct
  source 1..11: note = Description of Artificial Sequence: Synthetic peptide; note = XENP018869 vhCDR3
YYGNYGGYFDV

SEQ ID NO: 9605 - protein, 11 aa, synthetic construct
  source 1..11: note = Description of Artificial Sequence: Synthetic peptide; note = XENP018869 vlCDR1
RASQSVSNDVA

SEQ ID NO: 9606 - protein, 7 aa, synthetic construct
  source 1..7: note = Description of Artificial Sequence: Synthetic peptide; note = XENP018869 vlCDR2
YASHRYT

SEQ ID NO: 9607 - protein, 9 aa, synthetic construct
  source 1..9: note = Description of Artificial Sequence: Synthetic peptide; note = XENP018869 vlCDR3
QQDDSSPRT

SEQ ID NO: 9608 - protein, 249 aa, synthetic construct
  source 1..249: note = Description of Artificial Sequence: Synthetic polypeptide; note = XENP018870 1G6_H1_L1.124_scFv(GKPGS)4
EVQLVESGGGLVKPGGSLRLSCAASGFTFSNYWMNWVRQAPGKGLEWVGEIRLKSNNYATHYAEPVKGRFTISRDDSKSTVYLQMNSLKTEDTAVYYCTRYYGNYGGYFDVWGAGTLVTVSSGKPGSGKPGSGKPGSGKPGSSIVMTQSPATLSVSPGERATLSCRASQSVSNDVAWYQQKPGQSPRLLINYASHRYTGVPDRFTGSGYGTEFTLTISSLQSEDFAVYFCQQDKSSPRTFGGGTKVEIK

SEQ ID NO: 9609 - protein, 122 aa, synthetic construct; identical to SEQ ID NO: 6246
  source 1..122: note = Description of Artificial Sequence: Synthetic polypeptide; note = VH of XENP018870

SEQ ID NO: 9610 - protein, 107 aa, synthetic construct
  source 1..107: note = Description of Artificial Sequence: Synthetic polypeptide; note = VL of XENP018870
SIVMTQSPATLSVSPGERATLSCRASQSVSNDVAWYQQKPGQSPRLLINYASHRYTGVPDRFTGSGYGTEFTLTISSLQSEDFAVYFCQQDKSSPRTFGGGTKVEIK

SEQ ID NO: 9611 - protein, 5 aa, synthetic construct
  source 1..5: note = Description of Artificial Sequence: Synthetic peptide; note = XENP018870 vhCDR1
NYWMN

SEQ ID NO: 9612 - protein, 19 aa, synthetic construct
  source 1..19: note = Description of Artificial Sequence: Synthetic peptide; note = XENP018870 vhCDR2
EIRLKSNNYATHYAEPVKG

SEQ ID NO: 9613 - protein, 11 aa, synthetic construct
  source 1..11: note = Description of Artificial Sequence: Synthetic peptide; note = XENP018870 vhCDR3
YYGNYGGYFDV

SEQ ID NO: 9614 - protein, 11 aa, synthetic construct
  source 1..11: note = Description of Artificial Sequence: Synthetic peptide; note = XENP018870 vlCDR1
RASQSVSNDVA

SEQ ID NO: 9615 - protein, 7 aa, synthetic construct
  source 1..7: note = Description of Artificial Sequence: Synthetic peptide; note = XENP018870 vlCDR2
YASHRYT

SEQ ID NO: 9616 - protein, 9 aa, synthetic construct
  source 1..9: note = Description of Artificial Sequence: Synthetic peptide; note = XENP018870 vlCDR3
QQDKSSPRT

SEQ ID NO: 9617 - protein, 249 aa, synthetic construct
  source 1..249: note = Description of Artificial Sequence: Synthetic polypeptide; note = XENP018871 1G6_H1_L1.125_scFv(GKPGS)4
EVQLVESGGGLVKPGGSLRLSCAASGFTFSNYWMNWVRQAPGKGLEWVGEIRLKSNNYATHYAEPVKGRFTISRDDSKSTVYLQMNSLKTEDTAVYYCTRYYGNYGGYFDVWGAGTLVTVSSGKPGSGKPGSGKPGSGKPGSSIVMTQSPATLSVSPGERATLSCRASQSVSNDVAWYQQKPGQSPRLLINYASHRYTGVPDRFTGSGYGTEFTLTISSLQSEDFAVYFCQQDSSSPRTFGGGTKVEIK

SEQ ID NO: 9618 - protein, 122 aa, synthetic construct; identical to SEQ ID NO: 6246
  source 1..122: note = Description of Artificial Sequence: Synthetic polypeptide; note = VH of XENP018871

SEQ ID NO: 9619 - protein, 107 aa, synthetic construct
  source 1..107: note = Description of Artificial Sequence: Synthetic polypeptide; note = VL of XENP018871
SIVMTQSPATLSVSPGERATLSCRASQSVSNDVAWYQQKPGQSPRLLINYASHRYTGVPDRFTGSGYGTEFTLTISSLQSEDFAVYFCQQDSSSPRTFGGGTKVEIK

SEQ ID NO: 9620 - protein, 5 aa, synthetic construct
  source 1..5: note = Description of Artificial Sequence: Synthetic peptide; note = XENP018871 vhCDR1
NYWMN

SEQ ID NO: 9621 - protein, 19 aa, synthetic construct
  source 1..19: note = Description of Artificial Sequence: Synthetic peptide; note = XENP018871 vhCDR2
EIRLKSNNYATHYAEPVKG

SEQ ID NO: 9622 - protein, 11 aa, synthetic construct
  source 1..11: note = Description of Artificial Sequence: Synthetic peptide; note = XENP018871 vhCDR3
YYGNYGGYFDV

SEQ ID NO: 9623 - protein, 11 aa, synthetic construct
  source 1..11: note = Description of Artificial Sequence: Synthetic peptide; note = XENP018871 vlCDR1
RASQSVSNDVA

SEQ ID NO: 9624 - protein, 7 aa, synthetic construct
  source 1..7: note = Description of Artificial Sequence: Synthetic peptide; note = XENP018871 vlCDR2
YASHRYT

SEQ ID NO: 9625 - protein, 9 aa, synthetic construct
  source 1..9: note = Description of Artificial Sequence: Synthetic peptide; note = XENP018871 vlCDR3
QQDSSSPRT

SEQ ID NO: 9626 - protein, 249 aa, synthetic construct
  source 1..249: note = Description of Artificial Sequence: Synthetic polypeptide; note = XENP018872 1G6_H1_L1.126_scFv(GKPGS)4
EVQLVESGGGLVKPGGSLRLSCAASGFTFSNYWMNWVRQAPGKGLEWVGEIRLKSNNYATHYAEPVKGRFTISRDDSKSTVYLQMNSLKTEDTAVYYCTRYYGNYGGYFDVWGAGTLVTVSSGKPGSGKPGSGKPGSGKPGSSIVMTQSPATLSVSPGERATLSCRASQSVSNDVAWYQQKPGQSPRLLINYASHRYTGVPDRFTGSGYGTEFTLTISSLQSEDFAVYFCQQDGSSPRTFGGGTKVEIK

SEQ ID NO: 9627 - protein, 122 aa, synthetic construct; identical to SEQ ID NO: 6246
  source 1..122: note = Description of Artificial Sequence: Synthetic polypeptide; note = VH of XENP018872

SEQ ID NO: 9628 - protein, 107 aa, synthetic construct
  source 1..107: note = Description of Artificial Sequence: Synthetic polypeptide; note = VL of XENP018872
SIVMTQSPATLSVSPGERATLSCRASQSVSNDVAWYQQKPGQSPRLLINYASHRYTGVPDRFTGSGYGTEFTLTISSLQSEDFAVYFCQQDGSSPRTFGGGTKVEIK

SEQ ID NO: 9629 - protein, 5 aa, synthetic construct
  source 1..5: note = Description of Artificial Sequence: Synthetic peptide; note = XENP018872 vhCDR1
NYWMN

SEQ ID NO: 9630 - protein, 19 aa, synthetic construct
  source 1..19: note = Description of Artificial Sequence: Synthetic peptide; note = XENP018872 vhCDR2
EIRLKSNNYATHYAEPVKG

SEQ ID NO: 9631 - protein, 11 aa, synthetic construct
  source 1..11: note = Description of Artificial Sequence: Synthetic peptide; note = XENP018872 vhCDR3
YYGNYGGYFDV

SEQ ID NO: 9632 - protein, 11 aa, synthetic construct
  source 1..11: note = Description of Artificial Sequence: Synthetic peptide; note = XENP018872 vlCDR1
RASQSVSNDVA

SEQ ID NO: 9633 - protein, 7 aa, synthetic construct
  source 1..7: note = Description of Artificial Sequence: Synthetic peptide; note = XENP018872 vlCDR2
YASHRYT

SEQ ID NO: 9634 - protein, 9 aa, synthetic construct
  source 1..9: note = Description of Artificial Sequence: Synthetic peptide; note = XENP018872 vlCDR3
QQDGSSPRT

SEQ ID NO: 9635 - protein, 249 aa, synthetic construct
  source 1..249: note = Description of Artificial Sequence: Synthetic polypeptide; note = XENP018873 1G6_H1_L1.127_scFv(GKPGS)4
EVQLVESGGGLVKPGGSLRLSCAASGFTFSNYWMNWVRQAPGKGLEWVGEIRLKSNNYATHYAEPVKGRFTISRDDSKSTVYLQMNSLKTEDTAVYYCTRYYGNYGGYFDVWGAGTLVTVSSGKPGSGKPGSGKPGSGKPGSSIVMTQSPATLSVSPGERATLSCRASQSVSNDVAWYQQKPGQSPRLLINYASHRYTGVPDRFTGSGYGTEFTLTISSLQSEDFAVYFCQQDYTSPRTFGGGTKVEIK

SEQ ID NO: 9636 - protein, 122 aa, synthetic construct; identical to SEQ ID NO: 6246
  source 1..122: note = Description of Artificial Sequence: Synthetic polypeptide; note = VH of XENP018873

SEQ ID NO: 9637 - protein, 107 aa, synthetic construct
  source 1..107: note = Description of Artificial Sequence: Synthetic polypeptide; note = VL of XENP018873
SIVMTQSPATLSVSPGERATLSCRASQSVSNDVAWYQQKPGQSPRLLINYASHRYTGVPDRFTGSGYGTEFTLTISSLQSEDFAVYFCQQDYTSPRTFGGGTKVEIK

SEQ ID NO: 9638 - protein, 5 aa, synthetic construct
  source 1..5: note = Description of Artificial Sequence: Synthetic peptide; note = XENP018873 vhCDR1
NYWMN

SEQ ID NO: 9639 - protein, 19 aa, synthetic construct
  source 1..19: note = Description of Artificial Sequence: Synthetic peptide; note = XENP018873 vhCDR2
EIRLKSNNYATHYAEPVKG

SEQ ID NO: 9640 - protein, 11 aa, synthetic construct
  source 1..11: note = Description of Artificial Sequence: Synthetic peptide; note = XENP018873 vhCDR3
YYGNYGGYFDV

SEQ ID NO: 9641 - protein, 11 aa, synthetic construct
  source 1..11: note = Description of Artificial Sequence: Synthetic peptide; note = XENP018873 vlCDR1
RASQSVSNDVA

SEQ ID NO: 9642 - protein, 7 aa, synthetic construct
  source 1..7: note = Description of Artificial Sequence: Synthetic peptide; note = XENP018873 vlCDR2
YASHRYT

SEQ ID NO: 9643 - protein, 9 aa, synthetic construct
  source 1..9: note = Description of Artificial Sequence: Synthetic peptide; note = XENP018873 vlCDR3
QQDYTSPRT

SEQ ID NO: 9644 - protein, 249 aa, synthetic construct
  source 1..249: note = Description of Artificial Sequence: Synthetic polypeptide; note = XENP018874 1G6_H1_L1.128_scFv(GKPGS)4
EVQLVESGGGLVKPGGSLRLSCAASGFTFSNYWMNWVRQAPGKGLEWVGEIRLKSNNYATHYAEPVKGRFTISRDDSKSTVYLQMNSLKTEDTAVYYCTRYYGNYGGYFDVWGAGTLVTVSSGKPGSGKPGSGKPGSGKPGSSIVMTQSPATLSVSPGERATLSCRASQSVSNDVAWYQQKPGQSPRLLINYASHRYTGVPDRFTGSGYGTEFTLTISSLQSEDFAVYFCQQDYASPRTFGGGTKVEIK

SEQ ID NO: 9645 - protein, 122 aa, synthetic construct; identical to SEQ ID NO: 6246
  source 1..122: note = Description of Artificial Sequence: Synthetic polypeptide; note = VH of XENP018874

SEQ ID NO: 9646 - protein, 107 aa, synthetic construct
  source 1..107: note = Description of Artificial Sequence: Synthetic polypeptide; note = VL of XENP018874
SIVMTQSPATLSVSPGERATLSCRASQSVSNDVAWYQQKPGQSPRLLINYASHRYTGVPDRFTGSGYGTEFTLTISSLQSEDFAVYFCQQDYASPRTFGGGTKVEIK

SEQ ID NO: 9647 - protein, 5 aa, synthetic construct
  source 1..5: note = Description of Artificial Sequence: Synthetic peptide; note = XENP018874 vhCDR1
NYWMN

SEQ ID NO: 9648 - protein, 19 aa, synthetic construct
  source 1..19: note = Description of Artificial Sequence: Synthetic peptide; note = XENP018874 vhCDR2
EIRLKSNNYATHYAEPVKG

SEQ ID NO: 9649 - protein, 11 aa, synthetic construct
  source 1..11: note = Description of Artificial Sequence: Synthetic peptide; note = XENP018874 vhCDR3
YYGNYGGYFDV

SEQ ID NO: 9650 - protein, 11 aa, synthetic construct
  source 1..11: note = Description of Artificial Sequence: Synthetic peptide; note = XENP018874 vlCDR1
RASQSVSNDVA

SEQ ID NO: 9651 - protein, 7 aa, synthetic construct
  source 1..7: note = Description of Artificial Sequence: Synthetic peptide; note = XENP018874 vlCDR2
YASHRYT

SEQ ID NO: 9652 - protein, 9 aa, synthetic construct
  source 1..9: note = Description of Artificial Sequence: Synthetic peptide; note = XENP018874 vlCDR3
QQDYASPRT

SEQ ID NO: 9653 - protein, 249 aa, synthetic construct
  source 1..249: note = Description of Artificial Sequence: Synthetic polypeptide; note = XENP018875 1G6_H1_L1.129_scFv(GKPGS)4
EVQLVESGGGLVKPGGSLRLSCAASGFTFSNYWMNWVRQAPGKGLEWVGEIRLKSNNYATHYAEPVKGRFTISRDDSKSTVYLQMNSLKTEDTAVYYCTRYYGNYGGYFDVWGAGTLVTVSSGKPGSGKPGSGKPGSGKPGSSIVMTQSPATLSVSPGERATLSCRASQSVSNDVAWYQQKPGQSPRLLINYASHRYTGVPDRFTGSGYGTEFTLTISSLQSEDFAVYFCQQDYQSPRTFGGGTKVEIK

SEQ ID NO: 9654 - protein, 122 aa, synthetic construct; identical to SEQ ID NO: 6246
  source 1..122: note = Description of Artificial Sequence: Synthetic polypeptide; note = VH of XENP018875

SEQ ID NO: 9655 - protein, 107 aa, synthetic construct
  source 1..107: note = Description of Artificial Sequence: Synthetic polypeptide; note = VL of XENP018875
SIVMTQSPATLSVSPGERATLSCRASQSVSNDVAWYQQKPGQSPRLLINYASHRYTGVPDRFTGSGYGTEFTLTISSLQSEDFAVYFCQQDYQSPRTFGGGTKVEIK

SEQ ID NO: 9656 - protein, 5 aa, synthetic construct
  source 1..5: note = Description of Artificial Sequence: Synthetic peptide; note = XENP018875 vhCDR1
NYWMN

SEQ ID NO: 9657 - protein, 19 aa, synthetic construct
  source 1..19: note = Description of Artificial Sequence: Synthetic peptide; note = XENP018875 vhCDR2
EIRLKSNNYATHYAEPVKG

SEQ ID NO: 9658 - protein, 11 aa, synthetic construct
  source 1..11: note = Description of Artificial Sequence: Synthetic peptide; note = XENP018875 vhCDR3
YYGNYGGYFDV

SEQ ID NO: 9659 - protein, 11 aa, synthetic construct
  source 1..11: note = Description of Artificial Sequence: Synthetic peptide; note = XENP018875 vlCDR1
RASQSVSNDVA

SEQ ID NO: 9660 - protein, 7 aa, synthetic construct
  source 1..7: note = Description of Artificial Sequence: Synthetic peptide; note = XENP018875 vlCDR2
YASHRYT

SEQ ID NO: 9661 - protein, 9 aa, synthetic construct
  source 1..9: note = Description of Artificial Sequence: Synthetic peptide; note = XENP018875 vlCDR3
QQDYQSPRT

SEQ ID NO: 9662 - protein, 249 aa, synthetic construct
  source 1..249: note = Description of Artificial Sequence: Synthetic polypeptide; note = XENP018876 1G6_H1_L1.130_scFv(GKPGS)4
EVQLVESGGGLVKPGGSLRLSCAASGFTFSNYWMNWVRQAPGKGLEWVGEIRLKSNNYATHYAEPVKGRFTISRDDSKSTVYLQMNSLKTEDTAVYYCTRYYGNYGGYFDVWGAGTLVTVSSGKPGSGKPGSGKPGSGKPGSSIVMTQSPATLSVSPGERATLSCRASQSVSNDVAWYQQKPGQSPRLLINYASHRYTGVPDRFTGSGYGTEFTLTISSLQSEDFAVYFCQQDYGSPRTFGGGTKVEIK

SEQ ID NO: 9663 - protein, 122 aa, synthetic construct; identical to SEQ ID NO: 6246
  source 1..122: note = Description of Artificial Sequence: Synthetic polypeptide; note = VH of XENP018876

SEQ ID NO: 9664 - protein, 107 aa, synthetic construct
  source 1..107: note = Description of Artificial Sequence: Synthetic polypeptide; note = VL of XENP018876
SIVMTQSPATLSVSPGERATLSCRASQSVSNDVAWYQQKPGQSPRLLINYASHRYTGVPDRFTGSGYGTEFTLTISSLQSEDFAVYFCQQDYGSPRTFGGGTKVEIK

SEQ ID NO: 9665 - protein, 5 aa, synthetic construct
  source 1..5: note = Description of Artificial Sequence: Synthetic peptide; note = XENP018876 vhCDR1
NYWMN

SEQ ID NO: 9666 - protein, 19 aa, synthetic construct
  source 1..19: note = Description of Artificial Sequence: Synthetic peptide; note = XENP018876 vhCDR2
EIRLKSNNYATHYAEPVKG

SEQ ID NO: 9667 - protein, 11 aa, synthetic construct
  source 1..11: note = Description of Artificial Sequence: Synthetic peptide; note = XENP018876 vhCDR3
YYGNYGGYFDV

SEQ ID NO: 9668 - protein, 11 aa, synthetic construct
  source 1..11: note = Description of Artificial Sequence: Synthetic peptide; note = XENP018876 vlCDR1
RASQSVSNDVA

SEQ ID NO: 9669 - protein, 7 aa, synthetic construct
  source 1..7: note = Description of Artificial Sequence: Synthetic peptide; note = XENP018876 vlCDR2
YASHRYT

SEQ ID NO: 9670 - protein, 9 aa, synthetic construct
  source 1..9: note = Description of Artificial Sequence: Synthetic peptide; note = XENP018876 vlCDR3
QQDYGSPRT

SEQ ID NO: 9671 - protein, 249 aa, synthetic construct
  source 1..249: note = Description of Artificial Sequence: Synthetic polypeptide; note = XENP018877 1G6_H1_L1.131_scFv(GKPGS)4
EVQLVESGGGLVKPGGSLRLSCAASGFTFSNYWMNWVRQAPGKGLEWVGEIRLKSNNYATHYAEPVKGRFTISRDDSKSTVYLQMNSLKTEDTAVYYCTRYYGNYGGYFDVWGAGTLVTVSSGKPGSGKPGSGKPGSGKPGSSIVMTQSPATLSVSPGERATLSCRASQSVSNDVAWYQQKPGQSPRLLINYASHRYTGVPDRFTGSGYGTEFTLTISSLQSEDFAVYFCQQDYVSPRTFGGGTKVEIK

SEQ ID NO: 9672 - protein, 122 aa, synthetic construct; identical to SEQ ID NO: 6246
  source 1..122: note = Description of Artificial Sequence: Synthetic polypeptide; note = VH of XENP018877

SEQ ID NO: 9673 - protein, 107 aa, synthetic construct
  source 1..107: note = Description of Artificial Sequence: Synthetic polypeptide; note = VL of XENP018877
SIVMTQSPATLSVSPGERATLSCRASQSVSNDVAWYQQKPGQSPRLLINYASHRYTGVPDRFTGSGYGTEFTLTISSLQSEDFAVYFCQQDYVSPRTFGGGTKVEIK

SEQ ID NO: 9674 - protein, 5 aa, synthetic construct
  source 1..5: note = Description of Artificial Sequence: Synthetic peptide; note = XENP018877 vhCDR1
NYWMN

SEQ ID NO: 9675 - protein, 19 aa, synthetic construct
  source 1..19: note = Description of Artificial Sequence: Synthetic peptide; note = XENP018877 vhCDR2
EIRLKSNNYATHYAEPVKG

SEQ ID NO: 9676 - protein, 11 aa, synthetic construct
  source 1..11: note = Description of Artificial Sequence: Synthetic peptide; note = XENP018877 vhCDR3
YYGNYGGYFDV

SEQ ID NO: 9677 - protein, 11 aa, synthetic construct
  source 1..11: note = Description of Artificial Sequence: Synthetic peptide; note = XENP018877 vlCDR1
RASQSVSNDVA

SEQ ID NO: 9678 - protein, 7 aa, synthetic construct
  source 1..7: note = Description of Artificial Sequence: Synthetic peptide; note = XENP018877 vlCDR2
YASHRYT

SEQ ID NO: 9679 - protein, 9 aa, synthetic construct
  source 1..9: note = Description of Artificial Sequence: Synthetic peptide; note = XENP018877 vlCDR3
QQDYVSPRT

SEQ ID NO: 9680 - protein, 249 aa, synthetic construct
  source 1..249: note = Description of Artificial Sequence: Synthetic polypeptide; note = XENP018878 1G6_H1_L1.132_scFv(GKPGS)4
EVQLVESGGGLVKPGGSLRLSCAASGFTFSNYWMNWVRQAPGKGLEWVGEIRLKSNNYATHYAEPVKGRFTISRDDSKSTVYLQMNSLKTEDTAVYYCTRYYGNYGGYFDVWGAGTLVTVSSGKPGSGKPGSGKPGSGKPGSSIVMTQSPATLSVSPGERATLSCRASQSVSNDVAWYQQKPGQSPRLLINYASHRYTGVPDRFTGSGYGTEFTLTISSLQSEDFAVYFCQQDYHSPRTFGGGTKVEIK

SEQ ID NO: 9681 - protein, 122 aa, synthetic construct; identical to SEQ ID NO: 6246
  source 1..122: note = Description of Artificial Sequence: Synthetic polypeptide; note = VH of XENP018878

SEQ ID NO: 9682 - protein, 107 aa, synthetic construct
  source 1..107: note = Description of Artificial Sequence: Synthetic polypeptide; note = VL of XENP018878
SIVMTQSPATLSVSPGERATLSCRASQSVSNDVAWYQQKPGQSPRLLINYASHRYTGVPDRFTGSGYGTEFTLTISSLQSEDFAVYFCQQDYHSPRTFGGGTKVEIK

SEQ ID NO: 9683 - protein, 5 aa, synthetic construct
  source 1..5: note = Description of Artificial Sequence: Synthetic peptide; note = XENP018878 vhCDR1
NYWMN

SEQ ID NO: 9684 - protein, 19 aa, synthetic construct
  source 1..19: note = Description of Artificial Sequence: Synthetic peptide; note = XENP018878 vhCDR2
EIRLKSNNYATHYAEPVKG

SEQ ID NO: 9685 - protein, 11 aa, synthetic construct
  source 1..11: note = Description of Artificial Sequence: Synthetic peptide; note = XENP018878 vhCDR3
YYGNYGGYFDV

SEQ ID NO: 9686 - protein, 11 aa, synthetic construct
  source 1..11: note = Description of Artificial Sequence: Synthetic peptide; note = XENP018878 vlCDR1
RASQSVSNDVA

SEQ ID NO: 9687 - protein, 7 aa, synthetic construct
  source 1..7: note = Description of Artificial Sequence: Synthetic peptide; note = XENP018878 vlCDR2
YASHRYT

SEQ ID NO: 9688 - protein, 9 aa, synthetic construct
  source 1..9: note = Description of Artificial Sequence: Synthetic peptide; note = XENP018878 vlCDR3
QQDYHSPRT

SEQ ID NO: 9689 - protein, 249 aa, synthetic construct
  source 1..249: note = Description of Artificial Sequence: Synthetic polypeptide; note = XENP018879 1G6_H1_L1.133_scFv(GKPGS)4
EVQLVESGGGLVKPGGSLRLSCAASGFTFSNYWMNWVRQAPGKGLEWVGEIRLKSNNYATHYAEPVKGRFTISRDDSKSTVYLQMNSLKTEDTAVYYCTRYYGNYGGYFDVWGAGTLVTVSSGKPGSGKPGSGKPGSGKPGSSIVMTQSPATLSVSPGERATLSCRASQSVSNDVAWYQQKPGQSPRLLINYASHRYTGVPDRFTGSGYGTEFTLTISSLQSEDFAVYFCQQDYDSPRTFGGGTKVEIK

SEQ ID NO: 9690 - protein, 122 aa, synthetic construct; identical to SEQ ID NO: 6246
  source 1..122: note = Description of Artificial Sequence: Synthetic polypeptide; note = VH of XENP018879

SEQ ID NO: 9691 - protein, 107 aa, synthetic construct
  source 1..107: note = Description of Artificial Sequence: Synthetic polypeptide; note = VL of XENP018879
SIVMTQSPATLSVSPGERATLSCRASQSVSNDVAWYQQKPGQSPRLLINYASHRYTGVPDRFTGSGYGTEFTLTISSLQSEDFAVYFCQQDYDSPRTFGGGTKVEIK

SEQ ID NO: 9692 - protein, 5 aa, synthetic construct
  source 1..5: note = Description of Artificial Sequence: Synthetic peptide; note = XENP018879 vhCDR1
NYWMN

SEQ ID NO: 9693 - protein, 19 aa, synthetic construct
  source 1..19: note = Description of Artificial Sequence: Synthetic peptide; note = XENP018879 vhCDR2
EIRLKSNNYATHYAEPVKG

SEQ ID NO: 9694 - protein, 11 aa, synthetic construct
  source 1..11: note = Description of Artificial Sequence: Synthetic peptide; note = XENP018879 vhCDR3
YYGNYGGYFDV

SEQ ID NO: 9695 - protein, 11 aa, synthetic construct
  source 1..11: note = Description of Artificial Sequence: Synthetic peptide; note = XENP018879 vlCDR1
RASQSVSNDVA

SEQ ID NO: 9696 - protein, 7 aa, synthetic construct
  source 1..7: note = Description of Artificial Sequence: Synthetic peptide; note = XENP018879 vlCDR2
YASHRYT

SEQ ID NO: 9697 - protein, 9 aa, synthetic construct
  source 1..9: note = Description of Artificial Sequence: Synthetic peptide; note = XENP018879 vlCDR3
QQDYDSPRT

SEQ ID NO: 9698 - protein, 249 aa, synthetic construct
  source 1..249: note = Description of Artificial Sequence: Synthetic polypeptide; note = XENP018880 1G6_H1_L1.134_scFv(GKPGS)4
EVQLVESGGGLVKPGGSLRLSCAASGFTFSNYWMNWVRQAPGKGLEWVGEIRLKSNNYATHYAEPVKGRFTISRDDSKSTVYLQMNSLKTEDTAVYYCTRYYGNYGGYFDVWGAGTLVTVSSGKPGSGKPGSGKPGSGKPGSSIVMTQSPATLSVSPGERATLSCRASQSVSNDVAWYQQKPGQSPRLLINYASHRYTGVPDRFTGSGYGTEFTLTISSLQSEDFAVYFCQQDYKSPRTFGGGTKVEIK

SEQ ID NO: 9699 - protein, 122 aa, synthetic construct; identical to SEQ ID NO: 6246
  source 1..122: note = Description of Artificial Sequence: Synthetic polypeptide; note = VH of XENP018880

SEQ ID NO: 9700 - protein, 107 aa, synthetic construct
  source 1..107: note = Description of Artificial Sequence: Synthetic polypeptide; note = VL of XENP018880
SIVMTQSPATLSVSPGERATLSCRASQSVSNDVAWYQQKPGQSPRLLINYASHRYTGVPDRFTGSGYGTEFTLTISSLQSEDFAVYFCQQDYKSPRTFGGGTKVEIK

SEQ ID NO: 9701 - protein, 5 aa, synthetic construct
  source 1..5: note = Description of Artificial Sequence: Synthetic peptide; note = XENP018880 vhCDR1
NYWMN

SEQ ID NO: 9702 - protein, 19 aa, synthetic construct
  source 1..19: note = Description of Artificial Sequence: Synthetic peptide; note = XENP018880 vhCDR2
EIRLKSNNYATHYAEPVKG

SEQ ID NO: 9703 - protein, 11 aa, synthetic construct
  source 1..11: note = Description of Artificial Sequence: Synthetic peptide; note = XENP018880 vhCDR3
YYGNYGGYFDV

SEQ ID NO: 9704 - protein, 11 aa, synthetic construct
  source 1..11: note = Description of Artificial Sequence: Synthetic peptide; note = XENP018880 vlCDR1
RASQSVSNDVA

SEQ ID NO: 9705 - protein, 7 aa, synthetic construct
  source 1..7: note = Description of Artificial Sequence: Synthetic peptide; note = XENP018880 vlCDR2
YASHRYT

SEQ ID NO: 9706 - protein, 9 aa, synthetic construct
  source 1..9: note = Description of Artificial Sequence: Synthetic peptide; note = XENP018880 vlCDR3
QQDYKSPRT

SEQ ID NO: 9707 - protein, 249 aa, synthetic construct
  source 1..249: note = Description of Artificial Sequence: Synthetic polypeptide; note = XENP018881 1G6_H1_L1.135_scFv(GKPGS)4
EVQLVESGGGLVKPGGSLRLSCAASGFTFSNYWMNWVRQAPGKGLEWVGEIRLKSNNYATHYAEPVKGRFTISRDDSKSTVYLQMNSLKTEDTAVYYCTRYYGNYGGYFDVWGAGTLVTVSSGKPGSGKPGSGKPGSGKPGSSIVMTQSPATLSVSPGERATLSCRASQSVSNDVAWYQQKPGQSPRLLINYASHRYTGVPDRFTGSGYGTEFTLTISSLQSEDFAVYFCQQDYFSPRTFGGGTKVEIK

SEQ ID NO: 9708 - protein, 122 aa, synthetic construct; identical to SEQ ID NO: 6246
  source 1..122: note = Description of Artificial Sequence: Synthetic polypeptide; note = VH of XENP018881

SEQ ID NO: 9709 - protein, 107 aa, synthetic construct
  source 1..107: note = Description of Artificial Sequence: Synthetic polypeptide; note = VL of XENP018881
SIVMTQSPATLSVSPGERATLSCRASQSVSNDVAWYQQKPGQSPRLLINYASHRYTGVPDRFTGSGYGTEFTLTISSLQSEDFAVYFCQQDYFSPRTFGGGTKVEIK

SEQ ID NO: 9710 - protein, 5 aa, synthetic construct
  source 1..5: note = Description of Artificial Sequence: Synthetic peptide; note = XENP018881 vhCDR1
NYWMN

SEQ ID NO: 9711 - protein, 19 aa, synthetic construct
  source 1..19: note = Description of Artificial Sequence: Synthetic peptide; note = XENP018881 vhCDR2
EIRLKSNNYATHYAEPVKG

SEQ ID NO: 9712 - protein, 11 aa, synthetic construct
  source 1..11: note = Description of Artificial Sequence: Synthetic peptide; note = XENP018881 vhCDR3
YYGNYGGYFDV

SEQ ID NO: 9713 - protein, 11 aa, synthetic construct
  source 1..11: note = Description of Artificial Sequence: Synthetic peptide; note = XENP018881 vlCDR1
RASQSVSNDVA

SEQ ID NO: 9714 - protein, 7 aa, synthetic construct
  source 1..7: note = Description of Artificial Sequence: Synthetic peptide; note = XENP018881 vlCDR2
YASHRYT

SEQ ID NO: 9715 - protein, 9 aa, synthetic construct
  source 1..9: note = Description of Artificial Sequence: Synthetic peptide; note = XENP018881 vlCDR3
QQDYFSPRT

SEQ ID NO: 9716 - protein, 249 aa, synthetic construct
  source 1..249: note = Description of Artificial Sequence: Synthetic polypeptide; note = XENP018882 1G6_H1_L1.136_scFv(GKPGS)4
EVQLVESGGGLVKPGGSLRLSCAASGFTFSNYWMNWVRQAPGKGLEWVGEIRLKSNNYATHYAEPVKGRFTISRDDSKSTVYLQMNSLKTEDTAVYYCTRYYGNYGGYFDVWGAGTLVTVSSGKPGSGKPGSGKPGSGKPGSSIVMTQSPATLSVSPGERATLSCRASQSVSNDVAWYQQKPGQSPRLLINYASHRYTGVPDRFTGSGYGTEFTLTISSLQSEDFAVYFCQQDYSTPRTFGGGTKVEIK

SEQ ID NO: 9717 - protein, 122 aa, synthetic construct; identical to SEQ ID NO: 6246
  source 1..122: note = Description of Artificial Sequence: Synthetic polypeptide; note = VH of XENP018882

SEQ ID NO: 9718 - protein, 107 aa, synthetic construct
  source 1..107: note = Description of Artificial Sequence: Synthetic polypeptide; note = VL of XENP018882
SIVMTQSPATLSVSPGERATLSCRASQSVSNDVAWYQQKPGQSPRLLINYASHRYTGVPDRFTGSGYGTEFTLTISSLQSEDFAVYFCQQDYSTPRTFGGGTKVEIK

SEQ ID NO: 9719 - protein, 5 aa, synthetic construct
  source 1..5: note = Description of Artificial Sequence: Synthetic peptide; note = XENP018882 vhCDR1
NYWMN

SEQ ID NO: 9720 - protein, 19 aa, synthetic construct
  source 1..19: note = Description of Artificial Sequence: Synthetic peptide; note = XENP018882 vhCDR2
EIRLKSNNYATHYAEPVKG

SEQ ID NO: 9721 - protein, 11 aa, synthetic construct
  source 1..11: note = Description of Artificial Sequence: Synthetic peptide; note = XENP018882 vhCDR3
YYGNYGGYFDV

SEQ ID NO: 9722 - protein, 11 aa, synthetic construct
  source 1..11: note = Description of Artificial Sequence: Synthetic peptide; note = XENP018882 vlCDR1
RASQSVSNDVA

SEQ ID NO: 9723 - protein, 7 aa, synthetic construct
  source 1..7: note = Description of Artificial Sequence: Synthetic peptide; note = XENP018882 vlCDR2
YASHRYT

SEQ ID NO: 9724 - protein, 9 aa, synthetic construct
  source 1..9: note = Description of Artificial Sequence: Synthetic peptide; note = XENP018882 vlCDR3
QQDYSTPRT

SEQ ID NO: 9725 - protein, 249 aa, synthetic construct
  source 1..249: note = Description of Artificial Sequence: Synthetic polypeptide; note = XENP018883 1G6_H1_L1.137_scFv(GKPGS)4
EVQLVESGGGLVKPGGSLRLSCAASGFTFSNYWMNWVRQAPGKGLEWVGEIRLKSNNYATHYAEPVKGRFTISRDDSKSTVYLQMNSLKTEDTAVYYCTRYYGNYGGYFDVWGAGTLVTVSSGKPGSGKPGSGKPGSGKPGSSIVMTQSPATLSVSPGERATLSCRASQSVSNDVAWYQQKPGQSPRLLINYASHRYTGVPDRFTGSGYGTEFTLTISSLQSEDFAVYFCQQDYSAPRTFGGGTKVEIK

SEQ ID NO: 9726 - protein, 122 aa, synthetic construct; identical to SEQ ID NO: 6246
  source 1..122: note = Description of Artificial Sequence: Synthetic polypeptide; note = VH of XENP018883

SEQ ID NO: 9727 - protein, 107 aa, synthetic construct
  source 1..107: note = Description of Artificial Sequence: Synthetic polypeptide; note = VL of XENP018883
SIVMTQSPATLSVSPGERATLSCRASQSVSNDVAWYQQKPGQSPRLLINYASHRYTGVPDRFTGSGYGTEFTLTISSLQSEDFAVYFCQQDYSAPRTFGGGTKVEIK

SEQ ID NO: 9728 - protein, 5 aa, synthetic construct
  source 1..5: note = Description of Artificial Sequence: Synthetic peptide; note = XENP018883 vhCDR1
NYWMN

SEQ ID NO: 9729 - protein, 19 aa, synthetic construct
  source 1..19: note = Description of Artificial Sequence: Synthetic peptide; note = XENP018883 vhCDR2
EIRLKSNNYATHYAEPVKG

SEQ ID NO: 9730 - protein, 11 aa, synthetic construct
  source 1..11: note = Description of Artificial Sequence: Synthetic peptide; note = XENP018883 vhCDR3
YYGNYGGYFDV

SEQ ID NO: 9731 - protein, 11 aa, synthetic construct
  source 1..11: note = Description of Artificial Sequence: Synthetic peptide; note = XENP018883 vlCDR1
RASQSVSNDVA

SEQ ID NO: 9732 - protein, 7 aa, synthetic construct
  source 1..7: note = Description of Artificial Sequence: Synthetic peptide; note = XENP018883 vlCDR2
YASHRYT

SEQ ID NO: 9733 - protein, 9 aa, synthetic construct
  source 1..9: note = Description of Artificial Sequence: Synthetic peptide; note = XENP018883 vlCDR3
QQDYSAPRT

SEQ ID NO: 9734 - protein, 249 aa, synthetic construct
  source 1..249: note = Description of Artificial Sequence: Synthetic polypeptide; note = XENP018884 1G6_H1_L1.138_scFv(GKPGS)4
EVQLVESGGGLVKPGGSLRLSCAASGFTFSNYWMNWVRQAPGKGLEWVGEIRLKSNNYATHYAEPVKGRFTISRDDSKSTVYLQMNSLKTEDTAVYYCTRYYGNYGGYFDVWGAGTLVTVSSGKPGSGKPGSGKPGSGKPGSSIVMTQSPATLSVSPGERATLSCRASQSVSNDVAWYQQKPGQSPRLLINYASHRYTGVPDRFTGSGYGTEFTLTISSLQSEDFAVYFCQQDYSNPRTFGGGTKVEIK

SEQ ID NO: 9735 - protein, 122 aa, synthetic construct; identical to SEQ ID NO: 6246
  source 1..122: note = Description of Artificial Sequence: Synthetic polypeptide; note = VH of XENP018884

SEQ ID NO: 9736 - protein, 107 aa, synthetic construct
  source 1..107: note = Description of Artificial Sequence: Synthetic polypeptide; note = VL of XENP018884
SIVMTQSPATLSVSPGERATLSCRASQSVSNDVAWYQQKPGQSPRLLINYASHRYTGVPDRFTGSGYGTEFTLTISSLQSEDFAVYFCQQDYSNPRTFGGGTKVEIK

SEQ ID NO: 9737 - protein, 5 aa, synthetic construct
  source 1..5: note = Description of Artificial Sequence: Synthetic peptide; note = XENP018884 vhCDR1
NYWMN

SEQ ID NO: 9738 - protein, 19 aa, synthetic construct
  source 1..19: note = Description of Artificial Sequence: Synthetic peptide; note = XENP018884 vhCDR2
EIRLKSNNYATHYAEPVKG

SEQ ID NO: 9739 - protein, 11 aa, synthetic construct
  source 1..11: note = Description of Artificial Sequence: Synthetic peptide; note = XENP018884 vhCDR3
YYGNYGGYFDV

SEQ ID NO: 9740 - protein, 11 aa, synthetic construct
  source 1..11: note = Description of Artificial Sequence: Synthetic peptide; note = XENP018884 vlCDR1
RASQSVSNDVA

SEQ ID NO: 9741 - protein, 7 aa, synthetic construct
  source 1..7: note = Description of Artificial Sequence: Synthetic peptide; note = XENP018884 vlCDR2
YASHRYT

SEQ ID NO: 9742 - protein, 9 aa, synthetic construct
  source 1..9: note = Description of Artificial Sequence: Synthetic peptide; note = XENP018884 vlCDR3
QQDYSNPRT

SEQ ID NO: 9743 - protein, 249 aa, synthetic construct
  source 1..249: note = Description of Artificial Sequence: Synthetic polypeptide; note = XENP018885 1G6_H1_L1.139_scFv(GKPGS)4
EVQLVESGGGLVKPGGSLRLSCAASGFTFSNYWMNWVRQAPGKGLEWVGEIRLKSNNYATHYAEPVKGRFTISRDDSKSTVYLQMNSLKTEDTAVYYCTRYYGNYGGYFDVWGAGTLVTVSSGKPGSGKPGSGKPGSGKPGSSIVMTQSPATLSVSPGERATLSCRASQSVSNDVAWYQQKPGQSPRLLINYASHRYTGVPDRFTGSGYGTEFTLTISSLQSEDFAVYFCQQDYSGPRTFGGGTKVEIK

SEQ ID NO: 9744 - protein, 122 aa, synthetic construct; identical to SEQ ID NO: 6246
  source 1..122: note = Description of Artificial Sequence: Synthetic polypeptide; note = VH of XENP018885

SEQ ID NO: 9745 - protein, 107 aa, synthetic construct
  source 1..107: note = Description of Artificial Sequence: Synthetic polypeptide; note = VL of XENP018885
SIVMTQSPATLSVSPGERATLSCRASQSVSNDVAWYQQKPGQSPRLLINYASHRYTGVPDRFTGSGYGTEFTLTISSLQSEDFAVYFCQQDYSGPRTFGGGTKVEIK

SEQ ID NO: 9746 - protein, 5 aa, synthetic construct
  source 1..5: note = Description of Artificial Sequence: Synthetic peptide; note = XENP018885 vhCDR1
NYWMN

SEQ ID NO: 9747 - protein, 19 aa, synthetic construct
  source 1..19: note = Description of Artificial Sequence: Synthetic peptide; note = XENP018885 vhCDR2
EIRLKSNNYATHYAEPVKG

SEQ ID NO: 9748 - protein, 11 aa, synthetic construct
  source 1..11: note = Description of Artificial Sequence: Synthetic peptide; note = XENP018885 vhCDR3
YYGNYGGYFDV

SEQ ID NO: 9749 - protein, 11 aa, synthetic construct
  source 1..11: note = Description of Artificial Sequence: Synthetic peptide; note = XENP018885 vlCDR1
RASQSVSNDVA

SEQ ID NO: 9750 - protein, 7 aa, synthetic construct
  source 1..7: note = Description of Artificial Sequence: Synthetic peptide; note = XENP018885 vlCDR2
YASHRYT

SEQ ID NO: 9751 - protein, 9 aa, synthetic construct
  source 1..9: note = Description of Artificial Sequence: Synthetic peptide; note = XENP018885 vlCDR3
QQDYSGPRT

SEQ ID NO: 9752 - protein, 249 aa, synthetic construct
  source 1..249: note = Description of Artificial Sequence: Synthetic polypeptide; note = XENP018886 1G6_H1_L1.140_scFv(GKPGS)4
EVQLVESGGGLVKPGGSLRLSCAASGFTFSNYWMNWVRQAPGKGLEWVGEIRLKSNNYATHYAEPVKGRFTISRDDSKSTVYLQMNSLKTEDTAVYYCTRYYGNYGGYFDVWGAGTLVTVSSGKPGSGKPGSGKPGSGKPGSSIVMTQSPATLSVSPGERATLSCRASQSVSNDVAWYQQKPGQSPRLLINYASHRYTGVPDRFTGSGYGTEFTLTISSLQSEDFAVYFCQQDYSVPRTFGGGTKVEIK

SEQ ID NO: 9753 - protein, 122 aa, synthetic construct; identical to SEQ ID NO: 6246
  source 1..122: note = Description of Artificial Sequence: Synthetic polypeptide; note = VH of XENP018886

SEQ ID NO: 9754 - protein, 107 aa, synthetic construct
  source 1..107: note = Description of Artificial Sequence: Synthetic polypeptide; note = VL of XENP018886
SIVMTQSPATLSVSPGERATLSCRASQSVSNDVAWYQQKPGQSPRLLINYASHRYTGVPDRFTGSGYGTEFTLTISSLQSEDFAVYFCQQDYSVPRTFGGGTKVEIK

SEQ ID NO: 9755 - protein, 5 aa, synthetic construct
  source 1..5: note = Description of Artificial Sequence: Synthetic peptide; note = XENP018886 vhCDR1
NYWMN

SEQ ID NO: 9756 - protein, 19 aa, synthetic construct
  source 1..19: note = Description of Artificial Sequence: Synthetic peptide; note = XENP018886 vhCDR2
EIRLKSNNYATHYAEPVKG

SEQ ID NO: 9757 - protein, 11 aa, synthetic construct
  source 1..11: note = Description of Artificial Sequence: Synthetic peptide; note = XENP018886 vhCDR3
YYGNYGGYFDV

SEQ ID NO: 9758 - protein, 11 aa, synthetic construct
  source 1..11: note = Description of Artificial Sequence: Synthetic peptide; note = XENP018886 vlCDR1
RASQSVSNDVA

SEQ ID NO: 9759 - protein, 7 aa, synthetic construct
  source 1..7: note = Description of Artificial Sequence: Synthetic peptide; note = XENP018886 vlCDR2
YASHRYT

SEQ ID NO: 9760 - protein, 9 aa, synthetic construct
  source 1..9: note = Description of Artificial Sequence: Synthetic peptide; note = XENP018886 vlCDR3
QQDYSVPRT

SEQ ID NO: 9761 - protein, 249 aa, synthetic construct
  source 1..249: note = Description of Artificial Sequence: Synthetic polypeptide; note = XENP018887 1G6_H1_L1.141_scFv(GKPGS)4
EVQLVESGGGLVKPGGSLRLSCAASGFTFSNYWMNWVRQAPGKGLEWVGEIRLKSNNYATHYAEPVKGRFTISRDDSKSTVYLQMNSLKTEDTAVYYCTRYYGNYGGYFDVWGAGTLVTVSSGKPGSGKPGSGKPGSGKPGSSIVMTQSPATLSVSPGERATLSCRASQSVSNDVAWYQQKPGQSPRLLINYASHRYTGVPDRFTGSGYGTEFTLTISSLQSEDFAVYFCQQDYSHPRTFGGGTKVEIK

SEQ ID NO: 9762 - protein, 122 aa, synthetic construct; identical to SEQ ID NO: 6246
  source 1..122: note = Description of Artificial Sequence: Synthetic polypeptide; note = VH of XENP018887

SEQ ID NO: 9763 - protein, 107 aa, synthetic construct
  source 1..107: note = Description of Artificial Sequence: Synthetic polypeptide; note = VL of XENP018887
SIVMTQSPATLSVSPGERATLSCRASQSVSNDVAWYQQKPGQSPRLLINYASHRYTGVPDRFTGSGYGTEFTLTISSLQSEDFAVYFCQQDYSHPRTFGGGTKVEIK

SEQ ID NO: 9764 - protein, 5 aa, synthetic construct
  source 1..5: note = Description of Artificial Sequence: Synthetic peptide; note = XENP018887 vhCDR1
NYWMN

SEQ ID NO: 9765 - protein, 19 aa, synthetic construct
  source 1..19: note = Description of Artificial Sequence: Synthetic peptide; note = XENP018887 vhCDR2
EIRLKSNNYATHYAEPVKG

SEQ ID NO: 9766 - protein, 11 aa, synthetic construct
  source 1..11: note = Description of Artificial Sequence: Synthetic peptide; note = XENP018887 vhCDR3
YYGNYGGYFDV

SEQ ID NO: 9767 - protein, 11 aa, synthetic construct
  source 1..11: note = Description of Artificial Sequence: Synthetic peptide; note = XENP018887 vlCDR1
RASQSVSNDVA

SEQ ID NO: 9768 - protein, 7 aa, synthetic construct
  source 1..7: note = Description of Artificial Sequence: Synthetic peptide; note = XENP018887 vlCDR2
YASHRYT

SEQ ID NO: 9769 - protein, 9 aa, synthetic construct
  source 1..9: note = Description of Artificial Sequence: Synthetic peptide; note = XENP018887 vlCDR3
QQDYSHPRT

SEQ ID NO: 9770 - protein, 249 aa, synthetic construct
  source 1..249: note = Description of Artificial Sequence: Synthetic polypeptide; note = XENP018888 1G6_H1_L1.142_scFv(GKPGS)4
EVQLVESGGGLVKPGGSLRLSCAASGFTFSNYWMNWVRQAPGKGLEWVGEIRLKSNNYATHYAEPVKGRFTISRDDSKSTVYLQMNSLKTEDTAVYYCTRYYGNYGGYFDVWGAGTLVTVSSGKPGSGKPGSGKPGSGKPGSSIVMTQSPATLSVSPGERATLSCRASQSVSNDVAWYQQKPGQSPRLLINYASHRYTGVPDRFTGSGYGTEFTLTISSLQSEDFAVYFCQQDYSDPRTFGGGTKVEIK

SEQ ID NO: 9771 - protein, 122 aa, synthetic construct; identical to SEQ ID NO: 6246
  source 1..122: note = Description of Artificial Sequence: Synthetic polypeptide; note = VH of XENP018888

SEQ ID NO: 9772 - protein, 107 aa, synthetic construct
  source 1..107: note = Description of Artificial Sequence: Synthetic polypeptide; note = VL of XENP018888
SIVMTQSPATLSVSPGERATLSCRASQSVSNDVAWYQQKPGQSPRLLINYASHRYTGVPDRFTGSGYGTEFTLTISSLQSEDFAVYFCQQDYSDPRTFGGGTKVEIK

SEQ ID NO: 9773 - protein, 5 aa, synthetic construct
  source 1..5: note = Description of Artificial Sequence: Synthetic peptide; note = XENP018888 vhCDR1
NYWMN

SEQ ID NO: 9774 - protein, 19 aa, synthetic construct
  source 1..19: note = Description of Artificial Sequence: Synthetic peptide; note = XENP018888 vhCDR2
EIRLKSNNYATHYAEPVKG

SEQ ID NO: 9775 - protein, 11 aa, synthetic construct
  source 1..11: note = Description of Artificial Sequence: Synthetic peptide; note = XENP018888 vhCDR3
YYGNYGGYFDV

SEQ ID NO: 9776 - protein, 11 aa, synthetic construct
  source 1..11: note = Description of Artificial Sequence: Synthetic peptide; note = XENP018888 vlCDR1
RASQSVSNDVA

SEQ ID NO: 9777 - protein, 7 aa, synthetic construct
  source 1..7: note = Description of Artificial Sequence: Synthetic peptide; note = XENP018888 vlCDR2
YASHRYT

SEQ ID NO: 9778 - protein, 9 aa, synthetic construct
  source 1..9: note = Description of Artificial Sequence: Synthetic peptide; note = XENP018888 vlCDR3
QQDYSDPRT

SEQ ID NO: 9779 - protein, 249 aa, synthetic construct
  source 1..249: note = Description of Artificial Sequence: Synthetic polypeptide; note = XENP018889 1G6_H1_L1.143_scFv(GKPGS)4
EVQLVESGGGLVKPGGSLRLSCAASGFTFSNYWMNWVRQAPGKGLEWVGEIRLKSNNYATHYAEPVKGRFTISRDDSKSTVYLQMNSLKTEDTAVYYCTRYYGNYGGYFDVWGAGTLVTVSSGKPGSGKPGSGKPGSGKPGSSIVMTQSPATLSVSPGERATLSCRASQSVSNDVAWYQQKPGQSPRLLINYASHRYTGVPDRFTGSGYGTEFTLTISSLQSEDFAVYFCQQDYSKPRTFGGGTKVEIK

SEQ ID NO: 9780 - protein, 122 aa, synthetic construct; identical to SEQ ID NO: 6246
  source 1..122: note = Description of Artificial Sequence: Synthetic polypeptide; note = VH of XENP018889

SEQ ID NO: 9781 - protein, 107 aa, synthetic construct
  source 1..107: note = Description of Artificial Sequence: Synthetic polypeptide; note = VL of XENP018889
SIVMTQSPATLSVSPGERATLSCRASQSVSNDVAWYQQKPGQSPRLLINYASHRYTGVPDRFTGSGYGTEFTLTISSLQSEDFAVYFCQQDYSKPRTFGGGTKVEIK

SEQ ID NO: 9782 - protein, 5 aa, synthetic construct
  source 1..5: note = Description of Artificial Sequence: Synthetic peptide; note = XENP018889 vhCDR1
NYWMN

SEQ ID NO: 9783 - protein, 19 aa, synthetic construct
  source 1..19: note = Description of Artificial Sequence: Synthetic peptide; note = XENP018889 vhCDR2
EIRLKSNNYATHYAEPVKG

SEQ ID NO: 9784 - protein, 11 aa, synthetic construct
  source 1..11: note = Description of Artificial Sequence: Synthetic peptide; note = XENP018889 vhCDR3
YYGNYGGYFDV

SEQ ID NO: 9785 - protein, 11 aa, synthetic construct
  source 1..11: note = Description of Artificial Sequence: Synthetic peptide; note = XENP018889 vlCDR1
RASQSVSNDVA

SEQ ID NO: 9786 - protein, 7 aa, synthetic construct
  source 1..7: note = Description of Artificial Sequence: Synthetic peptide; note = XENP018889 vlCDR2
YASHRYT

SEQ ID NO: 9787 - protein, 9 aa, synthetic construct
  source 1..9: note = Description of Artificial Sequence: Synthetic peptide; note = XENP018889 vlCDR3
QQDYSKPRT

SEQ ID NO: 9788 - protein, 249 aa, synthetic construct
  source 1..249: note = Description of Artificial Sequence: Synthetic polypeptide; note = XENP018890 1G6_H1_L1.144_scFv(GKPGS)4
EVQLVESGGGLVKPGGSLRLSCAASGFTFSNYWMNWVRQAPGKGLEWVGEIRLKSNNYATHYAEPVKGRFTISRDDSKSTVYLQMNSLKTEDTAVYYCTRYYGNYGGYFDVWGAGTLVTVSSGKPGSGKPGSGKPGSGKPGSSIVMTQSPATLSVSPGERATLSCRASQSVSNDVAWYQQKPGQSPRLLINYASHRYTGVPDRFTGSGYGTEFTLTISSLQSEDFAVYFCQQDYSFPRTFGGGTKVEIK

SEQ ID NO: 9789 - protein, 122 aa, synthetic construct; identical to SEQ ID NO: 6246
  source 1..122: note = Description of Artificial Sequence: Synthetic polypeptide; note = VH of XENP018890

SEQ ID NO: 9790 - protein, 107 aa, synthetic construct
  source 1..107: note = Description of Artificial Sequence: Synthetic polypeptide; note = VL of XENP018890
SIVMTQSPATLSVSPGERATLSCRASQSVSNDVAWYQQKPGQSPRLLINYASHRYTGVPDRFTGSGYGTEFTLTISSLQSEDFAVYFCQQDYSFPRTFGGGTKVEIK

SEQ ID NO: 9791 - protein, 5 aa, synthetic construct
  source 1..5: note = Description of Artificial Sequence: Synthetic peptide; note = XENP018890 vhCDR1
NYWMN

SEQ ID NO: 9792 - protein, 19 aa, synthetic construct
  source 1..19: note = Description of Artificial Sequence: Synthetic peptide; note = XENP018890 vhCDR2
EIRLKSNNYATHYAEPVKG

SEQ ID NO: 9793 - protein, 11 aa, synthetic construct
  source 1..11: note = Description of Artificial Sequence: Synthetic peptide; note = XENP018890 vhCDR3
YYGNYGGYFDV

SEQ ID NO: 9794 - protein, 11 aa, synthetic construct
  source 1..11: note = Description of Artificial Sequence: Synthetic peptide; note = XENP018890 vlCDR1
RASQSVSNDVA

SEQ ID NO: 9795 - protein, 7 aa, synthetic construct
  source 1..7: note = Description of Artificial Sequence: Synthetic peptide; note = XENP018890 vlCDR2
YASHRYT

SEQ ID NO: 9796 - protein, 9 aa, synthetic construct
  source 1..9: note = Description of Artificial Sequence: Synthetic peptide; note = XENP018890 vlCDR3
QQDYSFPRT

SEQ ID NO: 9797 - protein, 249 aa, synthetic construct
  source 1..249: note = Description of Artificial Sequence: Synthetic polypeptide; note = XENP018891 1G6_H1_L1.145_scFv(GKPGS)4
EVQLVESGGGLVKPGGSLRLSCAASGFTFSNYWMNWVRQAPGKGLEWVGEIRLKSNNYATHYAEPVKGRFTISRDDSKSTVYLQMNSLKTEDTAVYYCTRYYGNYGGYFDVWGAGTLVTVSSGKPGSGKPGSGKPGSGKPGSSIVMTQSPATLSVSPGERATLSCRASQSVSNDVAWYQQKPGQSPRLLINYASHRYTGVPDRFTGSGYGTEFTLTISSLQSEDFAVYFCQQDYSSPRTFGGGTKLEIK

SEQ ID NO: 9798 - protein, 122 aa, synthetic construct; identical to SEQ ID NO: 6246
  source 1..122: note = Description of Artificial Sequence: Synthetic polypeptide; note = VH of XENP018891

SEQ ID NO: 9799 - protein, 107 aa, synthetic construct
  source 1..107: note = Description of Artificial Sequence: Synthetic polypeptide; note = VL of XENP018891
SIVMTQSPATLSVSPGERATLSCRASQSVSNDVAWYQQKPGQSPRLLINYASHRYTGVPDRFTGSGYGTEFTLTISSLQSEDFAVYFCQQDYSSPRTFGGGTKLEIK

SEQ ID NO: 9800 - protein, 5 aa, synthetic construct
  source 1..5: note = Description of Artificial Sequence: Synthetic peptide; note = XENP018891 vhCDR1
NYWMN

SEQ ID NO: 9801 - protein, 19 aa, synthetic construct
  source 1..19: note = Description of Artificial Sequence: Synthetic peptide; note = XENP018891 vhCDR2
EIRLKSNNYATHYAEPVKG

SEQ ID NO: 9802 - protein, 11 aa, synthetic construct
  source 1..11: note = Description of Artificial Sequence: Synthetic peptide; note = XENP018891 vhCDR3
YYGNYGGYFDV

SEQ ID NO: 9803 - protein, 11 aa, synthetic construct
  source 1..11: note = Description of Artificial Sequence: Synthetic peptide; note = XENP018891 vlCDR1
RASQSVSNDVA

SEQ ID NO: 9804 - protein, 7 aa, synthetic construct
  source 1..7: note = Description of Artificial Sequence: Synthetic peptide; note = XENP018891 vlCDR2
YASHRYT

SEQ ID NO: 9805 - protein, 9 aa, synthetic construct
  source 1..9: note = Description of Artificial Sequence: Synthetic peptide; note = XENP018891 vlCDR3
QQDYSSPRT

SEQ ID NO: 9806 - protein, 249 aa, synthetic construct
  source 1..249: note = Description of Artificial Sequence: Synthetic polypeptide; note = XENP018895 1G6_H0L0_scFv(GKPGS)4
EVKLEESGGGLVQPGGSMKLSCVASGFTFSNYWMNWVRQSPEKGLEWVAEIRLKSNNYATHYAESVKGRFTISRDDSKSSVYLQMNNLRAEDTGIYYCTRYYGNYGGYFDVWGAGTTVTVSSGKPGSGKPGSGKPGSGKPGSSIVMTQTPKFLLVSAGDRVTITCKASQSVSNDVAWYQQKPGQSPKLLINYASHRYTGVPDRFTGSGYGTDFTFTISTVQAEDLAVYFCQQDYSSPRTFGGGTKLEIK

SEQ ID NO: 9807 - protein, 122 aa, synthetic construct
  source 1..122: note = Description of Artificial Sequence: Synthetic polypeptide; note = VH of XENP018895
EVKLEESGGGLVQPGGSMKLSCVASGFTFSNYWMNWVRQSPEKGLEWVAEIRLKSNNYATHYAESVKGRFTISRDDSKSSVYLQMNNLRAEDTGIYYCTRYYGNYGGYFDVWGAGTTVTVSS

SEQ ID NO: 9808 - protein, 107 aa, synthetic construct
  source 1..107: note = Description of Artificial Sequence: Synthetic polypeptide; note = VL of XENP018895
SIVMTQTPKFLLVSAGDRVTITCKASQSVSNDVAWYQQKPGQSPKLLINYASHRYTGVPDRFTGSGYGTDFTFTISTVQAEDLAVYFCQQDYSSPRTFGGGTKLEIK

SEQ ID NO: 9809 - protein, 5 aa, synthetic construct
  source 1..5: note = Description of Artificial Sequence: Synthetic peptide; note = XENP018895 vhCDR1
NYWMN

SEQ ID NO: 9810 - protein, 19 aa, synthetic construct
  source 1..19: note = Description of Artificial Sequence: Synthetic peptide; note = XENP018895 vhCDR2
EIRLKSNNYATHYAESVKG

SEQ ID NO: 9811 - protein, 11 aa, synthetic construct
  source 1..11: note = Description of Artificial Sequence: Synthetic peptide; note = XENP018895 vhCDR3
YYGNYGGYFDV

SEQ ID NO: 9812 - protein, 11 aa, synthetic construct
  source 1..11: note = Description of Artificial Sequence: Synthetic peptide; note = XENP018895 vlCDR1
KASQSVSNDVA

SEQ ID NO: 9813 - protein, 7 aa, synthetic construct
  source 1..7: note = Description of Artificial Sequence: Synthetic peptide; note = XENP018895 vlCDR2
YASHRYT

SEQ ID NO: 9814 - protein, 9 aa, synthetic construct
  source 1..9: note = Description of Artificial Sequence: Synthetic peptide; note = XENP018895 vlCDR3
QQDYSSPRT

SEQ ID NO: 9815 - protein, 249 aa, synthetic construct
  source 1..249: note = Description of Artificial Sequence: Synthetic polypeptide; note = XENP018896 1G6_L1H1_scFv(GKPGS)4
SIVMTQSPATLSVSPGERATLSCRASQSVSNDVAWYQQKPGQSPRLLINYASHRYTGVPDRFTGSGYGTEFTLTISSLQSEDFAVYFCQQDYSSPRTFGGGTKVEIKGKPGSGKPGSGKPGSGKPGSEVQLVESGGGLVKPGGSLRLSCAASGFTFSNYWMNWVRQAPGKGLEWVGEIRLKSNNYATHYAEPVKGRFTISRDDSKSTVYLQMNSLKTEDTAVYYCTRYYGNYGGYFDVWGAGTLVTVSS

SEQ ID NO: 9816 - protein, 107 aa, synthetic construct; identical to SEQ ID NO: 6247
  source 1..107: note = Description of Artificial Sequence: Synthetic polypeptide; note = VH of XENP018896

SEQ ID NO: 9817 - protein, 122 aa, synthetic construct; identical to SEQ ID NO: 6246
  source 1..122: note = Description of Artificial Sequence: Synthetic polypeptide; note = VL of XENP018896

SEQ ID NO: 9818 - protein, 11 aa, synthetic construct
  source 1..11: note = Description of Artificial Sequence: Synthetic peptide; note = XENP018896 vhCDR1
RASQSVSNDVA

SEQ ID NO: 9819 - protein, 7 aa, synthetic construct
  source 1..7: note = Description of Artificial Sequence: Synthetic peptide; note = XENP018896 vhCDR2
YASHRYT

SEQ ID NO: 9820 - protein, 9 aa, synthetic construct
  source 1..9: note = Description of Artificial Sequence: Synthetic peptide; note = XENP018896 vhCDR3
QQDYSSPRT

SEQ ID NO: 9821 - protein, 5 aa, synthetic construct
  source 1..5: note = Description of Artificial Sequence: Synthetic peptide; note = XENP018896 vlCDR1
NYWMN

SEQ ID NO: 9822 - protein, 19 aa, synthetic construct
  source 1..19: note = Description of Artificial Sequence: Synthetic peptide; note = XENP018896 vlCDR2
EIRLKSNNYATHYAEPVKG

SEQ ID NO: 9823 - protein, 11 aa, synthetic construct
  source 1..11: note = Description of Artificial Sequence: Synthetic peptide; note = XENP018896 vlCDR3
YYGNYGGYFDV

SEQ ID NO: 9824 - protein, 244 aa, synthetic construct
  source 1..244: note = Description of Artificial Sequence: Synthetic polypeptide; note = XENP018901 6A3_H0L0_scFv(GKPGS)4
EVKLVESGGGLVKPGGSLKLSCAASGFTFSSYGMSWVRQTPEKRLEWVATISGGGRYTYYPDSVKGRFTISRDNAKNNLYLQMSSLRSEDTALYYCASYYDSSFDYWGQGTTLTVSSGKPGSGKPGSGKPGSGKPGSDIVMTQSHKFMSTSVGDRVSITCKASQDVGTAVAWYQQKPGQSPKLLIYWASTRHTGVPDRFTGSGSGTDFTLTISNVQSEDLADYFCQHYSIYPWTFGGGTKLEIK

SEQ ID NO: 9825 - protein, 117 aa, synthetic construct
  source 1..117: note = Description of Artificial Sequence: Synthetic polypeptide; note = VH of XENP018901
EVKLVESGGGLVKPGGSLKLSCAASGFTFSSYGMSWVRQTPEKRLEWVATISGGGRYTYYPDSVKGRFTISRDNAKNNLYLQMSSLRSEDTALYYCASYYDSSFDYWGQGTTLTVSS

SEQ ID NO: 9826 - protein, 107 aa, synthetic construct
  source 1..107: note = Description of Artificial Sequence: Synthetic polypeptide; note = VL of XENP018901
DIVMTQSHKFMSTSVGDRVSITCKASQDVGTAVAWYQQKPGQSPKLLIYWASTRHTGVPDRFTGSGSGTDFTLTISNVQSEDLADYFCQHYSIYPWTFGGGTKLEIK

SEQ ID NO: 9827 - protein, 5 aa, synthetic construct
  source 1..5: note = Description of Artificial Sequence: Synthetic peptide; note = XENP018901 vhCDR1
SYGMS

SEQ ID NO: 9828 - protein, 17 aa, synthetic construct
  source 1..17: note = Description of Artificial Sequence: Synthetic peptide; note = XENP018901 vhCDR2
TISGGGRYTYYPDSVKG

SEQ ID NO: 9829 - protein, 8 aa, synthetic construct
  source 1..8: note = Description of Artificial Sequence: Synthetic peptide; note = XENP018901 vhCDR3
YYDSSFDY

SEQ ID NO: 9830 - protein, 11 aa, synthetic construct
  source 1..11: note = Description of Artificial Sequence: Synthetic peptide; note = XENP018901 vlCDR1
KASQDVGTAVA

SEQ ID NO: 9831 - protein, 7 aa, synthetic construct
  source 1..7: note = Description of Artificial Sequence: Synthetic peptide; note = XENP018901 vlCDR2
WASTRHT

SEQ ID NO: 9832 - protein, 9 aa, synthetic construct
  source 1..9: note = Description of Artificial Sequence: Synthetic peptide; note = XENP018901 vlCDR3
QHYSIYPWT

SEQ ID NO: 9833 - protein, 244 aa, synthetic construct
  source 1..244: note = Description of Artificial Sequence: Synthetic polypeptide; note = XENP018902 6A3_L3_H1.1_scFv(GKPGS)4
DIVMTQSPSSLSASVGDRVTITCRASQDVGTAVAWYQQKPGKSPKLLIYWASTRHTGVPDRFTGSGSGTDFTLTISSLQPEDFATYFCQHYSIYPWTFGGGTKVEIKGKPGSGKPGSGKPGSGKPGSEVQLLESGGGLVQPGGSLRLSCAASGFTFSSYGMSWVRQAPGKGLEWVSTISGGGRYTYYPDSVKGRFTISRDNSKNTLYLQMNSLRAEDTAVYYCASYYDSSFDYWGQGTLVTVSS

SEQ ID NO: 9834 - protein, 107 aa, synthetic construct; identical to SEQ ID NO: 6337
  source 1..107: note = Description of Artificial Sequence: Synthetic polypeptide; note = VH of XENP018902

SEQ ID NO: 9835 - protein, 117 aa, synthetic construct; identical to SEQ ID NO: 6354
  source 1..117: note = Description of Artificial Sequence: Synthetic polypeptide; note = VL of XENP018902

SEQ ID NO: 9836 - protein, 11 aa, synthetic construct
  source 1..11: note = Description of Artificial Sequence: Synthetic peptide; note = XENP018902 vhCDR1
RASQDVGTAVA

SEQ ID NO: 9837 - protein, 7 aa, synthetic construct
  source 1..7: note = Description of Artificial Sequence: Synthetic peptide; note = XENP018902 vhCDR2
WASTRHT

SEQ ID NO: 9838 - protein, 9 aa, synthetic construct
  source 1..9: note = Description of Artificial Sequence: Synthetic peptide; note = XENP018902 vhCDR3
QHYSIYPWT

SEQ ID NO: 9839 - protein, 5 aa, synthetic construct
  source 1..5: note = Description of Artificial Sequence: Synthetic peptide; note = XENP018902 vlCDR1
SYGMS

SEQ ID NO: 9840 - protein, 17 aa, synthetic construct
  source 1..17: note = Description of Artificial Sequence: Synthetic peptide; note = XENP018902 vlCDR2
TISGGGRYTYYPDSVKG

SEQ ID NO: 9841 - protein, 9 aa, synthetic construct
  source 1..9: note = Description of Artificial Sequence: Synthetic peptide; note = XENP018902 vlCDR3
SYYDSSFDY

SEQ ID NO: 9842 - protein, 249 aa, synthetic construct
  source 1..249: note = Description of Artificial Sequence: Synthetic polypeptide; note = XENP018921 1G6_H1L3_scFv(GKPGS)4
EVQLVESGGGLVKPGGSLRLSCAASGFTFSNYWMNWVRQAPGKGLEWVGEIRLKSNNYATHYAEPVKGRFTISRDDSKSTVYLQMNSLKTEDTAVYYCTRYYGNYGGYFDVWGAGTLVTVSSGKPGSGKPGSGKPGSGKPGSSIVMTQSPLSLPVTPGEPASISCRASQSVSNDVAWYLQKPGQSPQLLINYASHRYTGVPDRFTGSGYGTDFTLKISRVEAEDVGVYFCQQDYSSPRTFGGGTKVEIK

SEQ ID NO: 9843 - protein, 122 aa, synthetic construct; identical to SEQ ID NO: 6246
  source 1..122: note = Description of Artificial Sequence: Synthetic polypeptide; note = VH of XENP018921

SEQ ID NO: 9844 - protein, 107 aa, synthetic construct
  source 1..107: note = Description of Artificial Sequence: Synthetic polypeptide; note = VL of XENP018921
SIVMTQSPLSLPVTPGEPASISCRASQSVSNDVAWYLQKPGQSPQLLINYASHRYTGVPDRFTGSGYGTDFTLKISRVEAEDVGVYFCQQDYSSPRTFGGGTKVEIK

SEQ ID NO: 9845 - protein, 5 aa, synthetic construct
  source 1..5: note = Description of Artificial Sequence: Synthetic peptide; note = XENP018921 vhCDR1
NYWMN

SEQ ID NO: 9846 - protein, 19 aa, synthetic construct
  source 1..19: note = Description of Artificial Sequence: Synthetic peptide; note = XENP018921 vhCDR2
EIRLKSNNYATHYAEPVKG

SEQ ID NO: 9847 - protein, 11 aa, synthetic construct
  source 1..11: note = Description of Artificial Sequence: Synthetic peptide; note = XENP018921 vhCDR3
YYGNYGGYFDV

SEQ ID NO: 9848 - protein, 11 aa, synthetic construct
  source 1..11: note = Description of Artificial Sequence: Synthetic peptide; note = XENP018921 vlCDR1
RASQSVSNDVA

SEQ ID NO: 9849 - protein, 7 aa, synthetic construct
  source 1..7: note = Description of Artificial Sequence: Synthetic peptide; note = XENP018921 vlCDR2
YASHRYT

SEQ ID NO: 9850 - protein, 9 aa, synthetic construct
  source 1..9: note = Description of Artificial Sequence: Synthetic peptide; note = XENP018921 vlCDR3
QQDYSSPRT

SEQ ID NO: 9851 - protein, 249 aa, synthetic construct
  source 1..249: note = Description of Artificial Sequence: Synthetic polypeptide; note = XENP018922 1G6_H1L4_scFv(GKPGS)4
EVQLVESGGGLVKPGGSLRLSCAASGFTFSNYWMNWVRQAPGKGLEWVGEIRLKSNNYATHYAEPVKGRFTISRDDSKSTVYLQMNSLKTEDTAVYYCTRYYGNYGGYFDVWGAGTLVTVSSGKPGSGKPGSGKPGSGKPGSSIVMTQSPGTLSLSPGERATLSCRASQSVSNDVAWYQQKPGQSPRLLINYASHRYTGVPDRFTGSGYGTDFTLTISRLEPEDFAVYFCQQDYSSPRTFGGGTKVEIK

SEQ ID NO: 9852 - protein, 122 aa, synthetic construct; identical to SEQ ID NO: 6246
  source 1..122: note = Description of Artificial Sequence: Synthetic polypeptide; note = VH of XENP018922

SEQ ID NO: 9853 - protein, 107 aa, synthetic construct
  source 1..107: note = Description of Artificial Sequence: Synthetic polypeptide; note = VL of XENP018922
SIVMTQSPGTLSLSPGERATLSCRASQSVSNDVAWYQQKPGQSPRLLINYASHRYTGVPDRFTGSGYGTDFTLTISRLEPEDFAVYFCQQDYSSPRTFGGGTKVEIK

SEQ ID NO: 9854 - protein, 5 aa, synthetic construct
  source 1..5: note = Description of Artificial Sequence: Synthetic peptide; note = XENP018922 vhCDR1
NYWMN

SEQ ID NO: 9855 - protein, 19 aa, synthetic construct
  source 1..19: note = Description of Artificial Sequence: Synthetic peptide; note = XENP018922 vhCDR2
EIRLKSNNYATHYAEPVKG

SEQ ID NO: 9856 - protein, 11 aa, synthetic construct
  source 1..11: note = Description of Artificial Sequence: Synthetic peptide; note = XENP018922 vhCDR3
YYGNYGGYFDV

SEQ ID NO: 9857 - protein, 11 aa, synthetic construct
  source 1..11: note = Description of Artificial Sequence: Synthetic peptide; note = XENP018922 vlCDR1
RASQSVSNDVA

SEQ ID NO: 9858 - protein, 7 aa, synthetic construct
  source 1..7: note = Description of Artificial Sequence: Synthetic peptide; note = XENP018922 vlCDR2
YASHRYT

SEQ ID NO: 9859 - protein, 9 aa, synthetic construct
  source 1..9: note = Description of Artificial Sequence: Synthetic peptide; note = XENP018922 vlCDR3
QQDYSSPRT

SEQ ID NO: 9860 - protein, 249 aa, synthetic construct
  source 1..249: note = Description of Artificial Sequence: Synthetic polypeptide; note = XENP018923 1G6_H1L5_scFv(GKPGS)4
EVQLVESGGGLVKPGGSLRLSCAASGFTFSNYWMNWVRQAPGKGLEWVGEIRLKSNNYATHYAEPVKGRFTISRDDSKSTVYLQMNSLKTEDTAVYYCTRYYGNYGGYFDVWGAGTLVTVSSGKPGSGKPGSGKPGSGKPGSSIVMTQSPDSLAVSLGERATINCKASQSVSNDVAWYQQKPGQSPKLLINYASHRYTGVPDRFTGSGYGTDFTLTISSLQAEDVAVYFCQQDYSSPRTFGGGTKVEIK

SEQ ID NO: 9861 - protein, 122 aa, synthetic construct; identical to SEQ ID NO: 6246
  source 1..122: note = Description of Artificial Sequence: Synthetic polypeptide; note = VH of XENP018923

SEQ ID NO: 9862 - protein, 107 aa, synthetic construct
  source 1..107: note = Description of Artificial Sequence: Synthetic polypeptide; note = VL of XENP018923
SIVMTQSPDSLAVSLGERATINCKASQSVSNDVAWYQQKPGQSPKLLINYASHRYTGVPDRFTGSGYGTDFTLTISSLQAEDVAVYFCQQDYSSPRTFGGGTKVEIK

SEQ ID NO: 9863 - protein, 5 aa, synthetic construct
  source 1..5: note = Description of Artificial Sequence: Synthetic peptide; note = XENP018923 vhCDR1
NYWMN

SEQ ID NO: 9864 - protein, 19 aa, synthetic construct
  source 1..19: note = Description of Artificial Sequence: Synthetic peptide; note = XENP018923 vhCDR2
EIRLKSNNYATHYAEPVKG

SEQ ID NO: 9865 - protein, 11 aa, synthetic construct
  source 1..11: note = Description of Artificial Sequence: Synthetic peptide; note = XENP018923 vhCDR3
YYGNYGGYFDV

SEQ ID NO: 9866 - protein, 11 aa, synthetic construct
  source 1..11: note = Description of Artificial Sequence: Synthetic peptide; note = XENP018923 vlCDR1
KASQSVSNDVA

SEQ ID NO: 9867 - protein, 7 aa, synthetic construct
  source 1..7: note = Description of Artificial Sequence: Synthetic peptide; note = XENP018923 vlCDR2
YASHRYT

SEQ ID NO: 9868 - protein, 9 aa, synthetic construct
  source 1..9: note = Description of Artificial Sequence: Synthetic peptide; note = XENP018923 vlCDR3
QQDYSSPRT

SEQ ID NO: 9869 - protein, 249 aa, synthetic construct
  source 1..249: note = Description of Artificial Sequence: Synthetic polypeptide; note = XENP018924 1G6_H2L1_scFv(GKPGS)4
QVQLVQSGAEVKKPGASVKVSCKASGFTFSNYWMNWVRQAPGQGLEWMGEIRLKSNNYATHYAEKFQGRVTMTRDDSTSTVYMELSSLRSEDTAVYYCTRYYGNYGGYFDVWGAGTLVTVSSGKPGSGKPGSGKPGSGKPGSSIVMTQSPATLSVSPGERATLSCRASQSVSNDVAWYQQKPGQSPRLLINYASHRYTGVPDRFTGSGYGTEFTLTISSLQSEDFAVYFCQQDYSSPRTFGGGTKVEIK

SEQ ID NO: 9870 - protein, 122 aa, synthetic construct
  source 1..122: note = Description of Artificial Sequence: Synthetic polypeptide; note = VH of XENP018924
QVQLVQSGAEVKKPGASVKVSCKASGFTFSNYWMNWVRQAPGQGLEWMGEIRLKSNNYATHYAEKFQGRVTMTRDDSTSTVYMELSSLRSEDTAVYYCTRYYGNYGGYFDVWGAGTLVTVSS

SEQ ID NO: 9871 - protein, 107 aa, synthetic construct; identical to SEQ ID NO: 6247
  source 1..107: note = Description of Artificial Sequence: Synthetic polypeptide; note = VL of XENP018924

SEQ ID NO: 9872 - protein, 5 aa, synthetic construct
  source 1..5: note = Description of Artificial Sequence: Synthetic peptide; note = XENP018924 vhCDR1
NYWMN

SEQ ID NO: 9873 - protein, 19 aa, synthetic construct
  source 1..19: note = Description of Artificial Sequence: Synthetic peptide; note = XENP018924 vhCDR2
EIRLKSNNYATHYAEKFQG

SEQ ID NO: 9874 - protein, 11 aa, synthetic construct
  source 1..11: note = Description of Artificial Sequence: Synthetic peptide; note = XENP018924 vhCDR3
YYGNYGGYFDV

SEQ ID NO: 9875 - protein, 11 aa, synthetic construct
  source 1..11: note = Description of Artificial Sequence: Synthetic peptide; note = XENP018924 vlCDR1
RASQSVSNDVA

SEQ ID NO: 9876 - protein, 7 aa, synthetic construct
  source 1..7: note = Description of Artificial Sequence: Synthetic peptide; note = XENP018924 vlCDR2
YASHRYT

SEQ ID NO: 9877 - protein, 9 aa, synthetic construct
  source 1..9: note = Description of Artificial Sequence: Synthetic peptide; note = XENP018924 vlCDR3
QQDYSSPRT

SEQ ID NO: 9878 - protein, 249 aa, synthetic construct
  source 1..249: note = Description of Artificial Sequence: Synthetic polypeptide; note = XENP018925 1G6_H2L2_scFv(GKPGS)4
QVQLVQSGAEVKKPGASVKVSCKASGFTFSNYWMNWVRQAPGQGLEWMGEIRLKSNNYATHYAEKFQGRVTMTRDDSTSTVYMELSSLRSEDTAVYYCTRYYGNYGGYFDVWGAGTLVTVSSGKPGSGKPGSGKPGSGKPGSSIVMTQSPSSLSASVGDRVTITCRASQSVSNDVAWYQQKPGKSPKLLINYASHRYTGVPDRFTGSGYGTDFTLTISSLQPEDFATYFCQQDYSSPRTFGGGTKVEIK

SEQ ID NO: 9879 - protein, 122 aa, synthetic construct; identical to SEQ ID NO: 9870
  source 1..122: note = Description of Artificial Sequence: Synthetic polypeptide; note = VH of XENP018925

SEQ ID NO: 9880 - protein, 107 aa, synthetic construct; identical to SEQ ID NO: 6256
  source 1..107: note = Description of Artificial Sequence: Synthetic polypeptide; note = VL of XENP018925

SEQ ID NO: 9881 - protein, 5 aa, synthetic construct
  source 1..5: note = Description of Artificial Sequence: Synthetic peptide; note = XENP018925 vhCDR1
NYWMN

SEQ ID NO: 9882 - protein, 19 aa, synthetic construct
  source 1..19: note = Description of Artificial Sequence: Synthetic peptide; note = XENP018925 vhCDR2
EIRLKSNNYATHYAEKFQG

SEQ ID NO: 9883 - protein, 11 aa, synthetic construct
  source 1..11: note = Description of Artificial Sequence: Synthetic peptide; note = XENP018925 vhCDR3
YYGNYGGYFDV

SEQ ID NO: 9884 - protein, 11 aa, synthetic construct
  source 1..11: note = Description of Artificial Sequence: Synthetic peptide; note = XENP018925 vlCDR1
RASQSVSNDVA

SEQ ID NO: 9885 - protein, 7 aa, synthetic construct
  source 1..7: note = Description of Artificial Sequence: Synthetic peptide; note = XENP018925 vlCDR2
YASHRYT

SEQ ID NO: 9886 - protein, 9 aa, synthetic construct
  source 1..9: note = Description of Artificial Sequence: Synthetic peptide; note = XENP018925 vlCDR3
QQDYSSPRT

SEQ ID NO: 9887 - protein, 249 aa, synthetic construct
  source 1..249: note = Description of Artificial Sequence: Synthetic polypeptide; note = XENP018926 1G6_H2L3_scFv(GKPGS)4
QVQLVQSGAEVKKPGASVKVSCKASGFTFSNYWMNWVRQAPGQGLEWMGEIRLKSNNYATHYAEKFQGRVTMTRDDSTSTVYMELSSLRSEDTAVYYCTRYYGNYGGYFDVWGAGTLVTVSSGKPGSGKPGSGKPGSGKPGSSIVMTQSPLSLPVTPGEPASISCRASQSVSNDVAWYLQKPGQSPQLLINYASHRYTGVPDRFTGSGYGTDFTLKISRVEAEDVGVYFCQQDYSSPRTFGGGTKVEIK

SEQ ID NO: 9888 - protein, 122 aa, synthetic construct; identical to SEQ ID NO: 9870
  source 1..122: note = Description of Artificial Sequence: Synthetic polypeptide; note = VH of XENP018926

SEQ ID NO: 9889 - protein, 107 aa, synthetic construct; identical to SEQ ID NO: 9844
  source 1..107: note = Description of Artificial Sequence: Synthetic polypeptide; note = VL of XENP018926

SEQ ID NO: 9890 - protein, 5 aa, synthetic construct
  source 1..5: note = Description of Artificial Sequence: Synthetic peptide; note = XENP018926 vhCDR1
NYWMN

SEQ ID NO: 9891 - protein, 19 aa, synthetic construct
  source 1..19: note = Description of Artificial Sequence: Synthetic peptide; note = XENP018926 vhCDR2
EIRLKSNNYATHYAEKFQG

SEQ ID NO: 9892 - protein, 11 aa, synthetic construct
  source 1..11: note = Description of Artificial Sequence: Synthetic peptide; note = XENP018926 vhCDR3
YYGNYGGYFDV

SEQ ID NO: 9893 - protein, 11 aa, synthetic construct
  source 1..11: note = Description of Artificial Sequence: Synthetic peptide; note = XENP018926 vlCDR1
RASQSVSNDVA

SEQ ID NO: 9894 - protein, 7 aa, synthetic construct
  source 1..7: note = Description of Artificial Sequence: Synthetic peptide; note = XENP018926 vlCDR2
YASHRYT

SEQ ID NO: 9895 - protein, 9 aa, synthetic construct
  source 1..9: note = Description of Artificial Sequence: Synthetic peptide; note = XENP018926 vlCDR3
QQDYSSPRT

SEQ ID NO: 9896 - protein, 249 aa, synthetic construct
  source 1..249: note = Description of Artificial Sequence: Synthetic polypeptide; note = XENP018927 1G6_H2L4_scFv(GKPGS)4
QVQLVQSGAEVKKPGASVKVSCKASGFTFSNYWMNWVRQAPGQGLEWMGEIRLKSNNYATHYAEKFQGRVTMTRDDSTSTVYMELSSLRSEDTAVYYCTRYYGNYGGYFDVWGAGTLVTVSSGKPGSGKPGSGKPGSGKPGSSIVMTQSPGTLSLSPGERATLSCRASQSVSNDVAWYQQKPGQSPRLLINYASHRYTGVPDRFTGSGYGTDFTLTISRLEPEDFAVYFCQQDYSSPRTFGGGTKVEIK

SEQ ID NO: 9897 - protein, 122 aa, synthetic construct; identical to SEQ ID NO: 9870
  source 1..122: note = Description of Artificial Sequence: Synthetic polypeptide; note = VH of XENP018927

SEQ ID NO: 9898 - protein, 107 aa, synthetic construct; identical to SEQ ID NO: 9853
  source 1..107: note = Description of Artificial Sequence: Synthetic polypeptide; note = VL of XENP018927

SEQ ID NO: 9899 - protein, 5 aa, synthetic construct
  source 1..5: note = Description of Artificial Sequence: Synthetic peptide; note = XENP018927 vhCDR1
NYWMN

SEQ ID NO: 9900 - protein, 19 aa, synthetic construct
  source 1..19: note = Description of Artificial Sequence: Synthetic peptide; note = XENP018927 vhCDR2
EIRLKSNNYATHYAEKFQG

SEQ ID NO: 9901 - protein, 11 aa, synthetic construct
  source 1..11: note = Description of Artificial Sequence: Synthetic peptide; note = XENP018927 vhCDR3
YYGNYGGYFDV

SEQ ID NO: 9902 - protein, 11 aa, synthetic construct
  source 1..11: note = Description of Artificial Sequence: Synthetic peptide; note = XENP018927 vlCDR1
RASQSVSNDVA

SEQ ID NO: 9903 - protein, 7 aa, synthetic construct
  source 1..7: note = Description of Artificial Sequence: Synthetic peptide; note = XENP018927 vlCDR2
YASHRYT

SEQ ID NO: 9904 - protein, 9 aa, synthetic construct
  source 1..9: note = Description of Artificial Sequence: Synthetic peptide; note = XENP018927 vlCDR3
QQDYSSPRT

SEQ ID NO: 9905 - protein, 249 aa, synthetic construct
  source 1..249: note = Description of Artificial Sequence: Synthetic polypeptide; note = XENP018928 1G6_H2L5_scFv(GKPGS)4
QVQLVQSGAEVKKPGASVKVSCKASGFTFSNYWMNWVRQAPGQGLEWMGEIRLKSNNYATHYAEKFQGRVTMTRDDSTSTVYMELSSLRSEDTAVYYCTRYYGNYGGYFDVWGAGTLVTVSSGKPGSGKPGSGKPGSGKPGSSIVMTQSPDSLAVSLGERATINCKASQSVSNDVAWYQQKPGQSPKLLINYASHRYTGVPDRFTGSGYGTDFTLTISSLQAEDVAVYFCQQDYSSPRTFGGGTKVEIK

SEQ ID NO: 9906 - protein, 122 aa, synthetic construct; identical to SEQ ID NO: 9870
  source 1..122: note = Description of Artificial Sequence: Synthetic polypeptide; note = VH of XENP018928

SEQ ID NO: 9907 - protein, 107 aa, synthetic construct; identical to SEQ ID NO: 9862
  source 1..107: note = Description of Artificial Sequence: Synthetic polypeptide; note = VL of XENP018928

SEQ ID NO: 9908 - protein, 5 aa, synthetic construct
  source 1..5: note = Description of Artificial Sequence: Synthetic peptide; note = XENP018928 vhCDR1
NYWMN

SEQ ID NO: 9909 - protein, 19 aa, synthetic construct
  source 1..19: note = Description of Artificial Sequence: Synthetic peptide; note = XENP018928 vhCDR2
EIRLKSNNYATHYAEKFQG

SEQ ID NO: 9910 - protein, 11 aa, synthetic construct
  source 1..11: note = Description of Artificial Sequence: Synthetic peptide; note = XENP018928 vhCDR3
YYGNYGGYFDV

SEQ ID NO: 9911 - protein, 11 aa, synthetic construct
  source 1..11: note = Description of Artificial Sequence: Synthetic peptide; note = XENP018928 vlCDR1
KASQSVSNDVA

SEQ ID NO: 9912 - protein, 7 aa, synthetic construct
  source 1..7: note = Description of Artificial Sequence: Synthetic peptide; note = XENP018928 vlCDR2
YASHRYT

SEQ ID NO: 9913 - protein, 9 aa, synthetic construct
  source 1..9: note = Description of Artificial Sequence: Synthetic peptide; note = XENP018928 vlCDR3
QQDYSSPRT

SEQ ID NO: 9914 - protein, 249 aa, synthetic construct
  source 1..249: note = Description of Artificial Sequence: Synthetic polypeptide; note = XENP018929 1G6_H3L1_scFv(GKPGS)4
EVQLLESGGGLVQPGGSLRLSCAASGFTFSNYWMNWVRQAPGKGLEWVSEIRLKSNNYATHYAESVKGRFTISRDDSKSTVYLQMNSLRAEDTAVYYCTRYYGNYGGYFDVWGAGTLVTVSSGKPGSGKPGSGKPGSGKPGSSIVMTQSPATLSVSPGERATLSCRASQSVSNDVAWYQQKPGQSPRLLINYASHRYTGVPDRFTGSGYGTEFTLTISSLQSEDFAVYFCQQDYSSPRTFGGGTKVEIK

SEQ ID NO: 9915 - protein, 122 aa, synthetic construct
  source 1..122: note = Description of Artificial Sequence: Synthetic polypeptide; note = VH of XENP018929
EVQLLESGGGLVQPGGSLRLSCAASGFTFSNYWMNWVRQAPGKGLEWVSEIRLKSNNYATHYAESVKGRFTISRDDSKSTVYLQMNSLRAEDTAVYYCTRYYGNYGGYFDVWGAGTLVTVSS

SEQ ID NO: 9916 - protein, 107 aa, synthetic construct; identical to SEQ ID NO: 6247
  source 1..107: note = Description of Artificial Sequence: Synthetic polypeptide; note = VL of XENP018929

SEQ ID NO: 9917 - protein, 5 aa, synthetic construct
  source 1..5: note = Description of Artificial Sequence: Synthetic peptide; note = XENP018929 vhCDR1
NYWMN

SEQ ID NO: 9918 - protein, 19 aa, synthetic construct
  source 1..19: note = Description of Artificial Sequence: Synthetic peptide; note = XENP018929 vhCDR2
EIRLKSNNYATHYAESVKG

SEQ ID NO: 9919 - protein, 11 aa, synthetic construct
  source 1..11: note = Description of Artificial Sequence: Synthetic peptide; note = XENP018929 vhCDR3
YYGNYGGYFDV

SEQ ID NO: 9920 - protein, 11 aa, synthetic construct
  source 1..11: note = Description of Artificial Sequence: Synthetic peptide; note = XENP018929 vlCDR1
RASQSVSNDVA

SEQ ID NO: 9921 - protein, 7 aa, synthetic construct
  source 1..7: note = Description of Artificial Sequence: Synthetic peptide; note = XENP018929 vlCDR2
YASHRYT

SEQ ID NO: 9922 - protein, 9 aa, synthetic construct
  source 1..9: note = Description of Artificial Sequence: Synthetic peptide; note = XENP018929 vlCDR3
QQDYSSPRT

SEQ ID NO: 9923 - protein, 249 aa, synthetic construct
  source 1..249: note = Description of Artificial Sequence: Synthetic polypeptide; note = XENP018930 1G6_H3L2_scFv(GKPGS)4
EVQLLESGGGLVQPGGSLRLSCAASGFTFSNYWMNWVRQAPGKGLEWVSEIRLKSNNYATHYAESVKGRFTISRDDSKSTVYLQMNSLRAEDTAVYYCTRYYGNYGGYFDVWGAGTLVTVSSGKPGSGKPGSGKPGSGKPGSSIVMTQSPSSLSASVGDRVTITCRASQSVSNDVAWYQQKPGKSPKLLINYASHRYTGVPDRFTGSGYGTDFTLTISSLQPEDFATYFCQQDYSSPRTFGGGTKVEIK

SEQ ID NO: 9924 - protein, 122 aa, synthetic construct; identical to SEQ ID NO: 9915
  source 1..122: note = Description of Artificial Sequence: Synthetic polypeptide; note = VH of XENP018930

SEQ ID NO: 9925 - protein, 107 aa, synthetic construct; identical to SEQ ID NO: 6256
  source 1..107: note = Description of Artificial Sequence: Synthetic polypeptide; note = VL of XENP018930

SEQ ID NO: 9926 - protein, 5 aa, synthetic construct
  source 1..5: note = Description of Artificial Sequence: Synthetic peptide; note = XENP018930 vhCDR1
NYWMN

SEQ ID NO: 9927 - protein, 19 aa, synthetic construct
  source 1..19: note = Description of Artificial Sequence: Synthetic peptide; note = XENP018930 vhCDR2
EIRLKSNNYATHYAESVKG

SEQ ID NO: 9928 - protein, 11 aa, synthetic construct
  source 1..11: note = Description of Artificial Sequence: Synthetic peptide; note = XENP018930 vhCDR3
YYGNYGGYFDV

SEQ ID NO: 9929 - protein, 11 aa, synthetic construct
  source 1..11: note = Description of Artificial Sequence: Synthetic peptide; note = XENP018930 vlCDR1
RASQSVSNDVA

SEQ ID NO: 9930 - protein, 7 aa, synthetic construct
  source 1..7: note = Description of Artificial Sequence: Synthetic peptide; note = XENP018930 vlCDR2
YASHRYT

SEQ ID NO: 9931 - protein, 9 aa, synthetic construct
  source 1..9: note = Description of Artificial Sequence: Synthetic peptide; note = XENP018930 vlCDR3
QQDYSSPRT

SEQ ID NO: 9932 - protein, 249 aa, synthetic construct
  source 1..249: note = Description of Artificial Sequence: Synthetic polypeptide; note = XENP018931 1G6_H3L3_scFv(GKPGS)4
EVQLLESGGGLVQPGGSLRLSCAASGFTFSNYWMNWVRQAPGKGLEWVSEIRLKSNNYATHYAESVKGRFTISRDDSKSTVYLQMNSLRAEDTAVYYCTRYYGNYGGYFDVWGAGTLVTVSSGKPGSGKPGSGKPGSGKPGSSIVMTQSPLSLPVTPGEPASISCRASQSVSNDVAWYLQKPGQSPQLLINYASHRYTGVPDRFTGSGYGTDFTLKISRVEAEDVGVYFCQQDYSSPRTFGGGTKVEIK

SEQ ID NO: 9933 - protein, 122 aa, synthetic construct; identical to SEQ ID NO: 9915
  source 1..122: note = Description of Artificial Sequence: Synthetic polypeptide; note = VH of XENP018931

SEQ ID NO: 9934 - protein, 107 aa, synthetic construct; identical to SEQ ID NO: 9844
  source 1..107: note = Description of Artificial Sequence: Synthetic polypeptide; note = VL of XENP018931

SEQ ID NO: 9935 - protein, 5 aa, synthetic construct
  source 1..5: note = Description of Artificial Sequence: Synthetic peptide; note = XENP018931 vhCDR1
NYWMN

SEQ ID NO: 9936 - protein, 19 aa, synthetic construct
  source 1..19: note = Description of Artificial Sequence: Synthetic peptide; note = XENP018931 vhCDR2
EIRLKSNNYATHYAESVKG

SEQ ID NO: 9937 - protein, 11 aa, synthetic construct
  source 1..11: note = Description of Artificial Sequence: Synthetic peptide; note = XENP018931 vhCDR3
YYGNYGGYFDV

SEQ ID NO: 9938 - protein, 11 aa, synthetic construct
  source 1..11: note = Description of Artificial Sequence: Synthetic peptide; note = XENP018931 vlCDR1
RASQSVSNDVA

SEQ ID NO: 9939 - protein, 7 aa, synthetic construct
  source 1..7: note = Description of Artificial Sequence: Synthetic peptide; note = XENP018931 vlCDR2
YASHRYT

SEQ ID NO: 9940 - protein, 9 aa, synthetic construct
  source 1..9: note = Description of Artificial Sequence: Synthetic peptide; note = XENP018931 vlCDR3
QQDYSSPRT

SEQ ID NO: 9941 - protein, 249 aa, synthetic construct
  source 1..249: note = Description of Artificial Sequence: Synthetic polypeptide; note = XENP018932 1G6_H3L4_scFv(GKPGS)4
EVQLLESGGGLVQPGGSLRLSCAASGFTFSNYWMNWVRQAPGKGLEWVSEIRLKSNNYATHYAESVKGRFTISRDDSKSTVYLQMNSLRAEDTAVYYCTRYYGNYGGYFDVWGAGTLVTVSSGKPGSGKPGSGKPGSGKPGSSIVMTQSPGTLSLSPGERATLSCRASQSVSNDVAWYQQKPGQSPRLLINYASHRYTGVPDRFTGSGYGTDFTLTISRLEPEDFAVYFCQQDYSSPRTFGGGTKVEIK

SEQ ID NO: 9942 - protein, 122 aa, synthetic construct; identical to SEQ ID NO: 9915
  source 1..122: note = Description of Artificial Sequence: Synthetic polypeptide; note = VH of XENP018932

SEQ ID NO: 9943 - protein, 107 aa, synthetic construct; identical to SEQ ID NO: 9853
  source 1..107: note = Description of Artificial Sequence: Synthetic polypeptide; note = VL of XENP018932

SEQ ID NO: 9944 - protein, 5 aa, synthetic construct
  source 1..5: note = Description of Artificial Sequence: Synthetic peptide; note = XENP018932 vhCDR1
NYWMN

SEQ ID NO: 9945 - protein, 19 aa, synthetic construct
  source 1..19: note = Description of Artificial Sequence: Synthetic peptide; note = XENP018932 vhCDR2
EIRLKSNNYATHYAESVKG

SEQ ID NO: 9946 - protein, 11 aa, synthetic construct
  source 1..11: note = Description of Artificial Sequence: Synthetic peptide; note = XENP018932 vhCDR3
YYGNYGGYFDV

SEQ ID NO: 9947 - protein, 11 aa, synthetic construct
  source 1..11: note = Description of Artificial Sequence: Synthetic peptide; note = XENP018932 vlCDR1
RASQSVSNDVA

SEQ ID NO: 9948 - protein, 7 aa, synthetic construct
  source 1..7: note = Description of Artificial Sequence: Synthetic peptide; note = XENP018932 vlCDR2
YASHRYT

SEQ ID NO: 9949 - protein, 9 aa, synthetic construct
  source 1..9: note = Description of Artificial Sequence: Synthetic peptide; note = XENP018932 vlCDR3
QQDYSSPRT

SEQ ID NO: 9950 - protein, 249 aa, synthetic construct
  source 1..249: note = Description of Artificial Sequence: Synthetic polypeptide; note = XENP018933 1G6_H3L5_scFv(GKPGS)4
EVQLLESGGGLVQPGGSLRLSCAASGFTFSNYWMNWVRQAPGKGLEWVSEIRLKSNNYATHYAESVKGRFTISRDDSKSTVYLQMNSLRAEDTAVYYCTRYYGNYGGYFDVWGAGTLVTVSSGKPGSGKPGSGKPGSGKPGSSIVMTQSPDSLAVSLGERATINCKASQSVSNDVAWYQQKPGQSPKLLINYASHRYTGVPDRFTGSGYGTDFTLTISSLQAEDVAVYFCQQDYSSPRTFGGGTKVEIK

SEQ ID NO: 9951 - protein, 122 aa, synthetic construct; identical to SEQ ID NO: 9915
  source 1..122: note = Description of Artificial Sequence: Synthetic polypeptide; note = VH of XENP018933

SEQ ID NO: 9952 - protein, 107 aa, synthetic construct; identical to SEQ ID NO: 9862
  source 1..107: note = Description of Artificial Sequence: Synthetic polypeptide; note = VL of XENP018933

SEQ ID NO: 9953 - protein, 5 aa, synthetic construct
  source 1..5: note = Description of Artificial Sequence: Synthetic peptide; note = XENP018933 vhCDR1
NYWMN

SEQ ID NO: 9954 - protein, 19 aa, synthetic construct
  source 1..19: note = Description of Artificial Sequence: Synthetic peptide; note = XENP018933 vhCDR2
EIRLKSNNYATHYAESVKG

SEQ ID NO: 9955 - protein, 11 aa, synthetic construct
  source 1..11: note = Description of Artificial Sequence: Synthetic peptide; note = XENP018933 vhCDR3
YYGNYGGYFDV

SEQ ID NO: 9956 - protein, 11 aa, synthetic construct
  source 1..11: note = Description of Artificial Sequence: Synthetic peptide; note = XENP018933 vlCDR1
KASQSVSNDVA

SEQ ID NO: 9957 - protein, 7 aa, synthetic construct
  source 1..7: note = Description of Artificial Sequence: Synthetic peptide; note = XENP018933 vlCDR2
YASHRYT

SEQ ID NO: 9958 - protein, 9 aa, synthetic construct
  source 1..9: note = Description of Artificial Sequence: Synthetic peptide; note = XENP018933 vlCDR3
QQDYSSPRT

SEQ ID NO: 9959 - protein, 249 aa, synthetic construct
  source 1..249: note = Description of Artificial Sequence: Synthetic polypeptide; note = XENP018934 1G6_H4L1_scFv(GKPGS)4
EVQLVESGGGLVQPGGSLKLSCAASGFTFSNYWMNWVRQASGKGLEWVGEIRLKSNNYATHYAESVKGRFTISRDDSKSTVYLQMNSLKTEDTAVYYCTRYYGNYGGYFDVWGAGTLVTVSSGKPGSGKPGSGKPGSGKPGSSIVMTQSPATLSVSPGERATLSCRASQSVSNDVAWYQQKPGQSPRLLINYASHRYTGVPDRFTGSGYGTEFTLTISSLQSEDFAVYFCQQDYSSPRTFGGGTKVEIK

SEQ ID NO: 9960 - protein, 122 aa, synthetic construct
  source 1..122: note = Description of Artificial Sequence: Synthetic polypeptide; note = VH of XENP018934
EVQLVESGGGLVQPGGSLKLSCAASGFTFSNYWMNWVRQASGKGLEWVGEIRLKSNNYATHYAESVKGRFTISRDDSKSTVYLQMNSLKTEDTAVYYCTRYYGNYGGYFDVWGAGTLVTVSS

SEQ ID NO: 9961 - protein, 107 aa, synthetic construct; identical to SEQ ID NO: 6247
  source 1..107: note = Description of Artificial Sequence: Synthetic polypeptide; note = VL of XENP018934

SEQ ID NO: 9962 - protein, 5 aa, synthetic construct
  source 1..5: note = Description of Artificial Sequence: Synthetic peptide; note = XENP018934 vhCDR1
NYWMN

SEQ ID NO: 9963 - protein, 19 aa, synthetic construct
  source 1..19: note = Description of Artificial Sequence: Synthetic peptide; note = XENP018934 vhCDR2
EIRLKSNNYATHYAESVKG

SEQ ID NO: 9964 - protein, 11 aa, synthetic construct
  source 1..11: note = Description of Artificial Sequence: Synthetic peptide; note = XENP018934 vhCDR3
YYGNYGGYFDV

SEQ ID NO: 9965 - protein, 11 aa, synthetic construct
  source 1..11: note = Description of Artificial Sequence: Synthetic peptide; note = XENP018934 vlCDR1
RASQSVSNDVA

SEQ ID NO: 9966 - protein, 7 aa, synthetic construct
  source 1..7: note = Description of Artificial Sequence: Synthetic peptide; note = XENP018934 vlCDR2
YASHRYT

SEQ ID NO: 9967 - protein, 9 aa, synthetic construct
  source 1..9: note = Description of Artificial Sequence: Synthetic peptide; note = XENP018934 vlCDR3
QQDYSSPRT

SEQ ID NO: 9968 - protein, 249 aa, synthetic construct
  source 1..249: note = Description of Artificial Sequence: Synthetic polypeptide; note = XENP018935 1G6_H4L2_scFv(GKPGS)4
EVQLVESGGGLVQPGGSLKLSCAASGFTFSNYWMNWVRQASGKGLEWVGEIRLKSNNYATHYAESVKGRFTISRDDSKSTVYLQMNSLKTEDTAVYYCTRYYGNYGGYFDVWGAGTLVTVSSGKPGSGKPGSGKPGSGKPGSSIVMTQSPSSLSASVGDRVTITCRASQSVSNDVAWYQQKPGKSPKLLINYASHRYTGVPDRFTGSGYGTDFTLTISSLQPEDFATYFCQQDYSSPRTFGGGTKVEIK

SEQ ID NO: 9969 - protein, 122 aa, synthetic construct; identical to SEQ ID NO: 9960
  source 1..122: note = Description of Artificial Sequence: Synthetic polypeptide; note = VH of XENP018935

SEQ ID NO: 9970 - protein, 107 aa, synthetic construct; identical to SEQ ID NO: 6256
  source 1..107: note = Description of Artificial Sequence: Synthetic polypeptide; note = VL of XENP018935

SEQ ID NO: 9971 - protein, 5 aa, synthetic construct
  source 1..5: note = Description of Artificial Sequence: Synthetic peptide; note = XENP018935 vhCDR1
NYWMN

SEQ ID NO: 9972 - protein, 19 aa, synthetic construct
  source 1..19: note = Description of Artificial Sequence: Synthetic peptide; note = XENP018935 vhCDR2
EIRLKSNNYATHYAESVKG

SEQ ID NO: 9973 - protein, 11 aa, synthetic construct
  source 1..11: note = Description of Artificial Sequence: Synthetic peptide; note = XENP018935 vhCDR3
YYGNYGGYFDV

SEQ ID NO: 9974 - protein, 11 aa, synthetic construct
  source 1..11: note = Description of Artificial Sequence: Synthetic peptide; note = XENP018935 vlCDR1
RASQSVSNDVA

SEQ ID NO: 9975 - protein, 7 aa, synthetic construct
  source 1..7: note = Description of Artificial Sequence: Synthetic peptide; note = XENP018935 vlCDR2
YASHRYT

SEQ ID NO: 9976 - protein, 9 aa, synthetic construct
  source 1..9: note = Description of Artificial Sequence: Synthetic peptide; note = XENP018935 vlCDR3
QQDYSSPRT

SEQ ID NO: 9977 - protein, 249 aa, synthetic construct
  source 1..249: note = Description of Artificial Sequence: Synthetic polypeptide; note = XENP018936 1G6_H4L3_scFv(GKPGS)4
EVQLVESGGGLVQPGGSLKLSCAASGFTFSNYWMNWVRQASGKGLEWVGEIRLKSNNYATHYAESVKGRFTISRDDSKSTVYLQMNSLKTEDTAVYYCTRYYGNYGGYFDVWGAGTLVTVSSGKPGSGKPGSGKPGSGKPGSSIVMTQSPLSLPVTPGEPASISCRASQSVSNDVAWYLQKPGQSPQLLINYASHRYTGVPDRFTGSGYGTDFTLKISRVEAEDVGVYFCQQDYSSPRTFGGGTKVEIK

SEQ ID NO: 9978 - protein, 122 aa, synthetic construct; identical to SEQ ID NO: 9960
  source 1..122: note = Description of Artificial Sequence: Synthetic polypeptide; note = VH of XENP018936

SEQ ID NO: 9979 - protein, 107 aa, synthetic construct; identical to SEQ ID NO: 9844
  source 1..107: note = Description of Artificial Sequence: Synthetic polypeptide; note = VL of XENP018936

SEQ ID NO: 9980 - protein, 5 aa, synthetic construct
  source 1..5: note = Description of Artificial Sequence: Synthetic peptide; note = XENP018936 vhCDR1
NYWMN

SEQ ID NO: 9981 - protein, 19 aa, synthetic construct
  source 1..19: note = Description of Artificial Sequence: Synthetic peptide; note = XENP018936 vhCDR2
EIRLKSNNYATHYAESVKG

SEQ ID NO: 9982 - protein, 11 aa, synthetic construct
  source 1..11: note = Description of Artificial Sequence: Synthetic peptide; note = XENP018936 vhCDR3
YYGNYGGYFDV

SEQ ID NO: 9983 - protein, 11 aa, synthetic construct
  source 1..11: note = Description of Artificial Sequence: Synthetic peptide; note = XENP018936 vlCDR1
RASQSVSNDVA

SEQ ID NO: 9984 - protein, 7 aa, synthetic construct
  source 1..7: note = Description of Artificial Sequence: Synthetic peptide; note = XENP018936 vlCDR2
YASHRYT

SEQ ID NO: 9985 - protein, 9 aa, synthetic construct
  source 1..9: note = Description of Artificial Sequence: Synthetic peptide; note = XENP018936 vlCDR3
QQDYSSPRT

SEQ ID NO: 9986 - protein, 249 aa, synthetic construct
  source 1..249: note = Description of Artificial Sequence: Synthetic polypeptide; note = XENP018937 1G6_H4L4_scFv(GKPGS)4
EVQLVESGGGLVQPGGSLKLSCAASGFTFSNYWMNWVRQASGKGLEWVGEIRLKSNNYATHYAESVKGRFTISRDDSKSTVYLQMNSLKTEDTAVYYCTRYYGNYGGYFDVWGAGTLVTVSSGKPGSGKPGSGKPGSGKPGSSIVMTQSPGTLSLSPGERATLSCRASQSVSNDVAWYQQKPGQSPRLLINYASHRYTGVPDRFTGSGYGTDFTLTISRLEPEDFAVYFCQQDYSSPRTFGGGTKVEIK

SEQ ID NO: 9987 - protein, 122 aa, synthetic construct; identical to SEQ ID NO: 9960
  source 1..122: note = Description of Artificial Sequence: Synthetic polypeptide; note = VH of XENP018937

SEQ ID NO: 9988 - protein, 107 aa, synthetic construct; identical to SEQ ID NO: 9853
  source 1..107: note = Description of Artificial Sequence: Synthetic polypeptide; note = VL of XENP018937

SEQ ID NO: 9989 - protein, 5 aa, synthetic construct
  source 1..5: note = Description of Artificial Sequence: Synthetic peptide; note = XENP018937 vhCDR1
NYWMN

SEQ ID NO: 9990 - protein, 19 aa, synthetic construct
  source 1..19: note = Description of Artificial Sequence: Synthetic peptide; note = XENP018937 vhCDR2
EIRLKSNNYATHYAESVKG

SEQ ID NO: 9991 - protein, 11 aa, synthetic construct
  source 1..11: note = Description of Artificial Sequence: Synthetic peptide; note = XENP018937 vhCDR3
YYGNYGGYFDV

SEQ ID NO: 9992 - protein, 11 aa, synthetic construct
  source 1..11: note = Description of Artificial Sequence: Synthetic peptide; note = XENP018937 vlCDR1
RASQSVSNDVA

SEQ ID NO: 9993 - protein, 7 aa, synthetic construct
  source 1..7: note = Description of Artificial Sequence: Synthetic peptide; note = XENP018937 vlCDR2
YASHRYT

SEQ ID NO: 9994 - protein, 9 aa, synthetic construct
  source 1..9: note = Description of Artificial Sequence: Synthetic peptide; note = XENP018937 vlCDR3
QQDYSSPRT

SEQ ID NO: 9995 - protein, 249 aa, synthetic construct
  source 1..249: note = Description of Artificial Sequence: Synthetic polypeptide; note = XENP018938 1G6_H4L5_scFv(GKPGS)4
EVQLVESGGGLVQPGGSLKLSCAASGFTFSNYWMNWVRQASGKGLEWVGEIRLKSNNYATHYAESVKGRFTISRDDSKSTVYLQMNSLKTEDTAVYYCTRYYGNYGGYFDVWGAGTLVTVSSGKPGSGKPGSGKPGSGKPGSSIVMTQSPDSLAVSLGERATINCKASQSVSNDVAWYQQKPGQSPKLLINYASHRYTGVPDRFTGSGYGTDFTLTISSLQAEDVAVYFCQQDYSSPRTFGGGTKVEIK

SEQ ID NO: 9996 - protein, 122 aa, synthetic construct; identical to SEQ ID NO: 9960
  source 1..122: note = Description of Artificial Sequence: Synthetic polypeptide; note = VH of XENP018938

SEQ ID NO: 9997 - protein, 107 aa, synthetic construct; identical to SEQ ID NO: 9862
  source 1..107: note = Description of Artificial Sequence: Synthetic polypeptide; note = VL of XENP018938

SEQ ID NO: 9998 - protein, 5 aa, synthetic construct
  source 1..5: note = Description of Artificial Sequence: Synthetic peptide; note = XENP018938 vhCDR1
NYWMN

SEQ ID NO: 9999 - protein, 19 aa, synthetic construct
  source 1..19: note = Description of Artificial Sequence: Synthetic peptide; note = XENP018938 vhCDR2
EIRLKSNNYATHYAESVKG

SEQ ID NO: 10000 - protein, 11 aa, synthetic construct
  source 1..11: note = Description of Artificial Sequence: Synthetic peptide; note = XENP018938 vhCDR3
YYGNYGGYFDV

SEQ ID NO: 10001 - protein, 11 aa, synthetic construct
  source 1..11: note = Description of Artificial Sequence: Synthetic peptide; note = XENP018938 vlCDR1
KASQSVSNDVA

SEQ ID NO: 10002 - protein, 7 aa, synthetic construct
  source 1..7: note = Description of Artificial Sequence: Synthetic peptide; note = XENP018938 vlCDR2
YASHRYT

SEQ ID NO: 10003 - protein, 9 aa, synthetic construct
  source 1..9: note = Description of Artificial Sequence: Synthetic peptide; note = XENP018938 vlCDR3
QQDYSSPRT

SEQ ID NO: 10004 - protein, 249 aa, synthetic construct
  source 1..249: note = Description of Artificial Sequence: Synthetic polypeptide; note = XENP019064 1G6_H1.239_L1_scFv(GKPGS)4
EVQLKESGGGLVKPGGSLRLSCAASGFTFSNYWMNWVRQAPGKGLEWVGEIRLKSNNYATHYAEPVKGRFTISRDDSKSTVYLQMNSLKTEDTAVYYCTRYYGNYGGYFDVWGAGTLVTVSSGKPGSGKPGSGKPGSGKPGSSIVMTQSPATLSVSPGERATLSCRASQSVSNDVAWYQQKPGQSPRLLINYASHRYTGVPDRFTGSGYGTEFTLTISSLQSEDFAVYFCQQDYSSPRTFGGGTKVEIK

SEQ ID NO: 10005 - protein, 122 aa, synthetic construct
  source 1..122: note = Description of Artificial Sequence: Synthetic polypeptide; note = VH of XENP019064
EVQLKESGGGLVKPGGSLRLSCAASGFTFSNYWMNWVRQAPGKGLEWVGEIRLKSNNYATHYAEPVKGRFTISRDDSKSTVYLQMNSLKTEDTAVYYCTRYYGNYGGYFDVWGAGTLVTVSS

SEQ ID NO: 10006 - protein, 107 aa, synthetic construct; identical to SEQ ID NO: 6247
  source 1..107: note = Description of Artificial Sequence: Synthetic polypeptide; note = VL of XENP019064

SEQ ID NO: 10007 - protein, 5 aa, synthetic construct
  source 1..5: note = Description of Artificial Sequence: Synthetic peptide; note = XENP019064 vhCDR1
NYWMN

SEQ ID NO: 10008 - protein, 19 aa, synthetic construct
  source 1..19: note = Description of Artificial Sequence: Synthetic peptide; note = XENP019064 vhCDR2
EIRLKSNNYATHYAEPVKG

SEQ ID NO: 10009 - protein, 11 aa, synthetic construct
  source 1..11: note = Description of Artificial Sequence: Synthetic peptide; note = XENP019064 vhCDR3
YYGNYGGYFDV

SEQ ID NO: 10010 - protein, 11 aa, synthetic construct
  source 1..11: note = Description of Artificial Sequence: Synthetic peptide; note = XENP019064 vlCDR1
RASQSVSNDVA

SEQ ID NO: 10011 - protein, 7 aa, synthetic construct
  source 1..7: note = Description of Artificial Sequence: Synthetic peptide; note = XENP019064 vlCDR2
YASHRYT

SEQ ID NO: 10012 - protein, 9 aa, synthetic construct
  source 1..9: note = Description of Artificial Sequence: Synthetic peptide; note = XENP019064 vlCDR3
QQDYSSPRT

SEQ ID NO: 10013 - protein, 249 aa, synthetic construct
  source 1..249: note = Description of Artificial Sequence: Synthetic polypeptide; note = XENP019065 1G6_H1.240_L1_scFv(GKPGS)4
EVQLVESGGGLVKPGESLRLSCAASGFTFSNYWMNWVRQAPGKGLEWVGEIRLKSNNYATHYAEPVKGRFTISRDDSKSTVYLQMNSLKTEDTAVYYCTRYYGNYGGYFDVWGAGTLVTVSSGKPGSGKPGSGKPGSGKPGSSIVMTQSPATLSVSPGERATLSCRASQSVSNDVAWYQQKPGQSPRLLINYASHRYTGVPDRFTGSGYGTEFTLTISSLQSEDFAVYFCQQDYSSPRTFGGGTKVEIK

SEQ ID NO: 10014 - protein, 122 aa, synthetic construct
  source 1..122: note = Description of Artificial Sequence: Synthetic polypeptide; note = VH of XENP019065
EVQLVESGGGLVKPGESLRLSCAASGFTFSNYWMNWVRQAPGKGLEWVGEIRLKSNNYATHYAEPVKGRFTISRDDSKSTVYLQMNSLKTEDTAVYYCTRYYGNYGGYFDVWGAGTLVTVSS

SEQ ID NO: 10015 - protein, 107 aa, synthetic construct; identical to SEQ ID NO: 6247
  source 1..107: note = Description of Artificial Sequence: Synthetic polypeptide; note = VL of XENP019065

SEQ ID NO: 10016 - protein, 5 aa, synthetic construct
  source 1..5: note = Description of Artificial Sequence: Synthetic peptide; note = XENP019065 vhCDR1
NYWMN

SEQ ID NO: 10017 - protein, 19 aa, synthetic construct
  source 1..19: note = Description of Artificial Sequence: Synthetic peptide; note = XENP019065 vhCDR2
EIRLKSNNYATHYAEPVKG

SEQ ID NO: 10018 - protein, 11 aa, synthetic construct
  source 1..11: note = Description of Artificial Sequence: Synthetic peptide; note = XENP019065 vhCDR3
YYGNYGGYFDV

SEQ ID NO: 10019 - protein, 11 aa, synthetic construct
  source 1..11: note = Description of Artificial Sequence: Synthetic peptide; note = XENP019065 vlCDR1
RASQSVSNDVA

SEQ ID NO: 10020 - protein, 7 aa, synthetic construct
  source 1..7: note = Description of Artificial Sequence: Synthetic peptide; note = XENP019065 vlCDR2
YASHRYT

SEQ ID NO: 10021 - protein, 9 aa, synthetic construct
  source 1..9: note = Description of Artificial Sequence: Synthetic peptide; note = XENP019065 vlCDR3
QQDYSSPRT

SEQ ID NO: 10022 - protein, 249 aa, synthetic construct
  source 1..249: note = Description of Artificial Sequence: Synthetic polypeptide; note = XENP019066 1G6_H1.241_L1_scFv(GKPGS)4
EVQLVESGGGLVKPGGSLRLTCAASGFTFSNYWMNWVRQAPGKGLEWVGEIRLKSNNYATHYAEPVKGRFTISRDDSKSTVYLQMNSLKTEDTAVYYCTRYYGNYGGYFDVWGAGTLVTVSSGKPGSGKPGSGKPGSGKPGSSIVMTQSPATLSVSPGERATLSCRASQSVSNDVAWYQQKPGQSPRLLINYASHRYTGVPDRFTGSGYGTEFTLTISSLQSEDFAVYFCQQDYSSPRTFGGGTKVEIK

SEQ ID NO: 10023 - protein, 122 aa, synthetic construct
  source 1..122: note = Description of Artificial Sequence: Synthetic polypeptide; note = VH of XENP019066
EVQLVESGGGLVKPGGSLRLTCAASGFTFSNYWMNWVRQAPGKGLEWVGEIRLKSNNYATHYAEPVKGRFTISRDDSKSTVYLQMNSLKTEDTAVYYCTRYYGNYGGYFDVWGAGTLVTVSS

SEQ ID NO: 10024 - protein, 107 aa, synthetic construct; identical to SEQ ID NO: 6247
  source 1..107: note = Description of Artificial Sequence: Synthetic polypeptide; note = VL of XENP019066

SEQ ID NO: 10025 - protein, 5 aa, synthetic construct
  source 1..5: note = Description of Artificial Sequence: Synthetic peptide; note = XENP019066 vhCDR1
NYWMN

SEQ ID NO: 10026 - protein, 19 aa, synthetic construct
  source 1..19: note = Description of Artificial Sequence: Synthetic peptide; note = XENP019066 vhCDR2
EIRLKSNNYATHYAEPVKG

SEQ ID NO: 10027 - protein, 11 aa, synthetic construct
  source 1..11: note = Description of Artificial Sequence: Synthetic peptide; note = XENP019066 vhCDR3
YYGNYGGYFDV

SEQ ID NO: 10028 - protein, 11 aa, synthetic construct
  source 1..11: note = Description of Artificial Sequence: Synthetic peptide; note = XENP019066 vlCDR1
RASQSVSNDVA

SEQ ID NO: 10029 - protein, 7 aa, synthetic construct
  source 1..7: note = Description of Artificial Sequence: Synthetic peptide; note = XENP019066 vlCDR2
YASHRYT

SEQ ID NO: 10030 - protein, 9 aa, synthetic construct
  source 1..9: note = Description of Artificial Sequence: Synthetic peptide; note = XENP019066 vlCDR3
QQDYSSPRT

SEQ ID NO: 10031 - protein, 249 aa, synthetic construct
  source 1..249: note = Description of Artificial Sequence: Synthetic polypeptide; note = XENP019067 1G6_H1.242_L1_scFv(GKPGS)4
EVQLVESGGGLVKPGGSLRLVCAASGFTFSNYWMNWVRQAPGKGLEWVGEIRLKSNNYATHYAEPVKGRFTISRDDSKSTVYLQMNSLKTEDTAVYYCTRYYGNYGGYFDVWGAGTLVTVSSGKPGSGKPGSGKPGSGKPGSSIVMTQSPATLSVSPGERATLSCRASQSVSNDVAWYQQKPGQSPRLLINYASHRYTGVPDRFTGSGYGTEFTLTISSLQSEDFAVYFCQQDYSSPRTFGGGTKVEIK

SEQ ID NO: 10032 - protein, 122 aa, synthetic construct
  source 1..122: note = Description of Artificial Sequence: Synthetic polypeptide; note = VH of XENP019067
EVQLVESGGGLVKPGGSLRLVCAASGFTFSNYWMNWVRQAPGKGLEWVGEIRLKSNNYATHYAEPVKGRFTISRDDSKSTVYLQMNSLKTEDTAVYYCTRYYGNYGGYFDVWGAGTLVTVSS

SEQ ID NO: 10033 - protein, 107 aa, synthetic construct; identical to SEQ ID NO: 6247
  source 1..107: note = Description of Artificial Sequence: Synthetic polypeptide; note = VL of XENP019067

SEQ ID NO: 10034 - protein, 5 aa, synthetic construct
  source 1..5: note = Description of Artificial Sequence: Synthetic peptide; note = XENP019067 vhCDR1
NYWMN

SEQ ID NO: 10035 - protein, 19 aa, synthetic construct
  source 1..19: note = Description of Artificial Sequence: Synthetic peptide; note = XENP019067 vhCDR2
EIRLKSNNYATHYAEPVKG

SEQ ID NO: 10036 - protein, 11 aa, synthetic construct
  source 1..11: note = Description of Artificial Sequence: Synthetic peptide; note = XENP019067 vhCDR3
YYGNYGGYFDV

SEQ ID NO: 10037 - protein, 11 aa, synthetic construct
  source 1..11: note = Description of Artificial Sequence: Synthetic peptide; note = XENP019067 vlCDR1
RASQSVSNDVA

SEQ ID NO: 10038 - protein, 7 aa, synthetic construct
  source 1..7: note = Description of Artificial Sequence: Synthetic peptide; note = XENP019067 vlCDR2
YASHRYT

SEQ ID NO: 10039 - protein, 9 aa, synthetic construct
  source 1..9: note = Description of Artificial Sequence: Synthetic peptide; note = XENP019067 vlCDR3
QQDYSSPRT

SEQ ID NO: 10040 - protein, 249 aa, synthetic construct
  source 1..249: note = Description of Artificial Sequence: Synthetic polypeptide; note = XENP019068 1G6_H1.243_L1_scFv(GKPGS)4
EVQLVESGGGLVKPGGSLRLSCAASGFTLSNYWMNWVRQAPGKGLEWVGEIRLKSNNYATHYAEPVKGRFTISRDDSKSTVYLQMNSLKTEDTAVYYCTRYYGNYGGYFDVWGAGTLVTVSSGKPGSGKPGSGKPGSGKPGSSIVMTQSPATLSVSPGERATLSCRASQSVSNDVAWYQQKPGQSPRLLINYASHRYTGVPDRFTGSGYGTEFTLTISSLQSEDFAVYFCQQDYSSPRTFGGGTKVEIK

SEQ ID NO: 10041 - protein, 122 aa, synthetic construct
  source 1..122: note = Description of Artificial Sequence: Synthetic polypeptide; note = VH of XENP019068
EVQLVESGGGLVKPGGSLRLSCAASGFTLSNYWMNWVRQAPGKGLEWVGEIRLKSNNYATHYAEPVKGRFTISRDDSKSTVYLQMNSLKTEDTAVYYCTRYYGNYGGYFDVWGAGTLVTVSS

SEQ ID NO: 10042 - protein, 107 aa, synthetic construct; identical to SEQ ID NO: 6247
  source 1..107: note = Description of Artificial Sequence: Synthetic polypeptide; note = VL of XENP019068

SEQ ID NO: 10043 - protein, 5 aa, synthetic construct
  source 1..5: note = Description of Artificial Sequence: Synthetic peptide; note = XENP019068 vhCDR1
NYWMN

SEQ ID NO: 10044 - protein, 19 aa, synthetic construct
  source 1..19: note = Description of Artificial Sequence: Synthetic peptide; note = XENP019068 vhCDR2
EIRLKSNNYATHYAEPVKG

SEQ ID NO: 10045 - protein, 11 aa, synthetic construct
  source 1..11: note = Description of Artificial Sequence: Synthetic peptide; note = XENP019068 vhCDR3
YYGNYGGYFDV

SEQ ID NO: 10046 - protein, 11 aa, synthetic construct
  source 1..11: note = Description of Artificial Sequence: Synthetic peptide; note = XENP019068 vlCDR1
RASQSVSNDVA

SEQ ID NO: 10047 - protein, 7 aa, synthetic construct
  source 1..7: note = Description of Artificial Sequence: Synthetic peptide; note = XENP019068 vlCDR2
YASHRYT

SEQ ID NO: 10048 - protein, 9 aa, synthetic construct
  source 1..9: note = Description of Artificial Sequence: Synthetic peptide; note = XENP019068 vlCDR3
QQDYSSPRT

SEQ ID NO: 10049 - protein, 249 aa, synthetic construct
  source 1..249: note = Description of Artificial Sequence: Synthetic polypeptide; note = XENP019069 1G6_H1.244_L1_scFv(GKPGS)4
EVQLVESGGGLVKPGGSLRLSCAASGFTFSNYWMNWVRQAPGKGLQWVGEIRLKSNNYATHYAEPVKGRFTISRDDSKSTVYLQMNSLKTEDTAVYYCTRYYGNYGGYFDVWGAGTLVTVSSGKPGSGKPGSGKPGSGKPGSSIVMTQSPATLSVSPGERATLSCRASQSVSNDVAWYQQKPGQSPRLLINYASHRYTGVPDRFTGSGYGTEFTLTISSLQSEDFAVYFCQQDYSSPRTFGGGTKVEIK

SEQ ID NO: 10050 - protein, 122 aa, synthetic construct
  source 1..122: note = Description of Artificial Sequence: Synthetic polypeptide; note = VH of XENP019069
EVQLVESGGGLVKPGGSLRLSCAASGFTFSNYWMNWVRQAPGKGLQWVGEIRLKSNNYATHYAEPVKGRFTISRDDSKSTVYLQMNSLKTEDTAVYYCTRYYGNYGGYFDVWGAGTLVTVSS

SEQ ID NO: 10051 - protein, 107 aa, synthetic construct; identical to SEQ ID NO: 6247
  source 1..107: note = Description of Artificial Sequence: Synthetic polypeptide; note = VL of XENP019069

SEQ ID NO: 10052 - protein, 5 aa, synthetic construct
  source 1..5: note = Description of Artificial Sequence: Synthetic peptide; note = XENP019069 vhCDR1
NYWMN

SEQ ID NO: 10053 - protein, 19 aa, synthetic construct
  source 1..19: note = Description of Artificial Sequence: Synthetic peptide; note = XENP019069 vhCDR2
EIRLKSNNYATHYAEPVKG

SEQ ID NO: 10054 - protein, 11 aa, synthetic construct
  source 1..11: note = Description of Artificial Sequence: Synthetic peptide; note = XENP019069 vhCDR3
YYGNYGGYFDV

SEQ ID NO: 10055 - protein, 11 aa, synthetic construct
  source 1..11: note = Description of Artificial Sequence: Synthetic peptide; note = XENP019069 vlCDR1
RASQSVSNDVA

SEQ ID NO: 10056 - protein, 7 aa, synthetic construct
  source 1..7: note = Description of Artificial Sequence: Synthetic peptide; note = XENP019069 vlCDR2
YASHRYT

SEQ ID NO: 10057 - protein, 9 aa, synthetic construct
  source 1..9: note = Description of Artificial Sequence: Synthetic peptide; note = XENP019069 vlCDR3
QQDYSSPRT

SEQ ID NO: 10058 - protein, 249 aa, synthetic construct
  source 1..249: note = Description of Artificial Sequence: Synthetic polypeptide; note = XENP019070 1G6_H1.245_L1_scFv(GKPGS)4
EVQLVESGGGLVKPGGSLRLSCAASGFTFSNYWMNWVRQAPGKGLEWIGEIRLKSNNYATHYAEPVKGRFTISRDDSKSTVYLQMNSLKTEDTAVYYCTRYYGNYGGYFDVWGAGTLVTVSSGKPGSGKPGSGKPGSGKPGSSIVMTQSPATLSVSPGERATLSCRASQSVSNDVAWYQQKPGQSPRLLINYASHRYTGVPDRFTGSGYGTEFTLTISSLQSEDFAVYFCQQDYSSPRTFGGGTKVEIK

SEQ ID NO: 10059 - protein, 122 aa, synthetic construct
  source 1..122: note = Description of Artificial Sequence: Synthetic polypeptide; note = VH of XENP019070
EVQLVESGGGLVKPGGSLRLSCAASGFTFSNYWMNWVRQAPGKGLEWIGEIRLKSNNYATHYAEPVKGRFTISRDDSKSTVYLQMNSLKTEDTAVYYCTRYYGNYGGYFDVWGAGTLVTVSS

SEQ ID NO: 10060 - protein, 107 aa, synthetic construct; identical to SEQ ID NO: 6247
  source 1..107: note = Description of Artificial Sequence: Synthetic polypeptide; note = VL of XENP019070

SEQ ID NO: 10061 - protein, 5 aa, synthetic construct
  source 1..5: note = Description of Artificial Sequence: Synthetic peptide; note = XENP019070 vhCDR1
NYWMN

SEQ ID NO: 10062 - protein, 19 aa, synthetic construct
  source 1..19: note = Description of Artificial Sequence: Synthetic peptide; note = XENP019070 vhCDR2
EIRLKSNNYATHYAEPVKG

SEQ ID NO: 10063 - protein, 11 aa, synthetic construct
  source 1..11: note = Description of Artificial Sequence: Synthetic peptide; note = XENP019070 vhCDR3
YYGNYGGYFDV

SEQ ID NO: 10064 - protein, 11 aa, synthetic construct
  source 1..11: note = Description of Artificial Sequence: Synthetic peptide; note = XENP019070 vlCDR1
RASQSVSNDVA

SEQ ID NO: 10065 - protein, 7 aa, synthetic construct
  source 1..7: note = Description of Artificial Sequence: Synthetic peptide; note = XENP019070 vlCDR2
YASHRYT

SEQ ID NO: 10066 - protein, 9 aa, synthetic construct
  source 1..9: note = Description of Artificial Sequence: Synthetic peptide; note = XENP019070 vlCDR3
QQDYSSPRT

SEQ ID NO: 10067 - protein, 249 aa, synthetic construct
  source 1..249: note = Description of Artificial Sequence: Synthetic polypeptide; note = XENP019071 1G6_H1.246_L1_scFv(GKPGS)4
EVQLVESGGGLVKPGGSLRLSCAASGFTFSNYWMNWVRQAPGKGLEWMGEIRLKSNNYATHYAEPVKGRFTISRDDSKSTVYLQMNSLKTEDTAVYYCTRYYGNYGGYFDVWGAGTLVTVSSGKPGSGKPGSGKPGSGKPGSSIVMTQSPATLSVSPGERATLSCRASQSVSNDVAWYQQKPGQSPRLLINYASHRYTGVPDRFTGSGYGTEFTLTISSLQSEDFAVYFCQQDYSSPRTFGGGTKVEIK

SEQ ID NO: 10068 - protein, 122 aa, synthetic construct
  source 1..122: note = Description of Artificial Sequence: Synthetic polypeptide; note = VH of XENP019071
EVQLVESGGGLVKPGGSLRLSCAASGFTFSNYWMNWVRQAPGKGLEWMGEIRLKSNNYATHYAEPVKGRFTISRDDSKSTVYLQMNSLKTEDTAVYYCTRYYGNYGGYFDVWGAGTLVTVSS

SEQ ID NO: 10069 - protein, 107 aa, synthetic construct; identical to SEQ ID NO: 6247
  source 1..107: note = Description of Artificial Sequence: Synthetic polypeptide; note = VL of XENP019071

SEQ ID NO: 10070 - protein, 5 aa, synthetic construct
  source 1..5: note = Description of Artificial Sequence: Synthetic peptide; note = XENP019071 vhCDR1
NYWMN

SEQ ID NO: 10071 - protein, 19 aa, synthetic construct
  source 1..19: note = Description of Artificial Sequence: Synthetic peptide; note = XENP019071 vhCDR2
EIRLKSNNYATHYAEPVKG

SEQ ID NO: 10072 - protein, 11 aa, synthetic construct
  source 1..11: note = Description of Artificial Sequence: Synthetic peptide; note = XENP019071 vhCDR3
YYGNYGGYFDV

SEQ ID NO: 10073 - protein, 11 aa, synthetic construct
  source 1..11: note = Description of Artificial Sequence: Synthetic peptide; note = XENP019071 vlCDR1
RASQSVSNDVA

SEQ ID NO: 10074 - protein, 7 aa, synthetic construct
  source 1..7: note = Description of Artificial Sequence: Synthetic peptide; note = XENP019071 vlCDR2
YASHRYT

SEQ ID NO: 10075 - protein, 9 aa, synthetic construct
  source 1..9: note = Description of Artificial Sequence: Synthetic peptide; note = XENP019071 vlCDR3
QQDYSSPRT

SEQ ID NO: 10076 - protein, 249 aa, synthetic construct
  source 1..249: note = Description of Artificial Sequence: Synthetic polypeptide; note = XENP019072 1G6_H1.247_L1_scFv(GKPGS)4
EVQLVESGGGLVKPGGSLRLSCAASGFTFSNYWMNWVRQAPGKGLEWVGEIRLKSNNYATHYAEPFKGRFTISRDDSKSTVYLQMNSLKTEDTAVYYCTRYYGNYGGYFDVWGAGTLVTVSSGKPGSGKPGSGKPGSGKPGSSIVMTQSPATLSVSPGERATLSCRASQSVSNDVAWYQQKPGQSPRLLINYASHRYTGVPDRFTGSGYGTEFTLTISSLQSEDFAVYFCQQDYSSPRTFGGGTKVEIK

SEQ ID NO: 10077 - protein, 122 aa, synthetic construct
  source 1..122: note = Description of Artificial Sequence: Synthetic polypeptide; note = VH of XENP019072
EVQLVESGGGLVKPGGSLRLSCAASGFTFSNYWMNWVRQAPGKGLEWVGEIRLKSNNYATHYAEPFKGRFTISRDDSKSTVYLQMNSLKTEDTAVYYCTRYYGNYGGYFDVWGAGTLVTVSS

SEQ ID NO: 10078 - protein, 107 aa, synthetic construct; identical to SEQ ID NO: 6247
  source 1..107: note = Description of Artificial Sequence: Synthetic polypeptide; note = VL of XENP019072

SEQ ID NO: 10079 - protein, 5 aa, synthetic construct
  source 1..5: note = Description of Artificial Sequence: Synthetic peptide; note = XENP019072 vhCDR1
NYWMN

SEQ ID NO: 10080 - protein, 19 aa, synthetic construct
  source 1..19: note = Description of Artificial Sequence: Synthetic peptide; note = XENP019072 vhCDR2
EIRLKSNNYATHYAEPFKG

SEQ ID NO: 10081 - protein, 11 aa, synthetic construct
  source 1..11: note = Description of Artificial Sequence: Synthetic peptide; note = XENP019072 vhCDR3
YYGNYGGYFDV

SEQ ID NO: 10082 - protein, 11 aa, synthetic construct
  source 1..11: note = Description of Artificial Sequence: Synthetic peptide; note = XENP019072 vlCDR1
RASQSVSNDVA

SEQ ID NO: 10083 - protein, 7 aa, synthetic construct
  source 1..7: note = Description of Artificial Sequence: Synthetic peptide; note = XENP019072 vlCDR2
YASHRYT

SEQ ID NO: 10084 - protein, 9 aa, synthetic construct
  source 1..9: note = Description of Artificial Sequence: Synthetic peptide; note = XENP019072 vlCDR3
QQDYSSPRT

SEQ ID NO: 10085 - protein, 249 aa, synthetic construct
  source 1..249: note = Description of Artificial Sequence: Synthetic polypeptide; note = XENP019073 1G6_H1.248_L1_scFv(GKPGS)4
EVQLVESGGGLVKPGGSLRLSCAASGFTFSNYWMNWVRQAPGKGLEWVGEIRLKSNNYATHYAEPVKGRATISRDDSKSTVYLQMNSLKTEDTAVYYCTRYYGNYGGYFDVWGAGTLVTVSSGKPGSGKPGSGKPGSGKPGSSIVMTQSPATLSVSPGERATLSCRASQSVSNDVAWYQQKPGQSPRLLINYASHRYTGVPDRFTGSGYGTEFTLTISSLQSEDFAVYFCQQDYSSPRTFGGGTKVEIK

SEQ ID NO: 10086 - protein, 122 aa, synthetic construct
  source 1..122: note = Description of Artificial Sequence: Synthetic polypeptide; note = VH of XENP019073
EVQLVESGGGLVKPGGSLRLSCAASGFTFSNYWMNWVRQAPGKGLEWVGEIRLKSNNYATHYAEPVKGRATISRDDSKSTVYLQMNSLKTEDTAVYYCTRYYGNYGGYFDVWGAGTLVTVSS

SEQ ID NO: 10087 - protein, 107 aa, synthetic construct; identical to SEQ ID NO: 6247
  source 1..107: note = Description of Artificial Sequence: Synthetic polypeptide; note = VL of XENP019073

SEQ ID NO: 10088 - protein, 5 aa, synthetic construct
  source 1..5: note = Description of Artificial Sequence: Synthetic peptide; note = XENP019073 vhCDR1
NYWMN

SEQ ID NO: 10089 - protein, 19 aa, synthetic construct
  source 1..19: note = Description of Artificial Sequence: Synthetic peptide; note = XENP019073 vhCDR2
EIRLKSNNYATHYAEPVKG

SEQ ID NO: 10090 - protein, 11 aa, synthetic construct
  source 1..11: note = Description of Artificial Sequence: Synthetic peptide; note = XENP019073 vhCDR3
YYGNYGGYFDV

SEQ ID NO: 10091 - protein, 11 aa, synthetic construct
  source 1..11: note = Description of Artificial Sequence: Synthetic peptide; note = XENP019073 vlCDR1
RASQSVSNDVA

SEQ ID NO: 10092 - protein, 7 aa, synthetic construct
  source 1..7: note = Description of Artificial Sequence: Synthetic peptide; note = XENP019073 vlCDR2
YASHRYT

SEQ ID NO: 10093 - protein, 9 aa, synthetic construct
  source 1..9: note = Description of Artificial Sequence: Synthetic peptide; note = XENP019073 vlCDR3
QQDYSSPRT

SEQ ID NO: 10094 - protein, 249 aa, synthetic construct
  source 1..249: note = Description of Artificial Sequence: Synthetic polypeptide; note = XENP019074 1G6_H1.249_L1_scFv(GKPGS)4
EVQLVESGGGLVKPGGSLRLSCAASGFTFSNYWMNWVRQAPGKGLEWVGEIRLKSNNYATHYAEPVKGRVTISRDDSKSTVYLQMNSLKTEDTAVYYCTRYYGNYGGYFDVWGAGTLVTVSSGKPGSGKPGSGKPGSGKPGSSIVMTQSPATLSVSPGERATLSCRASQSVSNDVAWYQQKPGQSPRLLINYASHRYTGVPDRFTGSGYGTEFTLTISSLQSEDFAVYFCQQDYSSPRTFGGGTKVEIK

SEQ ID NO: 10095 - protein, 122 aa, synthetic construct
  source 1..122: note = Description of Artificial Sequence: Synthetic polypeptide; note = VH of XENP019074
EVQLVESGGGLVKPGGSLRLSCAASGFTFSNYWMNWVRQAPGKGLEWVGEIRLKSNNYATHYAEPVKGRVTISRDDSKSTVYLQMNSLKTEDTAVYYCTRYYGNYGGYFDVWGAGTLVTVSS

SEQ ID NO: 10096 - protein, 107 aa, synthetic construct; identical to SEQ ID NO: 6247
  source 1..107: note = Description of Artificial Sequence: Synthetic polypeptide; note = VL of XENP019074

SEQ ID NO: 10097 - protein, 5 aa, synthetic construct
  source 1..5: note = Description of Artificial Sequence: Synthetic peptide; note = XENP019074 vhCDR1
NYWMN

SEQ ID NO: 10098 - protein, 19 aa, synthetic construct
  source 1..19: note = Description of Artificial Sequence: Synthetic peptide; note = XENP019074 vhCDR2
EIRLKSNNYATHYAEPVKG

SEQ ID NO: 10099 - protein, 11 aa, synthetic construct
  source 1..11: note = Description of Artificial Sequence: Synthetic peptide; note = XENP019074 vhCDR3
YYGNYGGYFDV

SEQ ID NO: 10100 - protein, 11 aa, synthetic construct
  source 1..11: note = Description of Artificial Sequence: Synthetic peptide; note = XENP019074 vlCDR1
RASQSVSNDVA

SEQ ID NO: 10101 - protein, 7 aa, synthetic construct
  source 1..7: note = Description of Artificial Sequence: Synthetic peptide; note = XENP019074 vlCDR2
YASHRYT

SEQ ID NO: 10102 - protein, 9 aa, synthetic construct
  source 1..9: note = Description of Artificial Sequence: Synthetic peptide; note = XENP019074 vlCDR3
QQDYSSPRT

SEQ ID NO: 10103 - protein, 249 aa, synthetic construct
  source 1..249: note = Description of Artificial Sequence: Synthetic polypeptide; note = XENP019075 1G6_H1.250_L1_scFv(GKPGS)4
EVQLVESGGGLVKPGGSLRLSCAASGFTFSNYWMNWVRQAPGKGLEWVGEIRLKSNNYATHYAEPVKGRFTISRDDSSSTVYLQMNSLKTEDTAVYYCTRYYGNYGGYFDVWGAGTLVTVSSGKPGSGKPGSGKPGSGKPGSSIVMTQSPATLSVSPGERATLSCRASQSVSNDVAWYQQKPGQSPRLLINYASHRYTGVPDRFTGSGYGTEFTLTISSLQSEDFAVYFCQQDYSSPRTFGGGTKVEIK

SEQ ID NO: 10104 - protein, 122 aa, synthetic construct
  source 1..122: note = Description of Artificial Sequence: Synthetic polypeptide; note = VH of XENP019075
EVQLVESGGGLVKPGGSLRLSCAASGFTFSNYWMNWVRQAPGKGLEWVGEIRLKSNNYATHYAEPVKGRFTISRDDSSSTVYLQMNSLKTEDTAVYYCTRYYGNYGGYFDVWGAGTLVTVSS

SEQ ID NO: 10105 - protein, 107 aa, synthetic construct; identical to SEQ ID NO: 6247
  source 1..107: note = Description of Artificial Sequence: Synthetic polypeptide; note = VL of XENP019075

SEQ ID NO: 10106 - protein, 5 aa, synthetic construct
  source 1..5: note = Description of Artificial Sequence: Synthetic peptide; note = XENP019075 vhCDR1
NYWMN

SEQ ID NO: 10107 - protein, 19 aa, synthetic construct
  source 1..19: note = Description of Artificial Sequence: Synthetic peptide; note = XENP019075 vhCDR2
EIRLKSNNYATHYAEPVKG

SEQ ID NO: 10108 - protein, 11 aa, synthetic construct
  source 1..11: note = Description of Artificial Sequence: Synthetic peptide; note = XENP019075 vhCDR3
YYGNYGGYFDV

SEQ ID NO: 10109 - protein, 11 aa, synthetic construct
  source 1..11: note = Description of Artificial Sequence: Synthetic peptide; note = XENP019075 vlCDR1
RASQSVSNDVA

SEQ ID NO: 10110 - protein, 7 aa, synthetic construct
  source 1..7: note = Description of Artificial Sequence: Synthetic peptide; note = XENP019075 vlCDR2
YASHRYT

SEQ ID NO: 10111 - protein, 9 aa, synthetic construct
  source 1..9: note = Description of Artificial Sequence: Synthetic peptide; note = XENP019075 vlCDR3
QQDYSSPRT

SEQ ID NO: 10112 - protein, 249 aa, synthetic construct
  source 1..249: note = Description of Artificial Sequence: Synthetic polypeptide; note = XENP019076 1G6_H1.251_L1_scFv(GKPGS)4
EVQLVESGGGLVKPGGSLRLSCAASGFTFSNYWMNWVRQAPGKGLEWVGEIRLKSNNYATHYAEPVKGRFTISRDDSKSMVYLQMNSLKTEDTAVYYCTRYYGNYGGYFDVWGAGTLVTVSSGKPGSGKPGSGKPGSGKPGSSIVMTQSPATLSVSPGERATLSCRASQSVSNDVAWYQQKPGQSPRLLINYASHRYTGVPDRFTGSGYGTEFTLTISSLQSEDFAVYFCQQDYSSPRTFGGGTKVEIK

SEQ ID NO: 10113 - protein, 122 aa, synthetic construct
  source 1..122: note = Description of Artificial Sequence: Synthetic polypeptide; note = VH of XENP019076
EVQLVESGGGLVKPGGSLRLSCAASGFTFSNYWMNWVRQAPGKGLEWVGEIRLKSNNYATHYAEPVKGRFTISRDDSKSMVYLQMNSLKTEDTAVYYCTRYYGNYGGYFDVWGAGTLVTVSS

SEQ ID NO: 10114 - protein, 107 aa, synthetic construct; identical to SEQ ID NO: 6247
  source 1..107: note = Description of Artificial Sequence: Synthetic polypeptide; note = VL of XENP019076

SEQ ID NO: 10115 - protein, 5 aa, synthetic construct
  source 1..5: note = Description of Artificial Sequence: Synthetic peptide; note = XENP019076 vhCDR1
NYWMN

SEQ ID NO: 10116 - protein, 19 aa, synthetic construct
  source 1..19: note = Description of Artificial Sequence: Synthetic peptide; note = XENP019076 vhCDR2
EIRLKSNNYATHYAEPVKG

SEQ ID NO: 10117 - protein, 11 aa, synthetic construct
  source 1..11: note = Description of Artificial Sequence: Synthetic peptide; note = XENP019076 vhCDR3
YYGNYGGYFDV

SEQ ID NO: 10118 - protein, 11 aa, synthetic construct
  source 1..11: note = Description of Artificial Sequence: Synthetic peptide; note = XENP019076 vlCDR1
RASQSVSNDVA

SEQ ID NO: 10119 - protein, 7 aa, synthetic construct
  source 1..7: note = Description of Artificial Sequence: Synthetic peptide; note = XENP019076 vlCDR2
YASHRYT

SEQ ID NO: 10120 - protein, 9 aa, synthetic construct
  source 1..9: note = Description of Artificial Sequence: Synthetic peptide; note = XENP019076 vlCDR3
QQDYSSPRT

SEQ ID NO: 10121 - protein, 249 aa, synthetic construct
  source 1..249: note = Description of Artificial Sequence: Synthetic polypeptide; note = XENP019077 1G6_H1.252_L1_scFv(GKPGS)4
EVQLVESGGGLVKPGGSLRLSCAASGFTFSNYWMNWVRQAPGKGLEWVGEIRLKSNNYATHYAEPVKGRFTISRDDSKSQVYLQMNSLKTEDTAVYYCTRYYGNYGGYFDVWGAGTLVTVSSGKPGSGKPGSGKPGSGKPGSSIVMTQSPATLSVSPGERATLSCRASQSVSNDVAWYQQKPGQSPRLLINYASHRYTGVPDRFTGSGYGTEFTLTISSLQSEDFAVYFCQQDYSSPRTFGGGTKVEIK

SEQ ID NO: 10122 - protein, 122 aa, synthetic construct
  source 1..122: note = Description of Artificial Sequence: Synthetic polypeptide; note = VH of XENP019077
EVQLVESGGGLVKPGGSLRLSCAASGFTFSNYWMNWVRQAPGKGLEWVGEIRLKSNNYATHYAEPVKGRFTISRDDSKSQVYLQMNSLKTEDTAVYYCTRYYGNYGGYFDVWGAGTLVTVSS

SEQ ID NO: 10123 - protein, 107 aa, synthetic construct; identical to SEQ ID NO: 6247
  source 1..107: note = Description of Artificial Sequence: Synthetic polypeptide; note = VL of XENP019077

SEQ ID NO: 10124 - protein, 5 aa, synthetic construct
  source 1..5: note = Description of Artificial Sequence: Synthetic peptide; note = XENP019077 vhCDR1
NYWMN

SEQ ID NO: 10125 - protein, 19 aa, synthetic construct
  source 1..19: note = Description of Artificial Sequence: Synthetic peptide; note = XENP019077 vhCDR2
EIRLKSNNYATHYAEPVKG

SEQ ID NO: 10126 - protein, 11 aa, synthetic construct
  source 1..11: note = Description of Artificial Sequence: Synthetic peptide; note = XENP019077 vhCDR3
YYGNYGGYFDV

SEQ ID NO: 10127 - protein, 11 aa, synthetic construct
  source 1..11: note = Description of Artificial Sequence: Synthetic peptide; note = XENP019077 vlCDR1
RASQSVSNDVA

SEQ ID NO: 10128 - protein, 7 aa, synthetic construct
  source 1..7: note = Description of Artificial Sequence: Synthetic peptide; note = XENP019077 vlCDR2
YASHRYT

SEQ ID NO: 10129 - protein, 9 aa, synthetic construct
  source 1..9: note = Description of Artificial Sequence: Synthetic peptide; note = XENP019077 vlCDR3
QQDYSSPRT

SEQ ID NO: 10130 - protein, 249 aa, synthetic construct
  source 1..249: note = Description of Artificial Sequence: Synthetic polypeptide; note = XENP019078 1G6_H1.253_L1_scFv(GKPGS)4
EVQLVESGGGLVKPGGSLRLSCAASGFTFSNYWMNWVRQAPGKGLEWVGEIRLKSNNYATHYAEPVKGRFTISRDDSKSTVVLQMNSLKTEDTAVYYCTRYYGNYGGYFDVWGAGTLVTVSSGKPGSGKPGSGKPGSGKPGSSIVMTQSPATLSVSPGERATLSCRASQSVSNDVAWYQQKPGQSPRLLINYASHRYTGVPDRFTGSGYGTEFTLTISSLQSEDFAVYFCQQDYSSPRTFGGGTKVEIK

SEQ ID NO: 10131 - protein, 122 aa, synthetic construct
  source 1..122: note = Description of Artificial Sequence: Synthetic polypeptide; note = VH of XENP019078
EVQLVESGGGLVKPGGSLRLSCAASGFTFSNYWMNWVRQAPGKGLEWVGEIRLKSNNYATHYAEPVKGRFTISRDDSKSTVVLQMNSLKTEDTAVYYCTRYYGNYGGYFDVWGAGTLVTVSS

SEQ ID NO: 10132 - protein, 107 aa, synthetic construct; identical to SEQ ID NO: 6247
  source 1..107: note = Description of Artificial Sequence: Synthetic polypeptide; note = VL of XENP019078

SEQ ID NO: 10133 - protein, 5 aa, synthetic construct
  source 1..5: note = Description of Artificial Sequence: Synthetic peptide; note = XENP019078 vhCDR1
NYWMN

SEQ ID NO: 10134 - protein, 19 aa, synthetic construct
  source 1..19: note = Description of Artificial Sequence: Synthetic peptide; note = XENP019078 vhCDR2
EIRLKSNNYATHYAEPVKG

SEQ ID NO: 10135 - protein, 11 aa, synthetic construct
  source 1..11: note = Description of Artificial Sequence: Synthetic peptide; note = XENP019078 vhCDR3
YYGNYGGYFDV

SEQ ID NO: 10136 - protein, 11 aa, synthetic construct
  source 1..11: note = Description of Artificial Sequence: Synthetic peptide; note = XENP019078 vlCDR1
RASQSVSNDVA

SEQ ID NO: 10137 - protein, 7 aa, synthetic construct
  source 1..7: note = Description of Artificial Sequence: Synthetic peptide; note = XENP019078 vlCDR2
YASHRYT

SEQ ID NO: 10138 - protein, 9 aa, synthetic construct
  source 1..9: note = Description of Artificial Sequence: Synthetic peptide; note = XENP019078 vlCDR3
QQDYSSPRT

SEQ ID NO: 10139 - protein, 249 aa, synthetic construct
  source 1..249: note = Description of Artificial Sequence: Synthetic polypeptide; note = XENP019079 1G6_H1.254_L1_scFv(GKPGS)4
EVQLVESGGGLVKPGGSLRLSCAASGFTFSNYWMNWVRQAPGKGLEWVGEIRLKSNNYATHYAEPVKGRFTISRDDSKSTVYLEMNSLKTEDTAVYYCTRYYGNYGGYFDVWGAGTLVTVSSGKPGSGKPGSGKPGSGKPGSSIVMTQSPATLSVSPGERATLSCRASQSVSNDVAWYQQKPGQSPRLLINYASHRYTGVPDRFTGSGYGTEFTLTISSLQSEDFAVYFCQQDYSSPRTFGGGTKVEIK

SEQ ID NO: 10140 - protein, 122 aa, synthetic construct
  source 1..122: note = Description of Artificial Sequence: Synthetic polypeptide; note = VH of XENP019079
EVQLVESGGGLVKPGGSLRLSCAASGFTFSNYWMNWVRQAPGKGLEWVGEIRLKSNNYATHYAEPVKGRFTISRDDSKSTVYLEMNSLKTEDTAVYYCTRYYGNYGGYFDVWGAGTLVTVSS

SEQ ID NO: 10141 - protein, 107 aa, synthetic construct; identical to SEQ ID NO: 6247
  source 1..107: note = Description of Artificial Sequence: Synthetic polypeptide; note = VL of XENP019079

SEQ ID NO: 10142 - protein, 5 aa, synthetic construct
  source 1..5: note = Description of Artificial Sequence: Synthetic peptide; note = XENP019079 vhCDR1
NYWMN

SEQ ID NO: 10143 - protein, 19 aa, synthetic construct
  source 1..19: note = Description of Artificial Sequence: Synthetic peptide; note = XENP019079 vhCDR2
EIRLKSNNYATHYAEPVKG

SEQ ID NO: 10144 - protein, 11 aa, synthetic construct
  source 1..11: note = Description of Artificial Sequence: Synthetic peptide; note = XENP019079 vhCDR3
YYGNYGGYFDV

SEQ ID NO: 10145 - protein, 11 aa, synthetic construct
  source 1..11: note = Description of Artificial Sequence: Synthetic peptide; note = XENP019079 vlCDR1
RASQSVSNDVA

SEQ ID NO: 10146 - protein, 7 aa, synthetic construct
  source 1..7: note = Description of Artificial Sequence: Synthetic peptide; note = XENP019079 vlCDR2
YASHRYT

SEQ ID NO: 10147 - protein, 9 aa, synthetic construct
  source 1..9: note = Description of Artificial Sequence: Synthetic peptide; note = XENP019079 vlCDR3
QQDYSSPRT

SEQ ID NO: 10148 - protein, 249 aa, synthetic construct
  source 1..249: note = Description of Artificial Sequence: Synthetic polypeptide; note = XENP019080 1G6_H1.255_L1_scFv(GKPGS)4
EVQLVESGGGLVKPGGSLRLSCAASGFTFSNYWMNWVRQAPGKGLEWVGEIRLKSNNYATHYAEPVKGRFTISRDDSKSTVYLQMNSEKTEDTAVYYCTRYYGNYGGYFDVWGAGTLVTVSSGKPGSGKPGSGKPGSGKPGSSIVMTQSPATLSVSPGERATLSCRASQSVSNDVAWYQQKPGQSPRLLINYASHRYTGVPDRFTGSGYGTEFTLTISSLQSEDFAVYFCQQDYSSPRTFGGGTKVEIK

SEQ ID NO: 10149 - protein, 122 aa, synthetic construct
  source 1..122: note = Description of Artificial Sequence: Synthetic polypeptide; note = VH of XENP019080
EVQLVESGGGLVKPGGSLRLSCAASGFTFSNYWMNWVRQAPGKGLEWVGEIRLKSNNYATHYAEPVKGRFTISRDDSKSTVYLQMNSEKTEDTAVYYCTRYYGNYGGYFDVWGAGTLVTVSS

SEQ ID NO: 10150 - protein, 107 aa, synthetic construct; identical to SEQ ID NO: 6247
  source 1..107: note = Description of Artificial Sequence: Synthetic polypeptide; note = VL of XENP019080

SEQ ID NO: 10151 - protein, 5 aa, synthetic construct
  source 1..5: note = Description of Artificial Sequence: Synthetic peptide; note = XENP019080 vhCDR1
NYWMN

SEQ ID NO: 10152 - protein, 19 aa, synthetic construct
  source 1..19: note = Description of Artificial Sequence: Synthetic peptide; note = XENP019080 vhCDR2
EIRLKSNNYATHYAEPVKG

SEQ ID NO: 10153 - protein, 11 aa, synthetic construct
  source 1..11: note = Description of Artificial Sequence: Synthetic peptide; note = XENP019080 vhCDR3
YYGNYGGYFDV

SEQ ID NO: 10154 - protein, 11 aa, synthetic construct
  source 1..11: note = Description of Artificial Sequence: Synthetic peptide; note = XENP019080 vlCDR1
RASQSVSNDVA

SEQ ID NO: 10155 - protein, 7 aa, synthetic construct
  source 1..7: note = Description of Artificial Sequence: Synthetic peptide; note = XENP019080 vlCDR2
YASHRYT

SEQ ID NO: 10156 - protein, 9 aa, synthetic construct
  source 1..9: note = Description of Artificial Sequence: Synthetic peptide; note = XENP019080 vlCDR3
QQDYSSPRT

SEQ ID NO: 10157 - protein, 249 aa, synthetic construct
  source 1..249: note = Description of Artificial Sequence: Synthetic polypeptide; note = XENP019081 1G6_H1.256_L1_scFv(GKPGS)4
EVQLVESGGGLVKPGGSLRLSCAASGFTFSNYWMNWVRQAPGKGLEWVGEIRLKSNNYATHYAEPVKGRFTISRDDSKSTVYLQMNSVKTEDTAVYYCTRYYGNYGGYFDVWGAGTLVTVSSGKPGSGKPGSGKPGSGKPGSSIVMTQSPATLSVSPGERATLSCRASQSVSNDVAWYQQKPGQSPRLLINYASHRYTGVPDRFTGSGYGTEFTLTISSLQSEDFAVYFCQQDYSSPRTFGGGTKVEIK

SEQ ID NO: 10158 - protein, 122 aa, synthetic construct
  source 1..122: note = Description of Artificial Sequence: Synthetic polypeptide; note = VH of XENP019081
EVQLVESGGGLVKPGGSLRLSCAASGFTFSNYWMNWVRQAPGKGLEWVGEIRLKSNNYATHYAEPVKGRFTISRDDSKSTVYLQMNSVKTEDTAVYYCTRYYGNYGGYFDVWGAGTLVTVSS

SEQ ID NO: 10159 - protein, 107 aa, synthetic construct; identical to SEQ ID NO: 6247
  source 1..107: note = Description of Artificial Sequence: Synthetic polypeptide; note = VL of XENP019081

SEQ ID NO: 10160 - protein, 5 aa, synthetic construct
  source 1..5: note = Description of Artificial Sequence: Synthetic peptide; note = XENP019081 vhCDR1
NYWMN

SEQ ID NO: 10161 - protein, 19 aa, synthetic construct
  source 1..19: note = Description of Artificial Sequence: Synthetic peptide; note = XENP019081 vhCDR2
EIRLKSNNYATHYAEPVKG

SEQ ID NO: 10162 - protein, 11 aa, synthetic construct
  source 1..11: note = Description of Artificial Sequence: Synthetic peptide; note = XENP019081 vhCDR3
YYGNYGGYFDV

SEQ ID NO: 10163 - protein, 11 aa, synthetic construct
  source 1..11: note = Description of Artificial Sequence: Synthetic peptide; note = XENP019081 vlCDR1
RASQSVSNDVA

SEQ ID NO: 10164 - protein, 7 aa, synthetic construct
  source 1..7: note = Description of Artificial Sequence: Synthetic peptide; note = XENP019081 vlCDR2
YASHRYT

SEQ ID NO: 10165 - protein, 9 aa, synthetic construct
  source 1..9: note = Description of Artificial Sequence: Synthetic peptide; note = XENP019081 vlCDR3
QQDYSSPRT

SEQ ID NO: 10166 - protein, 249 aa, synthetic construct
  source 1..249: note = Description of Artificial Sequence: Synthetic polypeptide; note = XENP019082 1G6_H1.257_L1_scFv(GKPGS)4
EVQLVESGGGLVKPGGSLRLSCAASGFTFSNYWMNWVRQAPGKGLEWVGEIRLKSNNYATHYAEPVKGRFTISRDDSKSTVYLQMNSLKTEDTAVYYCTRYYGNYGGYFDVWGRGTLVTVSSGKPGSGKPGSGKPGSGKPGSSIVMTQSPATLSVSPGERATLSCRASQSVSNDVAWYQQKPGQSPRLLINYASHRYTGVPDRFTGSGYGTEFTLTISSLQSEDFAVYFCQQDYSSPRTFGGGTKVEIK

SEQ ID NO: 10167 - protein, 122 aa, synthetic construct
  source 1..122: note = Description of Artificial Sequence: Synthetic polypeptide; note = VH of XENP019082
EVQLVESGGGLVKPGGSLRLSCAASGFTFSNYWMNWVRQAPGKGLEWVGEIRLKSNNYATHYAEPVKGRFTISRDDSKSTVYLQMNSLKTEDTAVYYCTRYYGNYGGYFDVWGRGTLVTVSS

SEQ ID NO: 10168 - protein, 107 aa, synthetic construct; identical to SEQ ID NO: 6247
  source 1..107: note = Description of Artificial Sequence: Synthetic polypeptide; note = VL of XENP019082

SEQ ID NO: 10169 - protein, 5 aa, synthetic construct
  source 1..5: note = Description of Artificial Sequence: Synthetic peptide; note = XENP019082 vhCDR1
NYWMN

SEQ ID NO: 10170 - protein, 19 aa, synthetic construct
  source 1..19: note = Description of Artificial Sequence: Synthetic peptide; note = XENP019082 vhCDR2
EIRLKSNNYATHYAEPVKG

SEQ ID NO: 10171 - protein, 11 aa, synthetic construct
  source 1..11: note = Description of Artificial Sequence: Synthetic peptide; note = XENP019082 vhCDR3
YYGNYGGYFDV

SEQ ID NO: 10172 - protein, 11 aa, synthetic construct
  source 1..11: note = Description of Artificial Sequence: Synthetic peptide; note = XENP019082 vlCDR1
RASQSVSNDVA

SEQ ID NO: 10173 - protein, 7 aa, synthetic construct
  source 1..7: note = Description of Artificial Sequence: Synthetic peptide; note = XENP019082 vlCDR2
YASHRYT

SEQ ID NO: 10174 - protein, 9 aa, synthetic construct
  source 1..9: note = Description of Artificial Sequence: Synthetic peptide; note = XENP019082 vlCDR3
QQDYSSPRT

SEQ ID NO: 10175 - protein, 249 aa, synthetic construct
  source 1..249: note = Description of Artificial Sequence: Synthetic polypeptide; note = XENP019083 1G6_H1.258_L1_scFv(GKPGS)4
EVQLVESGGGLKKPGESLRLSCAASGFTFSNYWMNWVRQAPGKGLEWVGEIRLKSNNYATHYAEPVKGRFTISRDDSKSTVYLQMNSLKTEDTAVYYCTRYYGNYGGYFDVWGAGTLVTVSSGKPGSGKPGSGKPGSGKPGSSIVMTQSPATLSVSPGERATLSCRASQSVSNDVAWYQQKPGQSPRLLINYASHRYTGVPDRFTGSGYGTEFTLTISSLQSEDFAVYFCQQDYSSPRTFGGGTKVEIK

SEQ ID NO: 10176 - protein, 122 aa, synthetic construct
  source 1..122: note = Description of Artificial Sequence: Synthetic polypeptide; note = VH of XENP019083
EVQLVESGGGLKKPGESLRLSCAASGFTFSNYWMNWVRQAPGKGLEWVGEIRLKSNNYATHYAEPVKGRFTISRDDSKSTVYLQMNSLKTEDTAVYYCTRYYGNYGGYFDVWGAGTLVTVSS

SEQ ID NO: 10177 - protein, 107 aa, synthetic construct; identical to SEQ ID NO: 6247
  source 1..107: note = Description of Artificial Sequence: Synthetic polypeptide; note = VL of XENP019083

SEQ ID NO: 10178 - protein, 5 aa, synthetic construct
  source 1..5: note = Description of Artificial Sequence: Synthetic peptide; note = XENP019083 vhCDR1
NYWMN

SEQ ID NO: 10179 - protein, 19 aa, synthetic construct
  source 1..19: note = Description of Artificial Sequence: Synthetic peptide; note = XENP019083 vhCDR2
EIRLKSNNYATHYAEPVKG

SEQ ID NO: 10180 - protein, 11 aa, synthetic construct
  source 1..11: note = Description of Artificial Sequence: Synthetic peptide; note = XENP019083 vhCDR3
YYGNYGGYFDV

SEQ ID NO: 10181 - protein, 11 aa, synthetic construct
  source 1..11: note = Description of Artificial Sequence: Synthetic peptide; note = XENP019083 vlCDR1
RASQSVSNDVA

SEQ ID NO: 10182 - protein, 7 aa, synthetic construct
  source 1..7: note = Description of Artificial Sequence: Synthetic peptide; note = XENP019083 vlCDR2
YASHRYT

SEQ ID NO: 10183 - protein, 9 aa, synthetic construct
  source 1..9: note = Description of Artificial Sequence: Synthetic peptide; note = XENP019083 vlCDR3
QQDYSSPRT

SEQ ID NO: 10184 - protein, 249 aa, synthetic construct
  source 1..249: note = Description of Artificial Sequence: Synthetic polypeptide; note = XENP019084 1G6_H1.259_L1_scFv(GKPGS)4
EVQLVESGGGLVKPGGSLRLSCAASGFTFSNYWMDWVRQAPGKGLEWVGEIRLKSNNYATHYAEPVKGRFTISRDDSKSTVYLQMNSLKTEDTAVYYCKRYYGNYGGYFDVWGAGTLVTVSSGKPGSGKPGSGKPGSGKPGSSIVMTQSPATLSVSPGERATLSCRASQSVSNDVAWYQQKPGQSPRLLINYASHRYTGVPDRFTGSGYGTEFTLTISSLQSEDFAVYFCQQDYSSPRTFGGGTKVEIK

SEQ ID NO: 10185 - protein, 122 aa, synthetic construct
  source 1..122: note = Description of Artificial Sequence: Synthetic polypeptide; note = VH of XENP019084
EVQLVESGGGLVKPGGSLRLSCAASGFTFSNYWMDWVRQAPGKGLEWVGEIRLKSNNYATHYAEPVKGRFTISRDDSKSTVYLQMNSLKTEDTAVYYCKRYYGNYGGYFDVWGAGTLVTVSS

SEQ ID NO: 10186 - protein, 107 aa, synthetic construct; identical to SEQ ID NO: 6247
  source 1..107: note = Description of Artificial Sequence: Synthetic polypeptide; note = VL of XENP019084

SEQ ID NO: 10187 - protein, 5 aa, synthetic construct
  source 1..5: note = Description of Artificial Sequence: Synthetic peptide; note = XENP019084 vhCDR1
NYWMD

SEQ ID NO: 10188 - protein, 19 aa, synthetic construct
  source 1..19: note = Description of Artificial Sequence: Synthetic peptide; note = XENP019084 vhCDR2
EIRLKSNNYATHYAEPVKG

SEQ ID NO: 10189 - protein, 11 aa, synthetic construct
  source 1..11: note = Description of Artificial Sequence: Synthetic peptide; note = XENP019084 vhCDR3
YYGNYGGYFDV

SEQ ID NO: 10190 - protein, 11 aa, synthetic construct
  source 1..11: note = Description of Artificial Sequence: Synthetic peptide; note = XENP019084 vlCDR1
RASQSVSNDVA

SEQ ID NO: 10191 - protein, 7 aa, synthetic construct
  source 1..7: note = Description of Artificial Sequence: Synthetic peptide; note = XENP019084 vlCDR2
YASHRYT

SEQ ID NO: 10192 - protein, 9 aa, synthetic construct
  source 1..9: note = Description of Artificial Sequence: Synthetic peptide; note = XENP019084 vlCDR3
QQDYSSPRT

SEQ ID NO: 10193 - protein, 249 aa, synthetic construct
  source 1..249: note = Description of Artificial Sequence: Synthetic polypeptide; note = XENP019085 1G6_H1.260_L1_scFv(GKPGS)4
EVQLVESGGGLVKPGESLRLSCAASGFTFSNYWMNWVRQAPGKGLEWVGEIRLKSNNYATHYAEPVKGRFTISRDDSKSTVYLQMNSRKTEDTAVYYCTRYYGNYGGYFDVWGAGTLVTVSSGKPGSGKPGSGKPGSGKPGSSIVMTQSPATLSVSPGERATLSCRASQSVSNDVAWYQQKPGQSPRLLINYASHRYTGVPDRFTGSGYGTEFTLTISSLQSEDFAVYFCQQDYSSPRTFGGGTKVEIK

SEQ ID NO: 10194 - protein, 122 aa, synthetic construct
  source 1..122: note = Description of Artificial Sequence: Synthetic polypeptide; note = VH of XENP019085
EVQLVESGGGLVKPGESLRLSCAASGFTFSNYWMNWVRQAPGKGLEWVGEIRLKSNNYATHYAEPVKGRFTISRDDSKSTVYLQMNSRKTEDTAVYYCTRYYGNYGGYFDVWGAGTLVTVSS

SEQ ID NO: 10195 - protein, 107 aa, synthetic construct; identical to SEQ ID NO: 6247
  source 1..107: note = Description of Artificial Sequence: Synthetic polypeptide; note = VL of XENP019085

SEQ ID NO: 10196 - protein, 5 aa, synthetic construct
  source 1..5: note = Description of Artificial Sequence: Synthetic peptide; note = XENP019085 vhCDR1
NYWMN

SEQ ID NO: 10197 - protein, 19 aa, synthetic construct
  source 1..19: note = Description of Artificial Sequence: Synthetic peptide; note = XENP019085 vhCDR2
EIRLKSNNYATHYAEPVKG

SEQ ID NO: 10198 - protein, 11 aa, synthetic construct
  source 1..11: note = Description of Artificial Sequence: Synthetic peptide; note = XENP019085 vhCDR3
YYGNYGGYFDV

SEQ ID NO: 10199 - protein, 11 aa, synthetic construct
  source 1..11: note = Description of Artificial Sequence: Synthetic peptide; note = XENP019085 vlCDR1
RASQSVSNDVA

SEQ ID NO: 10200 - protein, 7 aa, synthetic construct
  source 1..7: note = Description of Artificial Sequence: Synthetic peptide; note = XENP019085 vlCDR2
YASHRYT

SEQ ID NO: 10201 - protein, 9 aa, synthetic construct
  source 1..9: note = Description of Artificial Sequence: Synthetic peptide; note = XENP019085 vlCDR3
QQDYSSPRT

SEQ ID NO: 10202 - protein, 249 aa, synthetic construct
  source 1..249: note = Description of Artificial Sequence: Synthetic polypeptide; note = XENP019086 1G6_H1.261_L1_scFv(GKPGS)4
EVQLVESGGGLVKPGGSLRLSCKASGFTFSNYWMNWVRQAPGKGLEWVGEIRLKSNNYATHYAEPVKGRFTISRDDSKDTVYLQMNSLKTEDTAVYYCTRYYGNYGGYFDVWGAGTLVTVSSGKPGSGKPGSGKPGSGKPGSSIVMTQSPATLSVSPGERATLSCRASQSVSNDVAWYQQKPGQSPRLLINYASHRYTGVPDRFTGSGYGTEFTLTISSLQSEDFAVYFCQQDYSSPRTFGGGTKVEIK

SEQ ID NO: 10203 - protein, 122 aa, synthetic construct
  source 1..122: note = Description of Artificial Sequence: Synthetic polypeptide; note = VH of XENP019086
EVQLVESGGGLVKPGGSLRLSCKASGFTFSNYWMNWVRQAPGKGLEWVGEIRLKSNNYATHYAEPVKGRFTISRDDSKDTVYLQMNSLKTEDTAVYYCTRYYGNYGGYFDVWGAGTLVTVSS

SEQ ID NO: 10204 - protein, 107 aa, synthetic construct; identical to SEQ ID NO: 6247
  source 1..107: note = Description of Artificial Sequence: Synthetic polypeptide; note = VL of XENP019086

SEQ ID NO: 10205 - protein, 5 aa, synthetic construct
  source 1..5: note = Description of Artificial Sequence: Synthetic peptide; note = XENP019086 vhCDR1
NYWMN

SEQ ID NO: 10206 - protein, 19 aa, synthetic construct
  source 1..19: note = Description of Artificial Sequence: Synthetic peptide; note = XENP019086 vhCDR2
EIRLKSNNYATHYAEPVKG

SEQ ID NO: 10207 - protein, 11 aa, synthetic construct
  source 1..11: note = Description of Artificial Sequence: Synthetic peptide; note = XENP019086 vhCDR3
YYGNYGGYFDV

SEQ ID NO: 10208 - protein, 11 aa, synthetic construct
  source 1..11: note = Description of Artificial Sequence: Synthetic peptide; note = XENP019086 vlCDR1
RASQSVSNDVA

SEQ ID NO: 10209 - protein, 7 aa, synthetic construct
  source 1..7: note = Description of Artificial Sequence: Synthetic peptide; note = XENP019086 vlCDR2
YASHRYT

SEQ ID NO: 10210 - protein, 9 aa, synthetic construct
  source 1..9: note = Description of Artificial Sequence: Synthetic peptide; note = XENP019086 vlCDR3
QQDYSSPRT

SEQ ID NO: 10211 - protein, 249 aa, synthetic construct
  source 1..249: note = Description of Artificial Sequence: Synthetic polypeptide; note = XENP019087 1G6_H1.262_L1_scFv(GKPGS)4
EVQLVESGGGLVKPGESLRLSCAASGFTFSNYWMNWVRQAPGKGLEWVGEIRLKSNNYATHYAEPVKGRFTISRDDSKSTVYLQMNRLKTEDTAVYYCTRYYGNYGGYFDVWGAGTLVTVSSGKPGSGKPGSGKPGSGKPGSSIVMTQSPATLSVSPGERATLSCRASQSVSNDVAWYQQKPGQSPRLLINYASHRYTGVPDRFTGSGYGTEFTLTISSLQSEDFAVYFCQQDYSSPRTFGGGTKVEIK

SEQ ID NO: 10212 - protein, 122 aa, synthetic construct
  source 1..122: note = Description of Artificial Sequence: Synthetic polypeptide; note = VH of XENP019087
EVQLVESGGGLVKPGESLRLSCAASGFTFSNYWMNWVRQAPGKGLEWVGEIRLKSNNYATHYAEPVKGRFTISRDDSKSTVYLQMNRLKTEDTAVYYCTRYYGNYGGYFDVWGAGTLVTVSS

SEQ ID NO: 10213 - protein, 107 aa, synthetic construct; identical to SEQ ID NO: 6247
  source 1..107: note = Description of Artificial Sequence: Synthetic polypeptide; note = VL of XENP019087

SEQ ID NO: 10214 - protein, 5 aa, synthetic construct
  source 1..5: note = Description of Artificial Sequence: Synthetic peptide; note = XENP019087 vhCDR1
NYWMN

SEQ ID NO: 10215 - protein, 19 aa, synthetic construct
  source 1..19: note = Description of Artificial Sequence: Synthetic peptide; note = XENP019087 vhCDR2
EIRLKSNNYATHYAEPVKG

SEQ ID NO: 10216 - protein, 11 aa, synthetic construct
  source 1..11: note = Description of Artificial Sequence: Synthetic peptide; note = XENP019087 vhCDR3
YYGNYGGYFDV

SEQ ID NO: 10217 - protein, 11 aa, synthetic construct
  source 1..11: note = Description of Artificial Sequence: Synthetic peptide; note = XENP019087 vlCDR1
RASQSVSNDVA

SEQ ID NO: 10218 - protein, 7 aa, synthetic construct
  source 1..7: note = Description of Artificial Sequence: Synthetic peptide; note = XENP019087 vlCDR2
YASHRYT

SEQ ID NO: 10219 - protein, 9 aa, synthetic construct
  source 1..9: note = Description of Artificial Sequence: Synthetic peptide; note = XENP019087 vlCDR3
QQDYSSPRT

SEQ ID NO: 10220 - protein, 249 aa, synthetic construct
  source 1..249: note = Description of Artificial Sequence: Synthetic polypeptide; note = XENP019088 1G6_H1.263_L1_scFv(GKPGS)4
EVQLVESGGGLVKPGGSLRLSCAASGFTFSNYWMNWVRQAPGKGLEWVGEIRLKSNNYATHYAEKVKGLFTISRDDSKSTVYLQMNSLKTEDTAVYYCTRYYGNYGGYFDVWGAGTLVTVSSGKPGSGKPGSGKPGSGKPGSSIVMTQSPATLSVSPGERATLSCRASQSVSNDVAWYQQKPGQSPRLLINYASHRYTGVPDRFTGSGYGTEFTLTISSLQSEDFAVYFCQQDYSSPRTFGGGTKVEIK

SEQ ID NO: 10221 - protein, 122 aa, synthetic construct
  source 1..122: note = Description of Artificial Sequence: Synthetic polypeptide; note = VH of XENP019088
EVQLVESGGGLVKPGGSLRLSCAASGFTFSNYWMNWVRQAPGKGLEWVGEIRLKSNNYATHYAEKVKGLFTISRDDSKSTVYLQMNSLKTEDTAVYYCTRYYGNYGGYFDVWGAGTLVTVSS

SEQ ID NO: 10222 - protein, 107 aa, synthetic construct; identical to SEQ ID NO: 6247
  source 1..107: note = Description of Artificial Sequence: Synthetic polypeptide; note = VL of XENP019088

SEQ ID NO: 10223 - protein, 5 aa, synthetic construct
  source 1..5: note = Description of Artificial Sequence: Synthetic peptide; note = XENP019088 vhCDR1
NYWMN

SEQ ID NO: 10224 - protein, 19 aa, synthetic construct
  source 1..19: note = Description of Artificial Sequence: Synthetic peptide; note = XENP019088 vhCDR2
EIRLKSNNYATHYAEKVKG

SEQ ID NO: 10225 - protein, 11 aa, synthetic construct
  source 1..11: note = Description of Artificial Sequence: Synthetic peptide; note = XENP019088 vhCDR3
YYGNYGGYFDV

SEQ ID NO: 10226 - protein, 11 aa, synthetic construct
  source 1..11: note = Description of Artificial Sequence: Synthetic peptide; note = XENP019088 vlCDR1
RASQSVSNDVA

SEQ ID NO: 10227 - protein, 7 aa, synthetic construct
  source 1..7: note = Description of Artificial Sequence: Synthetic peptide; note = XENP019088 vlCDR2
YASHRYT

SEQ ID NO: 10228 - protein, 9 aa, synthetic construct
  source 1..9: note = Description of Artificial Sequence: Synthetic peptide; note = XENP019088 vlCDR3
QQDYSSPRT

SEQ ID NO: 10229 - protein, 249 aa, synthetic construct
  source 1..249: note = Description of Artificial Sequence: Synthetic polypeptide; note = XENP019089 1G6_H1.264_L1_scFv(GKPGS)4
EVQLVESGGGLVKPGGSLRLSCKASGDTFSNYWMNWVRQAPGKGLEWVGEIRLKSNNYATHYAEPVKGRFTISRDDSKSTVYLQMNSLKTEDTAVYYCTRYYGNYGGYFDVWGAGTLVTVSSGKPGSGKPGSGKPGSGKPGSSIVMTQSPATLSVSPGERATLSCRASQSVSNDVAWYQQKPGQSPRLLINYASHRYTGVPDRFTGSGYGTEFTLTISSLQSEDFAVYFCQQDYSSPRTFGGGTKVEIK

SEQ ID NO: 10230 - protein, 122 aa, synthetic construct
  source 1..122: note = Description of Artificial Sequence: Synthetic polypeptide; note = VH of XENP019089
EVQLVESGGGLVKPGGSLRLSCKASGDTFSNYWMNWVRQAPGKGLEWVGEIRLKSNNYATHYAEPVKGRFTISRDDSKSTVYLQMNSLKTEDTAVYYCTRYYGNYGGYFDVWGAGTLVTVSS

SEQ ID NO: 10231 - protein, 107 aa, synthetic construct; identical to SEQ ID NO: 6247
  source 1..107: note = Description of Artificial Sequence: Synthetic polypeptide; note = VL of XENP019089

SEQ ID NO: 10232 - protein, 5 aa, synthetic construct
  source 1..5: note = Description of Artificial Sequence: Synthetic peptide; note = XENP019089 vhCDR1
NYWMN

SEQ ID NO: 10233 - protein, 19 aa, synthetic construct
  source 1..19: note = Description of Artificial Sequence: Synthetic peptide; note = XENP019089 vhCDR2
EIRLKSNNYATHYAEPVKG

SEQ ID NO: 10234 - protein, 11 aa, synthetic construct
  source 1..11: note = Description of Artificial Sequence: Synthetic peptide; note = XENP019089 vhCDR3
YYGNYGGYFDV

SEQ ID NO: 10235 - protein, 11 aa, synthetic construct
  source 1..11: note = Description of Artificial Sequence: Synthetic peptide; note = XENP019089 vlCDR1
RASQSVSNDVA

SEQ ID NO: 10236 - protein, 7 aa, synthetic construct
  source 1..7: note = Description of Artificial Sequence: Synthetic peptide; note = XENP019089 vlCDR2
YASHRYT

SEQ ID NO: 10237 - protein, 9 aa, synthetic construct
  source 1..9: note = Description of Artificial Sequence: Synthetic peptide; note = XENP019089 vlCDR3
QQDYSSPRT

SEQ ID NO: 10238 - protein, 249 aa, synthetic construct
  source 1..249: note = Description of Artificial Sequence: Synthetic polypeptide; note = XENP019090 1G6_H1.265_L1_scFv(GKPGS)4
EVQLVESGGGLVKPGESLRLSCAASGFTFSNYWMNWVRQAPGKGLEWVGEIRLKSNNYATHYAEPVKGRFTISRDDSKSTVYLKMNSLKTEDTAVYYCTRYYGNYGGYFDVWGAGTLVTVSSGKPGSGKPGSGKPGSGKPGSSIVMTQSPATLSVSPGERATLSCRASQSVSNDVAWYQQKPGQSPRLLINYASHRYTGVPDRFTGSGYGTEFTLTISSLQSEDFAVYFCQQDYSSPRTFGGGTKVEIK

SEQ ID NO: 10239 - protein, 122 aa, synthetic construct
  source 1..122: note = Description of Artificial Sequence: Synthetic polypeptide; note = VH of XENP019090
EVQLVESGGGLVKPGESLRLSCAASGFTFSNYWMNWVRQAPGKGLEWVGEIRLKSNNYATHYAEPVKGRFTISRDDSKSTVYLKMNSLKTEDTAVYYCTRYYGNYGGYFDVWGAGTLVTVSS

SEQ ID NO: 10240 - protein, 107 aa, synthetic construct; identical to SEQ ID NO: 6247
  source 1..107: note = Description of Artificial Sequence: Synthetic polypeptide; note = VL of XENP019090

SEQ ID NO: 10241 - protein, 5 aa, synthetic construct
  source 1..5: note = Description of Artificial Sequence: Synthetic peptide; note = XENP019090 vhCDR1
NYWMN

SEQ ID NO: 10242 - protein, 19 aa, synthetic construct
  source 1..19: note = Description of Artificial Sequence: Synthetic peptide; note = XENP019090 vhCDR2
EIRLKSNNYATHYAEPVKG

SEQ ID NO: 10243 - protein, 11 aa, synthetic construct
  source 1..11: note = Description of Artificial Sequence: Synthetic peptide; note = XENP019090 vhCDR3
YYGNYGGYFDV

SEQ ID NO: 10244 - protein, 11 aa, synthetic construct
  source 1..11: note = Description of Artificial Sequence: Synthetic peptide; note = XENP019090 vlCDR1
RASQSVSNDVA

SEQ ID NO: 10245 - protein, 7 aa, synthetic construct
  source 1..7: note = Description of Artificial Sequence: Synthetic peptide; note = XENP019090 vlCDR2
YASHRYT

SEQ ID NO: 10246 - protein, 9 aa, synthetic construct
  source 1..9: note = Description of Artificial Sequence: Synthetic peptide; note = XENP019090 vlCDR3
QQDYSSPRT

SEQ ID NO: 10247 - protein, 249 aa, synthetic construct
  source 1..249: note = Description of Artificial Sequence: Synthetic polypeptide; note = XENP019091 1G6_H1.266_L1_scFv(GKPGS)4
EVQLVESGGGLVKPGGSLRLSCAASGFTFSNYWMNWVRQAPGKGLEWVGEIRLKSNNYATHYAQPVKDRFTISRDDSKSTVYLQMNSLKTEDTAVYYCTRYYGNYGGYFDVWGAGTLVTVSSGKPGSGKPGSGKPGSGKPGSSIVMTQSPATLSVSPGERATLSCRASQSVSNDVAWYQQKPGQSPRLLINYASHRYTGVPDRFTGSGYGTEFTLTISSLQSEDFAVYFCQQDYSSPRTFGGGTKVEIK

SEQ ID NO: 10248 - protein, 122 aa, synthetic construct
  source 1..122: note = Description of Artificial Sequence: Synthetic polypeptide; note = VH of XENP019091
EVQLVESGGGLVKPGGSLRLSCAASGFTFSNYWMNWVRQAPGKGLEWVGEIRLKSNNYATHYAQPVKDRFTISRDDSKSTVYLQMNSLKTEDTAVYYCTRYYGNYGGYFDVWGAGTLVTVSS

SEQ ID NO: 10249 - protein, 107 aa, synthetic construct; identical to SEQ ID NO: 6247
  source 1..107: note = Description of Artificial Sequence: Synthetic polypeptide; note = VL of XENP019091

SEQ ID NO: 10250 - protein, 5 aa, synthetic construct
  source 1..5: note = Description of Artificial Sequence: Synthetic peptide; note = XENP019091 vhCDR1
NYWMN

SEQ ID NO: 10251 - protein, 19 aa, synthetic construct
  source 1..19: note = Description of Artificial Sequence: Synthetic peptide; note = XENP019091 vhCDR2
EIRLKSNNYATHYAQPVKD

SEQ ID NO: 10252 - protein, 11 aa, synthetic construct
  source 1..11: note = Description of Artificial Sequence: Synthetic peptide; note = XENP019091 vhCDR3
YYGNYGGYFDV

SEQ ID NO: 10253 - protein, 11 aa, synthetic construct
  source 1..11: note = Description of Artificial Sequence: Synthetic peptide; note = XENP019091 vlCDR1
RASQSVSNDVA

SEQ ID NO: 10254 - protein, 7 aa, synthetic construct
  source 1..7: note = Description of Artificial Sequence: Synthetic peptide; note = XENP019091 vlCDR2
YASHRYT

SEQ ID NO: 10255 - protein, 9 aa, synthetic construct
  source 1..9: note = Description of Artificial Sequence: Synthetic peptide; note = XENP019091 vlCDR3
QQDYSSPRT

SEQ ID NO: 10256 - protein, 249 aa, synthetic construct
  source 1..249: note = Description of Artificial Sequence: Synthetic polypeptide; note = XENP019092 1G6_H1.267_L1_scFv(GKPGS)4
EVQLVESGGGLVKPGGSLRLSCAASGFTFSNYWMNWVRQAPGKGLEWVGEIRLKSNNYATHYAEPVKGRFTISRDDSKSTVYLEMNSRKTEDTAVYYCTRYYGNYGGYFDVWGAGTLVTVSSGKPGSGKPGSGKPGSGKPGSSIVMTQSPATLSVSPGERATLSCRASQSVSNDVAWYQQKPGQSPRLLINYASHRYTGVPDRFTGSGYGTEFTLTISSLQSEDFAVYFCQQDYSSPRTFGGGTKVEIK

SEQ ID NO: 10257 - protein, 122 aa, synthetic construct
  source 1..122: note = Description of Artificial Sequence: Synthetic polypeptide; note = VH of XENP019092
EVQLVESGGGLVKPGGSLRLSCAASGFTFSNYWMNWVRQAPGKGLEWVGEIRLKSNNYATHYAEPVKGRFTISRDDSKSTVYLEMNSRKTEDTAVYYCTRYYGNYGGYFDVWGAGTLVTVSS

SEQ ID NO: 10258 - protein, 107 aa, synthetic construct; identical to SEQ ID NO: 6247
  source 1..107: note = Description of Artificial Sequence: Synthetic polypeptide; note = VL of XENP019092

SEQ ID NO: 10259 - protein, 5 aa, synthetic construct
  source 1..5: note = Description of Artificial Sequence: Synthetic peptide; note = XENP019092 vhCDR1
NYWMN

SEQ ID NO: 10260 - protein, 19 aa, synthetic construct
  source 1..19: note = Description of Artificial Sequence: Synthetic peptide; note = XENP019092 vhCDR2
EIRLKSNNYATHYAEPVKG

SEQ ID NO: 10261 - protein, 11 aa, synthetic construct
  source 1..11: note = Description of Artificial Sequence: Synthetic peptide; note = XENP019092 vhCDR3
YYGNYGGYFDV

SEQ ID NO: 10262 - protein, 11 aa, synthetic construct
  source 1..11: note = Description of Artificial Sequence: Synthetic peptide; note = XENP019092 vlCDR1
RASQSVSNDVA

SEQ ID NO: 10263 - protein, 7 aa, synthetic construct
  source 1..7: note = Description of Artificial Sequence: Synthetic peptide; note = XENP019092 vlCDR2
YASHRYT

SEQ ID NO: 10264 - protein, 9 aa, synthetic construct
  source 1..9: note = Description of Artificial Sequence: Synthetic peptide; note = XENP019092 vlCDR3
QQDYSSPRT

SEQ ID NO: 10265 - protein, 249 aa, synthetic construct
  source 1..249: note = Description of Artificial Sequence: Synthetic polypeptide; note = XENP019093 1G6_H1.268_L1_scFv(GKPGS)4
EVQLVESGGGLVKPGESLRLSCAASGFTFSNYWMNWVRQAPGKGLEWVGEIRLKSNNYATHYAEPVKGRFTISRDDSKSTVYLQMRSLKTEDTAVYYCTRYYGNYGGYFDVWGAGTLVTVSSGKPGSGKPGSGKPGSGKPGSSIVMTQSPATLSVSPGERATLSCRASQSVSNDVAWYQQKPGQSPRLLINYASHRYTGVPDRFTGSGYGTEFTLTISSLQSEDFAVYFCQQDYSSPRTFGGGTKVEIK

SEQ ID NO: 10266 - protein, 122 aa, synthetic construct
  source 1..122: note = Description of Artificial Sequence: Synthetic polypeptide; note = VH of XENP019093
EVQLVESGGGLVKPGESLRLSCAASGFTFSNYWMNWVRQAPGKGLEWVGEIRLKSNNYATHYAEPVKGRFTISRDDSKSTVYLQMRSLKTEDTAVYYCTRYYGNYGGYFDVWGAGTLVTVSS

SEQ ID NO: 10267 - protein, 107 aa, synthetic construct; identical to SEQ ID NO: 6247
  source 1..107: note = Description of Artificial Sequence: Synthetic polypeptide; note = VL of XENP019093

SEQ ID NO: 10268 - protein, 5 aa, synthetic construct
  source 1..5: note = Description of Artificial Sequence: Synthetic peptide; note = XENP019093 vhCDR1
NYWMN

SEQ ID NO: 10269 - protein, 19 aa, synthetic construct
  source 1..19: note = Description of Artificial Sequence: Synthetic peptide; note = XENP019093 vhCDR2
EIRLKSNNYATHYAEPVKG

SEQ ID NO: 10270 - protein, 11 aa, synthetic construct
  source 1..11: note = Description of Artificial Sequence: Synthetic peptide; note = XENP019093 vhCDR3
YYGNYGGYFDV

SEQ ID NO: 10271 - protein, 11 aa, synthetic construct
  source 1..11: note = Description of Artificial Sequence: Synthetic peptide; note = XENP019093 vlCDR1
RASQSVSNDVA

SEQ ID NO: 10272 - protein, 7 aa, synthetic construct
  source 1..7: note = Description of Artificial Sequence: Synthetic peptide; note = XENP019093 vlCDR2
YASHRYT

SEQ ID NO: 10273 - protein, 9 aa, synthetic construct
  source 1..9: note = Description of Artificial Sequence: Synthetic peptide; note = XENP019093 vlCDR3
QQDYSSPRT

SEQ ID NO: 10274 - protein, 249 aa, synthetic construct
  source 1..249: note = Description of Artificial Sequence: Synthetic polypeptide; note = XENP019094 1G6_H1.269_L1_scFv(GKPGS)4
EVQLVESGGGLVKPGGSLRLSCAASGFTFSNFWMNWVRQAPGKGLEWVGEIRLYSNNYATHYAEPVKGRFTISRDDSKSTVYLQMNSLKTEDTAVYYCTRYYGNYGGYFDVWGAGTLVTVSSGKPGSGKPGSGKPGSGKPGSSIVMTQSPATLSVSPGERATLSCRASQSVSNDVAWYQQKPGQSPRLLINYASHRYTGVPDRFTGSGYGTEFTLTISSLQSEDFAVYFCQQDYSSPRTFGGGTKVEIK

SEQ ID NO: 10275 - protein, 122 aa, synthetic construct
  source 1..122: note = Description of Artificial Sequence: Synthetic polypeptide; note = VH of XENP019094
EVQLVESGGGLVKPGGSLRLSCAASGFTFSNFWMNWVRQAPGKGLEWVGEIRLYSNNYATHYAEPVKGRFTISRDDSKSTVYLQMNSLKTEDTAVYYCTRYYGNYGGYFDVWGAGTLVTVSS

SEQ ID NO: 10276 - protein, 107 aa, synthetic construct; identical to SEQ ID NO: 6247
  source 1..107: note = Description of Artificial Sequence: Synthetic polypeptide; note = VL of XENP019094

SEQ ID NO: 10277 - protein, 5 aa, synthetic construct
  source 1..5: note = Description of Artificial Sequence: Synthetic peptide; note = XENP019094 vhCDR1
NFWMN

SEQ ID NO: 10278 - protein, 19 aa, synthetic construct
  source 1..19: note = Description of Artificial Sequence: Synthetic peptide; note = XENP019094 vhCDR2
EIRLYSNNYATHYAEPVKG

SEQ ID NO: 10279 - protein, 11 aa, synthetic construct
  source 1..11: note = Description of Artificial Sequence: Synthetic peptide; note = XENP019094 vhCDR3
YYGNYGGYFDV

SEQ ID NO: 10280 - protein, 11 aa, synthetic construct
  source 1..11: note = Description of Artificial Sequence: Synthetic peptide; note = XENP019094 vlCDR1
RASQSVSNDVA

SEQ ID NO: 10281 - protein, 7 aa, synthetic construct
  source 1..7: note = Description of Artificial Sequence: Synthetic peptide; note = XENP019094 vlCDR2
YASHRYT

SEQ ID NO: 10282 - protein, 9 aa, synthetic construct
  source 1..9: note = Description of Artificial Sequence: Synthetic peptide; note = XENP019094 vlCDR3
QQDYSSPRT

SEQ ID NO: 10283 - protein, 249 aa, synthetic construct
  source 1..249: note = Description of Artificial Sequence: Synthetic polypeptide; note = XENP019095 1G6_H1.270_L1_scFv(GKPGS)4
EVQLVESGGGLVKPGGSLRLSCAASGFTFSNYWMNWVRQAPGKGLEWVGEIRWYSNNYATHYAEPVKGRFTISRDDSKSTVYLQMNSLKTEDTAVYYCTRYYGNYGGYFDVWGAGTLVTVSSGKPGSGKPGSGKPGSGKPGSSIVMTQSPATLSVSPGERATLSCRASQSVSNDVAWYQQKPGQSPRLLINYASHRYTGVPDRFTGSGYGTEFTLTISSLQSEDFAVYFCQQDYSSPRTFGGGTKVEIK

SEQ ID NO: 10284 - protein, 122 aa, synthetic construct
  source 1..122: note = Description of Artificial Sequence: Synthetic polypeptide; note = VH of XENP019095
EVQLVESGGGLVKPGGSLRLSCAASGFTFSNYWMNWVRQAPGKGLEWVGEIRWYSNNYATHYAEPVKGRFTISRDDSKSTVYLQMNSLKTEDTAVYYCTRYYGNYGGYFDVWGAGTLVTVSS

SEQ ID NO: 10285 - protein, 107 aa, synthetic construct; identical to SEQ ID NO: 6247
  source 1..107: note = Description of Artificial Sequence: Synthetic polypeptide; note = VL of XENP019095

SEQ ID NO: 10286 - protein, 5 aa, synthetic construct
  source 1..5: note = Description of Artificial Sequence: Synthetic peptide; note = XENP019095 vhCDR1
NYWMN

SEQ ID NO: 10287 - protein, 19 aa, synthetic construct
  source 1..19: note = Description of Artificial Sequence: Synthetic peptide; note = XENP019095 vhCDR2
EIRWYSNNYATHYAEPVKG

SEQ ID NO: 10288 - protein, 11 aa, synthetic construct
  source 1..11: note = Description of Artificial Sequence: Synthetic peptide; note = XENP019095 vhCDR3
YYGNYGGYFDV

SEQ ID NO: 10289 - protein, 11 aa, synthetic construct
  source 1..11: note = Description of Artificial Sequence: Synthetic peptide; note = XENP019095 vlCDR1
RASQSVSNDVA

SEQ ID NO: 10290 - protein, 7 aa, synthetic construct
  source 1..7: note = Description of Artificial Sequence: Synthetic peptide; note = XENP019095 vlCDR2
YASHRYT

SEQ ID NO: 10291 - protein, 9 aa, synthetic construct
  source 1..9: note = Description of Artificial Sequence: Synthetic peptide; note = XENP019095 vlCDR3
QQDYSSPRT

SEQ ID NO: 10292 - protein, 249 aa, synthetic construct
  source 1..249: note = Description of Artificial Sequence: Synthetic polypeptide; note = XENP019096 1G6_H1.271_L1_scFv(GKPGS)4
EVQLVESGGGLVKPGGSLRLSCAASGFTFSNYWMNWVRQAPGKGLEWVGEIRLYSNNYATHYAEPVKGRFTISRDDSKSTLYLQMNSLKTEDTAVYYCTRYYGNYGGYFDVWGAGTLVTVSSGKPGSGKPGSGKPGSGKPGSSIVMTQSPATLSVSPGERATLSCRASQSVSNDVAWYQQKPGQSPRLLINYASHRYTGVPDRFTGSGYGTEFTLTISSLQSEDFAVYFCQQDYSSPRTFGGGTKVEIK

SEQ ID NO: 10293 - protein, 122 aa, synthetic construct
  source 1..122: note = Description of Artificial Sequence: Synthetic polypeptide; note = VH of XENP019096
EVQLVESGGGLVKPGGSLRLSCAASGFTFSNYWMNWVRQAPGKGLEWVGEIRLYSNNYATHYAEPVKGRFTISRDDSKSTLYLQMNSLKTEDTAVYYCTRYYGNYGGYFDVWGAGTLVTVSS

SEQ ID NO: 10294 - protein, 107 aa, synthetic construct; identical to SEQ ID NO: 6247
  source 1..107: note = Description of Artificial Sequence: Synthetic polypeptide; note = VL of XENP019096

SEQ ID NO: 10295 - protein, 5 aa, synthetic construct
  source 1..5: note = Description of Artificial Sequence: Synthetic peptide; note = XENP019096 vhCDR1
NYWMN

SEQ ID NO: 10296 - protein, 19 aa, synthetic construct
  source 1..19: note = Description of Artificial Sequence: Synthetic peptide; note = XENP019096 vhCDR2
EIRLYSNNYATHYAEPVKG

SEQ ID NO: 10297 - protein, 11 aa, synthetic construct
  source 1..11: note = Description of Artificial Sequence: Synthetic peptide; note = XENP019096 vhCDR3
YYGNYGGYFDV

SEQ ID NO: 10298 - protein, 11 aa, synthetic construct
  source 1..11: note = Description of Artificial Sequence: Synthetic peptide; note = XENP019096 vlCDR1
RASQSVSNDVA

SEQ ID NO: 10299 - protein, 7 aa, synthetic construct
  source 1..7: note = Description of Artificial Sequence: Synthetic peptide; note = XENP019096 vlCDR2
YASHRYT

SEQ ID NO: 10300 - protein, 9 aa, synthetic construct
  source 1..9: note = Description of Artificial Sequence: Synthetic peptide; note = XENP019096 vlCDR3
QQDYSSPRT

SEQ ID NO: 10301 - protein, 249 aa, synthetic construct
  source 1..249: note = Description of Artificial Sequence: Synthetic polypeptide; note = XENP019101 1G6_H1.272_L1_scFv(GKPGS)4
EVQLVESGGGLVKPGGSLRLSCAASGFTFSNFWMNWVRQAPGKGLEWVGEIRLYSNNYATHYAEPVKGRFTISRDDSKSTLYLQMNSLKTEDTAVYYCTRYYGNYGGYFDVWGAGTLVTVSSGKPGSGKPGSGKPGSGKPGSSIVMTQSPATLSVSPGERATLSCRASQSVSNDVAWYQQKPGQSPRLLINYASHRYTGVPDRFTGSGYGTEFTLTISSLQSEDFAVYFCQQDYSSPRTFGGGTKVEIK

SEQ ID NO: 10302 - protein, 122 aa, synthetic construct
  source 1..122: note = Description of Artificial Sequence: Synthetic polypeptide; note = VH of XENP019101
EVQLVESGGGLVKPGGSLRLSCAASGFTFSNFWMNWVRQAPGKGLEWVGEIRLYSNNYATHYAEPVKGRFTISRDDSKSTLYLQMNSLKTEDTAVYYCTRYYGNYGGYFDVWGAGTLVTVSS

SEQ ID NO: 10303 - protein, 107 aa, synthetic construct; identical to SEQ ID NO: 6247
  source 1..107: note = Description of Artificial Sequence: Synthetic polypeptide; note = VL of XENP019101

SEQ ID NO: 10304 - protein, 5 aa, synthetic construct
  source 1..5: note = Description of Artificial Sequence: Synthetic peptide; note = XENP019101 vhCDR1
NFWMN

SEQ ID NO: 10305 - protein, 19 aa, synthetic construct
  source 1..19: note = Description of Artificial Sequence: Synthetic peptide; note = XENP019101 vhCDR2
EIRLYSNNYATHYAEPVKG

SEQ ID NO: 10306 - protein, 11 aa, synthetic construct
  source 1..11: note = Description of Artificial Sequence: Synthetic peptide; note = XENP019101 vhCDR3
YYGNYGGYFDV

SEQ ID NO: 10307 - protein, 11 aa, synthetic construct
  source 1..11: note = Description of Artificial Sequence: Synthetic peptide; note = XENP019101 vlCDR1
RASQSVSNDVA

SEQ ID NO: 10308 - protein, 7 aa, synthetic construct
  source 1..7: note = Description of Artificial Sequence: Synthetic peptide; note = XENP019101 vlCDR2
YASHRYT

SEQ ID NO: 10309 - protein, 9 aa, synthetic construct
  source 1..9: note = Description of Artificial Sequence: Synthetic peptide; note = XENP019101 vlCDR3
QQDYSSPRT

SEQ ID NO: 10310 - protein, 249 aa, synthetic construct
  source 1..249: note = Description of Artificial Sequence: Synthetic polypeptide; note = XENP019102 1G6_H1.273_L1_scFv(GKPGS)4
EVQLVESGGGLVKPGGSLRLSCAASGFTFSNFWMNWVRQAPGKGLEWVGEIRWKSNNYATHYAEPVKGRFTISRDDSKSTLYLQMNSLKTEDTAVYYCTRYYGNYGGYFDVWGAGTLVTVSSGKPGSGKPGSGKPGSGKPGSSIVMTQSPATLSVSPGERATLSCRASQSVSNDVAWYQQKPGQSPRLLINYASHRYTGVPDRFTGSGYGTEFTLTISSLQSEDFAVYFCQQDYSSPRTFGGGTKVEIK

SEQ ID NO: 10311 - protein, 122 aa, synthetic construct
  source 1..122: note = Description of Artificial Sequence: Synthetic polypeptide; note = VH of XENP019102
EVQLVESGGGLVKPGGSLRLSCAASGFTFSNFWMNWVRQAPGKGLEWVGEIRWKSNNYATHYAEPVKGRFTISRDDSKSTLYLQMNSLKTEDTAVYYCTRYYGNYGGYFDVWGAGTLVTVSS

SEQ ID NO: 10312 - protein, 107 aa, synthetic construct; identical to SEQ ID NO: 6247
  source 1..107: note = Description of Artificial Sequence: Synthetic polypeptide; note = VL of XENP019102

SEQ ID NO: 10313 - protein, 5 aa, synthetic construct
  source 1..5: note = Description of Artificial Sequence: Synthetic peptide; note = XENP019102 vhCDR1
NFWMN

SEQ ID NO: 10314 - protein, 19 aa, synthetic construct
  source 1..19: note = Description of Artificial Sequence: Synthetic peptide; note = XENP019102 vhCDR2
EIRWKSNNYATHYAEPVKG

SEQ ID NO: 10315 - protein, 11 aa, synthetic construct
  source 1..11: note = Description of Artificial Sequence: Synthetic peptide; note = XENP019102 vhCDR3
YYGNYGGYFDV

SEQ ID NO: 10316 - protein, 11 aa, synthetic construct
  source 1..11: note = Description of Artificial Sequence: Synthetic peptide; note = XENP019102 vlCDR1
RASQSVSNDVA

SEQ ID NO: 10317 - protein, 7 aa, synthetic construct
  source 1..7: note = Description of Artificial Sequence: Synthetic peptide; note = XENP019102 vlCDR2
YASHRYT

SEQ ID NO: 10318 - protein, 9 aa, synthetic construct
  source 1..9: note = Description of Artificial Sequence: Synthetic peptide; note = XENP019102 vlCDR3
QQDYSSPRT

SEQ ID NO: 10319 - protein, 249 aa, synthetic construct
  source 1..249: note = Description of Artificial Sequence: Synthetic polypeptide; note = XENP019103 1G6_H1.274_L1_scFv(GKPGS)4
EVQLVESGGGLVKPGGSLRLSCAASGFTFSNFWMNWVRQAPGKGLEWVGEIRLKKNNYATHYAEPVKGRFTISRDDSKSTLYLQMNSLKTEDTAVYYCTRYYGNYGGYFDVWGAGTLVTVSSGKPGSGKPGSGKPGSGKPGSSIVMTQSPATLSVSPGERATLSCRASQSVSNDVAWYQQKPGQSPRLLINYASHRYTGVPDRFTGSGYGTEFTLTISSLQSEDFAVYFCQQDYSSPRTFGGGTKVEIK

SEQ ID NO: 10320 - protein, 122 aa, synthetic construct
  source 1..122: note = Description of Artificial Sequence: Synthetic polypeptide; note = VH of XENP019103
EVQLVESGGGLVKPGGSLRLSCAASGFTFSNFWMNWVRQAPGKGLEWVGEIRLKKNNYATHYAEPVKGRFTISRDDSKSTLYLQMNSLKTEDTAVYYCTRYYGNYGGYFDVWGAGTLVTVSS

SEQ ID NO: 10321 - protein, 107 aa, synthetic construct; identical to SEQ ID NO: 6247
  source 1..107: note = Description of Artificial Sequence: Synthetic polypeptide; note = VL of XENP019103

SEQ ID NO: 10322 - protein, 5 aa, synthetic construct
  source 1..5: note = Description of Artificial Sequence: Synthetic peptide; note = XENP019103 vhCDR1
NFWMN

SEQ ID NO: 10323 - protein, 19 aa, synthetic construct
  source 1..19: note = Description of Artificial Sequence: Synthetic peptide; note = XENP019103 vhCDR2
EIRLKKNNYATHYAEPVKG

SEQ ID NO: 10324 - protein, 11 aa, synthetic construct
  source 1..11: note = Description of Artificial Sequence: Synthetic peptide; note = XENP019103 vhCDR3
YYGNYGGYFDV

SEQ ID NO: 10325 - protein, 11 aa, synthetic construct
  source 1..11: note = Description of Artificial Sequence: Synthetic peptide; note = XENP019103 vlCDR1
RASQSVSNDVA

SEQ ID NO: 10326 - protein, 7 aa, synthetic construct
  source 1..7: note = Description of Artificial Sequence: Synthetic peptide; note = XENP019103 vlCDR2
YASHRYT

SEQ ID NO: 10327 - protein, 9 aa, synthetic construct
  source 1..9: note = Description of Artificial Sequence: Synthetic peptide; note = XENP019103 vlCDR3
QQDYSSPRT

SEQ ID NO: 10328 - protein, 249 aa, synthetic construct
  source 1..249: note = Description of Artificial Sequence: Synthetic polypeptide; note = XENP019104 1G6_H1.275_L1_scFv(GKPGS)4
EVQLVESGGGLVKPGGSLRLSCAASGFTFSNFWMNWVRQAPGKGLEWVGEIRWYSNNYATHYAEPVKGRFTISRDDSKSTLYLQMNSLKTEDTAVYYCTRYYGNYGGYFDVWGAGTLVTVSSGKPGSGKPGSGKPGSGKPGSSIVMTQSPATLSVSPGERATLSCRASQSVSNDVAWYQQKPGQSPRLLINYASHRYTGVPDRFTGSGYGTEFTLTISSLQSEDFAVYFCQQDYSSPRTFGGGTKVEIK

SEQ ID NO: 10329 - protein, 122 aa, synthetic construct
  source 1..122: note = Description of Artificial Sequence: Synthetic polypeptide; note = VH of XENP019104
EVQLVESGGGLVKPGGSLRLSCAASGFTFSNFWMNWVRQAPGKGLEWVGEIRWYSNNYATHYAEPVKGRFTISRDDSKSTLYLQMNSLKTEDTAVYYCTRYYGNYGGYFDVWGAGTLVTVSS

SEQ ID NO: 10330 - protein, 107 aa, synthetic construct; identical to SEQ ID NO: 6247
  source 1..107: note = Description of Artificial Sequence: Synthetic polypeptide; note = VL of XENP019104

SEQ ID NO: 10331 - protein, 5 aa, synthetic construct
  source 1..5: note = Description of Artificial Sequence: Synthetic peptide; note = XENP019104 vhCDR1
NFWMN

SEQ ID NO: 10332 - protein, 19 aa, synthetic construct
  source 1..19: note = Description of Artificial Sequence: Synthetic peptide; note = XENP019104 vhCDR2
EIRWYSNNYATHYAEPVKG

SEQ ID NO: 10333 - protein, 11 aa, synthetic construct
  source 1..11: note = Description of Artificial Sequence: Synthetic peptide; note = XENP019104 vhCDR3
YYGNYGGYFDV

SEQ ID NO: 10334 - protein, 11 aa, synthetic construct
  source 1..11: note = Description of Artificial Sequence: Synthetic peptide; note = XENP019104 vlCDR1
RASQSVSNDVA

SEQ ID NO: 10335 - protein, 7 aa, synthetic construct
  source 1..7: note = Description of Artificial Sequence: Synthetic peptide; note = XENP019104 vlCDR2
YASHRYT

SEQ ID NO: 10336 - protein, 9 aa, synthetic construct
  source 1..9: note = Description of Artificial Sequence: Synthetic peptide; note = XENP019104 vlCDR3
QQDYSSPRT

SEQ ID NO: 10337 - protein, 249 aa, synthetic construct
  source 1..249: note = Description of Artificial Sequence: Synthetic polypeptide; note = XENP019105 1G6_H1.276_L1_scFv(GKPGS)4
EVQLVESGGGLVQPGGSLKLSCAASGFTFSNYWMNWVRQAPGKGLEWVGEIRLKSNNYATHYAASVKGRFTISRDDSKSTLYLQMNSLKTEDTAVYYCTRYYGNYGGYFDVWGQGTLVTVSSGKPGSGKPGSGKPGSGKPGSSIVMTQSPATLSVSPGERATLSCRASQSVSNDVAWYQQKPGQSPRLLINYASHRYTGVPDRFTGSGYGTEFTLTISSLQSEDFAVYFCQQDYSSPRTFGGGTKVEIK

SEQ ID NO: 10338 - protein, 122 aa, synthetic construct
  source 1..122: note = Description of Artificial Sequence: Synthetic polypeptide; note = VH of XENP019105
EVQLVESGGGLVQPGGSLKLSCAASGFTFSNYWMNWVRQAPGKGLEWVGEIRLKSNNYATHYAASVKGRFTISRDDSKSTLYLQMNSLKTEDTAVYYCTRYYGNYGGYFDVWGQGTLVTVSS

SEQ ID NO: 10339 - protein, 107 aa, synthetic construct; identical to SEQ ID NO: 6247
  source 1..107: note = Description of Artificial Sequence: Synthetic polypeptide; note = VL of XENP019105

SEQ ID NO: 10340 - protein, 5 aa, synthetic construct
  source 1..5: note = Description of Artificial Sequence: Synthetic peptide; note = XENP019105 vhCDR1
NYWMN

SEQ ID NO: 10341 - protein, 19 aa, synthetic construct
  source 1..19: note = Description of Artificial Sequence: Synthetic peptide; note = XENP019105 vhCDR2
EIRLKSNNYATHYAASVKG

SEQ ID NO: 10342 - protein, 11 aa, synthetic construct
  source 1..11: note = Description of Artificial Sequence: Synthetic peptide; note = XENP019105 vhCDR3
YYGNYGGYFDV

SEQ ID NO: 10343 - protein, 11 aa, synthetic construct
  source 1..11: note = Description of Artificial Sequence: Synthetic peptide; note = XENP019105 vlCDR1
RASQSVSNDVA

SEQ ID NO: 10344 - protein, 7 aa, synthetic construct
  source 1..7: note = Description of Artificial Sequence: Synthetic peptide; note = XENP019105 vlCDR2
YASHRYT

SEQ ID NO: 10345 - protein, 9 aa, synthetic construct
  source 1..9: note = Description of Artificial Sequence: Synthetic peptide; note = XENP019105 vlCDR3
QQDYSSPRT

SEQ ID NO: 10346 - protein, 249 aa, synthetic construct
  source 1..249: note = Description of Artificial Sequence: Synthetic polypeptide; note = XENP019106 1G6_H1.277_L1_scFv(GKPGS)4
EVQLVESGGGLVKPGGSLKLSCAASGFTFSNYWMNWVRQAPGKGLEWVGEIRLKSNNYATHYADSVKGRFTISRDDSKSTLYLQMNSLKTEDTAVYYCTRYYGNYGGYFDVWGQGTLVTVSSGKPGSGKPGSGKPGSGKPGSSIVMTQSPATLSVSPGERATLSCRASQSVSNDVAWYQQKPGQSPRLLINYASHRYTGVPDRFTGSGYGTEFTLTISSLQSEDFAVYFCQQDYSSPRTFGGGTKVEIK

SEQ ID NO: 10347 - protein, 122 aa, synthetic construct
  source 1..122: note = Description of Artificial Sequence: Synthetic polypeptide; note = VH of XENP019106
EVQLVESGGGLVKPGGSLKLSCAASGFTFSNYWMNWVRQAPGKGLEWVGEIRLKSNNYATHYADSVKGRFTISRDDSKSTLYLQMNSLKTEDTAVYYCTRYYGNYGGYFDVWGQGTLVTVSS

SEQ ID NO: 10348 - protein, 107 aa, synthetic construct; identical to SEQ ID NO: 6247
  source 1..107: note = Description of Artificial Sequence: Synthetic polypeptide; note = VL of XENP019106

SEQ ID NO: 10349 - protein, 5 aa, synthetic construct
  source 1..5: note = Description of Artificial Sequence: Synthetic peptide; note = XENP019106 vhCDR1
NYWMN

SEQ ID NO: 10350 - protein, 19 aa, synthetic construct
  source 1..19: note = Description of Artificial Sequence: Synthetic peptide; note = XENP019106 vhCDR2
EIRLKSNNYATHYADSVKG

SEQ ID NO: 10351 - protein, 11 aa, synthetic construct
  source 1..11: note = Description of Artificial Sequence: Synthetic peptide; note = XENP019106 vhCDR3
YYGNYGGYFDV

SEQ ID NO: 10352 - protein, 11 aa, synthetic construct
  source 1..11: note = Description of Artificial Sequence: Synthetic peptide; note = XENP019106 vlCDR1
RASQSVSNDVA

SEQ ID NO: 10353 - protein, 7 aa, synthetic construct
  source 1..7: note = Description of Artificial Sequence: Synthetic peptide; note = XENP019106 vlCDR2
YASHRYT

SEQ ID NO: 10354 - protein, 9 aa, synthetic construct
  source 1..9: note = Description of Artificial Sequence: Synthetic peptide; note = XENP019106 vlCDR3
QQDYSSPRT

SEQ ID NO: 10355 - protein, 249 aa, synthetic construct
  source 1..249: note = Description of Artificial Sequence: Synthetic polypeptide; note = XENP019107 1G6_H1_L1.146_scFv(GKPGS)4
EVQLVESGGGLVKPGGSLRLSCAASGFTFSNYWMNWVRQAPGKGLEWVGEIRLKSNNYATHYAEPVKGRFTISRDDSKSTVYLQMNSLKTEDTAVYYCTRYYGNYGGYFDVWGAGTLVTVSSGKPGSGKPGSGKPGSGKPGSSIVMTQSPATLAVSPGERATLSCRASQSVSNDVAWYQQKPGQSPRLLINYASHRYTGVPDRFTGSGYGTEFTLTISSLQSEDFAVYFCQQDYSSPRTFGGGTKVEIK

SEQ ID NO: 10356 - protein, 122 aa, synthetic construct; identical to SEQ ID NO: 6246
  source 1..122: note = Description of Artificial Sequence: Synthetic polypeptide; note = VH of XENP019107

SEQ ID NO: 10357 - protein, 107 aa, synthetic construct
  source 1..107: note = Description of Artificial Sequence: Synthetic polypeptide; note = VL of XENP019107
SIVMTQSPATLAVSPGERATLSCRASQSVSNDVAWYQQKPGQSPRLLINYASHRYTGVPDRFTGSGYGTEFTLTISSLQSEDFAVYFCQQDYSSPRTFGGGTKVEIK

SEQ ID NO: 10358 - protein, 5 aa, synthetic construct
  source 1..5: note = Description of Artificial Sequence: Synthetic peptide; note = XENP019107 vhCDR1
NYWMN

SEQ ID NO: 10359 - protein, 19 aa, synthetic construct
  source 1..19: note = Description of Artificial Sequence: Synthetic peptide; note = XENP019107 vhCDR2
EIRLKSNNYATHYAEPVKG

SEQ ID NO: 10360 - protein, 11 aa, synthetic construct
  source 1..11: note = Description of Artificial Sequence: Synthetic peptide; note = XENP019107 vhCDR3
YYGNYGGYFDV

SEQ ID NO: 10361 - protein, 11 aa, synthetic construct
  source 1..11: note = Description of Artificial Sequence: Synthetic peptide; note = XENP019107 vlCDR1
RASQSVSNDVA

SEQ ID NO: 10362 - protein, 7 aa, synthetic construct
  source 1..7: note = Description of Artificial Sequence: Synthetic peptide; note = XENP019107 vlCDR2
YASHRYT

SEQ ID NO: 10363 - protein, 9 aa, synthetic construct
  source 1..9: note = Description of Artificial Sequence: Synthetic peptide; note = XENP019107 vlCDR3
QQDYSSPRT

SEQ ID NO: 10364 - protein, 249 aa, synthetic construct
  source 1..249: note = Description of Artificial Sequence: Synthetic polypeptide; note = XENP019108 1G6_H1_L1.147_scFv(GKPGS)4
EVQLVESGGGLVKPGGSLRLSCAASGFTFSNYWMNWVRQAPGKGLEWVGEIRLKSNNYATHYAEPVKGRFTISRDDSKSTVYLQMNSLKTEDTAVYYCTRYYGNYGGYFDVWGAGTLVTVSSGKPGSGKPGSGKPGSGKPGSSIVMTQSPATLPVSPGERATLSCRASQSVSNDVAWYQQKPGQSPRLLINYASHRYTGVPDRFTGSGYGTEFTLTISSLQSEDFAVYFCQQDYSSPRTFGGGTKVEIK

SEQ ID NO: 10365 - protein, 122 aa, synthetic construct; identical to SEQ ID NO: 6246
  source 1..122: note = Description of Artificial Sequence: Synthetic polypeptide; note = VH of XENP019108

SEQ ID NO: 10366 - protein, 107 aa, synthetic construct
  source 1..107: note = Description of Artificial Sequence: Synthetic polypeptide; note = VL of XENP019108
SIVMTQSPATLPVSPGERATLSCRASQSVSNDVAWYQQKPGQSPRLLINYASHRYTGVPDRFTGSGYGTEFTLTISSLQSEDFAVYFCQQDYSSPRTFGGGTKVEIK

SEQ ID NO: 10367 - protein, 5 aa, synthetic construct
  source 1..5: note = Description of Artificial Sequence: Synthetic peptide; note = XENP019108 vhCDR1
NYWMN

SEQ ID NO: 10368 - protein, 19 aa, synthetic construct
  source 1..19: note = Description of Artificial Sequence: Synthetic peptide; note = XENP019108 vhCDR2
EIRLKSNNYATHYAEPVKG

SEQ ID NO: 10369 - protein, 11 aa, synthetic construct
  source 1..11: note = Description of Artificial Sequence: Synthetic peptide; note = XENP019108 vhCDR3
YYGNYGGYFDV

SEQ ID NO: 10370 - protein, 11 aa, synthetic construct
  source 1..11: note = Description of Artificial Sequence: Synthetic peptide; note = XENP019108 vlCDR1
RASQSVSNDVA

SEQ ID NO: 10371 - protein, 7 aa, synthetic construct
  source 1..7: note = Description of Artificial Sequence: Synthetic peptide; note = XENP019108 vlCDR2
YASHRYT

SEQ ID NO: 10372 - protein, 9 aa, synthetic construct
  source 1..9: note = Description of Artificial Sequence: Synthetic peptide; note = XENP019108 vlCDR3
QQDYSSPRT

SEQ ID NO: 10373 - protein, 249 aa, synthetic construct
  source 1..249: note = Description of Artificial Sequence: Synthetic polypeptide; note = XENP019109 1G6_H1_L1.148_scFv(GKPGS)4
EVQLVESGGGLVKPGGSLRLSCAASGFTFSNYWMNWVRQAPGKGLEWVGEIRLKSNNYATHYAEPVKGRFTISRDDSKSTVYLQMNSLKTEDTAVYYCTRYYGNYGGYFDVWGAGTLVTVSSGKPGSGKPGSGKPGSGKPGSSIVMTQSPATLSASPGERATLSCRASQSVSNDVAWYQQKPGQSPRLLINYASHRYTGVPDRFTGSGYGTEFTLTISSLQSEDFAVYFCQQDYSSPRTFGGGTKVEIK

SEQ ID NO: 10374 - protein, 122 aa, synthetic construct; identical to SEQ ID NO: 6246
  source 1..122: note = Description of Artificial Sequence: Synthetic polypeptide; note = VH of XENP019109

SEQ ID NO: 10375 - protein, 107 aa, synthetic construct
  source 1..107: note = Description of Artificial Sequence: Synthetic polypeptide; note = VL of XENP019109
SIVMTQSPATLSASPGERATLSCRASQSVSNDVAWYQQKPGQSPRLLINYASHRYTGVPDRFTGSGYGTEFTLTISSLQSEDFAVYFCQQDYSSPRTFGGGTKVEIK

SEQ ID NO: 10376 - protein, 5 aa, synthetic construct
  source 1..5: note = Description of Artificial Sequence: Synthetic peptide; note = XENP019109 vhCDR1
NYWMN

SEQ ID NO: 10377 - protein, 19 aa, synthetic construct
  source 1..19: note = Description of Artificial Sequence: Synthetic peptide; note = XENP019109 vhCDR2
EIRLKSNNYATHYAEPVKG

SEQ ID NO: 10378 - protein, 11 aa, synthetic construct
  source 1..11: note = Description of Artificial Sequence: Synthetic peptide; note = XENP019109 vhCDR3
YYGNYGGYFDV

SEQ ID NO: 10379 - protein, 11 aa, synthetic construct
  source 1..11: note = Description of Artificial Sequence: Synthetic peptide; note = XENP019109 vlCDR1
RASQSVSNDVA

SEQ ID NO: 10380 - protein, 7 aa, synthetic construct
  source 1..7: note = Description of Artificial Sequence: Synthetic peptide; note = XENP019109 vlCDR2
YASHRYT

SEQ ID NO: 10381 - protein, 9 aa, synthetic construct
  source 1..9: note = Description of Artificial Sequence: Synthetic peptide; note = XENP019109 vlCDR3
QQDYSSPRT

SEQ ID NO: 10382 - protein, 249 aa, synthetic construct
  source 1..249: note = Description of Artificial Sequence: Synthetic polypeptide; note = XENP019110 1G6_H1_L1.149_scFv(GKPGS)4
EVQLVESGGGLVKPGGSLRLSCAASGFTFSNYWMNWVRQAPGKGLEWVGEIRLKSNNYATHYAEPVKGRFTISRDDSKSTVYLQMNSLKTEDTAVYYCTRYYGNYGGYFDVWGAGTLVTVSSGKPGSGKPGSGKPGSGKPGSSIVMTQSPATLSVSPGERASLSCRASQSVSNDVAWYQQKPGQSPRLLINYASHRYTGVPDRFTGSGYGTEFTLTISSLQSEDFAVYFCQQDYSSPRTFGGGTKVEIK

SEQ ID NO: 10383 - protein, 122 aa, synthetic construct; identical to SEQ ID NO: 6246
  source 1..122: note = Description of Artificial Sequence: Synthetic polypeptide; note = VH of XENP019110

SEQ ID NO: 10384 - protein, 107 aa, synthetic construct
  source 1..107: note = Description of Artificial Sequence: Synthetic polypeptide; note = VL of XENP019110
SIVMTQSPATLSVSPGERASLSCRASQSVSNDVAWYQQKPGQSPRLLINYASHRYTGVPDRFTGSGYGTEFTLTISSLQSEDFAVYFCQQDYSSPRTFGGGTKVEIK

SEQ ID NO: 10385 - protein, 5 aa, synthetic construct
  source 1..5: note = Description of Artificial Sequence: Synthetic peptide; note = XENP019110 vhCDR1
NYWMN

SEQ ID NO: 10386 - protein, 19 aa, synthetic construct
  source 1..19: note = Description of Artificial Sequence: Synthetic peptide; note = XENP019110 vhCDR2
EIRLKSNNYATHYAEPVKG

SEQ ID NO: 10387 - protein, 11 aa, synthetic construct
  source 1..11: note = Description of Artificial Sequence: Synthetic peptide; note = XENP019110 vhCDR3
YYGNYGGYFDV

SEQ ID NO: 10388 - protein, 11 aa, synthetic construct
  source 1..11: note = Description of Artificial Sequence: Synthetic peptide; note = XENP019110 vlCDR1
RASQSVSNDVA

SEQ ID NO: 10389 - protein, 7 aa, synthetic construct
  source 1..7: note = Description of Artificial Sequence: Synthetic peptide; note = XENP019110 vlCDR2
YASHRYT

SEQ ID NO: 10390 - protein, 9 aa, synthetic construct
  source 1..9: note = Description of Artificial Sequence: Synthetic peptide; note = XENP019110 vlCDR3
QQDYSSPRT

SEQ ID NO: 10391 - protein, 249 aa, synthetic construct
  source 1..249: note = Description of Artificial Sequence: Synthetic polypeptide; note = XENP019111 1G6_H1_L1.150_scFv(GKPGS)4
EVQLVESGGGLVKPGGSLRLSCAASGFTFSNYWMNWVRQAPGKGLEWVGEIRLKSNNYATHYAEPVKGRFTISRDDSKSTVYLQMNSLKTEDTAVYYCTRYYGNYGGYFDVWGAGTLVTVSSGKPGSGKPGSGKPGSGKPGSSIVMTQSPATLSVSPGERATLKCRASQSVSNDVAWYQQKPGQSPRLLINYASHRYTGVPDRFTGSGYGTEFTLTISSLQSEDFAVYFCQQDYSSPRTFGGGTKVEIK

SEQ ID NO: 10392 - protein, 122 aa, synthetic construct; identical to SEQ ID NO: 6246
  source 1..122: note = Description of Artificial Sequence: Synthetic polypeptide; note = VH of XENP019111

SEQ ID NO: 10393 - protein, 107 aa, synthetic construct
  source 1..107: note = Description of Artificial Sequence: Synthetic polypeptide; note = VL of XENP019111
SIVMTQSPATLSVSPGERATLKCRASQSVSNDVAWYQQKPGQSPRLLINYASHRYTGVPDRFTGSGYGTEFTLTISSLQSEDFAVYFCQQDYSSPRTFGGGTKVEIK

SEQ ID NO: 10394 - protein, 5 aa, synthetic construct
  source 1..5: note = Description of Artificial Sequence: Synthetic peptide; note = XENP019111 vhCDR1
NYWMN

SEQ ID NO: 10395 - protein, 19 aa, synthetic construct
  source 1..19: note = Description of Artificial Sequence: Synthetic peptide; note = XENP019111 vhCDR2
EIRLKSNNYATHYAEPVKG

SEQ ID NO: 10396 - protein, 11 aa, synthetic construct
  source 1..11: note = Description of Artificial Sequence: Synthetic peptide; note = XENP019111 vhCDR3
YYGNYGGYFDV

SEQ ID NO: 10397 - protein, 11 aa, synthetic construct
  source 1..11: note = Description of Artificial Sequence: Synthetic peptide; note = XENP019111 vlCDR1
RASQSVSNDVA

SEQ ID NO: 10398 - protein, 7 aa, synthetic construct
  source 1..7: note = Description of Artificial Sequence: Synthetic peptide; note = XENP019111 vlCDR2
YASHRYT

SEQ ID NO: 10399 - protein, 9 aa, synthetic construct
  source 1..9: note = Description of Artificial Sequence: Synthetic peptide; note = XENP019111 vlCDR3
QQDYSSPRT

SEQ ID NO: 10400 - protein, 249 aa, synthetic construct
  source 1..249: note = Description of Artificial Sequence: Synthetic polypeptide; note = XENP019112 1G6_H1_L1.151_scFv(GKPGS)4
EVQLVESGGGLVKPGGSLRLSCAASGFTFSNYWMNWVRQAPGKGLEWVGEIRLKSNNYATHYAEPVKGRFTISRDDSKSTVYLQMNSLKTEDTAVYYCTRYYGNYGGYFDVWGAGTLVTVSSGKPGSGKPGSGKPGSGKPGSSIVMTQSPATLSVSPGERATLSCRASQSVSNDVAWYQQKPEQSPRLLINYASHRYTGVPDRFTGSGYGTEFTLTISSLQSEDFAVYFCQQDYSSPRTFGGGTKVEIK

SEQ ID NO: 10401 - protein, 122 aa, synthetic construct; identical to SEQ ID NO: 6246
  source 1..122: note = Description of Artificial Sequence: Synthetic polypeptide; note = VH of XENP019112

SEQ ID NO: 10402 - protein, 107 aa, synthetic construct
  source 1..107: note = Description of Artificial Sequence: Synthetic polypeptide; note = VL of XENP019112
SIVMTQSPATLSVSPGERATLSCRASQSVSNDVAWYQQKPEQSPRLLINYASHRYTGVPDRFTGSGYGTEFTLTISSLQSEDFAVYFCQQDYSSPRTFGGGTKVEIK

SEQ ID NO: 10403 - protein, 5 aa, synthetic construct
  source 1..5: note = Description of Artificial Sequence: Synthetic peptide; note = XENP019112 vhCDR1
NYWMN

SEQ ID NO: 10404 - protein, 19 aa, synthetic construct
  source 1..19: note = Description of Artificial Sequence: Synthetic peptide; note = XENP019112 vhCDR2
EIRLKSNNYATHYAEPVKG

SEQ ID NO: 10405 - protein, 11 aa, synthetic construct
  source 1..11: note = Description of Artificial Sequence: Synthetic peptide; note = XENP019112 vhCDR3
YYGNYGGYFDV

SEQ ID NO: 10406 - protein, 11 aa, synthetic construct
  source 1..11: note = Description of Artificial Sequence: Synthetic peptide; note = XENP019112 vlCDR1
RASQSVSNDVA

SEQ ID NO: 10407 - protein, 7 aa, synthetic construct
  source 1..7: note = Description of Artificial Sequence: Synthetic peptide; note = XENP019112 vlCDR2
YASHRYT

SEQ ID NO: 10408 - protein, 9 aa, synthetic construct
  source 1..9: note = Description of Artificial Sequence: Synthetic peptide; note = XENP019112 vlCDR3
QQDYSSPRT

SEQ ID NO: 10409 - protein, 249 aa, synthetic construct
  source 1..249: note = Description of Artificial Sequence: Synthetic polypeptide; note = XENP019113 1G6_H1_L1.152_scFv(GKPGS)4
EVQLVESGGGLVKPGGSLRLSCAASGFTFSNYWMNWVRQAPGKGLEWVGEIRLKSNNYATHYAEPVKGRFTISRDDSKSTVYLQMNSLKTEDTAVYYCTRYYGNYGGYFDVWGAGTLVTVSSGKPGSGKPGSGKPGSGKPGSSIVMTQSPATLSVSPGERATLSCRASQSVSNDVAWYQQKPGESPRLLINYASHRYTGVPDRFTGSGYGTEFTLTISSLQSEDFAVYFCQQDYSSPRTFGGGTKVEIK

SEQ ID NO: 10410 - protein, 122 aa, synthetic construct; identical to SEQ ID NO: 6246
  source 1..122: note = Description of Artificial Sequence: Synthetic polypeptide; note = VH of XENP019113

SEQ ID NO: 10411 - protein, 107 aa, synthetic construct
  source 1..107: note = Description of Artificial Sequence: Synthetic polypeptide; note = VL of XENP019113
SIVMTQSPATLSVSPGERATLSCRASQSVSNDVAWYQQKPGESPRLLINYASHRYTGVPDRFTGSGYGTEFTLTISSLQSEDFAVYFCQQDYSSPRTFGGGTKVEIK

SEQ ID NO: 10412 - protein, 5 aa, synthetic construct
  source 1..5: note = Description of Artificial Sequence: Synthetic peptide; note = XENP019113 vhCDR1
NYWMN

SEQ ID NO: 10413 - protein, 19 aa, synthetic construct
  source 1..19: note = Description of Artificial Sequence: Synthetic peptide; note = XENP019113 vhCDR2
EIRLKSNNYATHYAEPVKG

SEQ ID NO: 10414 - protein, 11 aa, synthetic construct
  source 1..11: note = Description of Artificial Sequence: Synthetic peptide; note = XENP019113 vhCDR3
YYGNYGGYFDV

SEQ ID NO: 10415 - protein, 11 aa, synthetic construct
  source 1..11: note = Description of Artificial Sequence: Synthetic peptide; note = XENP019113 vlCDR1
RASQSVSNDVA

SEQ ID NO: 10416 - protein, 7 aa, synthetic construct
  source 1..7: note = Description of Artificial Sequence: Synthetic peptide; note = XENP019113 vlCDR2
YASHRYT

SEQ ID NO: 10417 - protein, 9 aa, synthetic construct
  source 1..9: note = Description of Artificial Sequence: Synthetic peptide; note = XENP019113 vlCDR3
QQDYSSPRT

SEQ ID NO: 10418 - protein, 249 aa, synthetic construct
  source 1..249: note = Description of Artificial Sequence: Synthetic polypeptide; note = XENP019114 1G6_H1_L1.153_scFv(GKPGS)4
EVQLVESGGGLVKPGGSLRLSCAASGFTFSNYWMNWVRQAPGKGLEWVGEIRLKSNNYATHYAEPVKGRFTISRDDSKSTVYLQMNSLKTEDTAVYYCTRYYGNYGGYFDVWGAGTLVTVSSGKPGSGKPGSGKPGSGKPGSSIVMTQSPATLSVSPGERATLSCRASQSVSNDVAWYQQKPGQSPRVLINYASHRYTGVPDRFTGSGYGTEFTLTISSLQSEDFAVYFCQQDYSSPRTFGGGTKVEIK

SEQ ID NO: 10419 - protein, 122 aa, synthetic construct; identical to SEQ ID NO: 6246
  source 1..122: note = Description of Artificial Sequence: Synthetic polypeptide; note = VH of XENP019114

SEQ ID NO: 10420 - protein, 107 aa, synthetic construct
  source 1..107: note = Description of Artificial Sequence: Synthetic polypeptide; note = VL of XENP019114
SIVMTQSPATLSVSPGERATLSCRASQSVSNDVAWYQQKPGQSPRVLINYASHRYTGVPDRFTGSGYGTEFTLTISSLQSEDFAVYFCQQDYSSPRTFGGGTKVEIK

SEQ ID NO: 10421 - protein, 5 aa, synthetic construct
  source 1..5: note = Description of Artificial Sequence: Synthetic peptide; note = XENP019114 vhCDR1
NYWMN

SEQ ID NO: 10422 - protein, 19 aa, synthetic construct
  source 1..19: note = Description of Artificial Sequence: Synthetic peptide; note = XENP019114 vhCDR2
EIRLKSNNYATHYAEPVKG

SEQ ID NO: 10423 - protein, 11 aa, synthetic construct
  source 1..11: note = Description of Artificial Sequence: Synthetic peptide; note = XENP019114 vhCDR3
YYGNYGGYFDV

SEQ ID NO: 10424 - protein, 11 aa, synthetic construct
  source 1..11: note = Description of Artificial Sequence: Synthetic peptide; note = XENP019114 vlCDR1
RASQSVSNDVA

SEQ ID NO: 10425 - protein, 7 aa, synthetic construct
  source 1..7: note = Description of Artificial Sequence: Synthetic peptide; note = XENP019114 vlCDR2
YASHRYT

SEQ ID NO: 10426 - protein, 9 aa, synthetic construct
  source 1..9: note = Description of Artificial Sequence: Synthetic peptide; note = XENP019114 vlCDR3
QQDYSSPRT

SEQ ID NO: 10427 - protein, 249 aa, synthetic construct
  source 1..249: note = Description of Artificial Sequence: Synthetic polypeptide; note = XENP019115 1G6_H1_L1.154_scFv(GKPGS)4
EVQLVESGGGLVKPGGSLRLSCAASGFTFSNYWMNWVRQAPGKGLEWVGEIRLKSNNYATHYAEPVKGRFTISRDDSKSTVYLQMNSLKTEDTAVYYCTRYYGNYGGYFDVWGAGTLVTVSSGKPGSGKPGSGKPGSGKPGSSIVMTQSPATLSVSPGERATLSCRASQSVSNDVAWYQQKPGQSPRLLVNYASHRYTGVPDRFTGSGYGTEFTLTISSLQSEDFAVYFCQQDYSSPRTFGGGTKVEIK

SEQ ID NO: 10428 - protein, 122 aa, synthetic construct; identical to SEQ ID NO: 6246
  source 1..122: note = Description of Artificial Sequence: Synthetic polypeptide; note = VH of XENP019115

SEQ ID NO: 10429 - protein, 107 aa, synthetic construct
  source 1..107: note = Description of Artificial Sequence: Synthetic polypeptide; note = VL of XENP019115
SIVMTQSPATLSVSPGERATLSCRASQSVSNDVAWYQQKPGQSPRLLVNYASHRYTGVPDRFTGSGYGTEFTLTISSLQSEDFAVYFCQQDYSSPRTFGGGTKVEIK

SEQ ID NO: 10430 - protein, 5 aa, synthetic construct
  source 1..5: note = Description of Artificial Sequence: Synthetic peptide; note = XENP019115 vhCDR1
NYWMN

SEQ ID NO: 10431 - protein, 19 aa, synthetic construct
  source 1..19: note = Description of Artificial Sequence: Synthetic peptide; note = XENP019115 vhCDR2
EIRLKSNNYATHYAEPVKG

SEQ ID NO: 10432 - protein, 11 aa, synthetic construct
  source 1..11: note = Description of Artificial Sequence: Synthetic peptide; note = XENP019115 vhCDR3
YYGNYGGYFDV

SEQ ID NO: 10433 - protein, 11 aa, synthetic construct
  source 1..11: note = Description of Artificial Sequence: Synthetic peptide; note = XENP019115 vlCDR1
RASQSVSNDVA

SEQ ID NO: 10434 - protein, 9 aa, synthetic construct
  source 1..9: note = Description of Artificial Sequence: Synthetic peptide; note = XENP019115 vlCDR2
VNYASHRYT

SEQ ID NO: 10435 - protein, 9 aa, synthetic construct
  source 1..9: note = Description of Artificial Sequence: Synthetic peptide; note = XENP019115 vlCDR3
QQDYSSPRT

SEQ ID NO: 10436 - protein, 249 aa, synthetic construct
  source 1..249: note = Description of Artificial Sequence: Synthetic polypeptide; note = XENP019116 1G6_H1_L1.155_scFv(GKPGS)4
EVQLVESGGGLVKPGGSLRLSCAASGFTFSNYWMNWVRQAPGKGLEWVGEIRLKSNNYATHYAEPVKGRFTISRDDSKSTVYLQMNSLKTEDTAVYYCTRYYGNYGGYFDVWGAGTLVTVSSGKPGSGKPGSGKPGSGKPGSSIVMTQSPATLSVSPGERATLSCRASQSVSNDVAWYQQKPGQSPRLLINYANHRYTGVPDRFTGSGYGTEFTLTISSLQSEDFAVYFCQQDYSSPRTFGGGTKVEIK

SEQ ID NO: 10437 - protein, 122 aa, synthetic construct; identical to SEQ ID NO: 6246
  source 1..122: note = Description of Artificial Sequence: Synthetic polypeptide; note = VH of XENP019116

SEQ ID NO: 10438 - protein, 107 aa, synthetic construct
  source 1..107: note = Description of Artificial Sequence: Synthetic polypeptide; note = VL of XENP019116
SIVMTQSPATLSVSPGERATLSCRASQSVSNDVAWYQQKPGQSPRLLINYANHRYTGVPDRFTGSGYGTEFTLTISSLQSEDFAVYFCQQDYSSPRTFGGGTKVEIK

SEQ ID NO: 10439 - protein, 5 aa, synthetic construct
  source 1..5: note = Description of Artificial Sequence: Synthetic peptide; note = XENP019116 vhCDR1
NYWMN

SEQ ID NO: 10440 - protein, 19 aa, synthetic construct
  source 1..19: note = Description of Artificial Sequence: Synthetic peptide; note = XENP019116 vhCDR2
EIRLKSNNYATHYAEPVKG

SEQ ID NO: 10441 - protein, 11 aa, synthetic construct
  source 1..11: note = Description of Artificial Sequence: Synthetic peptide; note = XENP019116 vhCDR3
YYGNYGGYFDV

SEQ ID NO: 10442 - protein, 11 aa, synthetic construct
  source 1..11: note = Description of Artificial Sequence: Synthetic peptide; note = XENP019116 vlCDR1
RASQSVSNDVA

SEQ ID NO: 10443 - protein, 7 aa, synthetic construct
  source 1..7: note = Description of Artificial Sequence: Synthetic peptide; note = XENP019116 vlCDR2
YANHRYT

SEQ ID NO: 10444 - protein, 9 aa, synthetic construct
  source 1..9: note = Description of Artificial Sequence: Synthetic peptide; note = XENP019116 vlCDR3
QQDYSSPRT

SEQ ID NO: 10445 - protein, 249 aa, synthetic construct
  source 1..249: note = Description of Artificial Sequence: Synthetic polypeptide; note = XENP019117 1G6_H1_L1.156_scFv(GKPGS)4
EVQLVESGGGLVKPGGSLRLSCAASGFTFSNYWMNWVRQAPGKGLEWVGEIRLKSNNYATHYAEPVKGRFTISRDDSKSTVYLQMNSLKTEDTAVYYCTRYYGNYGGYFDVWGAGTLVTVSSGKPGSGKPGSGKPGSGKPGSSIVMTQSPATLSVSPGERATLSCRASQSVSNDVAWYQQKPGQSPRLLINYASHRYTGVPDRFTGSGYGTEFTLTISSLESEDFAVYFCQQDYSSPRTFGGGTKVEIK

SEQ ID NO: 10446 - protein, 122 aa, synthetic construct; identical to SEQ ID NO: 6246
  source 1..122: note = Description of Artificial Sequence: Synthetic polypeptide; note = VH of XENP019117

SEQ ID NO: 10447 - protein, 107 aa, synthetic construct
  source 1..107: note = Description of Artificial Sequence: Synthetic polypeptide; note = VL of XENP019117
SIVMTQSPATLSVSPGERATLSCRASQSVSNDVAWYQQKPGQSPRLLINYASHRYTGVPDRFTGSGYGTEFTLTISSLESEDFAVYFCQQDYSSPRTFGGGTKVEIK

SEQ ID NO: 10448 - protein, 5 aa, synthetic construct
  source 1..5: note = Description of Artificial Sequence: Synthetic peptide; note = XENP019117 vhCDR1
NYWMN

SEQ ID NO: 10449 - protein, 19 aa, synthetic construct
  source 1..19: note = Description of Artificial Sequence: Synthetic peptide; note = XENP019117 vhCDR2
EIRLKSNNYATHYAEPVKG

SEQ ID NO: 10450 - protein, 11 aa, synthetic construct
  source 1..11: note = Description of Artificial Sequence: Synthetic peptide; note = XENP019117 vhCDR3
YYGNYGGYFDV

SEQ ID NO: 10451 - protein, 11 aa, synthetic construct
  source 1..11: note = Description of Artificial Sequence: Synthetic peptide; note = XENP019117 vlCDR1
RASQSVSNDVA

SEQ ID NO: 10452 - protein, 7 aa, synthetic construct
  source 1..7: note = Description of Artificial Sequence: Synthetic peptide; note = XENP019117 vlCDR2
YASHRYT

SEQ ID NO: 10453 - protein, 9 aa, synthetic construct
  source 1..9: note = Description of Artificial Sequence: Synthetic peptide; note = XENP019117 vlCDR3
QQDYSSPRT

SEQ ID NO: 10454 - protein, 249 aa, synthetic construct
  source 1..249: note = Description of Artificial Sequence: Synthetic polypeptide; note = XENP019118 1G6_H1_L1.157_scFv(GKPGS)4
EVQLVESGGGLVKPGGSLRLSCAASGFTFSNYWMNWVRQAPGKGLEWVGEIRLKSNNYATHYAEPVKGRFTISRDDSKSTVYLQMNSLKTEDTAVYYCTRYYGNYGGYFDVWGAGTLVTVSSGKPGSGKPGSGKPGSGKPGSSIVMTQSPATLSVSPGERATLSCRASQSVSNDVAWYQQKPGQSPRLLINYASHRYTGVPDRFTGSGYGTEFTLTISSLKSEDFAVYFCQQDYSSPRTFGGGTKVEIK

SEQ ID NO: 10455 - protein, 122 aa, synthetic construct; identical to SEQ ID NO: 6246
  source 1..122: note = Description of Artificial Sequence: Synthetic polypeptide; note = VH of XENP019118

SEQ ID NO: 10456 - protein, 107 aa, synthetic construct
  source 1..107: note = Description of Artificial Sequence: Synthetic polypeptide; note = VL of XENP019118
SIVMTQSPATLSVSPGERATLSCRASQSVSNDVAWYQQKPGQSPRLLINYASHRYTGVPDRFTGSGYGTEFTLTISSLKSEDFAVYFCQQDYSSPRTFGGGTKVEIK

SEQ ID NO: 10457 - protein, 5 aa, synthetic construct
  source 1..5: note = Description of Artificial Sequence: Synthetic peptide; note = XENP019118 vhCDR1
NYWMN

SEQ ID NO: 10458 - protein, 19 aa, synthetic construct
  source 1..19: note = Description of Artificial Sequence: Synthetic peptide; note = XENP019118 vhCDR2
EIRLKSNNYATHYAEPVKG

SEQ ID NO: 10459 - protein, 11 aa, synthetic construct
  source 1..11: note = Description of Artificial Sequence: Synthetic peptide; note = XENP019118 vhCDR3
YYGNYGGYFDV

SEQ ID NO: 10460 - protein, 11 aa, synthetic construct
  source 1..11: note = Description of Artificial Sequence: Synthetic peptide; note = XENP019118 vlCDR1
RASQSVSNDVA

SEQ ID NO: 10461 - protein, 7 aa, synthetic construct
  source 1..7: note = Description of Artificial Sequence: Synthetic peptide; note = XENP019118 vlCDR2
YASHRYT

SEQ ID NO: 10462 - protein, 9 aa, synthetic construct
  source 1..9: note = Description of Artificial Sequence: Synthetic peptide; note = XENP019118 vlCDR3
QQDYSSPRT

SEQ ID NO: 10463 - protein, 249 aa, synthetic construct
  source 1..249: note = Description of Artificial Sequence: Synthetic polypeptide; note = XENP019119 1G6_H1_L1.158_scFv(GKPGS)4
EVQLVESGGGLVKPGGSLRLSCAASGFTFSNYWMNWVRQAPGKGLEWVGEIRLKSNNYATHYAEPVKGRFTISRDDSKSTVYLQMNSLKTEDTAVYYCTRYYGNYGGYFDVWGAGTLVTVSSGKPGSGKPGSGKPGSGKPGSSIVMTQSPATLSVSPGERATLSCRASQSVSNDVAWYQQKPGQSPRLLINYASHRYTGVPDRFTGSGYGTEFTLTISSLQSEDFGVYFCQQDYSSPRTFGGGTKVEIK

SEQ ID NO: 10464 - protein, 122 aa, synthetic construct; identical to SEQ ID NO: 6246
  source 1..122: note = Description of Artificial Sequence: Synthetic polypeptide; note = VH of XENP019119

SEQ ID NO: 10465 - protein, 107 aa, synthetic construct
  source 1..107: note = Description of Artificial Sequence: Synthetic polypeptide; note = VL of XENP019119
SIVMTQSPATLSVSPGERATLSCRASQSVSNDVAWYQQKPGQSPRLLINYASHRYTGVPDRFTGSGYGTEFTLTISSLQSEDFGVYFCQQDYSSPRTFGGGTKVEIK

SEQ ID NO: 10466 - protein, 5 aa, synthetic construct
  source 1..5: note = Description of Artificial Sequence: Synthetic peptide; note = XENP019119 vhCDR1
NYWMN

SEQ ID NO: 10467 - protein, 19 aa, synthetic construct
  source 1..19: note = Description of Artificial Sequence: Synthetic peptide; note = XENP019119 vhCDR2
EIRLKSNNYATHYAEPVKG

SEQ ID NO: 10468 - protein, 11 aa, synthetic construct
  source 1..11: note = Description of Artificial Sequence: Synthetic peptide; note = XENP019119 vhCDR3
YYGNYGGYFDV

SEQ ID NO: 10469 - protein, 11 aa, synthetic construct
  source 1..11: note = Description of Artificial Sequence: Synthetic peptide; note = XENP019119 vlCDR1
RASQSVSNDVA

SEQ ID NO: 10470 - protein, 7 aa, synthetic construct
  source 1..7: note = Description of Artificial Sequence: Synthetic peptide; note = XENP019119 vlCDR2
YASHRYT

SEQ ID NO: 10471 - protein, 9 aa, synthetic construct
  source 1..9: note = Description of Artificial Sequence: Synthetic peptide; note = XENP019119 vlCDR3
QQDYSSPRT

SEQ ID NO: 10472 - protein, 249 aa, synthetic construct
  source 1..249: note = Description of Artificial Sequence: Synthetic polypeptide; note = XENP019120 1G6_H1_L1.159_scFv(GKPGS)4
EVQLVESGGGLVKPGGSLRLSCAASGFTFSNYWMNWVRQAPGKGLEWVGEIRLKSNNYATHYAEPVKGRFTISRDDSKSTVYLQMNSLKTEDTAVYYCTRYYGNYGGYFDVWGAGTLVTVSSGKPGSGKPGSGKPGSGKPGSSIVMTQSPATLSVSPGERATLSCRASQSVSNDVAWYQQKPGQSPRLLINYASHRYTGVPDRFTGSGYGTEFTLTISSLQSEDFAVYFCKQDYSSPRTFGGGTKVEIK

SEQ ID NO: 10473 - protein, 122 aa, synthetic construct; identical to SEQ ID NO: 6246
  source 1..122: note = Description of Artificial Sequence: Synthetic polypeptide; note = VH of XENP019120

SEQ ID NO: 10474 - protein, 107 aa, synthetic construct
  source 1..107: note = Description of Artificial Sequence: Synthetic polypeptide; note = VL of XENP019120
SIVMTQSPATLSVSPGERATLSCRASQSVSNDVAWYQQKPGQSPRLLINYASHRYTGVPDRFTGSGYGTEFTLTISSLQSEDFAVYFCKQDYSSPRTFGGGTKVEIK

SEQ ID NO: 10475 - protein, 5 aa, synthetic construct
  source 1..5: note = Description of Artificial Sequence: Synthetic peptide; note = XENP019120 vhCDR1
NYWMN

SEQ ID NO: 10476 - protein, 19 aa, synthetic construct
  source 1..19: note = Description of Artificial Sequence: Synthetic peptide; note = XENP019120 vhCDR2
EIRLKSNNYATHYAEPVKG

SEQ ID NO: 10477 - protein, 11 aa, synthetic construct
  source 1..11: note = Description of Artificial Sequence: Synthetic peptide; note = XENP019120 vhCDR3
YYGNYGGYFDV

SEQ ID NO: 10478 - protein, 11 aa, synthetic construct
  source 1..11: note = Description of Artificial Sequence: Synthetic peptide; note = XENP019120 vlCDR1
RASQSVSNDVA

SEQ ID NO: 10479 - protein, 7 aa, synthetic construct
  source 1..7: note = Description of Artificial Sequence: Synthetic peptide; note = XENP019120 vlCDR2
YASHRYT

SEQ ID NO: 10480 - protein, 9 aa, synthetic construct
  source 1..9: note = Description of Artificial Sequence: Synthetic peptide; note = XENP019120 vlCDR3
KQDYSSPRT

SEQ ID NO: 10481 - protein, 249 aa, synthetic construct
  source 1..249: note = Description of Artificial Sequence: Synthetic polypeptide; note = XENP019121 1G6_H1_L1.160_scFv(GKPGS)4
EVQLVESGGGLVKPGGSLRLSCAASGFTFSNYWMNWVRQAPGKGLEWVGEIRLKSNNYATHYAEPVKGRFTISRDDSKSTVYLQMNSLKTEDTAVYYCTRYYGNYGGYFDVWGAGTLVTVSSGKPGSGKPGSGKPGSGKPGSSIVMTQSPATLSVSPGERATLSCRASQSVSNDVAWYQQKPGQSPRLLINYASHRYTGVPDRFTGSGYGTEFTLTISSLQSEDFAVYFCQKDYSSPRTFGGGTKVEIK

SEQ ID NO: 10482 - protein, 122 aa, synthetic construct; identical to SEQ ID NO: 6246
  source 1..122: note = Description of Artificial Sequence: Synthetic polypeptide; note = VH of XENP019121

SEQ ID NO: 10483 - protein, 107 aa, synthetic construct
  source 1..107: note = Description of Artificial Sequence: Synthetic polypeptide; note = VL of XENP019121
SIVMTQSPATLSVSPGERATLSCRASQSVSNDVAWYQQKPGQSPRLLINYASHRYTGVPDRFTGSGYGTEFTLTISSLQSEDFAVYFCQKDYSSPRTFGGGTKVEIK

SEQ ID NO: 10484 - protein, 5 aa, synthetic construct
  source 1..5: note = Description of Artificial Sequence: Synthetic peptide; note = XENP019121 vhCDR1
NYWMN

SEQ ID NO: 10485 - protein, 19 aa, synthetic construct
  source 1..19: note = Description of Artificial Sequence: Synthetic peptide; note = XENP019121 vhCDR2
EIRLKSNNYATHYAEPVKG

SEQ ID NO: 10486 - protein, 11 aa, synthetic construct
  source 1..11: note = Description of Artificial Sequence: Synthetic peptide; note = XENP019121 vhCDR3
YYGNYGGYFDV

SEQ ID NO: 10487 - protein, 11 aa, synthetic construct
  source 1..11: note = Description of Artificial Sequence: Synthetic peptide; note = XENP019121 vlCDR1
RASQSVSNDVA

SEQ ID NO: 10488 - protein, 7 aa, synthetic construct
  source 1..7: note = Description of Artificial Sequence: Synthetic peptide; note = XENP019121 vlCDR2
YASHRYT

SEQ ID NO: 10489 - protein, 9 aa, synthetic construct
  source 1..9: note = Description of Artificial Sequence: Synthetic peptide; note = XENP019121 vlCDR3
QKDYSSPRT

SEQ ID NO: 10490 - protein, 249 aa, synthetic construct
  source 1..249: note = Description of Artificial Sequence: Synthetic polypeptide; note = XENP019122 1G6_H1_L1.161_scFv(GKPGS)4
EVQLVESGGGLVKPGGSLRLSCAASGFTFSNYWMNWVRQAPGKGLEWVGEIRLKSNNYATHYAEPVKGRFTISRDDSKSTVYLQMNSLKTEDTAVYYCTRYYGNYGGYFDVWGAGTLVTVSSGKPGSGKPGSGKPGSGKPGSSIVMTQSPATLSVSPGERATLSCRASQSVSNDVAWYQQKPGQSPRLLINYASHRYTGVPDRFTGSGYGTEFTLTISSLQSEDFAVYFCQNDYSSPRTFGGGTKVEIK

SEQ ID NO: 10491 - protein, 122 aa, synthetic construct; identical to SEQ ID NO: 6246
  source 1..122: note = Description of Artificial Sequence: Synthetic polypeptide; note = VH of XENP019122

SEQ ID NO: 10492 - protein, 107 aa, synthetic construct
  source 1..107: note = Description of Artificial Sequence: Synthetic polypeptide; note = VL of XENP019122
SIVMTQSPATLSVSPGERATLSCRASQSVSNDVAWYQQKPGQSPRLLINYASHRYTGVPDRFTGSGYGTEFTLTISSLQSEDFAVYFCQNDYSSPRTFGGGTKVEIK

SEQ ID NO: 10493 - protein, 5 aa, synthetic construct
  source 1..5: note = Description of Artificial Sequence: Synthetic peptide; note = XENP019122 vhCDR1
NYWMN

SEQ ID NO: 10494 - protein, 19 aa, synthetic construct
  source 1..19: note = Description of Artificial Sequence: Synthetic peptide; note = XENP019122 vhCDR2
EIRLKSNNYATHYAEPVKG

SEQ ID NO: 10495 - protein, 11 aa, synthetic construct
  source 1..11: note = Description of Artificial Sequence: Synthetic peptide; note = XENP019122 vhCDR3
YYGNYGGYFDV

SEQ ID NO: 10496 - protein, 11 aa, synthetic construct
  source 1..11: note = Description of Artificial Sequence: Synthetic peptide; note = XENP019122 vlCDR1
RASQSVSNDVA

SEQ ID NO: 10497 - protein, 7 aa, synthetic construct
  source 1..7: note = Description of Artificial Sequence: Synthetic peptide; note = XENP019122 vlCDR2
YASHRYT

SEQ ID NO: 10498 - protein, 9 aa, synthetic construct
  source 1..9: note = Description of Artificial Sequence: Synthetic peptide; note = XENP019122 vlCDR3
QNDYSSPRT

SEQ ID NO: 10499 - protein, 249 aa, synthetic construct
  source 1..249: note = Description of Artificial Sequence: Synthetic polypeptide; note = XENP019123 1G6_H1_L1.162_scFv(GKPGS)4
EVQLVESGGGLVKPGGSLRLSCAASGFTFSNYWMNWVRQAPGKGLEWVGEIRLKSNNYATHYAEPVKGRFTISRDDSKSTVYLQMNSLKTEDTAVYYCTRYYGNYGGYFDVWGAGTLVTVSSGKPGSGKPGSGKPGSGKPGSSIVMTQSPATLSVSPGERATLSCRASQSVSNDVAWYQQKPGQSPRLLINYASHRYTGVPDRFTGSGYGTEFTLTISSLQSEDFAVYFCQRDYSSPRTFGGGTKVEIK

SEQ ID NO: 10500 - protein, 122 aa, synthetic construct; identical to SEQ ID NO: 6246
  source 1..122: note = Description of Artificial Sequence: Synthetic polypeptide; note = VH of XENP019123

SEQ ID NO: 10501 - protein, 107 aa, synthetic construct
  source 1..107: note = Description of Artificial Sequence: Synthetic polypeptide; note = VL of XENP019123
SIVMTQSPATLSVSPGERATLSCRASQSVSNDVAWYQQKPGQSPRLLINYASHRYTGVPDRFTGSGYGTEFTLTISSLQSEDFAVYFCQRDYSSPRTFGGGTKVEIK

SEQ ID NO: 10502 - protein, 5 aa, synthetic construct
  source 1..5: note = Description of Artificial Sequence: Synthetic peptide; note = XENP019123 vhCDR1
NYWMN

SEQ ID NO: 10503 - protein, 19 aa, synthetic construct
  source 1..19: note = Description of Artificial Sequence: Synthetic peptide; note = XENP019123 vhCDR2
EIRLKSNNYATHYAEPVKG

SEQ ID NO: 10504 - protein, 11 aa, synthetic construct
  source 1..11: note = Description of Artificial Sequence: Synthetic peptide; note = XENP019123 vhCDR3
YYGNYGGYFDV

SEQ ID NO: 10505 - protein, 11 aa, synthetic construct
  source 1..11: note = Description of Artificial Sequence: Synthetic peptide; note = XENP019123 vlCDR1
RASQSVSNDVA

SEQ ID NO: 10506 - protein, 7 aa, synthetic construct
  source 1..7: note = Description of Artificial Sequence: Synthetic peptide; note = XENP019123 vlCDR2
YASHRYT

SEQ ID NO: 10507 - protein, 9 aa, synthetic construct
  source 1..9: note = Description of Artificial Sequence: Synthetic peptide; note = XENP019123 vlCDR3
QRDYSSPRT

SEQ ID NO: 10508 - protein, 249 aa, synthetic construct
  source 1..249: note = Description of Artificial Sequence: Synthetic polypeptide; note = XENP019124 1G6_H1_L1.163_scFv(GKPGS)4
EVQLVESGGGLVKPGGSLRLSCAASGFTFSNYWMNWVRQAPGKGLEWVGEIRLKSNNYATHYAEPVKGRFTISRDDSKSTVYLQMNSLKTEDTAVYYCTRYYGNYGGYFDVWGAGTLVTVSSGKPGSGKPGSGKPGSGKPGSSIVMTQSPATLSVSPGEPATLSCRASQSVSNDVAWYQQKPGQSPRLLINYASHRYTGVPDRFTGSGYGTEFTLTISRLQSEDFAVYFCQQDYSSPRTFGGGTKVEIK

SEQ ID NO: 10509 - protein, 122 aa, synthetic construct; identical to SEQ ID NO: 6246
  source 1..122: note = Description of Artificial Sequence: Synthetic polypeptide; note = VH of XENP019124

SEQ ID NO: 10510 - protein, 107 aa, synthetic construct
  source 1..107: note = Description of Artificial Sequence: Synthetic polypeptide; note = VL of XENP019124
SIVMTQSPATLSVSPGEPATLSCRASQSVSNDVAWYQQKPGQSPRLLINYASHRYTGVPDRFTGSGYGTEFTLTISRLQSEDFAVYFCQQDYSSPRTFGGGTKVEIK

SEQ ID NO: 10511 - protein, 5 aa, synthetic construct
  source 1..5: note = Description of Artificial Sequence: Synthetic peptide; note = XENP019124 vhCDR1
NYWMN

SEQ ID NO: 10512 - protein, 19 aa, synthetic construct
  source 1..19: note = Description of Artificial Sequence: Synthetic peptide; note = XENP019124 vhCDR2
EIRLKSNNYATHYAEPVKG

SEQ ID NO: 10513 - protein, 11 aa, synthetic construct
  source 1..11: note = Description of Artificial Sequence: Synthetic peptide; note = XENP019124 vhCDR3
YYGNYGGYFDV

SEQ ID NO: 10514 - protein, 11 aa, synthetic construct
  source 1..11: note = Description of Artificial Sequence: Synthetic peptide; note = XENP019124 vlCDR1
RASQSVSNDVA

SEQ ID NO: 10515 - protein, 7 aa, synthetic construct
  source 1..7: note = Description of Artificial Sequence: Synthetic peptide; note = XENP019124 vlCDR2
YASHRYT

SEQ ID NO: 10516 - protein, 9 aa, synthetic construct
  source 1..9: note = Description of Artificial Sequence: Synthetic peptide; note = XENP019124 vlCDR3
QQDYSSPRT

SEQ ID NO: 10517 - protein, 249 aa, synthetic construct
  source 1..249: note = Description of Artificial Sequence: Synthetic polypeptide; note = XENP019125 1G6_H1_L1.164_scFv(GKPGS)4
EVQLVESGGGLVKPGGSLRLSCAASGFTFSNYWMNWVRQAPGKGLEWVGEIRLKSNNYATHYAEPVKGRFTISRDDSKSTVYLQMNSLKTEDTAVYYCTRYYGNYGGYFDVWGAGTLVTVSSGKPGSGKPGSGKPGSGKPGSSIVMTQSPATLSVSPGERATLSCRASESVSNDVAWYQQKPGQSPRLLINYASHRYTGVPDRFTGSGYGTEFTLTISSLQSEDFAVYFCQKDYSSPRTFGGGTKVEIK

SEQ ID NO: 10518 - protein, 122 aa, synthetic construct; identical to SEQ ID NO: 6246
  source 1..122: note = Description of Artificial Sequence: Synthetic polypeptide; note = VH of XENP019125

SEQ ID NO: 10519 - protein, 107 aa, synthetic construct
  source 1..107: note = Description of Artificial Sequence: Synthetic polypeptide; note = VL of XENP019125
SIVMTQSPATLSVSPGERATLSCRASESVSNDVAWYQQKPGQSPRLLINYASHRYTGVPDRFTGSGYGTEFTLTISSLQSEDFAVYFCQKDYSSPRTFGGGTKVEIK

SEQ ID NO: 10520 - protein, 5 aa, synthetic construct
  source 1..5: note = Description of Artificial Sequence: Synthetic peptide; note = XENP019125 vhCDR1
NYWMN

SEQ ID NO: 10521 - protein, 19 aa, synthetic construct
  source 1..19: note = Description of Artificial Sequence: Synthetic peptide; note = XENP019125 vhCDR2
EIRLKSNNYATHYAEPVKG

SEQ ID NO: 10522 - protein, 11 aa, synthetic construct
  source 1..11: note = Description of Artificial Sequence: Synthetic peptide; note = XENP019125 vhCDR3
YYGNYGGYFDV

SEQ ID NO: 10523 - protein, 11 aa, synthetic construct
  source 1..11: note = Description of Artificial Sequence: Synthetic peptide; note = XENP019125 vlCDR1
RASESVSNDVA

SEQ ID NO: 10524 - protein, 7 aa, synthetic construct
  source 1..7: note = Description of Artificial Sequence: Synthetic peptide; note = XENP019125 vlCDR2
YASHRYT

SEQ ID NO: 10525 - protein, 9 aa, synthetic construct
  source 1..9: note = Description of Artificial Sequence: Synthetic peptide; note = XENP019125 vlCDR3
QKDYSSPRT

SEQ ID NO: 10526 - protein, 249 aa, synthetic construct
  source 1..249: note = Description of Artificial Sequence: Synthetic polypeptide; note = XENP019126 1G6_H1_L1.165_scFv(GKPGS)4
EVQLVESGGGLVKPGGSLRLSCAASGFTFSNYWMNWVRQAPGKGLEWVGEIRLKSNNYATHYAEPVKGRFTISRDDSKSTVYLQMNSLKTEDTAVYYCTRYYGNYGGYFDVWGAGTLVTVSSGKPGSGKPGSGKPGSGKPGSSIVMTQSPATLSVSPGERATLSCRASESVSNDVAWYQQKPGQSPRLLINYASHRYTGVPDRFTGSGYGTEFTLTISSLQSEDFAVYFCQQDYKSPRTFGGGTKVEIK

SEQ ID NO: 10527 - protein, 122 aa, synthetic construct; identical to SEQ ID NO: 6246
  source 1..122: note = Description of Artificial Sequence: Synthetic polypeptide; note = VH of XENP019126

SEQ ID NO: 10528 - protein, 107 aa, synthetic construct
  source 1..107: note = Description of Artificial Sequence: Synthetic polypeptide; note = VL of XENP019126
SIVMTQSPATLSVSPGERATLSCRASESVSNDVAWYQQKPGQSPRLLINYASHRYTGVPDRFTGSGYGTEFTLTISSLQSEDFAVYFCQQDYKSPRTFGGGTKVEIK

SEQ ID NO: 10529 - protein, 5 aa, synthetic construct
  source 1..5: note = Description of Artificial Sequence: Synthetic peptide; note = XENP019126 vhCDR1
NYWMN

SEQ ID NO: 10530 - protein, 19 aa, synthetic construct
  source 1..19: note = Description of Artificial Sequence: Synthetic peptide; note = XENP019126 vhCDR2
EIRLKSNNYATHYAEPVKG

SEQ ID NO: 10531 - protein, 11 aa, synthetic construct
  source 1..11: note = Description of Artificial Sequence: Synthetic peptide; note = XENP019126 vhCDR3
YYGNYGGYFDV

SEQ ID NO: 10532 - protein, 11 aa, synthetic construct
  source 1..11: note = Description of Artificial Sequence: Synthetic peptide; note = XENP019126 vlCDR1
RASESVSNDVA

SEQ ID NO: 10533 - protein, 7 aa, synthetic construct
  source 1..7: note = Description of Artificial Sequence: Synthetic peptide; note = XENP019126 vlCDR2
YASHRYT

SEQ ID NO: 10534 - protein, 9 aa, synthetic construct
  source 1..9: note = Description of Artificial Sequence: Synthetic peptide; note = XENP019126 vlCDR3
QQDYKSPRT

SEQ ID NO: 10535 - protein, 249 aa, synthetic construct
  source 1..249: note = Description of Artificial Sequence: Synthetic polypeptide; note = XENP019127 1G6_H1_L1.166_scFv(GKPGS)4
EVQLVESGGGLVKPGGSLRLSCAASGFTFSNYWMNWVRQAPGKGLEWVGEIRLKSNNYATHYAEPVKGRFTISRDDSKSTVYLQMNSLKTEDTAVYYCTRYYGNYGGYFDVWGAGTLVTVSSGKPGSGKPGSGKPGSGKPGSSIVMTQSPATLSVSPGERATLSCRASQSVSNDVAWYRQKPEQSPRLLINYASHRYTGVPDRFTGSGYGTEFTLTISSLQSEDFAVYFCQQDYSSPRTFGGGTKVEIK

SEQ ID NO: 10536 - protein, 122 aa, synthetic construct; identical to SEQ ID NO: 6246
  source 1..122: note = Description of Artificial Sequence: Synthetic polypeptide; note = VH of XENP019127

SEQ ID NO: 10537 - protein, 107 aa, synthetic construct
  source 1..107: note = Description of Artificial Sequence: Synthetic polypeptide; note = VL of XENP019127
SIVMTQSPATLSVSPGERATLSCRASQSVSNDVAWYRQKPEQSPRLLINYASHRYTGVPDRFTGSGYGTEFTLTISSLQSEDFAVYFCQQDYSSPRTFGGGTKVEIK

SEQ ID NO: 10538 - protein, 5 aa, synthetic construct
  source 1..5: note = Description of Artificial Sequence: Synthetic peptide; note = XENP019127 vhCDR1
NYWMN

SEQ ID NO: 10539 - protein, 19 aa, synthetic construct
  source 1..19: note = Description of Artificial Sequence: Synthetic peptide; note = XENP019127 vhCDR2
EIRLKSNNYATHYAEPVKG

SEQ ID NO: 10540 - protein, 11 aa, synthetic construct
  source 1..11: note = Description of Artificial Sequence: Synthetic peptide; note = XENP019127 vhCDR3
YYGNYGGYFDV

SEQ ID NO: 10541 - protein, 11 aa, synthetic construct
  source 1..11: note = Description of Artificial Sequence: Synthetic peptide; note = XENP019127 vlCDR1
RASQSVSNDVA

SEQ ID NO: 10542 - protein, 7 aa, synthetic construct
  source 1..7: note = Description of Artificial Sequence: Synthetic peptide; note = XENP019127 vlCDR2
YASHRYT

SEQ ID NO: 10543 - protein, 9 aa, synthetic construct
  source 1..9: note = Description of Artificial Sequence: Synthetic peptide; note = XENP019127 vlCDR3
QQDYSSPRT

SEQ ID NO: 10544 - protein, 249 aa, synthetic construct
  source 1..249: note = Description of Artificial Sequence: Synthetic polypeptide; note = XENP019128 1G6_H1_L1.167_scFv(GKPGS)4
EVQLVESGGGLVKPGGSLRLSCAASGFTFSNYWMNWVRQAPGKGLEWVGEIRLKSNNYATHYAEPVKGRFTISRDDSKSTVYLQMNSLKTEDTAVYYCTRYYGNYGGYFDVWGAGTLVTVSSGKPGSGKPGSGKPGSGKPGSSIVMTQSPATLSVSPGERATLSCRASQSVSNDVAWYRQKPGESPRLLINYASHRYTGVPDRFTGSGYGTEFTLTISSLQSEDFAVYFCQQDYSSPRTFGGGTKVEIK

SEQ ID NO: 10545 - protein, 122 aa, synthetic construct; identical to SEQ ID NO: 6246
  source 1..122: note = Description of Artificial Sequence: Synthetic polypeptide; note = VH of XENP019128

SEQ ID NO: 10546 - protein, 107 aa, synthetic construct
  source 1..107: note = Description of Artificial Sequence: Synthetic polypeptide; note = VL of XENP019128
SIVMTQSPATLSVSPGERATLSCRASQSVSNDVAWYRQKPGESPRLLINYASHRYTGVPDRFTGSGYGTEFTLTISSLQSEDFAVYFCQQDYSSPRTFGGGTKVEIK

SEQ ID NO: 10547 - protein, 5 aa, synthetic construct
  source 1..5: note = Description of Artificial Sequence: Synthetic peptide; note = XENP019128 vhCDR1
NYWMN

SEQ ID NO: 10548 - protein, 19 aa, synthetic construct
  source 1..19: note = Description of Artificial Sequence: Synthetic peptide; note = XENP019128 vhCDR2
EIRLKSNNYATHYAEPVKG

SEQ ID NO: 10549 - protein, 11 aa, synthetic construct
  source 1..11: note = Description of Artificial Sequence: Synthetic peptide; note = XENP019128 vhCDR3
YYGNYGGYFDV

SEQ ID NO: 10550 - protein, 11 aa, synthetic construct
  source 1..11: note = Description of Artificial Sequence: Synthetic peptide; note = XENP019128 vlCDR1
RASQSVSNDVA

SEQ ID NO: 10551 - protein, 7 aa, synthetic construct
  source 1..7: note = Description of Artificial Sequence: Synthetic peptide; note = XENP019128 vlCDR2
YASHRYT

SEQ ID NO: 10552 - protein, 9 aa, synthetic construct
  source 1..9: note = Description of Artificial Sequence: Synthetic peptide; note = XENP019128 vlCDR3
QQDYSSPRT

SEQ ID NO: 10553 - protein, 249 aa, synthetic construct
  source 1..249: note = Description of Artificial Sequence: Synthetic polypeptide; note = XENP019129 1G6_H1_L1.168_scFv(GKPGS)4
EVQLVESGGGLVKPGGSLRLSCAASGFTFSNYWMNWVRQAPGKGLEWVGEIRLKSNNYATHYAEPVKGRFTISRDDSKSTVYLQMNSLKTEDTAVYYCTRYYGNYGGYFDVWGAGTLVTVSSGKPGSGKPGSGKPGSGKPGSSIVMTQSPATLSVSPGERATLSCRASQSVSNDVAWYQQKPGQSPRLLINYASWRYTGVPDRFTGSGYGTEFTLTISSLQSEDFAVYFCQQDFSSPRTFGGGTKVEIK

SEQ ID NO: 10554 - protein, 122 aa, synthetic construct; identical to SEQ ID NO: 6246
  source 1..122: note = Description of Artificial Sequence: Synthetic polypeptide; note = VH of XENP019129

SEQ ID NO: 10555 - protein, 107 aa, synthetic construct
  source 1..107: note = Description of Artificial Sequence: Synthetic polypeptide; note = VL of XENP019129
SIVMTQSPATLSVSPGERATLSCRASQSVSNDVAWYQQKPGQSPRLLINYASWRYTGVPDRFTGSGYGTEFTLTISSLQSEDFAVYFCQQDFSSPRTFGGGTKVEIK

SEQ ID NO: 10556 - protein, 5 aa, synthetic construct
  source 1..5: note = Description of Artificial Sequence: Synthetic peptide; note = XENP019129 vhCDR1
NYWMN

SEQ ID NO: 10557 - protein, 19 aa, synthetic construct
  source 1..19: note = Description of Artificial Sequence: Synthetic peptide; note = XENP019129 vhCDR2
EIRLKSNNYATHYAEPVKG

SEQ ID NO: 10558 - protein, 11 aa, synthetic construct
  source 1..11: note = Description of Artificial Sequence: Synthetic peptide; note = XENP019129 vhCDR3
YYGNYGGYFDV

SEQ ID NO: 10559 - protein, 11 aa, synthetic construct
  source 1..11: note = Description of Artificial Sequence: Synthetic peptide; note = XENP019129 vlCDR1
RASQSVSNDVA

SEQ ID NO: 10560 - protein, 7 aa, synthetic construct
  source 1..7: note = Description of Artificial Sequence: Synthetic peptide; note = XENP019129 vlCDR2
YASWRYT

SEQ ID NO: 10561 - protein, 9 aa, synthetic construct
  source 1..9: note = Description of Artificial Sequence: Synthetic peptide; note = XENP019129 vlCDR3
QQDFSSPRT

SEQ ID NO: 10562 - protein, 249 aa, synthetic construct
  source 1..249: note = Description of Artificial Sequence: Synthetic polypeptide; note = XENP019130 1G6_H1_L1.169_scFv(GKPGS)4
EVQLVESGGGLVKPGGSLRLSCAASGFTFSNYWMNWVRQAPGKGLEWVGEIRLKSNNYATHYAEPVKGRFTISRDDSKSTVYLQMNSLKTEDTAVYYCTRYYGNYGGYFDVWGAGTLVTVSSGKPGSGKPGSGKPGSGKPGSSIVMTQSPATLSVSPGERATLSCRASQSVSNDVAWYQQKPGQSPRLLINYASWRYTGVPDRFTGSGYGTEFTLTISSLQSEDFAVYFCQQDWSSPRTFGGGTKVEIK

SEQ ID NO: 10563 - protein, 122 aa, synthetic construct; identical to SEQ ID NO: 6246
  source 1..122: note = Description of Artificial Sequence: Synthetic polypeptide; note = VH of XENP019130

SEQ ID NO: 10564 - protein, 107 aa, synthetic construct
  source 1..107: note = Description of Artificial Sequence: Synthetic polypeptide; note = VL of XENP019130
SIVMTQSPATLSVSPGERATLSCRASQSVSNDVAWYQQKPGQSPRLLINYASWRYTGVPDRFTGSGYGTEFTLTISSLQSEDFAVYFCQQDWSSPRTFGGGTKVEIK

SEQ ID NO: 10565 - protein, 5 aa, synthetic construct
  source 1..5: note = Description of Artificial Sequence: Synthetic peptide; note = XENP019130 vhCDR1
NYWMN

SEQ ID NO: 10566 - protein, 19 aa, synthetic construct
  source 1..19: note = Description of Artificial Sequence: Synthetic peptide; note = XENP019130 vhCDR2
EIRLKSNNYATHYAEPVKG

SEQ ID NO: 10567 - protein, 11 aa, synthetic construct
  source 1..11: note = Description of Artificial Sequence: Synthetic peptide; note = XENP019130 vhCDR3
YYGNYGGYFDV

SEQ ID NO: 10568 - protein, 11 aa, synthetic construct
  source 1..11: note = Description of Artificial Sequence: Synthetic peptide; note = XENP019130 vlCDR1
RASQSVSNDVA

SEQ ID NO: 10569 - protein, 7 aa, synthetic construct
  source 1..7: note = Description of Artificial Sequence: Synthetic peptide; note = XENP019130 vlCDR2
YASWRYT

SEQ ID NO: 10570 - protein, 9 aa, synthetic construct
  source 1..9: note = Description of Artificial Sequence: Synthetic peptide; note = XENP019130 vlCDR3
QQDWSSPRT

SEQ ID NO: 10571 - protein, 249 aa, synthetic construct
  source 1..249: note = Description of Artificial Sequence: Synthetic polypeptide; note = XENP019131 1G6_H1_L1.170_scFv(GKPGS)4
EVQLVESGGGLVKPGGSLRLSCAASGFTFSNYWMNWVRQAPGKGLEWVGEIRLKSNNYATHYAEPVKGRFTISRDDSKSTVYLQMNSLKTEDTAVYYCTRYYGNYGGYFDVWGAGTLVTVSSGKPGSGKPGSGKPGSGKPGSSIVMTQSPATLSVSPGERATLSCRASQSVSNDVAWYQQKPGQSPRLLINYASWRYTGVPDRFTGSGYGTEFTLTISSLQSEDFAVYFCQQDGSSPRTFGGGTKVEIK

SEQ ID NO: 10572 - protein, 122 aa, synthetic construct; identical to SEQ ID NO: 6246
  source 1..122: note = Description of Artificial Sequence: Synthetic polypeptide; note = VH of XENP019131

SEQ ID NO: 10573 - protein, 107 aa, synthetic construct
  source 1..107: note = Description of Artificial Sequence: Synthetic polypeptide; note = VL of XENP019131
SIVMTQSPATLSVSPGERATLSCRASQSVSNDVAWYQQKPGQSPRLLINYASWRYTGVPDRFTGSGYGTEFTLTISSLQSEDFAVYFCQQDGSSPRTFGGGTKVEIK

SEQ ID NO: 10574 - protein, 5 aa, synthetic construct
  source 1..5: note = Description of Artificial Sequence: Synthetic peptide; note = XENP019131 vhCDR1
NYWMN

SEQ ID NO: 10575 - protein, 19 aa, synthetic construct
  source 1..19: note = Description of Artificial Sequence: Synthetic peptide; note = XENP019131 vhCDR2
EIRLKSNNYATHYAEPVKG

SEQ ID NO: 10576 - protein, 11 aa, synthetic construct
  source 1..11: note = Description of Artificial Sequence: Synthetic peptide; note = XENP019131 vhCDR3
YYGNYGGYFDV

SEQ ID NO: 10577 - protein, 11 aa, synthetic construct
  source 1..11: note = Description of Artificial Sequence: Synthetic peptide; note = XENP019131 vlCDR1
RASQSVSNDVA

SEQ ID NO: 10578 - protein, 7 aa, synthetic construct
  source 1..7: note = Description of Artificial Sequence: Synthetic peptide; note = XENP019131 vlCDR2
YASWRYT

SEQ ID NO: 10579 - protein, 9 aa, synthetic construct
  source 1..9: note = Description of Artificial Sequence: Synthetic peptide; note = XENP019131 vlCDR3
QQDGSSPRT

SEQ ID NO: 10580 - protein, 249 aa, synthetic construct
  source 1..249: note = Description of Artificial Sequence: Synthetic polypeptide; note = XENP019132 1G6_H1_L1.171_scFv(GKPGS)4
EVQLVESGGGLVKPGGSLRLSCAASGFTFSNYWMNWVRQAPGKGLEWVGEIRLKSNNYATHYAEPVKGRFTISRDDSKSTVYLQMNSLKTEDTAVYYCTRYYGNYGGYFDVWGAGTLVTVSSGKPGSGKPGSGKPGSGKPGSSIVMTQSPATLSVSPGERATLSCRASQSVSNDVAWYQQKPGQSPRLLINYASHRYTSVPDRFTGSGYGTEFTLTISSLQSEDFAVYFCQQDWSSPRTFGGGTKVEIK

SEQ ID NO: 10581 - protein, 122 aa, synthetic construct; identical to SEQ ID NO: 6246
  source 1..122: note = Description of Artificial Sequence: Synthetic polypeptide; note = VH of XENP019132

SEQ ID NO: 10582 - protein, 107 aa, synthetic construct
  source 1..107: note = Description of Artificial Sequence: Synthetic polypeptide; note = VL of XENP019132
SIVMTQSPATLSVSPGERATLSCRASQSVSNDVAWYQQKPGQSPRLLINYASHRYTSVPDRFTGSGYGTEFTLTISSLQSEDFAVYFCQQDWSSPRTFGGGTKVEIK

SEQ ID NO: 10583 - protein, 5 aa, synthetic construct
  source 1..5: note = Description of Artificial Sequence: Synthetic peptide; note = XENP019132 vhCDR1
NYWMN

SEQ ID NO: 10584 - protein, 19 aa, synthetic construct
  source 1..19: note = Description of Artificial Sequence: Synthetic peptide; note = XENP019132 vhCDR2
EIRLKSNNYATHYAEPVKG

SEQ ID NO: 10585 - protein, 11 aa, synthetic construct
  source 1..11: note = Description of Artificial Sequence: Synthetic peptide; note = XENP019132 vhCDR3
YYGNYGGYFDV

SEQ ID NO: 10586 - protein, 11 aa, synthetic construct
  source 1..11: note = Description of Artificial Sequence: Synthetic peptide; note = XENP019132 vlCDR1
RASQSVSNDVA

SEQ ID NO: 10587 - protein, 7 aa, synthetic construct
  source 1..7: note = Description of Artificial Sequence: Synthetic peptide; note = XENP019132 vlCDR2
YASHRYT

SEQ ID NO: 10588 - protein, 9 aa, synthetic construct
  source 1..9: note = Description of Artificial Sequence: Synthetic peptide; note = XENP019132 vlCDR3
QQDWSSPRT

SEQ ID NO: 10589 - protein, 249 aa, synthetic construct
  source 1..249: note = Description of Artificial Sequence: Synthetic polypeptide; note = XENP019133 1G6_H1_L1.172_scFv(GKPGS)4
EVQLVESGGGLVKPGGSLRLSCAASGFTFSNYWMNWVRQAPGKGLEWVGEIRLKSNNYATHYAEPVKGRFTISRDDSKSTVYLQMNSLKTEDTAVYYCTRYYGNYGGYFDVWGAGTLVTVSSGKPGSGKPGSGKPGSGKPGSSIVMTQSPATLSVSPGERATLSCRASQSVSNDVAWYQQKPGQSPRLLINYASHRYTSVPDRFTGSGYGTEFTLTISSLQSEDFAVYFCQQDFSSPRTFGGGTKVEIK

SEQ ID NO: 10590 - protein, 122 aa, synthetic construct; identical to SEQ ID NO: 6246
  source 1..122: note = Description of Artificial Sequence: Synthetic polypeptide; note = VH of XENP019133

SEQ ID NO: 10591 - protein, 107 aa, synthetic construct
  source 1..107: note = Description of Artificial Sequence: Synthetic polypeptide; note = VL of XENP019133
SIVMTQSPATLSVSPGERATLSCRASQSVSNDVAWYQQKPGQSPRLLINYASHRYTSVPDRFTGSGYGTEFTLTISSLQSEDFAVYFCQQDFSSPRTFGGGTKVEIK

SEQ ID NO: 10592 - protein, 5 aa, synthetic construct
  source 1..5: note = Description of Artificial Sequence: Synthetic peptide; note = XENP019133 vhCDR1
NYWMN

SEQ ID NO: 10593 - protein, 19 aa, synthetic construct
  source 1..19: note = Description of Artificial Sequence: Synthetic peptide; note = XENP019133 vhCDR2
EIRLKSNNYATHYAEPVKG

SEQ ID NO: 10594 - protein, 11 aa, synthetic construct
  source 1..11: note = Description of Artificial Sequence: Synthetic peptide; note = XENP019133 vhCDR3
YYGNYGGYFDV

SEQ ID NO: 10595 - protein, 11 aa, synthetic construct
  source 1..11: note = Description of Artificial Sequence: Synthetic peptide; note = XENP019133 vlCDR1
RASQSVSNDVA

SEQ ID NO: 10596 - protein, 7 aa, synthetic construct
  source 1..7: note = Description of Artificial Sequence: Synthetic peptide; note = XENP019133 vlCDR2
YASHRYT

SEQ ID NO: 10597 - protein, 9 aa, synthetic construct
  source 1..9: note = Description of Artificial Sequence: Synthetic peptide; note = XENP019133 vlCDR3
QQDFSSPRT

SEQ ID NO: 10598 - protein, 249 aa, synthetic construct
  source 1..249: note = Description of Artificial Sequence: Synthetic polypeptide; note = XENP019134 1G6_H1_L1.173_scFv(GKPGS)4
EVQLVESGGGLVKPGGSLRLSCAASGFTFSNYWMNWVRQAPGKGLEWVGEIRLKSNNYATHYAEPVKGRFTISRDDSKSTVYLQMNSLKTEDTAVYYCTRYYGNYGGYFDVWGAGTLVTVSSGKPGSGKPGSGKPGSGKPGSSIVMTQSPATLSVSPGERATLSCRASQSVSNDVAWYQQKPGQSPRLLINYASHRYTGVPDRFTGSGYGTEFTLTISSLQSEDFAVYFCQQDFGSPRTFGGGTKVEIK

SEQ ID NO: 10599 - protein, 122 aa, synthetic construct; identical to SEQ ID NO: 6246
  source 1..122: note = Description of Artificial Sequence: Synthetic polypeptide; note = VH of XENP019134

SEQ ID NO: 10600 - protein, 107 aa, synthetic construct
  source 1..107: note = Description of Artificial Sequence: Synthetic polypeptide; note = VL of XENP019134
SIVMTQSPATLSVSPGERATLSCRASQSVSNDVAWYQQKPGQSPRLLINYASHRYTGVPDRFTGSGYGTEFTLTISSLQSEDFAVYFCQQDFGSPRTFGGGTKVEIK

SEQ ID NO: 10601 - protein, 5 aa, synthetic construct
  source 1..5: note = Description of Artificial Sequence: Synthetic peptide; note = XENP019134 vhCDR1
NYWMN

SEQ ID NO: 10602 - protein, 19 aa, synthetic construct
  source 1..19: note = Description of Artificial Sequence: Synthetic peptide; note = XENP019134 vhCDR2
EIRLKSNNYATHYAEPVKG

SEQ ID NO: 10603 - protein, 11 aa, synthetic construct
  source 1..11: note = Description of Artificial Sequence: Synthetic peptide; note = XENP019134 vhCDR3
YYGNYGGYFDV

SEQ ID NO: 10604 - protein, 11 aa, synthetic construct
  source 1..11: note = Description of Artificial Sequence: Synthetic peptide; note = XENP019134 vlCDR1
RASQSVSNDVA

SEQ ID NO: 10605 - protein, 7 aa, synthetic construct
  source 1..7: note = Description of Artificial Sequence: Synthetic peptide; note = XENP019134 vlCDR2
YASHRYT

SEQ ID NO: 10606 - protein, 9 aa, synthetic construct
  source 1..9: note = Description of Artificial Sequence: Synthetic peptide; note = XENP019134 vlCDR3
QQDFGSPRT

SEQ ID NO: 10607 - protein, 249 aa, synthetic construct
  source 1..249: note = Description of Artificial Sequence: Synthetic polypeptide; note = XENP019135 1G6_H1_L1.174_scFv(GKPGS)4
EVQLVESGGGLVKPGGSLRLSCAASGFTFSNYWMNWVRQAPGKGLEWVGEIRLKSNNYATHYAEPVKGRFTISRDDSKSTVYLQMNSLKTEDTAVYYCTRYYGNYGGYFDVWGAGTLVTVSSGKPGSGKPGSGKPGSGKPGSSIVMTQSPATLSVSPGERATLSCRASQSVSNDVAWYQQKPGQSPRLLINYASHRYTGVPDRFTGSGYGTEFTLTISSLQSEDFAVYFCQQDWGSPRTFGGGTKVEIK

SEQ ID NO: 10608 - protein, 122 aa, synthetic construct; identical to SEQ ID NO: 6246
  source 1..122: note = Description of Artificial Sequence: Synthetic polypeptide; note = VH of XENP019135

SEQ ID NO: 10609 - protein, 107 aa, synthetic construct
  source 1..107: note = Description of Artificial Sequence: Synthetic polypeptide; note = VL of XENP019135
SIVMTQSPATLSVSPGERATLSCRASQSVSNDVAWYQQKPGQSPRLLINYASHRYTGVPDRFTGSGYGTEFTLTISSLQSEDFAVYFCQQDWGSPRTFGGGTKVEIK

SEQ ID NO: 10610 - protein, 5 aa, synthetic construct
  source 1..5: note = Description of Artificial Sequence: Synthetic peptide; note = XENP019135 vhCDR1
NYWMN

SEQ ID NO: 10611 - protein, 19 aa, synthetic construct
  source 1..19: note = Description of Artificial Sequence: Synthetic peptide; note = XENP019135 vhCDR2
EIRLKSNNYATHYAEPVKG

SEQ ID NO: 10612 - protein, 11 aa, synthetic construct
  source 1..11: note = Description of Artificial Sequence: Synthetic peptide; note = XENP019135 vhCDR3
YYGNYGGYFDV

SEQ ID NO: 10613 - protein, 11 aa, synthetic construct
  source 1..11: note = Description of Artificial Sequence: Synthetic peptide; note = XENP019135 vlCDR1
RASQSVSNDVA

SEQ ID NO: 10614 - protein, 7 aa, synthetic construct
  source 1..7: note = Description of Artificial Sequence: Synthetic peptide; note = XENP019135 vlCDR2
YASHRYT

SEQ ID NO: 10615 - protein, 9 aa, synthetic construct
  source 1..9: note = Description of Artificial Sequence: Synthetic peptide; note = XENP019135 vlCDR3
QQDWGSPRT

SEQ ID NO: 10616 - protein, 249 aa, synthetic construct
  source 1..249: note = Description of Artificial Sequence: Synthetic polypeptide; note = XENP019136 1G6_H1_L1.175_scFv(GKPGS)4
EVQLVESGGGLVKPGGSLRLSCAASGFTFSNYWMNWVRQAPGKGLEWVGEIRLKSNNYATHYAEPVKGRFTISRDDSKSTVYLQMNSLKTEDTAVYYCTRYYGNYGGYFDVWGAGTLVTVSSGKPGSGKPGSGKPGSGKPGSSIVMTQSPATLSVSPGERATLSCRASQSVGNDVAWYQQKPGQSPRLLINYASHRYTSVPDRFTGSGYGTEFTLTISSLQSEDFAVYFCQQDWSSPRTFGGGTKVEIK

SEQ ID NO: 10617 - protein, 122 aa, synthetic construct; identical to SEQ ID NO: 6246
  source 1..122: note = Description of Artificial Sequence: Synthetic polypeptide; note = VH of XENP019136

SEQ ID NO: 10618 - protein, 107 aa, synthetic construct
  source 1..107: note = Description of Artificial Sequence: Synthetic polypeptide; note = VL of XENP019136
SIVMTQSPATLSVSPGERATLSCRASQSVGNDVAWYQQKPGQSPRLLINYASHRYTSVPDRFTGSGYGTEFTLTISSLQSEDFAVYFCQQDWSSPRTFGGGTKVEIK

SEQ ID NO: 10619 - protein, 5 aa, synthetic construct
  source 1..5: note = Description of Artificial Sequence: Synthetic peptide; note = XENP019136 vhCDR1
NYWMN

SEQ ID NO: 10620 - protein, 19 aa, synthetic construct
  source 1..19: note = Description of Artificial Sequence: Synthetic peptide; note = XENP019136 vhCDR2
EIRLKSNNYATHYAEPVKG

SEQ ID NO: 10621 - protein, 11 aa, synthetic construct
  source 1..11: note = Description of Artificial Sequence: Synthetic peptide; note = XENP019136 vhCDR3
YYGNYGGYFDV

SEQ ID NO: 10622 - protein, 11 aa, synthetic construct
  source 1..11: note = Description of Artificial Sequence: Synthetic peptide; note = XENP019136 vlCDR1
RASQSVGNDVA

SEQ ID NO: 10623 - protein, 7 aa, synthetic construct
  source 1..7: note = Description of Artificial Sequence: Synthetic peptide; note = XENP019136 vlCDR2
YASHRYT

SEQ ID NO: 10624 - protein, 9 aa, synthetic construct
  source 1..9: note = Description of Artificial Sequence: Synthetic peptide; note = XENP019136 vlCDR3
QQDWSSPRT

SEQ ID NO: 10625 - protein, 249 aa, synthetic construct
  source 1..249: note = Description of Artificial Sequence: Synthetic polypeptide; note = XENP019137 1G6_H1_L1.176_scFv(GKPGS)4
EVQLVESGGGLVKPGGSLRLSCAASGFTFSNYWMNWVRQAPGKGLEWVGEIRLKSNNYATHYAEPVKGRFTISRDDSKSTVYLQMNSLKTEDTAVYYCTRYYGNYGGYFDVWGAGTLVTVSSGKPGSGKPGSGKPGSGKPGSSIVMTQSPATLSVSPGERATLSCRASQSVGNDVAWYQQKPGQSPRLLINYASWRYTSVPDRFTGSGYGTEFTLTISSLQSEDFAVYFCQQDYSSPRTFGGGTKVEIK

SEQ ID NO: 10626 - protein, 122 aa, synthetic construct; identical to SEQ ID NO: 6246
  source 1..122: note = Description of Artificial Sequence: Synthetic polypeptide; note = VH of XENP019137

SEQ ID NO: 10627 - protein, 107 aa, synthetic construct
  source 1..107: note = Description of Artificial Sequence: Synthetic polypeptide; note = VL of XENP019137
SIVMTQSPATLSVSPGERATLSCRASQSVGNDVAWYQQKPGQSPRLLINYASWRYTSVPDRFTGSGYGTEFTLTISSLQSEDFAVYFCQQDYSSPRTFGGGTKVEIK

SEQ ID NO: 10628 - protein, 5 aa, synthetic construct
  source 1..5: note = Description of Artificial Sequence: Synthetic peptide; note = XENP019137 vhCDR1
NYWMN

SEQ ID NO: 10629 - protein, 19 aa, synthetic construct
  source 1..19: note = Description of Artificial Sequence: Synthetic peptide; note = XENP019137 vhCDR2
EIRLKSNNYATHYAEPVKG

SEQ ID NO: 10630 - protein, 11 aa, synthetic construct
  source 1..11: note = Description of Artificial Sequence: Synthetic peptide; note = XENP019137 vhCDR3
YYGNYGGYFDV

SEQ ID NO: 10631 - protein, 11 aa, synthetic construct
  source 1..11: note = Description of Artificial Sequence: Synthetic peptide; note = XENP019137 vlCDR1
RASQSVGNDVA

SEQ ID NO: 10632 - protein, 7 aa, synthetic construct
  source 1..7: note = Description of Artificial Sequence: Synthetic peptide; note = XENP019137 vlCDR2
YASWRYT

SEQ ID NO: 10633 - protein, 9 aa, synthetic construct
  source 1..9: note = Description of Artificial Sequence: Synthetic peptide; note = XENP019137 vlCDR3
QQDYSSPRT

SEQ ID NO: 10634 - protein, 249 aa, synthetic construct
  source 1..249: note = Description of Artificial Sequence: Synthetic polypeptide; note = XENP019138 1G6_H1_L1.177_scFv(GKPGS)4
EVQLVESGGGLVKPGGSLRLSCAASGFTFSNYWMNWVRQAPGKGLEWVGEIRLKSNNYATHYAEPVKGRFTISRDDSKSTVYLQMNSLKTEDTAVYYCTRYYGNYGGYFDVWGAGTLVTVSSGKPGSGKPGSGKPGSGKPGSSIVMTQSPATLSVSPGERATLSCRASQSVGNDVAWYQQKPGQSPRLLINYASHRYTSVPDRFTGSGYGTEFTLTISSLQSEDFAVYFCQQDFSSPRTFGGGTKVEIK

SEQ ID NO: 10635 - protein, 122 aa, synthetic construct; identical to SEQ ID NO: 6246
  source 1..122: note = Description of Artificial Sequence: Synthetic polypeptide; note = VH of XENP019138

SEQ ID NO: 10636 - protein, 107 aa, synthetic construct
  source 1..107: note = Description of Artificial Sequence: Synthetic polypeptide; note = VL of XENP019138
SIVMTQSPATLSVSPGERATLSCRASQSVGNDVAWYQQKPGQSPRLLINYASHRYTSVPDRFTGSGYGTEFTLTISSLQSEDFAVYFCQQDFSSPRTFGGGTKVEIK

SEQ ID NO: 10637 - protein, 5 aa, synthetic construct
  source 1..5: note = Description of Artificial Sequence: Synthetic peptide; note = XENP019138 vhCDR1
NYWMN

SEQ ID NO: 10638 - protein, 19 aa, synthetic construct
  source 1..19: note = Description of Artificial Sequence: Synthetic peptide; note = XENP019138 vhCDR2
EIRLKSNNYATHYAEPVKG

SEQ ID NO: 10639 - protein, 11 aa, synthetic construct
  source 1..11: note = Description of Artificial Sequence: Synthetic peptide; note = XENP019138 vhCDR3
YYGNYGGYFDV

SEQ ID NO: 10640 - protein, 11 aa, synthetic construct
  source 1..11: note = Description of Artificial Sequence: Synthetic peptide; note = XENP019138 vlCDR1
RASQSVGNDVA

SEQ ID NO: 10641 - protein, 7 aa, synthetic construct
  source 1..7: note = Description of Artificial Sequence: Synthetic peptide; note = XENP019138 vlCDR2
YASHRYT

SEQ ID NO: 10642 - protein, 9 aa, synthetic construct
  source 1..9: note = Description of Artificial Sequence: Synthetic peptide; note = XENP019138 vlCDR3
QQDFSSPRT

SEQ ID NO: 10643 - protein, 249 aa, synthetic construct
  source 1..249: note = Description of Artificial Sequence: Synthetic polypeptide; note = XENP019139 1G6_H1_L1.178_scFv(GKPGS)4
EVQLVESGGGLVKPGGSLRLSCAASGFTFSNYWMNWVRQAPGKGLEWVGEIRLKSNNYATHYAEPVKGRFTISRDDSKSTVYLQMNSLKTEDTAVYYCTRYYGNYGGYFDVWGAGTLVTVSSGKPGSGKPGSGKPGSGKPGSSIVMTQSPATLSVSPGERATLSCRASQSVGNDVAWYQQKPGQSPRLLINYASHRYTSVPDRFTGSGYGTEFTLTISSLQSEDFAVYFCQQDGSSPRTFGGGTKVEIK

SEQ ID NO: 10644 - protein, 122 aa, synthetic construct; identical to SEQ ID NO: 6246
  source 1..122: note = Description of Artificial Sequence: Synthetic polypeptide; note = VH of XENP019139

SEQ ID NO: 10645 - protein, 107 aa, synthetic construct
  source 1..107: note = Description of Artificial Sequence: Synthetic polypeptide; note = VL of XENP019139
SIVMTQSPATLSVSPGERATLSCRASQSVGNDVAWYQQKPGQSPRLLINYASHRYTSVPDRFTGSGYGTEFTLTISSLQSEDFAVYFCQQDGSSPRTFGGGTKVEIK

SEQ ID NO: 10646 - protein, 5 aa, synthetic construct
  source 1..5: note = Description of Artificial Sequence: Synthetic peptide; note = XENP019139 vhCDR1
NYWMN

SEQ ID NO: 10647 - protein, 19 aa, synthetic construct
  source 1..19: note = Description of Artificial Sequence: Synthetic peptide; note = XENP019139 vhCDR2
EIRLKSNNYATHYAEPVKG

SEQ ID NO: 10648 - protein, 11 aa, synthetic construct
  source 1..11: note = Description of Artificial Sequence: Synthetic peptide; note = XENP019139 vhCDR3
YYGNYGGYFDV

SEQ ID NO: 10649 - protein, 11 aa, synthetic construct
  source 1..11: note = Description of Artificial Sequence: Synthetic peptide; note = XENP019139 vlCDR1
RASQSVGNDVA

SEQ ID NO: 10650 - protein, 7 aa, synthetic construct
  source 1..7: note = Description of Artificial Sequence: Synthetic peptide; note = XENP019139 vlCDR2
YASHRYT

SEQ ID NO: 10651 - protein, 9 aa, synthetic construct
  source 1..9: note = Description of Artificial Sequence: Synthetic peptide; note = XENP019139 vlCDR3
QQDGSSPRT

SEQ ID NO: 10652 - protein, 249 aa, synthetic construct
  source 1..249: note = Description of Artificial Sequence: Synthetic polypeptide; note = XENP019140 1G6_H1_L1.179_scFv(GKPGS)4
EVQLVESGGGLVKPGGSLRLSCAASGFTFSNYWMNWVRQAPGKGLEWVGEIRLKSNNYATHYAEPVKGRFTISRDDSKSTVYLQMNSLKTEDTAVYYCTRYYGNYGGYFDVWGAGTLVTVSSGKPGSGKPGSGKPGSGKPGSSIVMTQSPATLSVSPGERATLSCRASQSVSNDVAWYQQKPGQSPRLLINYASWRYTSVPDRFTGSGYGTEFTLTISSLQSEDFAVYFCQQDFSSPRTFGGGTKVEIK

SEQ ID NO: 10653 - protein, 122 aa, synthetic construct; identical to SEQ ID NO: 6246
  source 1..122: note = Description of Artificial Sequence: Synthetic polypeptide; note = VH of XENP019140

SEQ ID NO: 10654 - protein, 107 aa, synthetic construct
  source 1..107: note = Description of Artificial Sequence: Synthetic polypeptide; note = VL of XENP019140
SIVMTQSPATLSVSPGERATLSCRASQSVSNDVAWYQQKPGQSPRLLINYASWRYTSVPDRFTGSGYGTEFTLTISSLQSEDFAVYFCQQDFSSPRTFGGGTKVEIK

SEQ ID NO: 10655 - protein, 5 aa, synthetic construct
  source 1..5: note = Description of Artificial Sequence: Synthetic peptide; note = XENP019140 vhCDR1
NYWMN

SEQ ID NO: 10656 - protein, 19 aa, synthetic construct
  source 1..19: note = Description of Artificial Sequence: Synthetic peptide; note = XENP019140 vhCDR2
EIRLKSNNYATHYAEPVKG

SEQ ID NO: 10657 - protein, 11 aa, synthetic construct
  source 1..11: note = Description of Artificial Sequence: Synthetic peptide; note = XENP019140 vhCDR3
YYGNYGGYFDV

SEQ ID NO: 10658 - protein, 11 aa, synthetic construct
  source 1..11: note = Description of Artificial Sequence: Synthetic peptide; note = XENP019140 vlCDR1
RASQSVSNDVA

SEQ ID NO: 10659 - protein, 7 aa, synthetic construct
  source 1..7: note = Description of Artificial Sequence: Synthetic peptide; note = XENP019140 vlCDR2
YASWRYT

SEQ ID NO: 10660 - protein, 9 aa, synthetic construct
  source 1..9: note = Description of Artificial Sequence: Synthetic peptide; note = XENP019140 vlCDR3
QQDFSSPRT

SEQ ID NO: 10661 - protein, 249 aa, synthetic construct
  source 1..249: note = Description of Artificial Sequence: Synthetic polypeptide; note = XENP019141 1G6_H1_L1.180_scFv(GKPGS)4
EVQLVESGGGLVKPGGSLRLSCAASGFTFSNYWMNWVRQAPGKGLEWVGEIRLKSNNYATHYAEPVKGRFTISRDDSKSTVYLQMNSLKTEDTAVYYCTRYYGNYGGYFDVWGAGTLVTVSSGKPGSGKPGSGKPGSGKPGSSIVMTQSPATLSVSPGERATLSCRASQSVSNDVAWYQQKPGQSPRLLINYASWRYTSVPDRFTGSGYGTEFTLTISSLQSEDFAVYFCQQDWSSPRTFGGGTKVEIK

SEQ ID NO: 10662 - protein, 122 aa, synthetic construct; identical to SEQ ID NO: 6246
  source 1..122: note = Description of Artificial Sequence: Synthetic polypeptide; note = VH of XENP019141

SEQ ID NO: 10663 - protein, 107 aa, synthetic construct
  source 1..107: note = Description of Artificial Sequence: Synthetic polypeptide; note = VL of XENP019141
SIVMTQSPATLSVSPGERATLSCRASQSVSNDVAWYQQKPGQSPRLLINYASWRYTSVPDRFTGSGYGTEFTLTISSLQSEDFAVYFCQQDWSSPRTFGGGTKVEIK

SEQ ID NO: 10664 - protein, 5 aa, synthetic construct
  source 1..5: note = Description of Artificial Sequence: Synthetic peptide; note = XENP019141 vhCDR1
NYWMN

SEQ ID NO: 10665 - protein, 19 aa, synthetic construct
  source 1..19: note = Description of Artificial Sequence: Synthetic peptide; note = XENP019141 vhCDR2
EIRLKSNNYATHYAEPVKG

SEQ ID NO: 10666 - protein, 11 aa, synthetic construct
  source 1..11: note = Description of Artificial Sequence: Synthetic peptide; note = XENP019141 vhCDR3
YYGNYGGYFDV

SEQ ID NO: 10667 - protein, 11 aa, synthetic construct
  source 1..11: note = Description of Artificial Sequence: Synthetic peptide; note = XENP019141 vlCDR1
RASQSVSNDVA

SEQ ID NO: 10668 - protein, 7 aa, synthetic construct
  source 1..7: note = Description of Artificial Sequence: Synthetic peptide; note = XENP019141 vlCDR2
YASWRYT

SEQ ID NO: 10669 - protein, 9 aa, synthetic construct
  source 1..9: note = Description of Artificial Sequence: Synthetic peptide; note = XENP019141 vlCDR3
QQDWSSPRT

SEQ ID NO: 10670 - protein, 249 aa, synthetic construct
  source 1..249: note = Description of Artificial Sequence: Synthetic polypeptide; note = XENP019142 1G6_H1_L1.181_scFv(GKPGS)4
EVQLVESGGGLVKPGGSLRLSCAASGFTFSNYWMNWVRQAPGKGLEWVGEIRLKSNNYATHYAEPVKGRFTISRDDSKSTVYLQMNSLKTEDTAVYYCTRYYGNYGGYFDVWGAGTLVTVSSGKPGSGKPGSGKPGSGKPGSSIVMTQSPATLSVSPGERATLSCRASQSVSNDVAWYQQKPGQSPRLLINYASWRYTSVPDRFTGSGYGTEFTLTISSLQSEDFAVYFCQQDGSSPRTFGGGTKVEIK

SEQ ID NO: 10671 - protein, 122 aa, synthetic construct; identical to SEQ ID NO: 6246
  source 1..122: note = Description of Artificial Sequence: Synthetic polypeptide; note = VH of XENP019142

SEQ ID NO: 10672 - protein, 107 aa, synthetic construct
  source 1..107: note = Description of Artificial Sequence: Synthetic polypeptide; note = VL of XENP019142
SIVMTQSPATLSVSPGERATLSCRASQSVSNDVAWYQQKPGQSPRLLINYASWRYTSVPDRFTGSGYGTEFTLTISSLQSEDFAVYFCQQDGSSPRTFGGGTKVEIK

SEQ ID NO: 10673 - protein, 5 aa, synthetic construct
  source 1..5: note = Description of Artificial Sequence: Synthetic peptide; note = XENP019142 vhCDR1
NYWMN

SEQ ID NO: 10674 - protein, 19 aa, synthetic construct
  source 1..19: note = Description of Artificial Sequence: Synthetic peptide; note = XENP019142 vhCDR2
EIRLKSNNYATHYAEPVKG

SEQ ID NO: 10675 - protein, 11 aa, synthetic construct
  source 1..11: note = Description of Artificial Sequence: Synthetic peptide; note = XENP019142 vhCDR3
YYGNYGGYFDV

SEQ ID NO: 10676 - protein, 11 aa, synthetic construct
  source 1..11: note = Description of Artificial Sequence: Synthetic peptide; note = XENP019142 vlCDR1
RASQSVSNDVA

SEQ ID NO: 10677 - protein, 7 aa, synthetic construct
  source 1..7: note = Description of Artificial Sequence: Synthetic peptide; note = XENP019142 vlCDR2
YASWRYT

SEQ ID NO: 10678 - protein, 9 aa, synthetic construct
  source 1..9: note = Description of Artificial Sequence: Synthetic peptide; note = XENP019142 vlCDR3
QQDGSSPRT

SEQ ID NO: 10679 - protein, 249 aa, synthetic construct
  source 1..249: note = Description of Artificial Sequence: Synthetic polypeptide; note = XENP019143 1G6_H1_L1.182_scFv(GKPGS)4
EVQLVESGGGLVKPGGSLRLSCAASGFTFSNYWMNWVRQAPGKGLEWVGEIRLKSNNYATHYAEPVKGRFTISRDDSKSTVYLQMNSLKTEDTAVYYCTRYYGNYGGYFDVWGAGTLVTVSSGKPGSGKPGSGKPGSGKPGSSIVMTQSPATLSVSPGERATLSCRASQSVGNDVAWYQQKPGQSPRLLINYASWRYTSVPDRFTGSGYGTEFTLTISSLQSEDFAVYFCQQDWSSPRTFGGGTKVEIK

SEQ ID NO: 10680 - protein, 122 aa, synthetic construct; identical to SEQ ID NO: 6246
  source 1..122: note = Description of Artificial Sequence: Synthetic polypeptide; note = VH of XENP019143

SEQ ID NO: 10681 - protein, 107 aa, synthetic construct
  source 1..107: note = Description of Artificial Sequence: Synthetic polypeptide; note = VL of XENP019143
SIVMTQSPATLSVSPGERATLSCRASQSVGNDVAWYQQKPGQSPRLLINYASWRYTSVPDRFTGSGYGTEFTLTISSLQSEDFAVYFCQQDWSSPRTFGGGTKVEIK

SEQ ID NO: 10682 - protein, 5 aa, synthetic construct
  source 1..5: note = Description of Artificial Sequence: Synthetic peptide; note = XENP019143 vhCDR1
NYWMN

SEQ ID NO: 10683 - protein, 19 aa, synthetic construct
  source 1..19: note = Description of Artificial Sequence: Synthetic peptide; note = XENP019143 vhCDR2
EIRLKSNNYATHYAEPVKG

SEQ ID NO: 10684 - protein, 11 aa, synthetic construct
  source 1..11: note = Description of Artificial Sequence: Synthetic peptide; note = XENP019143 vhCDR3
YYGNYGGYFDV

SEQ ID NO: 10685 - protein, 11 aa, synthetic construct
  source 1..11: note = Description of Artificial Sequence: Synthetic peptide; note = XENP019143 vlCDR1
RASQSVGNDVA

SEQ ID NO: 10686 - protein, 7 aa, synthetic construct
  source 1..7: note = Description of Artificial Sequence: Synthetic peptide; note = XENP019143 vlCDR2
YASWRYT

SEQ ID NO: 10687 - protein, 9 aa, synthetic construct
  source 1..9: note = Description of Artificial Sequence: Synthetic peptide; note = XENP019143 vlCDR3
QQDWSSPRT

SEQ ID NO: 10688 - protein, 249 aa, synthetic construct
  source 1..249: note = Description of Artificial Sequence: Synthetic polypeptide; note = XENP019144 1G6_H1_L1.183_scFv(GKPGS)4
EVQLVESGGGLVKPGGSLRLSCAASGFTFSNYWMNWVRQAPGKGLEWVGEIRLKSNNYATHYAEPVKGRFTISRDDSKSTVYLQMNSLKTEDTAVYYCTRYYGNYGGYFDVWGAGTLVTVSSGKPGSGKPGSGKPGSGKPGSSIVMTQSPATLSVSPGERATLSCRASQSVGNDVAWYQQKPGQSPRLLINYASWRYTSVPDRFTGSGYGTEFTLTISSLQSEDFAVYFCQQDFSSPRTFGGGTKVEIK

SEQ ID NO: 10689 - protein, 122 aa, synthetic construct; identical to SEQ ID NO: 6246
  source 1..122: note = Description of Artificial Sequence: Synthetic polypeptide; note = VH of XENP019144

SEQ ID NO: 10690 - protein, 107 aa, synthetic construct
  source 1..107: note = Description of Artificial Sequence: Synthetic polypeptide; note = VL of XENP019144
SIVMTQSPATLSVSPGERATLSCRASQSVGNDVAWYQQKPGQSPRLLINYASWRYTSVPDRFTGSGYGTEFTLTISSLQSEDFAVYFCQQDFSSPRTFGGGTKVEIK

SEQ ID NO: 10691 - protein, 5 aa, synthetic construct
  source 1..5: note = Description of Artificial Sequence: Synthetic peptide; note = XENP019144 vhCDR1
NYWMN

SEQ ID NO: 10692 - protein, 19 aa, synthetic construct
  source 1..19: note = Description of Artificial Sequence: Synthetic peptide; note = XENP019144 vhCDR2
EIRLKSNNYATHYAEPVKG

SEQ ID NO: 10693 - protein, 11 aa, synthetic construct
  source 1..11: note = Description of Artificial Sequence: Synthetic peptide; note = XENP019144 vhCDR3
YYGNYGGYFDV

SEQ ID NO: 10694 - protein, 11 aa, synthetic construct
  source 1..11: note = Description of Artificial Sequence: Synthetic peptide; note = XENP019144 vlCDR1
RASQSVGNDVA

SEQ ID NO: 10695 - protein, 7 aa, synthetic construct
  source 1..7: note = Description of Artificial Sequence: Synthetic peptide; note = XENP019144 vlCDR2
YASWRYT

SEQ ID NO: 10696 - protein, 9 aa, synthetic construct
  source 1..9: note = Description of Artificial Sequence: Synthetic peptide; note = XENP019144 vlCDR3
QQDFSSPRT

SEQ ID NO: 10697 - protein, 249 aa, synthetic construct
  source 1..249: note = Description of Artificial Sequence: Synthetic polypeptide; note = XENP019145 1G6_H1_L1.184_scFv(GKPGS)4
EVQLVESGGGLVKPGGSLRLSCAASGFTFSNYWMNWVRQAPGKGLEWVGEIRLKSNNYATHYAEPVKGRFTISRDDSKSTVYLQMNSLKTEDTAVYYCTRYYGNYGGYFDVWGAGTLVTVSSGKPGSGKPGSGKPGSGKPGSSIVMTQSPATLSVSPGERATLSCRASQSVGNDVAWYQQKPGQSPRLLINYASWRYTSVPDRFTGSGYGTEFTLTISSLQSEDFAVYFCQQDGSSPRTFGGGTKVEIK

SEQ ID NO: 10698 - protein, 122 aa, synthetic construct; identical to SEQ ID NO: 6246
  source 1..122: note = Description of Artificial Sequence: Synthetic polypeptide; note = VH of XENP019145

SEQ ID NO: 10699 - protein, 107 aa, synthetic construct
  source 1..107: note = Description of Artificial Sequence: Synthetic polypeptide; note = VL of XENP019145
SIVMTQSPATLSVSPGERATLSCRASQSVGNDVAWYQQKPGQSPRLLINYASWRYTSVPDRFTGSGYGTEFTLTISSLQSEDFAVYFCQQDGSSPRTFGGGTKVEIK

SEQ ID NO: 10700 - protein, 5 aa, synthetic construct
  source 1..5: note = Description of Artificial Sequence: Synthetic peptide; note = XENP019145 vhCDR1
NYWMN

SEQ ID NO: 10701 - protein, 19 aa, synthetic construct
  source 1..19: note = Description of Artificial Sequence: Synthetic peptide; note = XENP019145 vhCDR2
EIRLKSNNYATHYAEPVKG

SEQ ID NO: 10702 - protein, 11 aa, synthetic construct
  source 1..11: note = Description of Artificial Sequence: Synthetic peptide; note = XENP019145 vhCDR3
YYGNYGGYFDV

SEQ ID NO: 10703 - protein, 11 aa, synthetic construct
  source 1..11: note = Description of Artificial Sequence: Synthetic peptide; note = XENP019145 vlCDR1
RASQSVGNDVA

SEQ ID NO: 10704 - protein, 7 aa, synthetic construct
  source 1..7: note = Description of Artificial Sequence: Synthetic peptide; note = XENP019145 vlCDR2
YASWRYT

SEQ ID NO: 10705 - protein, 9 aa, synthetic construct
  source 1..9: note = Description of Artificial Sequence: Synthetic peptide; note = XENP019145 vlCDR3
QQDGSSPRT

SEQ ID NO: 10706 - protein, 249 aa, synthetic construct
  source 1..249: note = Description of Artificial Sequence: Synthetic polypeptide; note = XENP019146 1G6_H1_L1.185_scFv(GKPGS)4
EVQLVESGGGLVKPGGSLRLSCAASGFTFSNYWMNWVRQAPGKGLEWVGEIRLKSNNYATHYAEPVKGRFTISRDDSKSTVYLQMNSLKTEDTAVYYCTRYYGNYGGYFDVWGAGTLVTVSSGKPGSGKPGSGKPGSGKPGSEIVMTQSPATLSVSPGERATLSCRASQSVSNDLAWYQQKPGQSPRLLINYASHRYTGVPARFSGSGYGTEFTLTISSLQSEDFAVYYCQQDYSSPRTFGGGTKVEIK

SEQ ID NO: 10707 - protein, 122 aa, synthetic construct; identical to SEQ ID NO: 6246
  source 1..122: note = Description of Artificial Sequence: Synthetic polypeptide; note = VH of XENP019146

SEQ ID NO: 10708 - protein, 107 aa, synthetic construct
  source 1..107: note = Description of Artificial Sequence: Synthetic polypeptide; note = VL of XENP019146
EIVMTQSPATLSVSPGERATLSCRASQSVSNDLAWYQQKPGQSPRLLINYASHRYTGVPARFSGSGYGTEFTLTISSLQSEDFAVYYCQQDYSSPRTFGGGTKVEIK

SEQ ID NO: 10709 - protein, 5 aa, synthetic construct
  source 1..5: note = Description of Artificial Sequence: Synthetic peptide; note = XENP019146 vhCDR1
NYWMN

SEQ ID NO: 10710 - protein, 19 aa, synthetic construct
  source 1..19: note = Description of Artificial Sequence: Synthetic peptide; note = XENP019146 vhCDR2
EIRLKSNNYATHYAEPVKG

SEQ ID NO: 10711 - protein, 11 aa, synthetic construct
  source 1..11: note = Description of Artificial Sequence: Synthetic peptide; note = XENP019146 vhCDR3
YYGNYGGYFDV

SEQ ID NO: 10712 - protein, 11 aa, synthetic construct
  source 1..11: note = Description of Artificial Sequence: Synthetic peptide; note = XENP019146 vlCDR1
RASQSVSNDLA

SEQ ID NO: 10713 - protein, 7 aa, synthetic construct
  source 1..7: note = Description of Artificial Sequence: Synthetic peptide; note = XENP019146 vlCDR2
YASHRYT

SEQ ID NO: 10714 - protein, 9 aa, synthetic construct
  source 1..9: note = Description of Artificial Sequence: Synthetic peptide; note = XENP019146 vlCDR3
QQDYSSPRT

SEQ ID NO: 10715 - protein, 249 aa, synthetic construct
  source 1..249: note = Description of Artificial Sequence: Synthetic polypeptide; note = XENP019147 1G6_H1_L1.186_scFv(GKPGS)4
EVQLVESGGGLVKPGGSLRLSCAASGFTFSNYWMNWVRQAPGKGLEWVGEIRLKSNNYATHYAEPVKGRFTISRDDSKSTVYLQMNSLKTEDTAVYYCTRYYGNYGGYFDVWGAGTLVTVSSGKPGSGKPGSGKPGSGKPGSDIVMTQSPATLSVSPGERATLSCRASQSVSNDLAWYQQKPGQSPRLLINYASHRYTGVPDRFSGSGYGTEFTLTISSLQSEDFAVYYCQQDYSSPRTFGGGTKVEIK

SEQ ID NO: 10716 - protein, 122 aa, synthetic construct; identical to SEQ ID NO: 6246
  source 1..122: note = Description of Artificial Sequence: Synthetic polypeptide; note = VH of XENP019147

SEQ ID NO: 10717 - protein, 107 aa, synthetic construct
  source 1..107: note = Description of Artificial Sequence: Synthetic polypeptide; note = VL of XENP019147
DIVMTQSPATLSVSPGERATLSCRASQSVSNDLAWYQQKPGQSPRLLINYASHRYTGVPDRFSGSGYGTEFTLTISSLQSEDFAVYYCQQDYSSPRTFGGGTKVEIK

SEQ ID NO: 10718 - protein, 5 aa, synthetic construct
  source 1..5: note = Description of Artificial Sequence: Synthetic peptide; note = XENP019147 vhCDR1
NYWMN

SEQ ID NO: 10719 - protein, 19 aa, synthetic construct
  source 1..19: note = Description of Artificial Sequence: Synthetic peptide; note = XENP019147 vhCDR2
EIRLKSNNYATHYAEPVKG

SEQ ID NO: 10720 - protein, 11 aa, synthetic construct
  source 1..11: note = Description of Artificial Sequence: Synthetic peptide; note = XENP019147 vhCDR3
YYGNYGGYFDV

SEQ ID NO: 10721 - protein, 11 aa, synthetic construct
  source 1..11: note = Description of Artificial Sequence: Synthetic peptide; note = XENP019147 vlCDR1
RASQSVSNDLA

SEQ ID NO: 10722 - protein, 7 aa, synthetic construct
  source 1..7: note = Description of Artificial Sequence: Synthetic peptide; note = XENP019147 vlCDR2
YASHRYT

SEQ ID NO: 10723 - protein, 9 aa, synthetic construct
  source 1..9: note = Description of Artificial Sequence: Synthetic peptide; note = XENP019147 vlCDR3
QQDYSSPRT

SEQ ID NO: 10724 - protein, 249 aa, synthetic construct
  source 1..249: note = Description of Artificial Sequence: Synthetic polypeptide; note = XENP019148 1G6_H1.257_L1.152_scFv(GKPGS)4
EVQLVESGGGLVKPGGSLRLSCAASGFTFSNYWMNWVRQAPGKGLEWVGEIRLKSNNYATHYAEPVKGRFTISRDDSKSTVYLQMNSLKTEDTAVYYCTRYYGNYGGYFDVWGRGTLVTVSSGKPGSGKPGSGKPGSGKPGSSIVMTQSPATLSVSPGERATLSCRASQSVSNDVAWYQQKPGESPRLLINYASHRYTGVPDRFTGSGYGTEFTLTISSLQSEDFAVYFCQQDYSSPRTFGGGTKVEIK

SEQ ID NO: 10725 - protein, 122 aa, synthetic construct; identical to SEQ ID NO: 10167
  source 1..122: note = Description of Artificial Sequence: Synthetic polypeptide; note = VH of XENP019148

SEQ ID NO: 10726 - protein, 107 aa, synthetic construct; identical to SEQ ID NO: 10411
  source 1..107: note = Description of Artificial Sequence: Synthetic polypeptide; note = VL of XENP019148

SEQ ID NO: 10727 - protein, 5 aa, synthetic construct
  source 1..5: note = Description of Artificial Sequence: Synthetic peptide; note = XENP019148 vhCDR1
NYWMN

SEQ ID NO: 10728 - protein, 19 aa, synthetic construct
  source 1..19: note = Description of Artificial Sequence: Synthetic peptide; note = XENP019148 vhCDR2
EIRLKSNNYATHYAEPVKG

SEQ ID NO: 10729 - protein, 11 aa, synthetic construct
  source 1..11: note = Description of Artificial Sequence: Synthetic peptide; note = XENP019148 vhCDR3
YYGNYGGYFDV

SEQ ID NO: 10730 - protein, 11 aa, synthetic construct
  source 1..11: note = Description of Artificial Sequence: Synthetic peptide; note = XENP019148 vlCDR1
RASQSVSNDVA

SEQ ID NO: 10731 - protein, 7 aa, synthetic construct
  source 1..7: note = Description of Artificial Sequence: Synthetic peptide; note = XENP019148 vlCDR2
YASHRYT

SEQ ID NO: 10732 - protein, 9 aa, synthetic construct
  source 1..9: note = Description of Artificial Sequence: Synthetic peptide; note = XENP019148 vlCDR3
QQDYSSPRT

SEQ ID NO: 10733 - protein, 249 aa, synthetic construct
  source 1..249: note = Description of Artificial Sequence: Synthetic polypeptide; note = XENP019149 1G6_H1.257_L1.151_scFv(GKPGS)4
EVQLVESGGGLVKPGGSLRLSCAASGFTFSNYWMNWVRQAPGKGLEWVGEIRLKSNNYATHYAEPVKGRFTISRDDSKSTVYLQMNSLKTEDTAVYYCTRYYGNYGGYFDVWGRGTLVTVSSGKPGSGKPGSGKPGSGKPGSSIVMTQSPATLSVSPGERATLSCRASQSVSNDVAWYQQKPEQSPRLLINYASHRYTGVPDRFTGSGYGTEFTLTISSLQSEDFAVYFCQQDYSSPRTFGGGTKVEIK

SEQ ID NO: 10734 - protein, 122 aa, synthetic construct; identical to SEQ ID NO: 10167
  source 1..122: note = Description of Artificial Sequence: Synthetic polypeptide; note = VH of XENP019149

SEQ ID NO: 10735 - protein, 107 aa, synthetic construct; identical to SEQ ID NO: 10402
  source 1..107: note = Description of Artificial Sequence: Synthetic polypeptide; note = VL of XENP019149

SEQ ID NO: 10736 - protein, 5 aa, synthetic construct
  source 1..5: note = Description of Artificial Sequence: Synthetic peptide; note = XENP019149 vhCDR1
NYWMN

SEQ ID NO: 10737 - protein, 19 aa, synthetic construct
  source 1..19: note = Description of Artificial Sequence: Synthetic peptide; note = XENP019149 vhCDR2
EIRLKSNNYATHYAEPVKG

SEQ ID NO: 10738 - protein, 11 aa, synthetic construct
  source 1..11: note = Description of Artificial Sequence: Synthetic peptide; note = XENP019149 vhCDR3
YYGNYGGYFDV

SEQ ID NO: 10739 - protein, 11 aa, synthetic construct
  source 1..11: note = Description of Artificial Sequence: Synthetic peptide; note = XENP019149 vlCDR1
RASQSVSNDVA

SEQ ID NO: 10740 - protein, 7 aa, synthetic construct
  source 1..7: note = Description of Artificial Sequence: Synthetic peptide; note = XENP019149 vlCDR2
YASHRYT

SEQ ID NO: 10741 - protein, 9 aa, synthetic construct
  source 1..9: note = Description of Artificial Sequence: Synthetic peptide; note = XENP019149 vlCDR3
QQDYSSPRT

SEQ ID NO: 10742 - protein, 249 aa, synthetic construct
  source 1..249: note = Description of Artificial Sequence: Synthetic polypeptide; note = XENP019150 1G6_H1.139_L1.134_scFv(GKPGS)4
EVQLVESGGGLVKPGGSLRLSCAASGFTFSNYWMNWVRQAPGKGLEWVGEIRLKSNNYATDYAEPVKGRFTISRDDSKSTVYLQMNSLKTEDTAVYYCTRYYGNYGGYFDVWGAGTLVTVSSGKPGSGKPGSGKPGSGKPGSSIVMTQSPATLSVSPGERATLSCRASQSVSNDVAWYQQKPGQSPRLLINYASHRYTGVPDRFTGSGYGTEFTLTISSLQSEDFAVYFCQQDYKSPRTFGGGTKVEIK

SEQ ID NO: 10743 - protein, 122 aa, synthetic construct; identical to SEQ ID NO: 7602
  source 1..122: note = Description of Artificial Sequence: Synthetic polypeptide; note = VH of XENP019150

SEQ ID NO: 10744 - protein, 107 aa, synthetic construct; identical to SEQ ID NO: 9700
  source 1..107: note = Description of Artificial Sequence: Synthetic polypeptide; note = VL of XENP019150

SEQ ID NO: 10745 - protein, 5 aa, synthetic construct
  source 1..5: note = Description of Artificial Sequence: Synthetic peptide; note = XENP019150 vhCDR1
NYWMN

SEQ ID NO: 10746 - protein, 19 aa, synthetic construct
  source 1..19: note = Description of Artificial Sequence: Synthetic peptide; note = XENP019150 vhCDR2
EIRLKSNNYATDYAEPVKG

SEQ ID NO: 10747 - protein, 11 aa, synthetic construct
  source 1..11: note = Description of Artificial Sequence: Synthetic peptide; note = XENP019150 vhCDR3
YYGNYGGYFDV

SEQ ID NO: 10748 - protein, 11 aa, synthetic construct
  source 1..11: note = Description of Artificial Sequence: Synthetic peptide; note = XENP019150 vlCDR1
RASQSVSNDVA

SEQ ID NO: 10749 - protein, 7 aa, synthetic construct
  source 1..7: note = Description of Artificial Sequence: Synthetic peptide; note = XENP019150 vlCDR2
YASHRYT

SEQ ID NO: 10750 - protein, 9 aa, synthetic construct
  source 1..9: note = Description of Artificial Sequence: Synthetic peptide; note = XENP019150 vlCDR3
QQDYKSPRT

SEQ ID NO: 10751 - protein, 249 aa, synthetic construct
  source 1..249: note = Description of Artificial Sequence: Synthetic polypeptide; note = XENP019151 1G6_H1.48_L1.187_scFv(GKPGS)4
EVQLVESGGGLVKPGGSLRLSCAASGFTFSNYWMNWVRKAPGKGLEWVGEIRLKSNNYATHYAEPVKGRFTISRDDSKSTVYLQMNSLKTEDTAVYYCTRYYGNYGGYFDVWGAGTLVTVSSGKPGSGKPGSGKPGSGKPGSSIVMTQSPATLSVSPGERATLSCRASQSVSNDVAWYQQKPGESPRLLINYASHRYTGVPDRFTGSGYGTEFTLTISSLQSEDFAVYFCQQDYSSPRTFGGGTKVEIK

SEQ ID NO: 10752 - protein, 122 aa, synthetic construct; identical to SEQ ID NO: 6786
  source 1..122: note = Description of Artificial Sequence: Synthetic polypeptide; note = VH of XENP019151

SEQ ID NO: 10753 - protein, 107 aa, synthetic construct; identical to SEQ ID NO: 10411
  source 1..107: note = Description of Artificial Sequence: Synthetic polypeptide; note = VL of XENP019151

SEQ ID NO: 10754 - protein, 11 aa, synthetic construct
  source 1..11: note = Description of Artificial Sequence: Synthetic peptide; note = XENP019151 vlCDR1
RASQSVSNDVA

SEQ ID NO: 10755 - protein, 7 aa, synthetic construct
  source 1..7: note = Description of Artificial Sequence: Synthetic peptide; note = XENP019151 vlCDR2
YASHRYT

SEQ ID NO: 10756 - protein, 9 aa, synthetic construct
  source 1..9: note = Description of Artificial Sequence: Synthetic peptide; note = XENP019151 vlCDR3
QQDYSSPRT

SEQ ID NO: 10757 - protein, 249 aa, synthetic construct
  source 1..249: note = Description of Artificial Sequence: Synthetic polypeptide; note = XENP019152 1G6_H1.48_L1.151_scFv(GKPGS)4
EVQLVESGGGLVKPGGSLRLSCAASGFTFSNYWMNWVRKAPGKGLEWVGEIRLKSNNYATHYAEPVKGRFTISRDDSKSTVYLQMNSLKTEDTAVYYCTRYYGNYGGYFDVWGAGTLVTVSSGKPGSGKPGSGKPGSGKPGSSIVMTQSPATLSVSPGERATLSCRASQSVSNDVAWYQQKPEQSPRLLINYASHRYTGVPDRFTGSGYGTEFTLTISSLQSEDFAVYFCQQDYSSPRTFGGGTKVEIK

SEQ ID NO: 10758 - protein, 122 aa, synthetic construct; identical to SEQ ID NO: 6786
  source 1..122: note = Description of Artificial Sequence: Synthetic polypeptide; note = VH of XENP019152

SEQ ID NO: 10759 - protein, 107 aa, synthetic construct; identical to SEQ ID NO: 10402
  source 1..107: note = Description of Artificial Sequence: Synthetic polypeptide; note = VL of XENP019152

SEQ ID NO: 10760 - protein, 11 aa, synthetic construct
  source 1..11: note = Description of Artificial Sequence: Synthetic peptide; note = XENP019152 vlCDR1
RASQSVSNDVA

SEQ ID NO: 10761 - protein, 7 aa, synthetic construct
  source 1..7: note = Description of Artificial Sequence: Synthetic peptide; note = XENP019152 vlCDR2
YASHRYT

SEQ ID NO: 10762 - protein, 9 aa, synthetic construct
  source 1..9: note = Description of Artificial Sequence: Synthetic peptide; note = XENP019152 vlCDR3
QQDYSSPRT

SEQ ID NO: 10763 - protein, 249 aa, synthetic construct
  source 1..249: note = Description of Artificial Sequence: Synthetic polypeptide; note = XENP019153 1G6_H1.43_L1.159_scFv(GKPGS)4
EVQLVESGGGLVKPGGSLRLSCAASGFTFSNYWMDWVRQAPGKGLEWVGEIRLKSNNYATHYAEPVKGRFTISRDDSKSTVYLQMNSLKTEDTAVYYCTRYYGNYGGYFDVWGAGTLVTVSSGKPGSGKPGSGKPGSGKPGSSIVMTQSPATLSVSPGERATLSCRASQSVSNDVAWYQQKPGQSPRLLINYASHRYTGVPDRFTGSGYGTEFTLTISSLQSEDFAVYFCKQDYSSPRTFGGGTKVEIK

SEQ ID NO: 10764 - protein, 122 aa, synthetic construct; identical to SEQ ID NO: 6741
  source 1..122: note = Description of Artificial Sequence: Synthetic polypeptide; note = VH of XENP019153

SEQ ID NO: 10765 - protein, 107 aa, synthetic construct; identical to SEQ ID NO: 10474
  source 1..107: note = Description of Artificial Sequence: Synthetic polypeptide; note = VL of XENP019153

SEQ ID NO: 10766 - protein, 5 aa, synthetic construct
  source 1..5: note = Description of Artificial Sequence: Synthetic peptide; note = XENP019153 vhCDR1
NYWMD

SEQ ID NO: 10767 - protein, 19 aa, synthetic construct
  source 1..19: note = Description of Artificial Sequence: Synthetic peptide; note = XENP019153 vhCDR2
EIRLKSNNYATHYAEPVKG

SEQ ID NO: 10768 - protein, 11 aa, synthetic construct
  source 1..11: note = Description of Artificial Sequence: Synthetic peptide; note = XENP019153 vhCDR3
YYGNYGGYFDV

SEQ ID NO: 10769 - protein, 11 aa, synthetic construct
  source 1..11: note = Description of Artificial Sequence: Synthetic peptide; note = XENP019153 vlCDR1
RASQSVSNDVA

SEQ ID NO: 10770 - protein, 7 aa, synthetic construct
  source 1..7: note = Description of Artificial Sequence: Synthetic peptide; note = XENP019153 vlCDR2
YASHRYT

SEQ ID NO: 10771 - protein, 9 aa, synthetic construct
  source 1..9: note = Description of Artificial Sequence: Synthetic peptide; note = XENP019153 vlCDR3
KQDYSSPRT

SEQ ID NO: 10772 - protein, 249 aa, synthetic construct
  source 1..249: note = Description of Artificial Sequence: Synthetic polypeptide; note = XENP019154 1G6_H1.90_L1.119_scFv(GKPGS)4
EVQLVESGGGLVKPGGSLRLSCAASGFTFSNYWMNWVRQAPGKGLEWVGEIRLYSNNYATHYAEPVKGRFTISRDDSKSTVYLQMNSLKTEDTAVYYCTRYYGNYGGYFDVWGAGTLVTVSSGKPGSGKPGSGKPGSGKPGSSIVMTQSPATLSVSPGERATLSCRASQSVSNDVAWYQQKPGQSPRLLINYASHRYTGVPDRFTGSGYGTEFTLTISSLQSEDFAVYFCQQDWSSPRTFGGGTKVEIK

SEQ ID NO: 10773 - protein, 122 aa, synthetic construct; identical to SEQ ID NO: 7161
  source 1..122: note = Description of Artificial Sequence: Synthetic polypeptide; note = VH of XENP019154

SEQ ID NO: 10774 - protein, 107 aa, synthetic construct; identical to SEQ ID NO: 9565
  source 1..107: note = Description of Artificial Sequence: Synthetic polypeptide; note = VL of XENP019154

SEQ ID NO: 10775 - protein, 5 aa, synthetic construct
  source 1..5: note = Description of Artificial Sequence: Synthetic peptide; note = XENP019154 vhCDR1
NYWMN

SEQ ID NO: 10776 - protein, 19 aa, synthetic construct
  source 1..19: note = Description of Artificial Sequence: Synthetic peptide; note = XENP019154 vhCDR2
EIRLYSNNYATHYAEPVKG

SEQ ID NO: 10777 - protein, 11 aa, synthetic construct
  source 1..11: note = Description of Artificial Sequence: Synthetic peptide; note = XENP019154 vhCDR3
YYGNYGGYFDV

SEQ ID NO: 10778 - protein, 11 aa, synthetic construct
  source 1..11: note = Description of Artificial Sequence: Synthetic peptide; note = XENP019154 vlCDR1
RASQSVSNDVA

SEQ ID NO: 10779 - protein, 7 aa, synthetic construct
  source 1..7: note = Description of Artificial Sequence: Synthetic peptide; note = XENP019154 vlCDR2
YASHRYT

SEQ ID NO: 10780 - protein, 9 aa, synthetic construct
  source 1..9: note = Description of Artificial Sequence: Synthetic peptide; note = XENP019154 vlCDR3
QQDWSSPRT

SEQ ID NO: 10781 - protein, 249 aa, synthetic construct
  source 1..249: note = Description of Artificial Sequence: Synthetic polypeptide; note = XENP019155 1G6_H1.90_L1.23_scFv(GKPGS)4
EVQLVESGGGLVKPGGSLRLSCAASGFTFSNYWMNWVRQAPGKGLEWVGEIRLYSNNYATHYAEPVKGRFTISRDDSKSTVYLQMNSLKTEDTAVYYCTRYYGNYGGYFDVWGAGTLVTVSSGKPGSGKPGSGKPGSGKPGSSIVMTQSPATLSVSPGERATLSCRASQSVGNDVAWYQQKPGQSPRLLINYASHRYTGVPDRFTGSGYGTEFTLTISSLQSEDFAVYFCQQDYSSPRTFGGGTKVEIK

SEQ ID NO: 10782 - protein, 122 aa, synthetic construct; identical to SEQ ID NO: 7161
  source 1..122: note = Description of Artificial Sequence: Synthetic polypeptide; note = VH of XENP019155

SEQ ID NO: 10783 - protein, 107 aa, synthetic construct; identical to SEQ ID NO: 8701
  source 1..107: note = Description of Artificial Sequence: Synthetic polypeptide; note = VL of XENP019155

SEQ ID NO: 10784 - protein, 5 aa, synthetic construct
  source 1..5: note = Description of Artificial Sequence: Synthetic peptide; note = XENP019155 vhCDR1
NYWMN

SEQ ID NO: 10785 - protein, 19 aa, synthetic construct
  source 1..19: note = Description of Artificial Sequence: Synthetic peptide; note = XENP019155 vhCDR2
EIRLYSNNYATHYAEPVKG

SEQ ID NO: 10786 - protein, 11 aa, synthetic construct
  source 1..11: note = Description of Artificial Sequence: Synthetic peptide; note = XENP019155 vhCDR3
YYGNYGGYFDV

SEQ ID NO: 10787 - protein, 11 aa, synthetic construct
  source 1..11: note = Description of Artificial Sequence: Synthetic peptide; note = XENP019155 vlCDR1
RASQSVGNDVA

SEQ ID NO: 10788 - protein, 7 aa, synthetic construct
  source 1..7: note = Description of Artificial Sequence: Synthetic peptide; note = XENP019155 vlCDR2
YASHRYT

SEQ ID NO: 10789 - protein, 9 aa, synthetic construct
  source 1..9: note = Description of Artificial Sequence: Synthetic peptide; note = XENP019155 vlCDR3
QQDYSSPRT

SEQ ID NO: 10790 - protein, 249 aa, synthetic construct
  source 1..249: note = Description of Artificial Sequence: Synthetic polypeptide; note = XENP019156 1G6_H1.90_L1.67_scFv(GKPGS)4
EVQLVESGGGLVKPGGSLRLSCAASGFTFSNYWMNWVRQAPGKGLEWVGEIRLYSNNYATHYAEPVKGRFTISRDDSKSTVYLQMNSLKTEDTAVYYCTRYYGNYGGYFDVWGAGTLVTVSSGKPGSGKPGSGKPGSGKPGSSIVMTQSPATLSVSPGERATLSCRASQSVSNDVAWYQQKPGQSPRLLINYASWRYTGVPDRFTGSGYGTEFTLTISSLQSEDFAVYFCQQDYSSPRTFGGGTKVEIK

SEQ ID NO: 10791 - protein, 122 aa, synthetic construct; identical to SEQ ID NO: 7161
  source 1..122: note = Description of Artificial Sequence: Synthetic polypeptide; note = VH of XENP019156

SEQ ID NO: 10792 - protein, 107 aa, synthetic construct; identical to SEQ ID NO: 9097
  source 1..107: note = Description of Artificial Sequence: Synthetic polypeptide; note = VL of XENP019156

SEQ ID NO: 10793 - protein, 5 aa, synthetic construct
  source 1..5: note = Description of Artificial Sequence: Synthetic peptide; note = XENP019156 vhCDR1
NYWMN

SEQ ID NO: 10794 - protein, 19 aa, synthetic construct
  source 1..19: note = Description of Artificial Sequence: Synthetic peptide; note = XENP019156 vhCDR2
EIRLYSNNYATHYAEPVKG

SEQ ID NO: 10795 - protein, 11 aa, synthetic construct
  source 1..11: note = Description of Artificial Sequence: Synthetic peptide; note = XENP019156 vhCDR3
YYGNYGGYFDV

SEQ ID NO: 10796 - protein, 11 aa, synthetic construct
  source 1..11: note = Description of Artificial Sequence: Synthetic peptide; note = XENP019156 vlCDR1
RASQSVSNDVA

SEQ ID NO: 10797 - protein, 7 aa, synthetic construct
  source 1..7: note = Description of Artificial Sequence: Synthetic peptide; note = XENP019156 vlCDR2
YASWRYT

SEQ ID NO: 10798 - protein, 9 aa, synthetic construct
  source 1..9: note = Description of Artificial Sequence: Synthetic peptide; note = XENP019156 vlCDR3
QQDYSSPRT

SEQ ID NO: 10799 - protein, 249 aa, synthetic construct
  source 1..249: note = Description of Artificial Sequence: Synthetic polypeptide; note = XENP019157 1G6_H1.90_L1.94_scFv(GKPGS)4
EVQLVESGGGLVKPGGSLRLSCAASGFTFSNYWMNWVRQAPGKGLEWVGEIRLYSNNYATHYAEPVKGRFTISRDDSKSTVYLQMNSLKTEDTAVYYCTRYYGNYGGYFDVWGAGTLVTVSSGKPGSGKPGSGKPGSGKPGSSIVMTQSPATLSVSPGERATLSCRASQSVSNDVAWYQQKPGQSPRLLINYASHRYTSVPDRFTGSGYGTEFTLTISSLQSEDFAVYFCQQDYSSPRTFGGGTKVEIK

SEQ ID NO: 10800 - protein, 122 aa, synthetic construct; identical to SEQ ID NO: 7161
  source 1..122: note = Description of Artificial Sequence: Synthetic polypeptide; note = VH of XENP019157

SEQ ID NO: 10801 - protein, 107 aa, synthetic construct; identical to SEQ ID NO: 9340
  source 1..107: note = Description of Artificial Sequence: Synthetic polypeptide; note = VL of XENP019157

SEQ ID NO: 10802 - protein, 5 aa, synthetic construct
  source 1..5: note = Description of Artificial Sequence: Synthetic peptide; note = XENP019157 vhCDR1
NYWMN

SEQ ID NO: 10803 - protein, 19 aa, synthetic construct
  source 1..19: note = Description of Artificial Sequence: Synthetic peptide; note = XENP019157 vhCDR2
EIRLYSNNYATHYAEPVKG

SEQ ID NO: 10804 - protein, 11 aa, synthetic construct
  source 1..11: note = Description of Artificial Sequence: Synthetic peptide; note = XENP019157 vhCDR3
YYGNYGGYFDV

SEQ ID NO: 10805 - protein, 11 aa, synthetic construct
  source 1..11: note = Description of Artificial Sequence: Synthetic peptide; note = XENP019157 vlCDR1
RASQSVSNDVA

SEQ ID NO: 10806 - protein, 7 aa, synthetic construct
  source 1..7: note = Description of Artificial Sequence: Synthetic peptide; note = XENP019157 vlCDR2
YASHRYT

SEQ ID NO: 10807 - protein, 9 aa, synthetic construct
  source 1..9: note = Description of Artificial Sequence: Synthetic peptide; note = XENP019157 vlCDR3
QQDYSSPRT

SEQ ID NO: 10808 - protein, 249 aa, synthetic construct
  source 1..249: note = Description of Artificial Sequence: Synthetic polypeptide; note = XENP019158 1G6_H1.90_L1.116_scFv(GKPGS)4
EVQLVESGGGLVKPGGSLRLSCAASGFTFSNYWMNWVRQAPGKGLEWVGEIRLYSNNYATHYAEPVKGRFTISRDDSKSTVYLQMNSLKTEDTAVYYCTRYYGNYGGYFDVWGAGTLVTVSSGKPGSGKPGSGKPGSGKPGSSIVMTQSPATLSVSPGERATLSCRASQSVSNDVAWYQQKPGQSPRLLINYASHRYTGVPDRFTGSGYGTEFTLTISSLQSEDFAVYFCQQDFSSPRTFGGGTKVEIK

SEQ ID NO: 10809 - protein, 122 aa, synthetic construct; identical to SEQ ID NO: 7161
  source 1..122: note = Description of Artificial Sequence: Synthetic polypeptide; note = VH of XENP019158

SEQ ID NO: 10810 - protein, 107 aa, synthetic construct; identical to SEQ ID NO: 9538
  source 1..107: note = Description of Artificial Sequence: Synthetic polypeptide; note = VL of XENP019158

SEQ ID NO: 10811 - protein, 5 aa, synthetic construct
  source 1..5: note = Description of Artificial Sequence: Synthetic peptide; note = XENP019158 vhCDR1
NYWMN

SEQ ID NO: 10812 - protein, 19 aa, synthetic construct
  source 1..19: note = Description of Artificial Sequence: Synthetic peptide; note = XENP019158 vhCDR2
EIRLYSNNYATHYAEPVKG

SEQ ID NO: 10813 - protein, 11 aa, synthetic construct
  source 1..11: note = Description of Artificial Sequence: Synthetic peptide; note = XENP019158 vhCDR3
YYGNYGGYFDV

SEQ ID NO: 10814 - protein, 11 aa, synthetic construct
  source 1..11: note = Description of Artificial Sequence: Synthetic peptide; note = XENP019158 vlCDR1
RASQSVSNDVA

SEQ ID NO: 10815 - protein, 7 aa, synthetic construct
  source 1..7: note = Description of Artificial Sequence: Synthetic peptide; note = XENP019158 vlCDR2
YASHRYT

SEQ ID NO: 10816 - protein, 9 aa, synthetic construct
  source 1..9: note = Description of Artificial Sequence: Synthetic peptide; note = XENP019158 vlCDR3
QQDFSSPRT

SEQ ID NO: 10817 - protein, 249 aa, synthetic construct; identical to SEQ ID NO: 10772
  source 1..249: note = Description of Artificial Sequence: Synthetic polypeptide; note = XENP019159 1G6_H1.155_L1.119_scFv(GKPGS)4

SEQ ID NO: 10818 - protein, 122 aa, synthetic construct; identical to SEQ ID NO: 7161
  source 1..122: note = Description of Artificial Sequence: Synthetic polypeptide; note = VH of XENP019159

SEQ ID NO: 10819 - protein, 107 aa, synthetic construct; identical to SEQ ID NO: 9565
  source 1..107: note = Description of Artificial Sequence: Synthetic polypeptide; note = VL of XENP019159

SEQ ID NO: 10820 - protein, 5 aa, synthetic construct
  source 1..5: note = Description of Artificial Sequence: Synthetic peptide; note = XENP019159 vhCDR1
NYWMN

SEQ ID NO: 10821 - protein, 19 aa, synthetic construct
  source 1..19: note = Description of Artificial Sequence: Synthetic peptide; note = XENP019159 vhCDR2
EIRLYSNNYATHYAEPVKG

SEQ ID NO: 10822 - protein, 11 aa, synthetic construct
  source 1..11: note = Description of Artificial Sequence: Synthetic peptide; note = XENP019159 vhCDR3
YYGNYGGYFDV

SEQ ID NO: 10823 - protein, 11 aa, synthetic construct
  source 1..11: note = Description of Artificial Sequence: Synthetic peptide; note = XENP019159 vlCDR1
RASQSVSNDVA

SEQ ID NO: 10824 - protein, 7 aa, synthetic construct
  source 1..7: note = Description of Artificial Sequence: Synthetic peptide; note = XENP019159 vlCDR2
YASHRYT

SEQ ID NO: 10825 - protein, 9 aa, synthetic construct
  source 1..9: note = Description of Artificial Sequence: Synthetic peptide; note = XENP019159 vlCDR3
QQDWSSPRT

SEQ ID NO: 10826 - protein, 249 aa, synthetic construct
  source 1..249: note = Description of Artificial Sequence: Synthetic polypeptide; note = XENP019182 1G6_H1_L1.190_scFv(GKPGS)4
EVQLVESGGGLVKPGGSLRLSCAASGFTFSNYWMNWVRQAPGKGLEWVGEIRLKSNNYATHYAEPVKGRFTISRDDSKSTVYLQMNSLKTEDTAVYYCTRYYGNYGGYFDVWGAGTLVTVSSGKPGSGKPGSGKPGSGKPGSSIVMTQSPATLSVSPGERATLSCRASQSVGNDVAWYQQKPGQSPRLLINYASHRYTGVPDRFTGSGYGTEFTLTISSLQSEDFAVYFCQQDFSSPRTFGGGTKVEIK

SEQ ID NO: 10827 - protein, 122 aa, synthetic construct; identical to SEQ ID NO: 6246
  source 1..122: note = Description of Artificial Sequence: Synthetic polypeptide; note = VH of XENP019182

SEQ ID NO: 10828 - protein, 107 aa, synthetic construct
  source 1..107: note = Description of Artificial Sequence: Synthetic polypeptide; note = VL of XENP019182
SIVMTQSPATLSVSPGERATLSCRASQSVGNDVAWYQQKPGQSPRLLINYASHRYTGVPDRFTGSGYGTEFTLTISSLQSEDFAVYFCQQDFSSPRTFGGGTKVEIK

SEQ ID NO: 10829 - protein, 5 aa, synthetic construct
  source 1..5: note = Description of Artificial Sequence: Synthetic peptide; note = XENP019182 vhCDR1
NYWMN

SEQ ID NO: 10830 - protein, 19 aa, synthetic construct
  source 1..19: note = Description of Artificial Sequence: Synthetic peptide; note = XENP019182 vhCDR2
EIRLKSNNYATHYAEPVKG

SEQ ID NO: 10831 - protein, 11 aa, synthetic construct
  source 1..11: note = Description of Artificial Sequence: Synthetic peptide; note = XENP019182 vhCDR3
YYGNYGGYFDV

SEQ ID NO: 10832 - protein, 11 aa, synthetic construct
  source 1..11: note = Description of Artificial Sequence: Synthetic peptide; note = XENP019182 vlCDR1
RASQSVGNDVA

SEQ ID NO: 10833 - protein, 7 aa, synthetic construct
  source 1..7: note = Description of Artificial Sequence: Synthetic peptide; note = XENP019182 vlCDR2
YASHRYT

SEQ ID NO: 10834 - protein, 9 aa, synthetic construct
  source 1..9: note = Description of Artificial Sequence: Synthetic peptide; note = XENP019182 vlCDR3
QQDFSSPRT

SEQ ID NO: 10835 - protein, 249 aa, synthetic construct
  source 1..249: note = Description of Artificial Sequence: Synthetic polypeptide; note = XENP019183 1G6_H1_L1.191_scFv(GKPGS)4
EVQLVESGGGLVKPGGSLRLSCAASGFTFSNYWMNWVRQAPGKGLEWVGEIRLKSNNYATHYAEPVKGRFTISRDDSKSTVYLQMNSLKTEDTAVYYCTRYYGNYGGYFDVWGAGTLVTVSSGKPGSGKPGSGKPGSGKPGSSIVMTQSPATLSVSPGERATLSCRASQSVGNDVAWYQQKPGQSPRLLINYASHRYTGVPDRFTGSGYGTEFTLTISSLQSEDFAVYFCQQDWSSPRTFGGGTKVEIK

SEQ ID NO: 10836 - protein, 122 aa, synthetic construct; identical to SEQ ID NO: 6246
  source 1..122: note = Description of Artificial Sequence: Synthetic polypeptide; note = VH of XENP019183

SEQ ID NO: 10837 - protein, 107 aa, synthetic construct
  source 1..107: note = Description of Artificial Sequence: Synthetic polypeptide; note = VL of XENP019183
SIVMTQSPATLSVSPGERATLSCRASQSVGNDVAWYQQKPGQSPRLLINYASHRYTGVPDRFTGSGYGTEFTLTISSLQSEDFAVYFCQQDWSSPRTFGGGTKVEIK

SEQ ID NO: 10838 - protein, 5 aa, synthetic construct
  source 1..5: note = Description of Artificial Sequence: Synthetic peptide; note = XENP019183 vhCDR1
NYWMN

SEQ ID NO: 10839 - protein, 19 aa, synthetic construct
  source 1..19: note = Description of Artificial Sequence: Synthetic peptide; note = XENP019183 vhCDR2
EIRLKSNNYATHYAEPVKG

SEQ ID NO: 10840 - protein, 11 aa, synthetic construct
  source 1..11: note = Description of Artificial Sequence: Synthetic peptide; note = XENP019183 vhCDR3
YYGNYGGYFDV

SEQ ID NO: 10841 - protein, 11 aa, synthetic construct
  source 1..11: note = Description of Artificial Sequence: Synthetic peptide; note = XENP019183 vlCDR1
RASQSVGNDVA

SEQ ID NO: 10842 - protein, 7 aa, synthetic construct
  source 1..7: note = Description of Artificial Sequence: Synthetic peptide; note = XENP019183 vlCDR2
YASHRYT

SEQ ID NO: 10843 - protein, 9 aa, synthetic construct
  source 1..9: note = Description of Artificial Sequence: Synthetic peptide; note = XENP019183 vlCDR3
QQDWSSPRT

SEQ ID NO: 10844 - protein, 480 aa, synthetic construct
  source 1..480: note = Description of Artificial Sequence: Synthetic polypeptide; note = XENP019202 1G6_H1.278_L1_scFv(GKPGS)4
EVQLVESGGGLVKPGGSLRLSCVASGFTFSNYWMNWVRQAPGKGLEWVAEIRLYSNNYATHYAESVKGRFTISRDDSKSTLYLQMNNLKTEDTGVYYCTRYYGNYGGYFDVWGQGTLVTVSSGKPGSGKPGSGKPGSGKPGSSIVMTQSPATLSVSPGERATLSCRASQSVSNDVAWYQQKPGQSPRLLINYASHRYTGVPDRFTGSGYGTEFTLTISSLQSEDFAVYFCQQDYSSPRTFGGGTKVEIKEPKSSDKTHTCPPCPAPPVAGPSVFLFPPKPKDTLMISRTPEVTCVVVDVKHEDPEVKFNWYVDGVEVHNAKTKPREEQYNSTYRVVSVLTVLHQDWLNGKEYKCKVSNKALPAPIEKTISKAKGQPREPQVYTLPPSREQMTKNQVKLTCLVKGFYPSDIAVEWESNGQPENNYKTTPPVLDSDGSFFLYSKLTVDKSRWQQGNVFSCSVMHEALHNHYTQKSLSLSPGK

SEQ ID NO: 10845 - protein, 122 aa, synthetic construct
  source 1..122: note = Description of Artificial Sequence: Synthetic polypeptide; note = VH of XENP019202
EVQLVESGGGLVKPGGSLRLSCVASGFTFSNYWMNWVRQAPGKGLEWVAEIRLYSNNYATHYAESVKGRFTISRDDSKSTLYLQMNNLKTEDTGVYYCTRYYGNYGGYFDVWGQGTLVTVSS

SEQ ID NO: 10846 - protein, 338 aa, synthetic construct
  source 1..338: note = Description of Artificial Sequence: Synthetic polypeptide; note = VL of XENP019202
SIVMTQSPATLSVSPGERATLSCRASQSVSNDVAWYQQKPGQSPRLLINYASHRYTGVPDRFTGSGYGTEFTLTISSLQSEDFAVYFCQQDYSSPRTFGGGTKVEIKEPKSSDKTHTCPPCPAPPVAGPSVFLFPPKPKDTLMISRTPEVTCVVVDVKHEDPEVKFNWYVDGVEVHNAKTKPREEQYNSTYRVVSVLTVLHQDWLNGKEYKCKVSNKALPAPIEKTISKAKGQPREPQVYTLPPSREQMTKNQVKLTCLVKGFYPSDIAVEWESNGQPENNYKTTPPVLDSDGSFFLYSKLTVDKSRWQQGNVFSCSVMHEALHNHYTQKSLSLSPGK

SEQ ID NO: 10847 - protein, 5 aa, synthetic construct
  source 1..5: note = Description of Artificial Sequence: Synthetic peptide; note = XENP019202 vhCDR1
NYWMN

SEQ ID NO: 10848 - protein, 19 aa, synthetic construct
  source 1..19: note = Description of Artificial Sequence: Synthetic peptide; note = XENP019202 vhCDR2
EIRLYSNNYATHYAESVKG

SEQ ID NO: 10849 - protein, 11 aa, synthetic construct
  source 1..11: note = Description of Artificial Sequence: Synthetic peptide; note = XENP019202 vhCDR3
YYGNYGGYFDV

SEQ ID NO: 10850 - protein, 11 aa, synthetic construct
  source 1..11: note = Description of Artificial Sequence: Synthetic peptide; note = XENP019202 vlCDR1
RASQSVSNDVA

SEQ ID NO: 10851 - protein, 7 aa, synthetic construct
  source 1..7: note = Description of Artificial Sequence: Synthetic peptide; note = XENP019202 vlCDR2
YASHRYT

SEQ ID NO: 10852 - protein, 9 aa, synthetic construct
  source 1..9: note = Description of Artificial Sequence: Synthetic peptide; note = XENP019202 vlCDR3
QQDYSSPRT

SEQ ID NO: 10853 - protein, 249 aa, synthetic construct
  source 1..249: note = Description of Artificial Sequence: Synthetic polypeptide; note = XENP019203 1G6_H1_L1.188_scFv(GKPGS)4
EVQLVESGGGLVKPGGSLRLSCAASGFTFSNYWMNWVRQAPGKGLEWVGEIRLKSNNYATHYAEPVKGRFTISRDDSKSTVYLQMNSLKTEDTAVYYCTRYYGNYGGYFDVWGAGTLVTVSSGKPGSGKPGSGKPGSGKPGSEIVMTQSPATLSVSPGERVTLTCRASQSVGNDVAWYQQKPGQSPRLLINYASHRYTGVPDRFTGSGYGTEFTLTISSVQSEDFAVYFCQQDFSSPRTFGGGTKVEIK

SEQ ID NO: 10854 - protein, 122 aa, synthetic construct; identical to SEQ ID NO: 6246
  source 1..122: note = Description of Artificial Sequence: Synthetic polypeptide; note = VH of XENP019203

SEQ ID NO: 10855 - protein, 107 aa, synthetic construct
  source 1..107: note = Description of Artificial Sequence: Synthetic polypeptide; note = VL of XENP019203
EIVMTQSPATLSVSPGERVTLTCRASQSVGNDVAWYQQKPGQSPRLLINYASHRYTGVPDRFTGSGYGTEFTLTISSVQSEDFAVYFCQQDFSSPRTFGGGTKVEIK

SEQ ID NO: 10856 - protein, 5 aa, synthetic construct
  source 1..5: note = Description of Artificial Sequence: Synthetic peptide; note = XENP019203 vhCDR1
NYWMN

SEQ ID NO: 10857 - protein, 19 aa, synthetic construct
  source 1..19: note = Description of Artificial Sequence: Synthetic peptide; note = XENP019203 vhCDR2
EIRLKSNNYATHYAEPVKG

SEQ ID NO: 10858 - protein, 11 aa, synthetic construct
  source 1..11: note = Description of Artificial Sequence: Synthetic peptide; note = XENP019203 vhCDR3
YYGNYGGYFDV

SEQ ID NO: 10859 - protein, 11 aa, synthetic construct
  source 1..11: note = Description of Artificial Sequence: Synthetic peptide; note = XENP019203 vlCDR1
RASQSVGNDVA

SEQ ID NO: 10860 - protein, 7 aa, synthetic construct
  source 1..7: note = Description of Artificial Sequence: Synthetic peptide; note = XENP019203 vlCDR2
YASHRYT

SEQ ID NO: 10861 - protein, 9 aa, synthetic construct
  source 1..9: note = Description of Artificial Sequence: Synthetic peptide; note = XENP019203 vlCDR3
QQDFSSPRT

SEQ ID NO: 10862 - protein, 249 aa, synthetic construct
  source 1..249: note = Description of Artificial Sequence: Synthetic polypeptide; note = XENP019204 1G6_H1_L1.189_scFv(GKPGS)4
EVQLVESGGGLVKPGGSLRLSCAASGFTFSNYWMNWVRQAPGKGLEWVGEIRLKSNNYATHYAEPVKGRFTISRDDSKSTVYLQMNSLKTEDTAVYYCTRYYGNYGGYFDVWGAGTLVTVSSGKPGSGKPGSGKPGSGKPGSEIVLTQSPATLSVSPGERVTLTCRASQSVGNDVAWYQQKPGQAPRLLINYASHRYTGVPDRFTGSGYGTEFTLTISSVQSEDFAVYYCQQDFSSPRTFGGGTKVEIK

SEQ ID NO: 10863 - protein, 122 aa, synthetic construct; identical to SEQ ID NO: 6246
  source 1..122: note = Description of Artificial Sequence: Synthetic polypeptide; note = VH of XENP019204

SEQ ID NO: 10864 - protein, 107 aa, synthetic construct
  source 1..107: note = Description of Artificial Sequence: Synthetic polypeptide; note = VL of XENP019204
EIVLTQSPATLSVSPGERVTLTCRASQSVGNDVAWYQQKPGQAPRLLINYASHRYTGVPDRFTGSGYGTEFTLTISSVQSEDFAVYYCQQDFSSPRTFGGGTKVEIK

SEQ ID NO: 10865 - protein, 5 aa, synthetic construct
  source 1..5: note = Description of Artificial Sequence: Synthetic peptide; note = XENP019204 vhCDR1
NYWMN

SEQ ID NO: 10866 - protein, 19 aa, synthetic construct
  source 1..19: note = Description of Artificial Sequence: Synthetic peptide; note = XENP019204 vhCDR2
EIRLKSNNYATHYAEPVKG

SEQ ID NO: 10867 - protein, 11 aa, synthetic construct
  source 1..11: note = Description of Artificial Sequence: Synthetic peptide; note = XENP019204 vhCDR3
YYGNYGGYFDV

SEQ ID NO: 10868 - protein, 11 aa, synthetic construct
  source 1..11: note = Description of Artificial Sequence: Synthetic peptide; note = XENP019204 vlCDR1
RASQSVGNDVA

SEQ ID NO: 10869 - protein, 7 aa, synthetic construct
  source 1..7: note = Description of Artificial Sequence: Synthetic peptide; note = XENP019204 vlCDR2
YASHRYT

SEQ ID NO: 10870 - protein, 9 aa, synthetic construct
  source 1..9: note = Description of Artificial Sequence: Synthetic peptide; note = XENP019204 vlCDR3
QQDFSSPRT

SEQ ID NO: 10871 - protein, 249 aa, synthetic construct
  source 1..249: note = Description of Artificial Sequence: Synthetic polypeptide; note = XENP019205 1G6_H1.278_L1.188_scFv(GKPGS)4
EVQLVESGGGLVKPGGSLRLSCVASGFTFSNYWMNWVRQAPGKGLEWVAEIRLYSNNYATHYAESVKGRFTISRDDSKSTLYLQMNNLKTEDTGVYYCTRYYGNYGGYFDVWGQGTLVTVSSGKPGSGKPGSGKPGSGKPGSEIVMTQSPATLSVSPGERVTLTCRASQSVGNDVAWYQQKPGQSPRLLINYASHRYTGVPDRFTGSGYGTEFTLTISSVQSEDFAVYFCQQDFSSPRTFGGGTKVEIK

SEQ ID NO: 10872 - protein, 122 aa, synthetic construct; identical to SEQ ID NO: 10845
  source 1..122: note = Description of Artificial Sequence: Synthetic polypeptide; note = VH of XENP019205

SEQ ID NO: 10873 - protein, 107 aa, synthetic construct; identical to SEQ ID NO: 10855
  source 1..107: note = Description of Artificial Sequence: Synthetic polypeptide; note = VL of XENP019205

SEQ ID NO: 10874 - protein, 5 aa, synthetic construct
  source 1..5: note = Description of Artificial Sequence: Synthetic peptide; note = XENP019205 vhCDR1
NYWMN

SEQ ID NO: 10875 - protein, 19 aa, synthetic construct
  source 1..19: note = Description of Artificial Sequence: Synthetic peptide; note = XENP019205 vhCDR2
EIRLYSNNYATHYAESVKG

SEQ ID NO: 10876 - protein, 11 aa, synthetic construct
  source 1..11: note = Description of Artificial Sequence: Synthetic peptide; note = XENP019205 vhCDR3
YYGNYGGYFDV

SEQ ID NO: 10877 - protein, 11 aa, synthetic construct
  source 1..11: note = Description of Artificial Sequence: Synthetic peptide; note = XENP019205 vlCDR1
RASQSVGNDVA

SEQ ID NO: 10878 - protein, 7 aa, synthetic construct
  source 1..7: note = Description of Artificial Sequence: Synthetic peptide; note = XENP019205 vlCDR2
YASHRYT

SEQ ID NO: 10879 - protein, 9 aa, synthetic construct
  source 1..9: note = Description of Artificial Sequence: Synthetic peptide; note = XENP019205 vlCDR3
QQDFSSPRT

SEQ ID NO: 10880 - protein, 249 aa, synthetic construct
  source 1..249: note = Description of Artificial Sequence: Synthetic polypeptide; note = XENP019206 1G6_H1.278_L1.189_scFv(GKPGS)4
EVQLVESGGGLVKPGGSLRLSCVASGFTFSNYWMNWVRQAPGKGLEWVAEIRLYSNNYATHYAESVKGRFTISRDDSKSTLYLQMNNLKTEDTGVYYCTRYYGNYGGYFDVWGQGTLVTVSSGKPGSGKPGSGKPGSGKPGSEIVLTQSPATLSVSPGERVTLTCRASQSVGNDVAWYQQKPGQAPRLLINYASHRYTGVPDRFTGSGYGTEFTLTISSVQSEDFAVYYCQQDFSSPRTFGGGTKVEIK

SEQ ID NO: 10881 - protein, 122 aa, synthetic construct; identical to SEQ ID NO: 10845
  source 1..122: note = Description of Artificial Sequence: Synthetic polypeptide; note = VH of XENP019206

SEQ ID NO: 10882 - protein, 107 aa, synthetic construct; identical to SEQ ID NO: 10864
  source 1..107: note = Description of Artificial Sequence: Synthetic polypeptide; note = VL of XENP019206

SEQ ID NO: 10883 - protein, 5 aa, synthetic construct
  source 1..5: note = Description of Artificial Sequence: Synthetic peptide; note = XENP019206 vhCDR1
NYWMN

SEQ ID NO: 10884 - protein, 19 aa, synthetic construct
  source 1..19: note = Description of Artificial Sequence: Synthetic peptide; note = XENP019206 vhCDR2
EIRLYSNNYATHYAESVKG

SEQ ID NO: 10885 - protein, 11 aa, synthetic construct
  source 1..11: note = Description of Artificial Sequence: Synthetic peptide; note = XENP019206 vhCDR3
YYGNYGGYFDV

SEQ ID NO: 10886 - protein, 11 aa, synthetic construct
  source 1..11: note = Description of Artificial Sequence: Synthetic peptide; note = XENP019206 vlCDR1
RASQSVGNDVA

SEQ ID NO: 10887 - protein, 7 aa, synthetic construct
  source 1..7: note = Description of Artificial Sequence: Synthetic peptide; note = XENP019206 vlCDR2
YASHRYT

SEQ ID NO: 10888 - protein, 9 aa, synthetic construct
  source 1..9: note = Description of Artificial Sequence: Synthetic peptide; note = XENP019206 vlCDR3
QQDFSSPRT

SEQ ID NO: 10889 - protein, 249 aa, synthetic construct
  source 1..249: note = Description of Artificial Sequence: Synthetic polypeptide; note = XENP019207 1G6_L1.188_H1.278_scFv(GKPGS)4
EIVMTQSPATLSVSPGERVTLTCRASQSVGNDVAWYQQKPGQSPRLLINYASHRYTGVPDRFTGSGYGTEFTLTISSVQSEDFAVYFCQQDFSSPRTFGGGTKVEIKGKPGSGKPGSGKPGSGKPGSEVQLVESGGGLVKPGGSLRLSCVASGFTFSNYWMNWVRQAPGKGLEWVAEIRLYSNNYATHYAESVKGRFTISRDDSKSTLYLQMNNLKTEDTGVYYCTRYYGNYGGYFDVWGQGTLVTVSS

SEQ ID NO: 10890 - protein, 107 aa, synthetic construct; identical to SEQ ID NO: 10855
  source 1..107: note = Description of Artificial Sequence: Synthetic polypeptide; note = VH of XENP019207

SEQ ID NO: 10891 - protein, 122 aa, synthetic construct; identical to SEQ ID NO: 10845
  source 1..122: note = Description of Artificial Sequence: Synthetic polypeptide; note = VL of XENP019207

SEQ ID NO: 10892 - protein, 11 aa, synthetic construct
  source 1..11: note = Description of Artificial Sequence: Synthetic peptide; note = XENP019207 vhCDR1
RASQSVGNDVA

SEQ ID NO: 10893 - protein, 7 aa, synthetic construct
  source 1..7: note = Description of Artificial Sequence: Synthetic peptide; note = XENP019207 vhCDR2
YASHRYT

SEQ ID NO: 10894 - protein, 9 aa, synthetic construct
  source 1..9: note = Description of Artificial Sequence: Synthetic peptide; note = XENP019207 vhCDR3
QQDFSSPRT

SEQ ID NO: 10895 - protein, 5 aa, synthetic construct
  source 1..5: note = Description of Artificial Sequence: Synthetic peptide; note = XENP019207 vlCDR1
NYWMN

SEQ ID NO: 10896 - protein, 19 aa, synthetic construct
  source 1..19: note = Description of Artificial Sequence: Synthetic peptide; note = XENP019207 vlCDR2
EIRLYSNNYATHYAESVKG

SEQ ID NO: 10897 - protein, 11 aa, synthetic construct
  source 1..11: note = Description of Artificial Sequence: Synthetic peptide; note = XENP019207 vlCDR3
YYGNYGGYFDV

SEQ ID NO: 10898 - protein, 249 aa, synthetic construct
  source 1..249: note = Description of Artificial Sequence: Synthetic polypeptide; note = XENP019208 1G6_L1.189_H1.278_scFv(GKPGS)4
EIVLTQSPATLSVSPGERVTLTCRASQSVGNDVAWYQQKPGQAPRLLINYASHRYTGVPDRFTGSGYGTEFTLTISSVQSEDFAVYYCQQDFSSPRTFGGGTKVEIKGKPGSGKPGSGKPGSGKPGSEVQLVESGGGLVKPGGSLRLSCVASGFTFSNYWMNWVRQAPGKGLEWVAEIRLYSNNYATHYAESVKGRFTISRDDSKSTLYLQMNNLKTEDTGVYYCTRYYGNYGGYFDVWGQGTLVTVSS

SEQ ID NO: 10899 - protein, 107 aa, synthetic construct; identical to SEQ ID NO: 10864
  source 1..107: note = Description of Artificial Sequence: Synthetic polypeptide; note = VH of XENP019208

SEQ ID NO: 10900 - protein, 122 aa, synthetic construct; identical to SEQ ID NO: 10845
  source 1..122: note = Description of Artificial Sequence: Synthetic polypeptide; note = VL of XENP019208

SEQ ID NO: 10901 - protein, 11 aa, synthetic construct
  source 1..11: note = Description of Artificial Sequence: Synthetic peptide; note = XENP019208 vhCDR1
RASQSVGNDVA

SEQ ID NO: 10902 - protein, 7 aa, synthetic construct
  source 1..7: note = Description of Artificial Sequence: Synthetic peptide; note = XENP019208 vhCDR2
YASHRYT

SEQ ID NO: 10903 - protein, 9 aa, synthetic construct
  source 1..9: note = Description of Artificial Sequence: Synthetic peptide; note = XENP019208 vhCDR3
QQDFSSPRT

SEQ ID NO: 10904 - protein, 5 aa, synthetic construct
  source 1..5: note = Description of Artificial Sequence: Synthetic peptide; note = XENP019208 vlCDR1
NYWMN

SEQ ID NO: 10905 - protein, 19 aa, synthetic construct
  source 1..19: note = Description of Artificial Sequence: Synthetic peptide; note = XENP019208 vlCDR2
EIRLYSNNYATHYAESVKG

SEQ ID NO: 10906 - protein, 11 aa, synthetic construct
  source 1..11: note = Description of Artificial Sequence: Synthetic peptide; note = XENP019208 vlCDR3
YYGNYGGYFDV

SEQ ID NO: 10907 - protein, 249 aa, synthetic construct
  source 1..249: note = Description of Artificial Sequence: Synthetic polypeptide; note = XENP019618 1G6_H1.279_L1.189_scFv(GKPGS)4
EVQLVESGGGLVKPGGSLRLSCVASGFTFSNYWMNWVRQAPGKGLEWVAEIRLYSNNYATHYAESVKGRFTISRDDSKSTLYLQMNNLKTEDTGVYYCTRYYGNYGGYFDVWGRGTLVTVSSGKPGSGKPGSGKPGSGKPGSEIVLTQSPATLSVSPGERVTLTCRASQSVGNDVAWYQQKPGQAPRLLINYASHRYTGVPDRFTGSGYGTEFTLTISSVQSEDFAVYYCQQDFSSPRTFGGGTKVEIK

SEQ ID NO: 10908 - protein, 122 aa, synthetic construct
  source 1..122: note = Description of Artificial Sequence: Synthetic polypeptide; note = VH of XENP019618
EVQLVESGGGLVKPGGSLRLSCVASGFTFSNYWMNWVRQAPGKGLEWVAEIRLYSNNYATHYAESVKGRFTISRDDSKSTLYLQMNNLKTEDTGVYYCTRYYGNYGGYFDVWGRGTLVTVSS

SEQ ID NO: 10909 - protein, 107 aa, synthetic construct; identical to SEQ ID NO: 10864
  source 1..107: note = Description of Artificial Sequence: Synthetic polypeptide; note = VL of XENP019618

SEQ ID NO: 10910 - protein, 5 aa, synthetic construct
  source 1..5: note = Description of Artificial Sequence: Synthetic peptide; note = XENP019618 vhCDR1
NYWMN

SEQ ID NO: 10911 - protein, 19 aa, synthetic construct
  source 1..19: note = Description of Artificial Sequence: Synthetic peptide; note = XENP019618 vhCDR2
EIRLYSNNYATHYAESVKG

SEQ ID NO: 10912 - protein, 11 aa, synthetic construct
  source 1..11: note = Description of Artificial Sequence: Synthetic peptide; note = XENP019618 vhCDR3
YYGNYGGYFDV

SEQ ID NO: 10913 - protein, 11 aa, synthetic construct
  source 1..11: note = Description of Artificial Sequence: Synthetic peptide; note = XENP019618 vlCDR1
RASQSVGNDVA

SEQ ID NO: 10914 - protein, 7 aa, synthetic construct
  source 1..7: note = Description of Artificial Sequence: Synthetic peptide; note = XENP019618 vlCDR2
YASHRYT

SEQ ID NO: 10915 - protein, 9 aa, synthetic construct
  source 1..9: note = Description of Artificial Sequence: Synthetic peptide; note = XENP019618 vlCDR3
QQDFSSPRT

SEQ ID NO: 10916 - protein, 249 aa, synthetic construct
  source 1..249: note = Description of Artificial Sequence: Synthetic polypeptide; note = XENP019619 1G6_H1.280_L1.189_scFv(GKPGS)4
EVQLVESGGGLVKPGGSLRLTCVASGFTFSNYWMNWVRQAPGKGLEWVAEIRLYSNNYATHYAESVKGRFTISRDDSKSTLYLQMNNLKTEDTGVYYCTRYYGNYGGYFDVWGRGTLVTVSSGKPGSGKPGSGKPGSGKPGSEIVLTQSPATLSVSPGERVTLTCRASQSVGNDVAWYQQKPGQAPRLLINYASHRYTGVPDRFTGSGYGTEFTLTISSVQSEDFAVYYCQQDFSSPRTFGGGTKVEIK

SEQ ID NO: 10917 - protein, 122 aa, synthetic construct
  source 1..122: note = Description of Artificial Sequence: Synthetic polypeptide; note = VH of XENP019619
EVQLVESGGGLVKPGGSLRLTCVASGFTFSNYWMNWVRQAPGKGLEWVAEIRLYSNNYATHYAESVKGRFTISRDDSKSTLYLQMNNLKTEDTGVYYCTRYYGNYGGYFDVWGRGTLVTVSS

SEQ ID NO: 10918 - protein, 107 aa, synthetic construct; identical to SEQ ID NO: 10864
  source 1..107: note = Description of Artificial Sequence: Synthetic polypeptide; note = VL of XENP019619

SEQ ID NO: 10919 - protein, 5 aa, synthetic construct
  source 1..5: note = Description of Artificial Sequence: Synthetic peptide; note = XENP019619 vhCDR1
NYWMN

SEQ ID NO: 10920 - protein, 19 aa, synthetic construct
  source 1..19: note = Description of Artificial Sequence: Synthetic peptide; note = XENP019619 vhCDR2
EIRLYSNNYATHYAESVKG

SEQ ID NO: 10921 - protein, 11 aa, synthetic construct
  source 1..11: note = Description of Artificial Sequence: Synthetic peptide; note = XENP019619 vhCDR3
YYGNYGGYFDV

SEQ ID NO: 10922 - protein, 11 aa, synthetic construct
  source 1..11: note = Description of Artificial Sequence: Synthetic peptide; note = XENP019619 vlCDR1
RASQSVGNDVA

SEQ ID NO: 10923 - protein, 7 aa, synthetic construct
  source 1..7: note = Description of Artificial Sequence: Synthetic peptide; note = XENP019619 vlCDR2
YASHRYT

SEQ ID NO: 10924 - protein, 9 aa, synthetic construct
  source 1..9: note = Description of Artificial Sequence: Synthetic peptide; note = XENP019619 vlCDR3
QQDFSSPRT

SEQ ID NO: 10925 - protein, 249 aa, synthetic construct
  source 1..249: note = Description of Artificial Sequence: Synthetic polypeptide; note = XENP019620 1G6_H1.281_L1.189_scFv(GKPGS)4
EVQLVESGGGLVKPGGSLRLSCVASGFTFSNYWMNWVRQAPGKGLEWVAEIRLYSNNYATHYAESVKGRFTISRDDSKSMLYLQMNNLKTEDTGVYYCTRYYGNYGGYFDVWGRGTLVTVSSGKPGSGKPGSGKPGSGKPGSEIVLTQSPATLSVSPGERVTLTCRASQSVGNDVAWYQQKPGQAPRLLINYASHRYTGVPDRFTGSGYGTEFTLTISSVQSEDFAVYYCQQDFSSPRTFGGGTKVEIK

SEQ ID NO: 10926 - protein, 122 aa, synthetic construct
  source 1..122: note = Description of Artificial Sequence: Synthetic polypeptide; note = VH of XENP019620
EVQLVESGGGLVKPGGSLRLSCVASGFTFSNYWMNWVRQAPGKGLEWVAEIRLYSNNYATHYAESVKGRFTISRDDSKSMLYLQMNNLKTEDTGVYYCTRYYGNYGGYFDVWGRGTLVTVSS

SEQ ID NO: 10927 - protein, 107 aa, synthetic construct; identical to SEQ ID NO: 10864
  source 1..107: note = Description of Artificial Sequence: Synthetic polypeptide; note = VL of XENP019620

SEQ ID NO: 10928 - protein, 5 aa, synthetic construct
  source 1..5: note = Description of Artificial Sequence: Synthetic peptide; note = XENP019620 vhCDR1
NYWMN

SEQ ID NO: 10929 - protein, 19 aa, synthetic construct
  source 1..19: note = Description of Artificial Sequence: Synthetic peptide; note = XENP019620 vhCDR2
EIRLYSNNYATHYAESVKG

SEQ ID NO: 10930 - protein, 11 aa, synthetic construct
  source 1..11: note = Description of Artificial Sequence: Synthetic peptide; note = XENP019620 vhCDR3
YYGNYGGYFDV

SEQ ID NO: 10931 - protein, 11 aa, synthetic construct
  source 1..11: note = Description of Artificial Sequence: Synthetic peptide; note = XENP019620 vlCDR1
RASQSVGNDVA

SEQ ID NO: 10932 - protein, 7 aa, synthetic construct
  source 1..7: note = Description of Artificial Sequence: Synthetic peptide; note = XENP019620 vlCDR2
YASHRYT

SEQ ID NO: 10933 - protein, 9 aa, synthetic construct
  source 1..9: note = Description of Artificial Sequence: Synthetic peptide; note = XENP019620 vlCDR3
QQDFSSPRT

SEQ ID NO: 10934 - protein, 249 aa, synthetic construct
  source 1..249: note = Description of Artificial Sequence: Synthetic polypeptide; note = XENP019621 1G6_H1.282_L1.189_scFv(GKPGS)4
EVQLVESGGGLVKPGGSLRLTCVASGFTFSNYWMNWVRQAPGKGLEWVAEIRLYSNNYATHYAESVKGRFTISRDDSKSMLYLQMNNLKTEDTGVYYCTRYYGNYGGYFDVWGRGTLVTVSSGKPGSGKPGSGKPGSGKPGSEIVLTQSPATLSVSPGERVTLTCRASQSVGNDVAWYQQKPGQAPRLLINYASHRYTGVPDRFTGSGYGTEFTLTISSVQSEDFAVYYCQQDFSSPRTFGGGTKVEIK

SEQ ID NO: 10935 - protein, 122 aa, synthetic construct
  source 1..122: note = Description of Artificial Sequence: Synthetic polypeptide; note = VH of XENP019621
EVQLVESGGGLVKPGGSLRLTCVASGFTFSNYWMNWVRQAPGKGLEWVAEIRLYSNNYATHYAESVKGRFTISRDDSKSMLYLQMNNLKTEDTGVYYCTRYYGNYGGYFDVWGRGTLVTVSS

SEQ ID NO: 10936 - protein, 107 aa, synthetic construct; identical to SEQ ID NO: 10864
  source 1..107: note = Description of Artificial Sequence: Synthetic polypeptide; note = VL of XENP019621

SEQ ID NO: 10937 - protein, 5 aa, synthetic construct
  source 1..5: note = Description of Artificial Sequence: Synthetic peptide; note = XENP019621 vhCDR1
NYWMN

SEQ ID NO: 10938 - protein, 19 aa, synthetic construct
  source 1..19: note = Description of Artificial Sequence: Synthetic peptide; note = XENP019621 vhCDR2
EIRLYSNNYATHYAESVKG

SEQ ID NO: 10939 - protein, 11 aa, synthetic construct
  source 1..11: note = Description of Artificial Sequence: Synthetic peptide; note = XENP019621 vhCDR3
YYGNYGGYFDV

SEQ ID NO: 10940 - protein, 11 aa, synthetic construct
  source 1..11: note = Description of Artificial Sequence: Synthetic peptide; note = XENP019621 vlCDR1
RASQSVGNDVA

SEQ ID NO: 10941 - protein, 7 aa, synthetic construct
  source 1..7: note = Description of Artificial Sequence: Synthetic peptide; note = XENP019621 vlCDR2
YASHRYT

SEQ ID NO: 10942 - protein, 9 aa, synthetic construct
  source 1..9: note = Description of Artificial Sequence: Synthetic peptide; note = XENP019621 vlCDR3
QQDFSSPRT

SEQ ID NO: 10943 - protein, 249 aa, synthetic construct
  source 1..249: note = Description of Artificial Sequence: Synthetic polypeptide; note = XENP019622 1G6_H1.283_L1.189_scFv(GKPGS)4
EVQLVESGGGLVKPGGSLRLSCVASGFTFSNYWMNWVRQAPGKGLEWVCEIRLYSNNYATHYAESVKGRFTCSRDDSKSTLYLQMNNLKTEDTGVYYCTRYYGNYGGYFDVWGQGTLVTVSSGKPGSGKPGSGKPGSGKPGSEIVLTQSPATLSVSPGERVTLTCRASQSVGNDVAWYQQKPGQAPRLLINYASHRYTGVPDRFTGSGYGTEFTLTISSVQSEDFAVYYCQQDFSSPRTFGGGTKVEIK

SEQ ID NO: 10944 - protein, 122 aa, synthetic construct
  source 1..122: note = Description of Artificial Sequence: Synthetic polypeptide; note = VH of XENP019622
EVQLVESGGGLVKPGGSLRLSCVASGFTFSNYWMNWVRQAPGKGLEWVCEIRLYSNNYATHYAESVKGRFTCSRDDSKSTLYLQMNNLKTEDTGVYYCTRYYGNYGGYFDVWGQGTLVTVSS

SEQ ID NO: 10945 - protein, 107 aa, synthetic construct; identical to SEQ ID NO: 10864
  source 1..107: note = Description of Artificial Sequence: Synthetic polypeptide; note = VL of XENP019622

SEQ ID NO: 10946 - protein, 5 aa, synthetic construct
  source 1..5: note = Description of Artificial Sequence: Synthetic peptide; note = XENP019622 vhCDR1
NYWMN

SEQ ID NO: 10947 - protein, 19 aa, synthetic construct
  source 1..19: note = Description of Artificial Sequence: Synthetic peptide; note = XENP019622 vhCDR2
EIRLYSNNYATHYAESVKG

SEQ ID NO: 10948 - protein, 11 aa, synthetic construct
  source 1..11: note = Description of Artificial Sequence: Synthetic peptide; note = XENP019622 vhCDR3
YYGNYGGYFDV

SEQ ID NO: 10949 - protein, 11 aa, synthetic construct
  source 1..11: note = Description of Artificial Sequence: Synthetic peptide; note = XENP019622 vlCDR1
RASQSVGNDVA

SEQ ID NO: 10950 - protein, 7 aa, synthetic construct
  source 1..7: note = Description of Artificial Sequence: Synthetic peptide; note = XENP019622 vlCDR2
YASHRYT

SEQ ID NO: 10951 - protein, 9 aa, synthetic construct
  source 1..9: note = Description of Artificial Sequence: Synthetic peptide; note = XENP019622 vlCDR3
QQDFSSPRT

SEQ ID NO: 10952 - protein, 249 aa, synthetic construct
  source 1..249: note = Description of Artificial Sequence: Synthetic polypeptide; note = XENP019623 1G6_H1.284_L1.189_scFv(GKPGS)4
EVQLVESGGGLVKPGGSLRLSCVASGFTFSNYWMNWVRQAPGKGLEWVCEIRLYSNNYATHYAESVKGRFTCSRDDSKSTLYLQMNNLKTEDTGVYYCTRYYGNYGGYFDVWGRGTLVTVSSGKPGSGKPGSGKPGSGKPGSEIVLTQSPATLSVSPGERVTLTCRASQSVGNDVAWYQQKPGQAPRLLINYASHRYTGVPDRFTGSGYGTEFTLTISSVQSEDFAVYYCQQDFSSPRTFGGGTKVEIK

SEQ ID NO: 10953 - protein, 122 aa, synthetic construct
  source 1..122: note = Description of Artificial Sequence: Synthetic polypeptide; note = VH of XENP019623
EVQLVESGGGLVKPGGSLRLSCVASGFTFSNYWMNWVRQAPGKGLEWVCEIRLYSNNYATHYAESVKGRFTCSRDDSKSTLYLQMNNLKTEDTGVYYCTRYYGNYGGYFDVWGRGTLVTVSS

SEQ ID NO: 10954 - protein, 107 aa, synthetic construct; identical to SEQ ID NO: 10864
  source 1..107: note = Description of Artificial Sequence: Synthetic polypeptide; note = VL of XENP019623

SEQ ID NO: 10955 - protein, 5 aa, synthetic construct
  source 1..5: note = Description of Artificial Sequence: Synthetic peptide; note = XENP019623 vhCDR1
NYWMN

SEQ ID NO: 10956 - protein, 19 aa, synthetic construct
  source 1..19: note = Description of Artificial Sequence: Synthetic peptide; note = XENP019623 vhCDR2
EIRLYSNNYATHYAESVKG

SEQ ID NO: 10957 - protein, 11 aa, synthetic construct
  source 1..11: note = Description of Artificial Sequence: Synthetic peptide; note = XENP019623 vhCDR3
YYGNYGGYFDV

SEQ ID NO: 10958 - protein, 11 aa, synthetic construct
  source 1..11: note = Description of Artificial Sequence: Synthetic peptide; note = XENP019623 vlCDR1
RASQSVGNDVA

SEQ ID NO: 10959 - protein, 7 aa, synthetic construct
  source 1..7: note = Description of Artificial Sequence: Synthetic peptide; note = XENP019623 vlCDR2
YASHRYT

SEQ ID NO: 10960 - protein, 9 aa, synthetic construct
  source 1..9: note = Description of Artificial Sequence: Synthetic peptide; note = XENP019623 vlCDR3
QQDFSSPRT

SEQ ID NO: 10961 - protein, 249 aa, synthetic construct
  source 1..249: note = Description of Artificial Sequence: Synthetic polypeptide; note = XENP019624 1G6_H1.285_L1.189_scFv(GKPGS)4
EVQLVESGGGLVKPGGSLRLTCVASGFTFSNYWMNWVRQAPGKGLEWVCEIRLYSNNYATHYAESVKGRFTCSRDDSKSMLYLQMNNLKTEDTGVYYCTRYYGNYGGYFDVWGRGTLVTVSSGKPGSGKPGSGKPGSGKPGSEIVLTQSPATLSVSPGERVTLTCRASQSVGNDVAWYQQKPGQAPRLLINYASHRYTGVPDRFTGSGYGTEFTLTISSVQSEDFAVYYCQQDFSSPRTFGGGTKVEIK

SEQ ID NO: 10962 - protein, 122 aa, synthetic construct
  source 1..122: note = Description of Artificial Sequence: Synthetic polypeptide; note = VH of XENP019624
EVQLVESGGGLVKPGGSLRLTCVASGFTFSNYWMNWVRQAPGKGLEWVCEIRLYSNNYATHYAESVKGRFTCSRDDSKSMLYLQMNNLKTEDTGVYYCTRYYGNYGGYFDVWGRGTLVTVSS

SEQ ID NO: 10963 - protein, 107 aa, synthetic construct; identical to SEQ ID NO: 10864
  source 1..107: note = Description of Artificial Sequence: Synthetic polypeptide; note = VL of XENP019624

SEQ ID NO: 10964 - protein, 5 aa, synthetic construct
  source 1..5: note = Description of Artificial Sequence: Synthetic peptide; note = XENP019624 vhCDR1
NYWMN

SEQ ID NO: 10965 - protein, 19 aa, synthetic construct
  source 1..19: note = Description of Artificial Sequence: Synthetic peptide; note = XENP019624 vhCDR2
EIRLYSNNYATHYAESVKG

SEQ ID NO: 10966 - protein, 11 aa, synthetic construct
  source 1..11: note = Description of Artificial Sequence: Synthetic peptide; note = XENP019624 vhCDR3
YYGNYGGYFDV

SEQ ID NO: 10967 - protein, 11 aa, synthetic construct
  source 1..11: note = Description of Artificial Sequence: Synthetic peptide; note = XENP019624 vlCDR1
RASQSVGNDVA

SEQ ID NO: 10968 - protein, 7 aa, synthetic construct
  source 1..7: note = Description of Artificial Sequence: Synthetic peptide; note = XENP019624 vlCDR2
YASHRYT

SEQ ID NO: 10969 - protein, 9 aa, synthetic construct
  source 1..9: note = Description of Artificial Sequence: Synthetic peptide; note = XENP019624 vlCDR3
QQDFSSPRT

SEQ ID NO: 10970 - protein, 249 aa, synthetic construct
  source 1..249: note = Description of Artificial Sequence: Synthetic polypeptide; note = XENP019625 1G6_H1.286_L1.189_scFv(GKPGS)4
EVQLVESGGGLVKPGGSLRLSCVASGFTFSNYWMNWVRQAPGKGLEWVAEIRLYSDNYATHYAESVKGRFTISRDDSKSTLYLQMNNLKTEDTGVYYCTRYYGNYGGYFDVWGQGTLVTVSSGKPGSGKPGSGKPGSGKPGSEIVLTQSPATLSVSPGERVTLTCRASQSVGNDVAWYQQKPGQAPRLLINYASHRYTGVPDRFTGSGYGTEFTLTISSVQSEDFAVYYCQQDFSSPRTFGGGTKVEIK

SEQ ID NO: 10971 - protein, 122 aa, synthetic construct
  source 1..122: note = Description of Artificial Sequence: Synthetic polypeptide; note = VH of XENP019625
EVQLVESGGGLVKPGGSLRLSCVASGFTFSNYWMNWVRQAPGKGLEWVAEIRLYSDNYATHYAESVKGRFTISRDDSKSTLYLQMNNLKTEDTGVYYCTRYYGNYGGYFDVWGQGTLVTVSS

SEQ ID NO: 10972 - protein, 107 aa, synthetic construct; identical to SEQ ID NO: 10864
  source 1..107: note = Description of Artificial Sequence: Synthetic polypeptide; note = VL of XENP019625

SEQ ID NO: 10973 - protein, 5 aa, synthetic construct
  source 1..5: note = Description of Artificial Sequence: Synthetic peptide; note = XENP019625 vhCDR1
NYWMN

SEQ ID NO: 10974 - protein, 19 aa, synthetic construct
  source 1..19: note = Description of Artificial Sequence: Synthetic peptide; note = XENP019625 vhCDR2
EIRLYSDNYATHYAESVKG

SEQ ID NO: 10975 - protein, 11 aa, synthetic construct
  source 1..11: note = Description of Artificial Sequence: Synthetic peptide; note = XENP019625 vhCDR3
YYGNYGGYFDV

SEQ ID NO: 10976 - protein, 11 aa, synthetic construct
  source 1..11: note = Description of Artificial Sequence: Synthetic peptide; note = XENP019625 vlCDR1
RASQSVGNDVA

SEQ ID NO: 10977 - protein, 7 aa, synthetic construct
  source 1..7: note = Description of Artificial Sequence: Synthetic peptide; note = XENP019625 vlCDR2
YASHRYT

SEQ ID NO: 10978 - protein, 9 aa, synthetic construct
  source 1..9: note = Description of Artificial Sequence: Synthetic peptide; note = XENP019625 vlCDR3
QQDFSSPRT

SEQ ID NO: 10979 - protein, 249 aa, synthetic construct
  source 1..249: note = Description of Artificial Sequence: Synthetic polypeptide; note = XENP019626 1G6_H1.278_L1.192_scFv(GKPGS)4
EVQLVESGGGLVKPGGSLRLSCVASGFTFSNYWMNWVRQAPGKGLEWVAEIRLYSNNYATHYAESVKGRFTISRDDSKSTLYLQMNNLKTEDTGVYYCTRYYGNYGGYFDVWGQGTLVTVSSGKPGSGKPGSGKPGSGKPGSEIVLTQSPATLSASPGERVTLTCRASQSVGNDVAWYQQKPGQAPRLLINYASHRYTGVPDRFTGSGYGTEFTLTISSVQSEDFAVYYCQQDFSSPRTFGGGTKVEIK

SEQ ID NO: 10980 - protein, 122 aa, synthetic construct; identical to SEQ ID NO: 10845
  source 1..122: note = Description of Artificial Sequence: Synthetic polypeptide; note = VH of XENP019626

SEQ ID NO: 10981 - protein, 107 aa, synthetic construct
  source 1..107: note = Description of Artificial Sequence: Synthetic polypeptide; note = VL of XENP019626
EIVLTQSPATLSASPGERVTLTCRASQSVGNDVAWYQQKPGQAPRLLINYASHRYTGVPDRFTGSGYGTEFTLTISSVQSEDFAVYYCQQDFSSPRTFGGGTKVEIK

SEQ ID NO: 10982 - protein, 5 aa, synthetic construct
  source 1..5: note = Description of Artificial Sequence: Synthetic peptide; note = XENP019626 vhCDR1
NYWMN

SEQ ID NO: 10983 - protein, 19 aa, synthetic construct
  source 1..19: note = Description of Artificial Sequence: Synthetic peptide; note = XENP019626 vhCDR2
EIRLYSNNYATHYAESVKG

SEQ ID NO: 10984 - protein, 11 aa, synthetic construct
  source 1..11: note = Description of Artificial Sequence: Synthetic peptide; note = XENP019626 vhCDR3
YYGNYGGYFDV

SEQ ID NO: 10985 - protein, 11 aa, synthetic construct
  source 1..11: note = Description of Artificial Sequence: Synthetic peptide; note = XENP019626 vlCDR1
RASQSVGNDVA

SEQ ID NO: 10986 - protein, 7 aa, synthetic construct
  source 1..7: note = Description of Artificial Sequence: Synthetic peptide; note = XENP019626 vlCDR2
YASHRYT

SEQ ID NO: 10987 - protein, 9 aa, synthetic construct
  source 1..9: note = Description of Artificial Sequence: Synthetic peptide; note = XENP019626 vlCDR3
QQDFSSPRT

SEQ ID NO: 10988 - protein, 249 aa, synthetic construct
  source 1..249: note = Description of Artificial Sequence: Synthetic polypeptide; note = XENP019627 1G6_H1.278_L1.193_scFv(GKPGS)4
EVQLVESGGGLVKPGGSLRLSCVASGFTFSNYWMNWVRQAPGKGLEWVAEIRLYSNNYATHYAESVKGRFTISRDDSKSTLYLQMNNLKTEDTGVYYCTRYYGNYGGYFDVWGQGTLVTVSSGKPGSGKPGSGKPGSGKPGSEIVLTQSPATLSVSPGERVTLTCRASQSVGNDVAWYQQKPGQAPRLLINYASHRYTGVPDRFTGSGYGTEFTLTISSVQSEDFGVYYCQQDFSSPRTFGGGTKVEIK

SEQ ID NO: 10989 - protein, 122 aa, synthetic construct; identical to SEQ ID NO: 10845
  source 1..122: note = Description of Artificial Sequence: Synthetic polypeptide; note = VH of XENP019627

SEQ ID NO: 10990 - protein, 107 aa, synthetic construct
  source 1..107: note = Description of Artificial Sequence: Synthetic polypeptide; note = VL of XENP019627
EIVLTQSPATLSVSPGERVTLTCRASQSVGNDVAWYQQKPGQAPRLLINYASHRYTGVPDRFTGSGYGTEFTLTISSVQSEDFGVYYCQQDFSSPRTFGGGTKVEIK

SEQ ID NO: 10991 - protein, 5 aa, synthetic construct
  source 1..5: note = Description of Artificial Sequence: Synthetic peptide; note = XENP019627 vhCDR1
NYWMN

SEQ ID NO: 10992 - protein, 19 aa, synthetic construct
  source 1..19: note = Description of Artificial Sequence: Synthetic peptide; note = XENP019627 vhCDR2
EIRLYSNNYATHYAESVKG

SEQ ID NO: 10993 - protein, 11 aa, synthetic construct
  source 1..11: note = Description of Artificial Sequence: Synthetic peptide; note = XENP019627 vhCDR3
YYGNYGGYFDV

SEQ ID NO: 10994 - protein, 11 aa, synthetic construct
  source 1..11: note = Description of Artificial Sequence: Synthetic peptide; note = XENP019627 vlCDR1
RASQSVGNDVA

SEQ ID NO: 10995 - protein, 7 aa, synthetic construct
  source 1..7: note = Description of Artificial Sequence: Synthetic peptide; note = XENP019627 vlCDR2
YASHRYT

SEQ ID NO: 10996 - protein, 9 aa, synthetic construct
  source 1..9: note = Description of Artificial Sequence: Synthetic peptide; note = XENP019627 vlCDR3
QQDFSSPRT

SEQ ID NO: 10997 - protein, 249 aa, synthetic construct
  source 1..249: note = Description of Artificial Sequence: Synthetic polypeptide; note = XENP019628 1G6_H1.278_L1.194_scFv(GKPGS)4
EVQLVESGGGLVKPGGSLRLSCVASGFTFSNYWMNWVRQAPGKGLEWVAEIRLYSNNYATHYAESVKGRFTISRDDSKSTLYLQMNNLKTEDTGVYYCTRYYGNYGGYFDVWGQGTLVTVSSGKPGSGKPGSGKPGSGKPGSEIVLTQSPATLSASPGERVTLTCRASQSVGNDVAWYQQKPGQAPRLLINYASHRYTGVPDRFTGSGYGTEFTLTISSVQSEDFGVYYCQQDFSSPRTFGGGTKVEIK

SEQ ID NO: 10998 - protein, 122 aa, synthetic construct; identical to SEQ ID NO: 10845
  source 1..122: note = Description of Artificial Sequence: Synthetic polypeptide; note = VH of XENP019628

SEQ ID NO: 10999 - protein, 107 aa, synthetic construct
  source 1..107: note = Description of Artificial Sequence: Synthetic polypeptide; note = VL of XENP019628
EIVLTQSPATLSASPGERVTLTCRASQSVGNDVAWYQQKPGQAPRLLINYASHRYTGVPDRFTGSGYGTEFTLTISSVQSEDFGVYYCQQDFSSPRTFGGGTKVEIK

SEQ ID NO: 11000 - protein, 5 aa, synthetic construct
  source 1..5: note = Description of Artificial Sequence: Synthetic peptide; note = XENP019628 vhCDR1
NYWMN

SEQ ID NO: 11001 - protein, 19 aa, synthetic construct
  source 1..19: note = Description of Artificial Sequence: Synthetic peptide; note = XENP019628 vhCDR2
EIRLYSNNYATHYAESVKG

SEQ ID NO: 11002 - protein, 11 aa, synthetic construct
  source 1..11: note = Description of Artificial Sequence: Synthetic peptide; note = XENP019628 vhCDR3
YYGNYGGYFDV

SEQ ID NO: 11003 - protein, 11 aa, synthetic construct
  source 1..11: note = Description of Artificial Sequence: Synthetic peptide; note = XENP019628 vlCDR1
RASQSVGNDVA

SEQ ID NO: 11004 - protein, 7 aa, synthetic construct
  source 1..7: note = Description of Artificial Sequence: Synthetic peptide; note = XENP019628 vlCDR2
YASHRYT

SEQ ID NO: 11005 - protein, 9 aa, synthetic construct
  source 1..9: note = Description of Artificial Sequence: Synthetic peptide; note = XENP019628 vlCDR3
QQDFSSPRT

SEQ ID NO: 11006 - protein, 249 aa, synthetic construct
  source 1..249: note = Description of Artificial Sequence: Synthetic polypeptide; note = XENP019629 1G6_H1.278_L1.195_scFv(GKPGS)4
EVQLVESGGGLVKPGGSLRLSCVASGFTFSNYWMNWVRQAPGKGLEWVAEIRLYSNNYATHYAESVKGRFTISRDDSKSTLYLQMNNLKTEDTGVYYCTRYYGNYGGYFDVWGQGTLVTVSSGKPGSGKPGSGKPGSGKPGSEIVLTQSPATLSVSPGERVTLTCRASQSVGNDVAWYQQKPGQAPRLLCNYASHRYTGVPDRFTCSGYGTEFTLTISSVQSEDFAVYYCQQDFSSPRTFGGGTKVEIK

SEQ ID NO: 11007 - protein, 122 aa, synthetic construct; identical to SEQ ID NO: 10845
  source 1..122: note = Description of Artificial Sequence: Synthetic polypeptide; note = VH of XENP019629

SEQ ID NO: 11008 - protein, 107 aa, synthetic construct
  source 1..107: note = Description of Artificial Sequence: Synthetic polypeptide; note = VL of XENP019629
EIVLTQSPATLSVSPGERVTLTCRASQSVGNDVAWYQQKPGQAPRLLCNYASHRYTGVPDRFTCSGYGTEFTLTISSVQSEDFAVYYCQQDFSSPRTFGGGTKVEIK

SEQ ID NO: 11009 - protein, 5 aa, synthetic construct
  source 1..5: note = Description of Artificial Sequence: Synthetic peptide; note = XENP019629 vhCDR1
NYWMN

SEQ ID NO: 11010 - protein, 19 aa, synthetic construct
  source 1..19: note = Description of Artificial Sequence: Synthetic peptide; note = XENP019629 vhCDR2
EIRLYSNNYATHYAESVKG

SEQ ID NO: 11011 - protein, 11 aa, synthetic construct
  source 1..11: note = Description of Artificial Sequence: Synthetic peptide; note = XENP019629 vhCDR3
YYGNYGGYFDV

SEQ ID NO: 11012 - protein, 11 aa, synthetic construct
  source 1..11: note = Description of Artificial Sequence: Synthetic peptide; note = XENP019629 vlCDR1
RASQSVGNDVA

SEQ ID NO: 11013 - protein, 9 aa, synthetic construct
  source 1..9: note = Description of Artificial Sequence: Synthetic peptide; note = XENP019629 vlCDR2
CNYASHRYT

SEQ ID NO: 11014 - protein, 9 aa, synthetic construct
  source 1..9: note = Description of Artificial Sequence: Synthetic peptide; note = XENP019629 vlCDR3
QQDFSSPRT

SEQ ID NO: 11015 - protein, 249 aa, synthetic construct
  source 1..249: note = Description of Artificial Sequence: Synthetic polypeptide; note = XENP019630 1G6_H1.278_L1.196_scFv(GKPGS)4
EVQLVESGGGLVKPGGSLRLSCVASGFTFSNYWMNWVRQAPGKGLEWVAEIRLYSNNYATHYAESVKGRFTISRDDSKSTLYLQMNNLKTEDTGVYYCTRYYGNYGGYFDVWGQGTLVTVSSGKPGSGKPGSGKPGSGKPGSEIVLTQSPATLSASPGERVTLTCRASQSVGNDVAWYQQKPGQAPRLLCNYASHRYTGVPDRFTCSGYGTEFTLTISSVQSEDFGVYYCQQDFSSPRTFGGGTKVEIK

SEQ ID NO: 11016 - protein, 122 aa, synthetic construct; identical to SEQ ID NO: 10845
  source 1..122: note = Description of Artificial Sequence: Synthetic polypeptide; note = VH of XENP019630

SEQ ID NO: 11017 - protein, 107 aa, synthetic construct
  source 1..107: note = Description of Artificial Sequence: Synthetic polypeptide; note = VL of XENP019630
EIVLTQSPATLSASPGERVTLTCRASQSVGNDVAWYQQKPGQAPRLLCNYASHRYTGVPDRFTCSGYGTEFTLTISSVQSEDFGVYYCQQDFSSPRTFGGGTKVEIK

SEQ ID NO: 11018 - protein, 5 aa, synthetic construct
  source 1..5: note = Description of Artificial Sequence: Synthetic peptide; note = XENP019630 vhCDR1
NYWMN

SEQ ID NO: 11019 - protein, 19 aa, synthetic construct
  source 1..19: note = Description of Artificial Sequence: Synthetic peptide; note = XENP019630 vhCDR2
EIRLYSNNYATHYAESVKG

SEQ ID NO: 11020 - protein, 11 aa, synthetic construct
  source 1..11: note = Description of Artificial Sequence: Synthetic peptide; note = XENP019630 vhCDR3
YYGNYGGYFDV

SEQ ID NO: 11021 - protein, 11 aa, synthetic construct
  source 1..11: note = Description of Artificial Sequence: Synthetic peptide; note = XENP019630 vlCDR1
RASQSVGNDVA

SEQ ID NO: 11022 - protein, 9 aa, synthetic construct
  source 1..9: note = Description of Artificial Sequence: Synthetic peptide; note = XENP019630 vlCDR2
CNYASHRYT

SEQ ID NO: 11023 - protein, 9 aa, synthetic construct
  source 1..9: note = Description of Artificial Sequence: Synthetic peptide; note = XENP019630 vlCDR3
QQDFSSPRT

SEQ ID NO: 11024 - protein, 249 aa, synthetic construct
  source 1..249: note = Description of Artificial Sequence: Synthetic polypeptide; note = XENP019631 1G6_H1.278_L1.197_scFv(GKPGS)4
EVQLVESGGGLVKPGGSLRLSCVASGFTFSNYWMNWVRQAPGKGLEWVAEIRLYSNNYATHYAESVKGRFTISRDDSKSTLYLQMNNLKTEDTGVYYCTRYYGNYGGYFDVWGQGTLVTVSSGKPGSGKPGSGKPGSGKPGSEIVLTQSPATLSASPGERVTLTCRASQSVGNDVAWYQQKPGQAPRLLCNYASHRYTSVPDRFTCSGYGTEFTLTISSVQSEDFGVYYCQQDFSSPRTFGGGTKVEIK

SEQ ID NO: 11025 - protein, 122 aa, synthetic construct; identical to SEQ ID NO: 10845
  source 1..122: note = Description of Artificial Sequence: Synthetic polypeptide; note = VH of XENP019631

SEQ ID NO: 11026 - protein, 107 aa, synthetic construct
  source 1..107: note = Description of Artificial Sequence: Synthetic polypeptide; note = VL of XENP019631
EIVLTQSPATLSASPGERVTLTCRASQSVGNDVAWYQQKPGQAPRLLCNYASHRYTSVPDRFTCSGYGTEFTLTISSVQSEDFGVYYCQQDFSSPRTFGGGTKVEIK

SEQ ID NO: 11027 - protein, 5 aa, synthetic construct
  source 1..5: note = Description of Artificial Sequence: Synthetic peptide; note = XENP019631 vhCDR1
NYWMN

SEQ ID NO: 11028 - protein, 19 aa, synthetic construct
  source 1..19: note = Description of Artificial Sequence: Synthetic peptide; note = XENP019631 vhCDR2
EIRLYSNNYATHYAESVKG

SEQ ID NO: 11029 - protein, 11 aa, synthetic construct
  source 1..11: note = Description of Artificial Sequence: Synthetic peptide; note = XENP019631 vhCDR3
YYGNYGGYFDV

SEQ ID NO: 11030 - protein, 11 aa, synthetic construct
  source 1..11: note = Description of Artificial Sequence: Synthetic peptide; note = XENP019631 vlCDR1
RASQSVGNDVA

SEQ ID NO: 11031 - protein, 9 aa, synthetic construct
  source 1..9: note = Description of Artificial Sequence: Synthetic peptide; note = XENP019631 vlCDR2
CNYASHRYT

SEQ ID NO: 11032 - protein, 9 aa, synthetic construct
  source 1..9: note = Description of Artificial Sequence: Synthetic peptide; note = XENP019631 vlCDR3
QQDFSSPRT

SEQ ID NO: 11033 - protein, 249 aa, synthetic construct
  source 1..249: note = Description of Artificial Sequence: Synthetic polypeptide; note = XENP019632 1G6_H1.278_L1.198_scFv(GKPGS)4
EVQLVESGGGLVKPGGSLRLSCVASGFTFSNYWMNWVRQAPGKGLEWVAEIRLYSNNYATHYAESVKGRFTISRDDSKSTLYLQMNNLKTEDTGVYYCTRYYGNYGGYFDVWGQGTLVTVSSGKPGSGKPGSGKPGSGKPGSEIVLTQSPSTLSVSPGERVTLTCRASQSVGNDVAWYQQKPGQAPRLLINYASHRYTGVPDRFTGSGYGTEFTLTISSVQSEDFAVYYCQQDFSSPRTFGGGTKVEIK

SEQ ID NO: 11034 - protein, 122 aa, synthetic construct; identical to SEQ ID NO: 10845
  source 1..122: note = Description of Artificial Sequence: Synthetic polypeptide; note = VH of XENP019632

SEQ ID NO: 11035 - protein, 107 aa, synthetic construct
  source 1..107: note = Description of Artificial Sequence: Synthetic polypeptide; note = VL of XENP019632
EIVLTQSPSTLSVSPGERVTLTCRASQSVGNDVAWYQQKPGQAPRLLINYASHRYTGVPDRFTGSGYGTEFTLTISSVQSEDFAVYYCQQDFSSPRTFGGGTKVEIK

SEQ ID NO: 11036 - protein, 5 aa, synthetic construct
  source 1..5: note = Description of Artificial Sequence: Synthetic peptide; note = XENP019632 vhCDR1
NYWMN

SEQ ID NO: 11037 - protein, 19 aa, synthetic construct
  source 1..19: note = Description of Artificial Sequence: Synthetic peptide; note = XENP019632 vhCDR2
EIRLYSNNYATHYAESVKG

SEQ ID NO: 11038 - protein, 11 aa, synthetic construct
  source 1..11: note = Description of Artificial Sequence: Synthetic peptide; note = XENP019632 vhCDR3
YYGNYGGYFDV

SEQ ID NO: 11039 - protein, 11 aa, synthetic construct
  source 1..11: note = Description of Artificial Sequence: Synthetic peptide; note = XENP019632 vlCDR1
RASQSVGNDVA

SEQ ID NO: 11040 - protein, 7 aa, synthetic construct
  source 1..7: note = Description of Artificial Sequence: Synthetic peptide; note = XENP019632 vlCDR2
YASHRYT

SEQ ID NO: 11041 - protein, 9 aa, synthetic construct
  source 1..9: note = Description of Artificial Sequence: Synthetic peptide; note = XENP019632 vlCDR3
QQDFSSPRT

SEQ ID NO: 11042 - protein, 249 aa, synthetic construct
  source 1..249: note = Description of Artificial Sequence: Synthetic polypeptide; note = XENP019633 1G6_H1.278_L1.199_scFv(GKPGS)4
EVQLVESGGGLVKPGGSLRLSCVASGFTFSNYWMNWVRQAPGKGLEWVAEIRLYSNNYATHYAESVKGRFTISRDDSKSTLYLQMNNLKTEDTGVYYCTRYYGNYGGYFDVWGQGTLVTVSSGKPGSGKPGSGKPGSGKPGSEIVLTQSPDTLSVSPGERVTLTCRASQSVGNDVAWYQQKPGQAPRLLINYASHRYTGVPDRFTGSGYGTEFTLTISSVQSEDFAVYYCQQDFSSPRTFGGGTKVEIK

SEQ ID NO: 11043 - protein, 122 aa, synthetic construct; identical to SEQ ID NO: 10845
  source 1..122: note = Description of Artificial Sequence: Synthetic polypeptide; note = VH of XENP019633

SEQ ID NO: 11044 - protein, 107 aa, synthetic construct
  source 1..107: note = Description of Artificial Sequence: Synthetic polypeptide; note = VL of XENP019633
EIVLTQSPDTLSVSPGERVTLTCRASQSVGNDVAWYQQKPGQAPRLLINYASHRYTGVPDRFTGSGYGTEFTLTISSVQSEDFAVYYCQQDFSSPRTFGGGTKVEIK

SEQ ID NO: 11045 - protein, 5 aa, synthetic construct
  source 1..5: note = Description of Artificial Sequence: Synthetic peptide; note = XENP019633 vhCDR1
NYWMN

SEQ ID NO: 11046 - protein, 19 aa, synthetic construct
  source 1..19: note = Description of Artificial Sequence: Synthetic peptide; note = XENP019633 vhCDR2
EIRLYSNNYATHYAESVKG

SEQ ID NO: 11047 - protein, 11 aa, synthetic construct
  source 1..11: note = Description of Artificial Sequence: Synthetic peptide; note = XENP019633 vhCDR3
YYGNYGGYFDV

SEQ ID NO: 11048 - protein, 11 aa, synthetic construct
  source 1..11: note = Description of Artificial Sequence: Synthetic peptide; note = XENP019633 vlCDR1
RASQSVGNDVA

SEQ ID NO: 11049 - protein, 7 aa, synthetic construct
  source 1..7: note = Description of Artificial Sequence: Synthetic peptide; note = XENP019633 vlCDR2
YASHRYT

SEQ ID NO: 11050 - protein, 9 aa, synthetic construct
  source 1..9: note = Description of Artificial Sequence: Synthetic peptide; note = XENP019633 vlCDR3
QQDFSSPRT

SEQ ID NO: 11051 - protein, 249 aa, synthetic construct
  source 1..249: note = Description of Artificial Sequence: Synthetic polypeptide; note = XENP019634 1G6_H1.278_L1.200_scFv(GKPGS)4
EVQLVESGGGLVKPGGSLRLSCVASGFTFSNYWMNWVRQAPGKGLEWVAEIRLYSNNYATHYAESVKGRFTISRDDSKSTLYLQMNNLKTEDTGVYYCTRYYGNYGGYFDVWGQGTLVTVSSGKPGSGKPGSGKPGSGKPGSEIVLTQSPATLAVSPGERVTLTCRASQSVGNDVAWYQQKPGQAPRLLINYASHRYTGVPDRFTGSGYGTEFTLTISSVQSEDFAVYYCQQDFSSPRTFGGGTKVEIK

SEQ ID NO: 11052 - protein, 122 aa, synthetic construct; identical to SEQ ID NO: 10845
  source 1..122: note = Description of Artificial Sequence: Synthetic polypeptide; note = VH of XENP019634

SEQ ID NO: 11053 - protein, 107 aa, synthetic construct
  source 1..107: note = Description of Artificial Sequence: Synthetic polypeptide; note = VL of XENP019634
EIVLTQSPATLAVSPGERVTLTCRASQSVGNDVAWYQQKPGQAPRLLINYASHRYTGVPDRFTGSGYGTEFTLTISSVQSEDFAVYYCQQDFSSPRTFGGGTKVEIK

SEQ ID NO: 11054 - protein, 5 aa, synthetic construct
  source 1..5: note = Description of Artificial Sequence: Synthetic peptide; note = XENP019634 vhCDR1
NYWMN

SEQ ID NO: 11055 - protein, 19 aa, synthetic construct
  source 1..19: note = Description of Artificial Sequence: Synthetic peptide; note = XENP019634 vhCDR2
EIRLYSNNYATHYAESVKG

SEQ ID NO: 11056 - protein, 11 aa, synthetic construct
  source 1..11: note = Description of Artificial Sequence: Synthetic peptide; note = XENP019634 vhCDR3
YYGNYGGYFDV

SEQ ID NO: 11057 - protein, 11 aa, synthetic construct
  source 1..11: note = Description of Artificial Sequence: Synthetic peptide; note = XENP019634 vlCDR1
RASQSVGNDVA

SEQ ID NO: 11058 - protein, 7 aa, synthetic construct
  source 1..7: note = Description of Artificial Sequence: Synthetic peptide; note = XENP019634 vlCDR2
YASHRYT

SEQ ID NO: 11059 - protein, 9 aa, synthetic construct
  source 1..9: note = Description of Artificial Sequence: Synthetic peptide; note = XENP019634 vlCDR3
QQDFSSPRT

SEQ ID NO: 11060 - protein, 249 aa, synthetic construct; identical to SEQ ID NO: 10979
  source 1..249: note = Description of Artificial Sequence: Synthetic polypeptide; note = XENP019635 1G6_H1.278_L1.201_scFv(GKPGS)4

SEQ ID NO: 11061 - protein, 122 aa, synthetic construct; identical to SEQ ID NO: 10845
  source 1..122: note = Description of Artificial Sequence: Synthetic polypeptide; note = VH of XENP019635

SEQ ID NO: 11062 - protein, 107 aa, synthetic construct; identical to SEQ ID NO: 10981
  source 1..107: note = Description of Artificial Sequence: Synthetic polypeptide; note = VL of XENP019635

SEQ ID NO: 11063 - protein, 5 aa, synthetic construct
  source 1..5: note = Description of Artificial Sequence: Synthetic peptide; note = XENP019635 vhCDR1
NYWMN

SEQ ID NO: 11064 - protein, 19 aa, synthetic construct
  source 1..19: note = Description of Artificial Sequence: Synthetic peptide; note = XENP019635 vhCDR2
EIRLYSNNYATHYAESVKG

SEQ ID NO: 11065 - protein, 11 aa, synthetic construct
  source 1..11: note = Description of Artificial Sequence: Synthetic peptide; note = XENP019635 vhCDR3
YYGNYGGYFDV

SEQ ID NO: 11066 - protein, 11 aa, synthetic construct
  source 1..11: note = Description of Artificial Sequence: Synthetic peptide; note = XENP019635 vlCDR1
RASQSVGNDVA

SEQ ID NO: 11067 - protein, 7 aa, synthetic construct
  source 1..7: note = Description of Artificial Sequence: Synthetic peptide; note = XENP019635 vlCDR2
YASHRYT

SEQ ID NO: 11068 - protein, 9 aa, synthetic construct
  source 1..9: note = Description of Artificial Sequence: Synthetic peptide; note = XENP019635 vlCDR3
QQDFSSPRT

SEQ ID NO: 11069 - protein, 249 aa, synthetic construct
  source 1..249: note = Description of Artificial Sequence: Synthetic polypeptide; note = XENP019636 1G6_H1.278_L1.202_scFv(GKPGS)4
EVQLVESGGGLVKPGGSLRLSCVASGFTFSNYWMNWVRQAPGKGLEWVAEIRLYSNNYATHYAESVKGRFTISRDDSKSTLYLQMNNLKTEDTGVYYCTRYYGNYGGYFDVWGQGTLVTVSSGKPGSGKPGSGKPGSGKPGSEIVLTQSPATLSVSVGERVTLTCRASQSVGNDVAWYQQKPGQAPRLLINYASHRYTGVPDRFTGSGYGTEFTLTISSVQSEDFAVYYCQQDFSSPRTFGGGTKVEIK

SEQ ID NO: 11070 - protein, 122 aa, synthetic construct; identical to SEQ ID NO: 10845
  source 1..122: note = Description of Artificial Sequence: Synthetic polypeptide; note = VH of XENP019636

SEQ ID NO: 11071 - protein, 107 aa, synthetic construct
  source 1..107: note = Description of Artificial Sequence: Synthetic polypeptide; note = VL of XENP019636
EIVLTQSPATLSVSVGERVTLTCRASQSVGNDVAWYQQKPGQAPRLLINYASHRYTGVPDRFTGSGYGTEFTLTISSVQSEDFAVYYCQQDFSSPRTFGGGTKVEIK

SEQ ID NO: 11072 - protein, 5 aa, synthetic construct
  source 1..5: note = Description of Artificial Sequence: Synthetic peptide; note = XENP019636 vhCDR1
NYWMN

SEQ ID NO: 11073 - protein, 19 aa, synthetic construct
  source 1..19: note = Description of Artificial Sequence: Synthetic peptide; note = XENP019636 vhCDR2
EIRLYSNNYATHYAESVKG

SEQ ID NO: 11074 - protein, 11 aa, synthetic construct
  source 1..11: note = Description of Artificial Sequence: Synthetic peptide; note = XENP019636 vhCDR3
YYGNYGGYFDV

SEQ ID NO: 11075 - protein, 11 aa, synthetic construct
  source 1..11: note = Description of Artificial Sequence: Synthetic peptide; note = XENP019636 vlCDR1
RASQSVGNDVA

SEQ ID NO: 11076 - protein, 7 aa, synthetic construct
  source 1..7: note = Description of Artificial Sequence: Synthetic peptide; note = XENP019636 vlCDR2
YASHRYT

SEQ ID NO: 11077 - protein, 9 aa, synthetic construct
  source 1..9: note = Description of Artificial Sequence: Synthetic peptide; note = XENP019636 vlCDR3
QQDFSSPRT

SEQ ID NO: 11078 - protein, 249 aa, synthetic construct
  source 1..249: note = Description of Artificial Sequence: Synthetic polypeptide; note = XENP019637 1G6_H1.278_L1.203_scFv(GKPGS)4
EVQLVESGGGLVKPGGSLRLSCVASGFTFSNYWMNWVRQAPGKGLEWVAEIRLYSNNYATHYAESVKGRFTISRDDSKSTLYLQMNNLKTEDTGVYYCTRYYGNYGGYFDVWGQGTLVTVSSGKPGSGKPGSGKPGSGKPGSEIVLTQSPATLSVSLGERVTLTCRASQSVGNDVAWYQQKPGQAPRLLINYASHRYTGVPDRFTGSGYGTEFTLTISSVQSEDFAVYYCQQDFSSPRTFGGGTKVEIK

SEQ ID NO: 11079 - protein, 122 aa, synthetic construct; identical to SEQ ID NO: 10845
  source 1..122: note = Description of Artificial Sequence: Synthetic polypeptide; note = VH of XENP019637

SEQ ID NO: 11080 - protein, 107 aa, synthetic construct
  source 1..107: note = Description of Artificial Sequence: Synthetic polypeptide; note = VL of XENP019637
EIVLTQSPATLSVSLGERVTLTCRASQSVGNDVAWYQQKPGQAPRLLINYASHRYTGVPDRFTGSGYGTEFTLTISSVQSEDFAVYYCQQDFSSPRTFGGGTKVEIK

SEQ ID NO: 11081 - protein, 5 aa, synthetic construct
  source 1..5: note = Description of Artificial Sequence: Synthetic peptide; note = XENP019637 vhCDR1
NYWMN

SEQ ID NO: 11082 - protein, 19 aa, synthetic construct
  source 1..19: note = Description of Artificial Sequence: Synthetic peptide; note = XENP019637 vhCDR2
EIRLYSNNYATHYAESVKG

SEQ ID NO: 11083 - protein, 11 aa, synthetic construct
  source 1..11: note = Description of Artificial Sequence: Synthetic peptide; note = XENP019637 vhCDR3
YYGNYGGYFDV

SEQ ID NO: 11084 - protein, 11 aa, synthetic construct
  source 1..11: note = Description of Artificial Sequence: Synthetic peptide; note = XENP019637 vlCDR1
RASQSVGNDVA

SEQ ID NO: 11085 - protein, 7 aa, synthetic construct
  source 1..7: note = Description of Artificial Sequence: Synthetic peptide; note = XENP019637 vlCDR2
YASHRYT

SEQ ID NO: 11086 - protein, 9 aa, synthetic construct
  source 1..9: note = Description of Artificial Sequence: Synthetic peptide; note = XENP019637 vlCDR3
QQDFSSPRT

SEQ ID NO: 11087 - protein, 249 aa, synthetic construct
  source 1..249: note = Description of Artificial Sequence: Synthetic polypeptide; note = XENP019638 1G6_H1.278_L1.204_scFv(GKPGS)4
EVQLVESGGGLVKPGGSLRLSCVASGFTFSNYWMNWVRQAPGKGLEWVAEIRLYSNNYATHYAESVKGRFTISRDDSKSTLYLQMNNLKTEDTGVYYCTRYYGNYGGYFDVWGQGTLVTVSSGKPGSGKPGSGKPGSGKPGSEIVLTQSPATLSVSPGERVTLNCRASQSVGNDVAWYQQKPGQAPRLLINYASHRYTGVPDRFTGSGYGTEFTLTISSVQSEDFAVYYCQQDFSSPRTFGGGTKVEIK

SEQ ID NO: 11088 - protein, 122 aa, synthetic construct; identical to SEQ ID NO: 10845
  source 1..122: note = Description of Artificial Sequence: Synthetic polypeptide; note = VH of XENP019638

SEQ ID NO: 11089 - protein, 107 aa, synthetic construct
  source 1..107: note = Description of Artificial Sequence: Synthetic polypeptide; note = VL of XENP019638
EIVLTQSPATLSVSPGERVTLNCRASQSVGNDVAWYQQKPGQAPRLLINYASHRYTGVPDRFTGSGYGTEFTLTISSVQSEDFAVYYCQQDFSSPRTFGGGTKVEIK

SEQ ID NO: 11090 - protein, 5 aa, synthetic construct
  source 1..5: note = Description of Artificial Sequence: Synthetic peptide; note = XENP019638 vhCDR1
NYWMN

SEQ ID NO: 11091 - protein, 19 aa, synthetic construct
  source 1..19: note = Description of Artificial Sequence: Synthetic peptide; note = XENP019638 vhCDR2
EIRLYSNNYATHYAESVKG

SEQ ID NO: 11092 - protein, 11 aa, synthetic construct
  source 1..11: note = Description of Artificial Sequence: Synthetic peptide; note = XENP019638 vhCDR3
YYGNYGGYFDV

SEQ ID NO: 11093 - protein, 11 aa, synthetic construct
  source 1..11: note = Description of Artificial Sequence: Synthetic peptide; note = XENP019638 vlCDR1
RASQSVGNDVA

SEQ ID NO: 11094 - protein, 7 aa, synthetic construct
  source 1..7: note = Description of Artificial Sequence: Synthetic peptide; note = XENP019638 vlCDR2
YASHRYT

SEQ ID NO: 11095 - protein, 9 aa, synthetic construct
  source 1..9: note = Description of Artificial Sequence: Synthetic peptide; note = XENP019638 vlCDR3
QQDFSSPRT

SEQ ID NO: 11096 - protein, 249 aa, synthetic construct
  source 1..249: note = Description of Artificial Sequence: Synthetic polypeptide; note = XENP019639 1G6_H1.278_L1.205_scFv(GKPGS)4
EVQLVESGGGLVKPGGSLRLSCVASGFTFSNYWMNWVRQAPGKGLEWVAEIRLYSNNYATHYAESVKGRFTISRDDSKSTLYLQMNNLKTEDTGVYYCTRYYGNYGGYFDVWGQGTLVTVSSGKPGSGKPGSGKPGSGKPGSEIVLTQSPATLSVSPGERVTLTCRASQSVGNDVAWYQQKPGKAPRLLINYASHRYTGVPDRFTGSGYGTEFTLTISSVQSEDFAVYYCQQDFSSPRTFGGGTKVEIK

SEQ ID NO: 11097 - protein, 122 aa, synthetic construct; identical to SEQ ID NO: 10845
  source 1..122: note = Description of Artificial Sequence: Synthetic polypeptide; note = VH of XENP019639

SEQ ID NO: 11098 - protein, 107 aa, synthetic construct
  source 1..107: note = Description of Artificial Sequence: Synthetic polypeptide; note = VL of XENP019639
EIVLTQSPATLSVSPGERVTLTCRASQSVGNDVAWYQQKPGKAPRLLINYASHRYTGVPDRFTGSGYGTEFTLTISSVQSEDFAVYYCQQDFSSPRTFGGGTKVEIK

SEQ ID NO: 11099 - protein, 5 aa, synthetic construct
  source 1..5: note = Description of Artificial Sequence: Synthetic peptide; note = XENP019639 vhCDR1
NYWMN

SEQ ID NO: 11100 - protein, 19 aa, synthetic construct
  source 1..19: note = Description of Artificial Sequence: Synthetic peptide; note = XENP019639 vhCDR2
EIRLYSNNYATHYAESVKG

SEQ ID NO: 11101 - protein, 11 aa, synthetic construct
  source 1..11: note = Description of Artificial Sequence: Synthetic peptide; note = XENP019639 vhCDR3
YYGNYGGYFDV

SEQ ID NO: 11102 - protein, 11 aa, synthetic construct
  source 1..11: note = Description of Artificial Sequence: Synthetic peptide; note = XENP019639 vlCDR1
RASQSVGNDVA

SEQ ID NO: 11103 - protein, 7 aa, synthetic construct
  source 1..7: note = Description of Artificial Sequence: Synthetic peptide; note = XENP019639 vlCDR2
YASHRYT

SEQ ID NO: 11104 - protein, 9 aa, synthetic construct
  source 1..9: note = Description of Artificial Sequence: Synthetic peptide; note = XENP019639 vlCDR3
QQDFSSPRT

SEQ ID NO: 11105 - protein, 249 aa, synthetic construct
  source 1..249: note = Description of Artificial Sequence: Synthetic polypeptide; note = XENP019640 1G6_H1.278_L1.206_scFv(GKPGS)4
EVQLVESGGGLVKPGGSLRLSCVASGFTFSNYWMNWVRQAPGKGLEWVAEIRLYSNNYATHYAESVKGRFTISRDDSKSTLYLQMNNLKTEDTGVYYCTRYYGNYGGYFDVWGQGTLVTVSSGKPGSGKPGSGKPGSGKPGSEIVLTQSPATLSVSPGERVTLTCRASQSVGNDVAWYQQKPGQAPRLLINYASHRYTGVPDRFTGSGYGTEFTLTISSVQPEDFAVYYCQQDFSSPRTFGGGTKVEIK

SEQ ID NO: 11106 - protein, 122 aa, synthetic construct; identical to SEQ ID NO: 10845
  source 1..122: note = Description of Artificial Sequence: Synthetic polypeptide; note = VH of XENP019640

SEQ ID NO: 11107 - protein, 107 aa, synthetic construct
  source 1..107: note = Description of Artificial Sequence: Synthetic polypeptide; note = VL of XENP019640
EIVLTQSPATLSVSPGERVTLTCRASQSVGNDVAWYQQKPGQAPRLLINYASHRYTGVPDRFTGSGYGTEFTLTISSVQPEDFAVYYCQQDFSSPRTFGGGTKVEIK

SEQ ID NO: 11108 - protein, 5 aa, synthetic construct
  source 1..5: note = Description of Artificial Sequence: Synthetic peptide; note = XENP019640 vhCDR1
NYWMN

SEQ ID NO: 11109 - protein, 19 aa, synthetic construct
  source 1..19: note = Description of Artificial Sequence: Synthetic peptide; note = XENP019640 vhCDR2
EIRLYSNNYATHYAESVKG

SEQ ID NO: 11110 - protein, 11 aa, synthetic construct
  source 1..11: note = Description of Artificial Sequence: Synthetic peptide; note = XENP019640 vhCDR3
YYGNYGGYFDV

SEQ ID NO: 11111 - protein, 11 aa, synthetic construct
  source 1..11: note = Description of Artificial Sequence: Synthetic peptide; note = XENP019640 vlCDR1
RASQSVGNDVA

SEQ ID NO: 11112 - protein, 7 aa, synthetic construct
  source 1..7: note = Description of Artificial Sequence: Synthetic peptide; note = XENP019640 vlCDR2
YASHRYT

SEQ ID NO: 11113 - protein, 9 aa, synthetic construct
  source 1..9: note = Description of Artificial Sequence: Synthetic peptide; note = XENP019640 vlCDR3
QQDFSSPRT

SEQ ID NO: 11114 - protein, 249 aa, synthetic construct
  source 1..249: note = Description of Artificial Sequence: Synthetic polypeptide; note = XENP019641 1G6_H1.278_L1.207_scFv(GKPGS)4
EVQLVESGGGLVKPGGSLRLSCVASGFTFSNYWMNWVRQAPGKGLEWVAEIRLYSNNYATHYAESVKGRFTISRDDSKSTLYLQMNNLKTEDTGVYYCTRYYGNYGGYFDVWGQGTLVTVSSGKPGSGKPGSGKPGSGKPGSEIVLTQSPATLSVSPGERVTLTCRASQSVGNDVAWYQQKPGQAPRLLINYASHRYTGVPDRFTGSGYGTEFTLTISSVQSEDVAVYYCQQDFSSPRTFGGGTKVEIK

SEQ ID NO: 11115 - protein, 122 aa, synthetic construct; identical to SEQ ID NO: 10845
  source 1..122: note = Description of Artificial Sequence: Synthetic polypeptide; note = VH of XENP019641

SEQ ID NO: 11116 - protein, 107 aa, synthetic construct
  source 1..107: note = Description of Artificial Sequence: Synthetic polypeptide; note = VL of XENP019641
EIVLTQSPATLSVSPGERVTLTCRASQSVGNDVAWYQQKPGQAPRLLINYASHRYTGVPDRFTGSGYGTEFTLTISSVQSEDVAVYYCQQDFSSPRTFGGGTKVEIK

SEQ ID NO: 11117 - protein, 5 aa, synthetic construct
  source 1..5: note = Description of Artificial Sequence: Synthetic peptide; note = XENP019641 vhCDR1
NYWMN

SEQ ID NO: 11118 - protein, 19 aa, synthetic construct
  source 1..19: note = Description of Artificial Sequence: Synthetic peptide; note = XENP019641 vhCDR2
EIRLYSNNYATHYAESVKG

SEQ ID NO: 11119 - protein, 11 aa, synthetic construct
  source 1..11: note = Description of Artificial Sequence: Synthetic peptide; note = XENP019641 vhCDR3
YYGNYGGYFDV

SEQ ID NO: 11120 - protein, 11 aa, synthetic construct
  source 1..11: note = Description of Artificial Sequence: Synthetic peptide; note = XENP019641 vlCDR1
RASQSVGNDVA

SEQ ID NO: 11121 - protein, 7 aa, synthetic construct
  source 1..7: note = Description of Artificial Sequence: Synthetic peptide; note = XENP019641 vlCDR2
YASHRYT

SEQ ID NO: 11122 - protein, 9 aa, synthetic construct
  source 1..9: note = Description of Artificial Sequence: Synthetic peptide; note = XENP019641 vlCDR3
QQDFSSPRT

SEQ ID NO: 11123 - protein, 249 aa, synthetic construct
  source 1..249: note = Description of Artificial Sequence: Synthetic polypeptide; note = XENP019642 1G6_H1.278_L1.208_scFv(GKPGS)4
EVQLVESGGGLVKPGGSLRLSCVASGFTFSNYWMNWVRQAPGKGLEWVAEIRLYSNNYATHYAESVKGRFTISRDDSKSTLYLQMNNLKTEDTGVYYCTRYYGNYGGYFDVWGQGTLVTVSSGKPGSGKPGSGKPGSGKPGSEIVLTQSPATLSVSPGERVTLTCRASQSVGNDVAWYQQKPGQAPRLLINYASHRYTGVPDRFTGSGYGTEFTLTISSVQSEDFATYYCQQDFSSPRTFGGGTKVEIK

SEQ ID NO: 11124 - protein, 122 aa, synthetic construct; identical to SEQ ID NO: 10845
  source 1..122: note = Description of Artificial Sequence: Synthetic polypeptide; note = VH of XENP019642

SEQ ID NO: 11125 - protein, 107 aa, synthetic construct
  source 1..107: note = Description of Artificial Sequence: Synthetic polypeptide; note = VL of XENP019642
EIVLTQSPATLSVSPGERVTLTCRASQSVGNDVAWYQQKPGQAPRLLINYASHRYTGVPDRFTGSGYGTEFTLTISSVQSEDFATYYCQQDFSSPRTFGGGTKVEIK

SEQ ID NO: 11126 - protein, 5 aa, synthetic construct
  source 1..5: note = Description of Artificial Sequence: Synthetic peptide; note = XENP019642 vhCDR1
NYWMN

SEQ ID NO: 11127 - protein, 19 aa, synthetic construct
  source 1..19: note = Description of Artificial Sequence: Synthetic peptide; note = XENP019642 vhCDR2
EIRLYSNNYATHYAESVKG

SEQ ID NO: 11128 - protein, 11 aa, synthetic construct
  source 1..11: note = Description of Artificial Sequence: Synthetic peptide; note = XENP019642 vhCDR3
YYGNYGGYFDV

SEQ ID NO: 11129 - protein, 11 aa, synthetic construct
  source 1..11: note = Description of Artificial Sequence: Synthetic peptide; note = XENP019642 vlCDR1
RASQSVGNDVA

SEQ ID NO: 11130 - protein, 7 aa, synthetic construct
  source 1..7: note = Description of Artificial Sequence: Synthetic peptide; note = XENP019642 vlCDR2
YASHRYT

SEQ ID NO: 11131 - protein, 9 aa, synthetic construct
  source 1..9: note = Description of Artificial Sequence: Synthetic peptide; note = XENP019642 vlCDR3
QQDFSSPRT

SEQ ID NO: 11132 - protein, 249 aa, synthetic construct
  source 1..249: note = Description of Artificial Sequence: Synthetic polypeptide; note = XENP019643 1G6_L1.189_H1.279_scFv(GKPGS)4
EIVLTQSPATLSVSPGERVTLTCRASQSVGNDVAWYQQKPGQAPRLLINYASHRYTGVPDRFTGSGYGTEFTLTISSVQSEDFAVYYCQQDFSSPRTFGGGTKVEIKGKPGSGKPGSGKPGSGKPGSEVQLVESGGGLVKPGGSLRLSCVASGFTFSNYWMNWVRQAPGKGLEWVAEIRLYSNNYATHYAESVKGRFTISRDDSKSTLYLQMNNLKTEDTGVYYCTRYYGNYGGYFDVWGRGTLVTVSS

SEQ ID NO: 11133 - protein, 107 aa, synthetic construct; identical to SEQ ID NO: 10864
  source 1..107: note = Description of Artificial Sequence: Synthetic polypeptide; note = VH of XENP019643

SEQ ID NO: 11134 - protein, 122 aa, synthetic construct; identical to SEQ ID NO: 10908
  source 1..122: note = Description of Artificial Sequence: Synthetic polypeptide; note = VL of XENP019643

SEQ ID NO: 11135 - protein, 11 aa, synthetic construct
  source 1..11: note = Description of Artificial Sequence: Synthetic peptide; note = XENP019643 vhCDR1
RASQSVGNDVA

SEQ ID NO: 11136 - protein, 7 aa, synthetic construct
  source 1..7: note = Description of Artificial Sequence: Synthetic peptide; note = XENP019643 vhCDR2
YASHRYT

SEQ ID NO: 11137 - protein, 9 aa, synthetic construct
  source 1..9: note = Description of Artificial Sequence: Synthetic peptide; note = XENP019643 vhCDR3
QQDFSSPRT

SEQ ID NO: 11138 - protein, 5 aa, synthetic construct
  source 1..5: note = Description of Artificial Sequence: Synthetic peptide; note = XENP019643 vlCDR1
NYWMN

SEQ ID NO: 11139 - protein, 19 aa, synthetic construct
  source 1..19: note = Description of Artificial Sequence: Synthetic peptide; note = XENP019643 vlCDR2
EIRLYSNNYATHYAESVKG

SEQ ID NO: 11140 - protein, 11 aa, synthetic construct
  source 1..11: note = Description of Artificial Sequence: Synthetic peptide; note = XENP019643 vlCDR3
YYGNYGGYFDV

SEQ ID NO: 11141 - protein, 249 aa, synthetic construct
  source 1..249: note = Description of Artificial Sequence: Synthetic polypeptide; note = XENP019644 1G6_L1.189_H1.280_scFv(GKPGS)4
EIVLTQSPATLSVSPGERVTLTCRASQSVGNDVAWYQQKPGQAPRLLINYASHRYTGVPDRFTGSGYGTEFTLTISSVQSEDFAVYYCQQDFSSPRTFGGGTKVEIKGKPGSGKPGSGKPGSGKPGSEVQLVESGGGLVKPGGSLRLTCVASGFTFSNYWMNWVRQAPGKGLEWVAEIRLYSNNYATHYAESVKGRFTISRDDSKSTLYLQMNNLKTEDTGVYYCTRYYGNYGGYFDVWGRGTLVTVSS

SEQ ID NO: 11142 - protein, 107 aa, synthetic construct; identical to SEQ ID NO: 10864
  source 1..107: note = Description of Artificial Sequence: Synthetic polypeptide; note = VH of XENP019644

SEQ ID NO: 11143 - protein, 122 aa, synthetic construct; identical to SEQ ID NO: 10917
  source 1..122: note = Description of Artificial Sequence: Synthetic polypeptide; note = VL of XENP019644

SEQ ID NO: 11144 - protein, 11 aa, synthetic construct
  source 1..11: note = Description of Artificial Sequence: Synthetic peptide; note = XENP019644 vhCDR1
RASQSVGNDVA

SEQ ID NO: 11145 - protein, 7 aa, synthetic construct
  source 1..7: note = Description of Artificial Sequence: Synthetic peptide; note = XENP019644 vhCDR2
YASHRYT

SEQ ID NO: 11146 - protein, 9 aa, synthetic construct
  source 1..9: note = Description of Artificial Sequence: Synthetic peptide; note = XENP019644 vhCDR3
QQDFSSPRT

SEQ ID NO: 11147 - protein, 5 aa, synthetic construct
  source 1..5: note = Description of Artificial Sequence: Synthetic peptide; note = XENP019644 vlCDR1
NYWMN

SEQ ID NO: 11148 - protein, 19 aa, synthetic construct
  source 1..19: note = Description of Artificial Sequence: Synthetic peptide; note = XENP019644 vlCDR2
EIRLYSNNYATHYAESVKG

SEQ ID NO: 11149 - protein, 11 aa, synthetic construct
  source 1..11: note = Description of Artificial Sequence: Synthetic peptide; note = XENP019644 vlCDR3
YYGNYGGYFDV

SEQ ID NO: 11150 - protein, 249 aa, synthetic construct
  source 1..249: note = Description of Artificial Sequence: Synthetic polypeptide; note = XENP019645 1G6_L1.189_H1.281_scFv(GKPGS)4
EIVLTQSPATLSVSPGERVTLTCRASQSVGNDVAWYQQKPGQAPRLLINYASHRYTGVPDRFTGSGYGTEFTLTISSVQSEDFAVYYCQQDFSSPRTFGGGTKVEIKGKPGSGKPGSGKPGSGKPGSEVQLVESGGGLVKPGGSLRLSCVASGFTFSNYWMNWVRQAPGKGLEWVAEIRLYSNNYATHYAESVKGRFTISRDDSKSMLYLQMNNLKTEDTGVYYCTRYYGNYGGYFDVWGRGTLVTVSS

SEQ ID NO: 11151 - protein, 107 aa, synthetic construct; identical to SEQ ID NO: 10864
  source 1..107: note = Description of Artificial Sequence: Synthetic polypeptide; note = VH of XENP019645

SEQ ID NO: 11152 - protein, 122 aa, synthetic construct; identical to SEQ ID NO: 10926
  source 1..122: note = Description of Artificial Sequence: Synthetic polypeptide; note = VL of XENP019645

SEQ ID NO: 11153 - protein, 11 aa, synthetic construct
  source 1..11: note = Description of Artificial Sequence: Synthetic peptide; note = XENP019645 vhCDR1
RASQSVGNDVA

SEQ ID NO: 11154 - protein, 7 aa, synthetic construct
  source 1..7: note = Description of Artificial Sequence: Synthetic peptide; note = XENP019645 vhCDR2
YASHRYT

SEQ ID NO: 11155 - protein, 9 aa, synthetic construct
  source 1..9: note = Description of Artificial Sequence: Synthetic peptide; note = XENP019645 vhCDR3
QQDFSSPRT

SEQ ID NO: 11156 - protein, 5 aa, synthetic construct
  source 1..5: note = Description of Artificial Sequence: Synthetic peptide; note = XENP019645 vlCDR1
NYWMN

SEQ ID NO: 11157 - protein, 19 aa, synthetic construct
  source 1..19: note = Description of Artificial Sequence: Synthetic peptide; note = XENP019645 vlCDR2
EIRLYSNNYATHYAESVKG

SEQ ID NO: 11158 - protein, 11 aa, synthetic construct
  source 1..11: note = Description of Artificial Sequence: Synthetic peptide; note = XENP019645 vlCDR3
YYGNYGGYFDV

SEQ ID NO: 11159 - protein, 249 aa, synthetic construct
  source 1..249: note = Description of Artificial Sequence: Synthetic polypeptide; note = XENP019646 1G6_L1.189_H1.282_scFv(GKPGS)4
EIVLTQSPATLSVSPGERVTLTCRASQSVGNDVAWYQQKPGQAPRLLINYASHRYTGVPDRFTGSGYGTEFTLTISSVQSEDFAVYYCQQDFSSPRTFGGGTKVEIKGKPGSGKPGSGKPGSGKPGSEVQLVESGGGLVKPGGSLRLTCVASGFTFSNYWMNWVRQAPGKGLEWVAEIRLYSNNYATHYAESVKGRFTISRDDSKSMLYLQMNNLKTEDTGVYYCTRYYGNYGGYFDVWGRGTLVTVSS

SEQ ID NO: 11160 - protein, 107 aa, synthetic construct; identical to SEQ ID NO: 10864
  source 1..107: note = Description of Artificial Sequence: Synthetic polypeptide; note = VH of XENP019646

SEQ ID NO: 11161 - protein, 122 aa, synthetic construct; identical to SEQ ID NO: 10935
  source 1..122: note = Description of Artificial Sequence: Synthetic polypeptide; note = VL of XENP019646

SEQ ID NO: 11162 - protein, 11 aa, synthetic construct
  source 1..11: note = Description of Artificial Sequence: Synthetic peptide; note = XENP019646 vhCDR1
RASQSVGNDVA

SEQ ID NO: 11163 - protein, 7 aa, synthetic construct
  source 1..7: note = Description of Artificial Sequence: Synthetic peptide; note = XENP019646 vhCDR2
YASHRYT

SEQ ID NO: 11164 - protein, 9 aa, synthetic construct
  source 1..9: note = Description of Artificial Sequence: Synthetic peptide; note = XENP019646 vhCDR3
QQDFSSPRT

SEQ ID NO: 11165 - protein, 5 aa, synthetic construct
  source 1..5: note = Description of Artificial Sequence: Synthetic peptide; note = XENP019646 vlCDR1
NYWMN

SEQ ID NO: 11166 - protein, 19 aa, synthetic construct
  source 1..19: note = Description of Artificial Sequence: Synthetic peptide; note = XENP019646 vlCDR2
EIRLYSNNYATHYAESVKG

SEQ ID NO: 11167 - protein, 11 aa, synthetic construct
  source 1..11: note = Description of Artificial Sequence: Synthetic peptide; note = XENP019646 vlCDR3
YYGNYGGYFDV

SEQ ID NO: 11168 - protein, 249 aa, synthetic construct
  source 1..249: note = Description of Artificial Sequence: Synthetic polypeptide; note = XENP019647 1G6_L1.189_H1.283_scFv(GKPGS)4
EIVLTQSPATLSVSPGERVTLTCRASQSVGNDVAWYQQKPGQAPRLLINYASHRYTGVPDRFTGSGYGTEFTLTISSVQSEDFAVYYCQQDFSSPRTFGGGTKVEIKGKPGSGKPGSGKPGSGKPGSEVQLVESGGGLVKPGGSLRLSCVASGFTFSNYWMNWVRQAPGKGLEWVCEIRLYSNNYATHYAESVKGRFTCSRDDSKSTLYLQMNNLKTEDTGVYYCTRYYGNYGGYFDVWGQGTLVTVSS

SEQ ID NO: 11169 - protein, 107 aa, synthetic construct; identical to SEQ ID NO: 10864
  source 1..107: note = Description of Artificial Sequence: Synthetic polypeptide; note = VH of XENP019647

SEQ ID NO: 11170 - protein, 122 aa, synthetic construct; identical to SEQ ID NO: 10944
  source 1..122: note = Description of Artificial Sequence: Synthetic polypeptide; note = VL of XENP019647

SEQ ID NO: 11171 - protein, 11 aa, synthetic construct
  source 1..11: note = Description of Artificial Sequence: Synthetic peptide; note = XENP019647 vhCDR1
RASQSVGNDVA

SEQ ID NO: 11172 - protein, 7 aa, synthetic construct
  source 1..7: note = Description of Artificial Sequence: Synthetic peptide; note = XENP019647 vhCDR2
YASHRYT

SEQ ID NO: 11173 - protein, 9 aa, synthetic construct
  source 1..9: note = Description of Artificial Sequence: Synthetic peptide; note = XENP019647 vhCDR3
QQDFSSPRT

SEQ ID NO: 11174 - protein, 5 aa, synthetic construct
  source 1..5: note = Description of Artificial Sequence: Synthetic peptide; note = XENP019647 vlCDR1
NYWMN

SEQ ID NO: 11175 - protein, 19 aa, synthetic construct
  source 1..19: note = Description of Artificial Sequence: Synthetic peptide; note = XENP019647 vlCDR2
EIRLYSNNYATHYAESVKG

SEQ ID NO: 11176 - protein, 11 aa, synthetic construct
  source 1..11: note = Description of Artificial Sequence: Synthetic peptide; note = XENP019647 vlCDR3
YYGNYGGYFDV

SEQ ID NO: 11177 - protein, 249 aa, synthetic construct
  source 1..249: note = Description of Artificial Sequence: Synthetic polypeptide; note = XENP019648 1G6_L1.189_H1.284_scFv(GKPGS)4
EIVLTQSPATLSVSPGERVTLTCRASQSVGNDVAWYQQKPGQAPRLLINYASHRYTGVPDRFTGSGYGTEFTLTISSVQSEDFAVYYCQQDFSSPRTFGGGTKVEIKGKPGSGKPGSGKPGSGKPGSEVQLVESGGGLVKPGGSLRLSCVASGFTFSNYWMNWVRQAPGKGLEWVCEIRLYSNNYATHYAESVKGRFTCSRDDSKSTLYLQMNNLKTEDTGVYYCTRYYGNYGGYFDVWGRGTLVTVSS

SEQ ID NO: 11178 - protein, 107 aa, synthetic construct; identical to SEQ ID NO: 10864
  source 1..107: note = Description of Artificial Sequence: Synthetic polypeptide; note = VH of XENP019648

SEQ ID NO: 11179 - protein, 122 aa, synthetic construct; identical to SEQ ID NO: 10953
  source 1..122: note = Description of Artificial Sequence: Synthetic polypeptide; note = VL of XENP019648

SEQ ID NO: 11180 - protein, 11 aa, synthetic construct
  source 1..11: note = Description of Artificial Sequence: Synthetic peptide; note = XENP019648 vhCDR1
RASQSVGNDVA

SEQ ID NO: 11181 - protein, 7 aa, synthetic construct
  source 1..7: note = Description of Artificial Sequence: Synthetic peptide; note = XENP019648 vhCDR2
YASHRYT

SEQ ID NO: 11182 - protein, 9 aa, synthetic construct
  source 1..9: note = Description of Artificial Sequence: Synthetic peptide; note = XENP019648 vhCDR3
QQDFSSPRT

SEQ ID NO: 11183 - protein, 5 aa, synthetic construct
  source 1..5: note = Description of Artificial Sequence: Synthetic peptide; note = XENP019648 vlCDR1
NYWMN

SEQ ID NO: 11184 - protein, 19 aa, synthetic construct
  source 1..19: note = Description of Artificial Sequence: Synthetic peptide; note = XENP019648 vlCDR2
EIRLYSNNYATHYAESVKG

SEQ ID NO: 11185 - protein, 11 aa, synthetic construct
  source 1..11: note = Description of Artificial Sequence: Synthetic peptide; note = XENP019648 vlCDR3
YYGNYGGYFDV

SEQ ID NO: 11186 - protein, 249 aa, synthetic construct
  source 1..249: note = Description of Artificial Sequence: Synthetic polypeptide; note = XENP019649 1G6_L1.189_H1.285_scFv(GKPGS)4
EIVLTQSPATLSVSPGERVTLTCRASQSVGNDVAWYQQKPGQAPRLLINYASHRYTGVPDRFTGSGYGTEFTLTISSVQSEDFAVYYCQQDFSSPRTFGGGTKVEIKGKPGSGKPGSGKPGSGKPGSEVQLVESGGGLVKPGGSLRLTCVASGFTFSNYWMNWVRQAPGKGLEWVCEIRLYSNNYATHYAESVKGRFTCSRDDSKSMLYLQMNNLKTEDTGVYYCTRYYGNYGGYFDVWGRGTLVTVSS

SEQ ID NO: 11187 - protein, 107 aa, synthetic construct; identical to SEQ ID NO: 10864
  source 1..107: note = Description of Artificial Sequence: Synthetic polypeptide; note = VH of XENP019649

SEQ ID NO: 11188 - protein, 122 aa, synthetic construct; identical to SEQ ID NO: 10962
  source 1..122: note = Description of Artificial Sequence: Synthetic polypeptide; note = VL of XENP019649

SEQ ID NO: 11189 - protein, 11 aa, synthetic construct
  source 1..11: note = Description of Artificial Sequence: Synthetic peptide; note = XENP019649 vhCDR1
RASQSVGNDVA

SEQ ID NO: 11190 - protein, 7 aa, synthetic construct
  source 1..7: note = Description of Artificial Sequence: Synthetic peptide; note = XENP019649 vhCDR2
YASHRYT

SEQ ID NO: 11191 - protein, 9 aa, synthetic construct
  source 1..9: note = Description of Artificial Sequence: Synthetic peptide; note = XENP019649 vhCDR3
QQDFSSPRT

SEQ ID NO: 11192 - protein, 5 aa, synthetic construct
  source 1..5: note = Description of Artificial Sequence: Synthetic peptide; note = XENP019649 vlCDR1
NYWMN

SEQ ID NO: 11193 - protein, 19 aa, synthetic construct
  source 1..19: note = Description of Artificial Sequence: Synthetic peptide; note = XENP019649 vlCDR2
EIRLYSNNYATHYAESVKG

SEQ ID NO: 11194 - protein, 11 aa, synthetic construct
  source 1..11: note = Description of Artificial Sequence: Synthetic peptide; note = XENP019649 vlCDR3
YYGNYGGYFDV

SEQ ID NO: 11195 - protein, 249 aa, synthetic construct
  source 1..249: note = Description of Artificial Sequence: Synthetic polypeptide; note = XENP019650 1G6_L1.192_H1.278_scFv(GKPGS)4
EIVLTQSPATLSASPGERVTLTCRASQSVGNDVAWYQQKPGQAPRLLINYASHRYTGVPDRFTGSGYGTEFTLTISSVQSEDFAVYYCQQDFSSPRTFGGGTKVEIKGKPGSGKPGSGKPGSGKPGSEVQLVESGGGLVKPGGSLRLSCVASGFTFSNYWMNWVRQAPGKGLEWVAEIRLYSNNYATHYAESVKGRFTISRDDSKSTLYLQMNNLKTEDTGVYYCTRYYGNYGGYFDVWGQGTLVTVSS

SEQ ID NO: 11196 - protein, 107 aa, synthetic construct; identical to SEQ ID NO: 10981
  source 1..107: note = Description of Artificial Sequence: Synthetic polypeptide; note = VH of XENP019650

SEQ ID NO: 11197 - protein, 122 aa, synthetic construct; identical to SEQ ID NO: 10845
  source 1..122: note = Description of Artificial Sequence: Synthetic polypeptide; note = VL of XENP019650

SEQ ID NO: 11198 - protein, 11 aa, synthetic construct
  source 1..11: note = Description of Artificial Sequence: Synthetic peptide; note = XENP019650 vhCDR1
RASQSVGNDVA

SEQ ID NO: 11199 - protein, 7 aa, synthetic construct
  source 1..7: note = Description of Artificial Sequence: Synthetic peptide; note = XENP019650 vhCDR2
YASHRYT

SEQ ID NO: 11200 - protein, 9 aa, synthetic construct
  source 1..9: note = Description of Artificial Sequence: Synthetic peptide; note = XENP019650 vhCDR3
QQDFSSPRT

SEQ ID NO: 11201 - protein, 5 aa, synthetic construct
  source 1..5: note = Description of Artificial Sequence: Synthetic peptide; note = XENP019650 vlCDR1
NYWMN

SEQ ID NO: 11202 - protein, 19 aa, synthetic construct
  source 1..19: note = Description of Artificial Sequence: Synthetic peptide; note = XENP019650 vlCDR2
EIRLYSNNYATHYAESVKG

SEQ ID NO: 11203 - protein, 11 aa, synthetic construct
  source 1..11: note = Description of Artificial Sequence: Synthetic peptide; note = XENP019650 vlCDR3
YYGNYGGYFDV

SEQ ID NO: 11204 - protein, 249 aa, synthetic construct
  source 1..249: note = Description of Artificial Sequence: Synthetic polypeptide; note = XENP019651 1G6_L1.193_H1.278_scFv(GKPGS)4
EIVLTQSPATLSVSPGERVTLTCRASQSVGNDVAWYQQKPGQAPRLLINYASHRYTGVPDRFTGSGYGTEFTLTISSVQSEDFGVYYCQQDFSSPRTFGGGTKVEIKGKPGSGKPGSGKPGSGKPGSEVQLVESGGGLVKPGGSLRLSCVASGFTFSNYWMNWVRQAPGKGLEWVAEIRLYSNNYATHYAESVKGRFTISRDDSKSTLYLQMNNLKTEDTGVYYCTRYYGNYGGYFDVWGQGTLVTVSS

SEQ ID NO: 11205 - protein, 107 aa, synthetic construct; identical to SEQ ID NO: 10990
  source 1..107: note = Description of Artificial Sequence: Synthetic polypeptide; note = VH of XENP019651

SEQ ID NO: 11206 - protein, 122 aa, synthetic construct; identical to SEQ ID NO: 10845
  source 1..122: note = Description of Artificial Sequence: Synthetic polypeptide; note = VL of XENP019651

SEQ ID NO: 11207 - protein, 11 aa, synthetic construct
  source 1..11: note = Description of Artificial Sequence: Synthetic peptide; note = XENP019651 vhCDR1
RASQSVGNDVA

SEQ ID NO: 11208 - protein, 7 aa, synthetic construct
  source 1..7: note = Description of Artificial Sequence: Synthetic peptide; note = XENP019651 vhCDR2
YASHRYT

SEQ ID NO: 11209 - protein, 9 aa, synthetic construct
  source 1..9: note = Description of Artificial Sequence: Synthetic peptide; note = XENP019651 vhCDR3
QQDFSSPRT

SEQ ID NO: 11210 - protein, 5 aa, synthetic construct
  source 1..5: note = Description of Artificial Sequence: Synthetic peptide; note = XENP019651 vlCDR1
NYWMN

SEQ ID NO: 11211 - protein, 19 aa, synthetic construct
  source 1..19: note = Description of Artificial Sequence: Synthetic peptide; note = XENP019651 vlCDR2
EIRLYSNNYATHYAESVKG

SEQ ID NO: 11212 - protein, 11 aa, synthetic construct
  source 1..11: note = Description of Artificial Sequence: Synthetic peptide; note = XENP019651 vlCDR3
YYGNYGGYFDV

SEQ ID NO: 11213 - protein, 249 aa, synthetic construct
  source 1..249: note = Description of Artificial Sequence: Synthetic polypeptide; note = XENP019652 1G6_L1.194_H1.278_scFv(GKPGS)4
EIVLTQSPATLSASPGERVTLTCRASQSVGNDVAWYQQKPGQAPRLLINYASHRYTGVPDRFTGSGYGTEFTLTISSVQSEDFGVYYCQQDFSSPRTFGGGTKVEIKGKPGSGKPGSGKPGSGKPGSEVQLVESGGGLVKPGGSLRLSCVASGFTFSNYWMNWVRQAPGKGLEWVAEIRLYSNNYATHYAESVKGRFTISRDDSKSTLYLQMNNLKTEDTGVYYCTRYYGNYGGYFDVWGQGTLVTVSS

SEQ ID NO: 11214 - protein, 107 aa, synthetic construct; identical to SEQ ID NO: 10999
  source 1..107: note = Description of Artificial Sequence: Synthetic polypeptide; note = VH of XENP019652

SEQ ID NO: 11215 - protein, 122 aa, synthetic construct; identical to SEQ ID NO: 10845
  source 1..122: note = Description of Artificial Sequence: Synthetic polypeptide; note = VL of XENP019652

SEQ ID NO: 11216 - protein, 11 aa, synthetic construct
  source 1..11: note = Description of Artificial Sequence: Synthetic peptide; note = XENP019652 vhCDR1
RASQSVGNDVA

SEQ ID NO: 11217 - protein, 7 aa, synthetic construct
  source 1..7: note = Description of Artificial Sequence: Synthetic peptide; note = XENP019652 vhCDR2
YASHRYT

SEQ ID NO: 11218 - protein, 9 aa, synthetic construct
  source 1..9: note = Description of Artificial Sequence: Synthetic peptide; note = XENP019652 vhCDR3
QQDFSSPRT

SEQ ID NO: 11219 - protein, 5 aa, synthetic construct
  source 1..5: note = Description of Artificial Sequence: Synthetic peptide; note = XENP019652 vlCDR1
NYWMN

SEQ ID NO: 11220 - protein, 19 aa, synthetic construct
  source 1..19: note = Description of Artificial Sequence: Synthetic peptide; note = XENP019652 vlCDR2
EIRLYSNNYATHYAESVKG

SEQ ID NO: 11221 - protein, 11 aa, synthetic construct
  source 1..11: note = Description of Artificial Sequence: Synthetic peptide; note = XENP019652 vlCDR3
YYGNYGGYFDV

SEQ ID NO: 11222 - protein, 249 aa, synthetic construct
  source 1..249: note = Description of Artificial Sequence: Synthetic polypeptide; note = XENP019653 1G6_L1.195_H1.278_scFv(GKPGS)4
EIVLTQSPATLSVSPGERVTLTCRASQSVGNDVAWYQQKPGQAPRLLCNYASHRYTGVPDRFTCSGYGTEFTLTISSVQSEDFAVYYCQQDFSSPRTFGGGTKVEIKGKPGSGKPGSGKPGSGKPGSEVQLVESGGGLVKPGGSLRLSCVASGFTFSNYWMNWVRQAPGKGLEWVAEIRLYSNNYATHYAESVKGRFTISRDDSKSTLYLQMNNLKTEDTGVYYCTRYYGNYGGYFDVWGQGTLVTVSS

SEQ ID NO: 11223 - protein, 107 aa, synthetic construct; identical to SEQ ID NO: 11008
  source 1..107: note = Description of Artificial Sequence: Synthetic polypeptide; note = VH of XENP019653

SEQ ID NO: 11224 - protein, 122 aa, synthetic construct; identical to SEQ ID NO: 10845
  source 1..122: note = Description of Artificial Sequence: Synthetic polypeptide; note = VL of XENP019653

SEQ ID NO: 11225 - protein, 11 aa, synthetic construct
  source 1..11: note = Description of Artificial Sequence: Synthetic peptide; note = XENP019653 vhCDR1
RASQSVGNDVA

SEQ ID NO: 11226 - protein, 9 aa, synthetic construct
  source 1..9: note = Description of Artificial Sequence: Synthetic peptide; note = XENP019653 vhCDR2
CNYASHRYT

SEQ ID NO: 11227 - protein, 9 aa, synthetic construct
  source 1..9: note = Description of Artificial Sequence: Synthetic peptide; note = XENP019653 vhCDR3
QQDFSSPRT

SEQ ID NO: 11228 - protein, 5 aa, synthetic construct
  source 1..5: note = Description of Artificial Sequence: Synthetic peptide; note = XENP019653 vlCDR1
NYWMN

SEQ ID NO: 11229 - protein, 19 aa, synthetic construct
  source 1..19: note = Description of Artificial Sequence: Synthetic peptide; note = XENP019653 vlCDR2
EIRLYSNNYATHYAESVKG

SEQ ID NO: 11230 - protein, 11 aa, synthetic construct
  source 1..11: note = Description of Artificial Sequence: Synthetic peptide; note = XENP019653 vlCDR3
YYGNYGGYFDV

SEQ ID NO: 11231 - protein, 249 aa, synthetic construct
  source 1..249: note = Description of Artificial Sequence: Synthetic polypeptide; note = XENP019654 1G6_L1.196_H1.278_scFv(GKPGS)4
EIVLTQSPATLSASPGERVTLTCRASQSVGNDVAWYQQKPGQAPRLLCNYASHRYTGVPDRFTCSGYGTEFTLTISSVQSEDFGVYYCQQDFSSPRTFGGGTKVEIKGKPGSGKPGSGKPGSGKPGSEVQLVESGGGLVKPGGSLRLSCVASGFTFSNYWMNWVRQAPGKGLEWVAEIRLYSNNYATHYAESVKGRFTISRDDSKSTLYLQMNNLKTEDTGVYYCTRYYGNYGGYFDVWGQGTLVTVSS

SEQ ID NO: 11232 - protein, 107 aa, synthetic construct; identical to SEQ ID NO: 11017
  source 1..107: note = Description of Artificial Sequence: Synthetic polypeptide; note = VH of XENP019654

SEQ ID NO: 11233 - protein, 122 aa, synthetic construct; identical to SEQ ID NO: 10845
  source 1..122: note = Description of Artificial Sequence: Synthetic polypeptide; note = VL of XENP019654

SEQ ID NO: 11234 - protein, 11 aa, synthetic construct
  source 1..11: note = Description of Artificial Sequence: Synthetic peptide; note = XENP019654 vhCDR1
RASQSVGNDVA

SEQ ID NO: 11235 - protein, 9 aa, synthetic construct
  source 1..9: note = Description of Artificial Sequence: Synthetic peptide; note = XENP019654 vhCDR2
CNYASHRYT

SEQ ID NO: 11236 - protein, 9 aa, synthetic construct
  source 1..9: note = Description of Artificial Sequence: Synthetic peptide; note = XENP019654 vhCDR3
QQDFSSPRT

SEQ ID NO: 11237 - protein, 5 aa, synthetic construct
  source 1..5: note = Description of Artificial Sequence: Synthetic peptide; note = XENP019654 vlCDR1
NYWMN

SEQ ID NO: 11238 - protein, 19 aa, synthetic construct
  source 1..19: note = Description of Artificial Sequence: Synthetic peptide; note = XENP019654 vlCDR2
EIRLYSNNYATHYAESVKG

SEQ ID NO: 11239 - protein, 11 aa, synthetic construct
  source 1..11: note = Description of Artificial Sequence: Synthetic peptide; note = XENP019654 vlCDR3
YYGNYGGYFDV

SEQ ID NO: 11240 - protein, 249 aa, synthetic construct
  source 1..249: note = Description of Artificial Sequence: Synthetic polypeptide; note = XENP019655 1G6_L1.197_H1.278_scFv(GKPGS)4
EIVLTQSPATLSASPGERVTLTCRASQSVGNDVAWYQQKPGQAPRLLCNYASHRYTSVPDRFTCSGYGTEFTLTISSVQSEDFGVYYCQQDFSSPRTFGGGTKVEIKGKPGSGKPGSGKPGSGKPGSEVQLVESGGGLVKPGGSLRLSCVASGFTFSNYWMNWVRQAPGKGLEWVAEIRLYSNNYATHYAESVKGRFTISRDDSKSTLYLQMNNLKTEDTGVYYCTRYYGNYGGYFDVWGQGTLVTVSS

SEQ ID NO: 11241 - protein, 107 aa, synthetic construct; identical to SEQ ID NO: 11026
  source 1..107: note = Description of Artificial Sequence: Synthetic polypeptide; note = VH of XENP019655

SEQ ID NO: 11242 - protein, 122 aa, synthetic construct; identical to SEQ ID NO: 10845
  source 1..122: note = Description of Artificial Sequence: Synthetic polypeptide; note = VL of XENP019655

SEQ ID NO: 11243 - protein, 11 aa, synthetic construct
  source 1..11: note = Description of Artificial Sequence: Synthetic peptide; note = XENP019655 vhCDR1
RASQSVGNDVA

SEQ ID NO: 11244 - protein, 9 aa, synthetic construct
  source 1..9: note = Description of Artificial Sequence: Synthetic peptide; note = XENP019655 vhCDR2
CNYASHRYT

SEQ ID NO: 11245 - protein, 9 aa, synthetic construct
  source 1..9: note = Description of Artificial Sequence: Synthetic peptide; note = XENP019655 vhCDR3
QQDFSSPRT

SEQ ID NO: 11246 - protein, 5 aa, synthetic construct
  source 1..5: note = Description of Artificial Sequence: Synthetic peptide; note = XENP019655 vlCDR1
NYWMN

SEQ ID NO: 11247 - protein, 19 aa, synthetic construct
  source 1..19: note = Description of Artificial Sequence: Synthetic peptide; note = XENP019655 vlCDR2
EIRLYSNNYATHYAESVKG

SEQ ID NO: 11248 - protein, 11 aa, synthetic construct
  source 1..11: note = Description of Artificial Sequence: Synthetic peptide; note = XENP019655 vlCDR3
YYGNYGGYFDV

SEQ ID NO: 11249 - protein, 249 aa, synthetic construct
  source 1..249: note = Description of Artificial Sequence: Synthetic polypeptide; note = XENP019656 1G6_H1.278_L1.189_scFv_linkerV1
EVQLVESGGGLVKPGGSLRLSCVASGFTFSNYWMNWVRQAPGKGLEWVAEIRLYSNNYATHYAESVKGRFTISRDDSKSTLYLQMNNLKTEDTGVYYCTRYYGNYGGYFDVWGQGTLVTVSSGKPGSGKPGSGKPGSGGGGSEIVLTQSPATLSVSPGERVTLTCRASQSVGNDVAWYQQKPGQAPRLLINYASHRYTGVPDRFTGSGYGTEFTLTISSVQSEDFAVYYCQQDFSSPRTFGGGTKVEIK

SEQ ID NO: 11250 - protein, 122 aa, synthetic construct; identical to SEQ ID NO: 10845
  source 1..122: note = Description of Artificial Sequence: Synthetic polypeptide; note = VH of XENP019656

SEQ ID NO: 11251 - protein, 107 aa, synthetic construct; identical to SEQ ID NO: 10864
  source 1..107: note = Description of Artificial Sequence: Synthetic polypeptide; note = VL of XENP019656

SEQ ID NO: 11252 - protein, 5 aa, synthetic construct
  source 1..5: note = Description of Artificial Sequence: Synthetic peptide; note = XENP019656 vhCDR1
NYWMN

SEQ ID NO: 11253 - protein, 19 aa, synthetic construct
  source 1..19: note = Description of Artificial Sequence: Synthetic peptide; note = XENP019656 vhCDR2
EIRLYSNNYATHYAESVKG

SEQ ID NO: 11254 - protein, 11 aa, synthetic construct
  source 1..11: note = Description of Artificial Sequence: Synthetic peptide; note = XENP019656 vhCDR3
YYGNYGGYFDV

SEQ ID NO: 11255 - protein, 11 aa, synthetic construct
  source 1..11: note = Description of Artificial Sequence: Synthetic peptide; note = XENP019656 vlCDR1
RASQSVGNDVA

SEQ ID NO: 11256 - protein, 7 aa, synthetic construct
  source 1..7: note = Description of Artificial Sequence: Synthetic peptide; note = XENP019656 vlCDR2
YASHRYT

SEQ ID NO: 11257 - protein, 9 aa, synthetic construct
  source 1..9: note = Description of Artificial Sequence: Synthetic peptide; note = XENP019656 vlCDR3
QQDFSSPRT

SEQ ID NO: 11258 - protein, 247 aa, synthetic construct
  source 1..247: note = Description of Artificial Sequence: Synthetic polypeptide; note = XENP019657 1G6_H1.278_L1.189_scFv_linkerV2
EVQLVESGGGLVKPGGSLRLSCVASGFTFSNYWMNWVRQAPGKGLEWVAEIRLYSNNYATHYAESVKGRFTISRDDSKSTLYLQMNNLKTEDTGVYYCTRYYGNYGGYFDVWGQGTLVTVSSGKPGSGKPGSGKPGSGKPEIVLTQSPATLSVSPGERVTLTCRASQSVGNDVAWYQQKPGQAPRLLINYASHRYTGVPDRFTGSGYGTEFTLTISSVQSEDFAVYYCQQDFSSPRTFGGGTKVEIK

SEQ ID NO: 11259 - protein, 122 aa, synthetic construct; identical to SEQ ID NO: 10845
  source 1..122: note = Description of Artificial Sequence: Synthetic polypeptide; note = VH of XENP019657

SEQ ID NO: 11260 - protein, 107 aa, synthetic construct; identical to SEQ ID NO: 10864
  source 1..107: note = Description of Artificial Sequence: Synthetic polypeptide; note = VL of XENP019657

SEQ ID NO: 11261 - protein, 5 aa, synthetic construct
  source 1..5: note = Description of Artificial Sequence: Synthetic peptide; note = XENP019657 vhCDR1
NYWMN

SEQ ID NO: 11262 - protein, 19 aa, synthetic construct
  source 1..19: note = Description of Artificial Sequence: Synthetic peptide; note = XENP019657 vhCDR2
EIRLYSNNYATHYAESVKG

SEQ ID NO: 11263 - protein, 11 aa, synthetic construct
  source 1..11: note = Description of Artificial Sequence: Synthetic peptide; note = XENP019657 vhCDR3
YYGNYGGYFDV

SEQ ID NO: 11264 - protein, 11 aa, synthetic construct
  source 1..11: note = Description of Artificial Sequence: Synthetic peptide; note = XENP019657 vlCDR1
RASQSVGNDVA

SEQ ID NO: 11265 - protein, 7 aa, synthetic construct
  source 1..7: note = Description of Artificial Sequence: Synthetic peptide; note = XENP019657 vlCDR2
YASHRYT

SEQ ID NO: 11266 - protein, 9 aa, synthetic construct
  source 1..9: note = Description of Artificial Sequence: Synthetic peptide; note = XENP019657 vlCDR3
QQDFSSPRT

SEQ ID NO: 11267 - protein, 244 aa, synthetic construct
  source 1..244: note = Description of Artificial Sequence: Synthetic polypeptide; note = XENP019658 1G6_H1.278_L1.189_scFv_linkerV3
EVQLVESGGGLVKPGGSLRLSCVASGFTFSNYWMNWVRQAPGKGLEWVAEIRLYSNNYATHYAESVKGRFTISRDDSKSTLYLQMNNLKTEDTGVYYCTRYYGNYGGYFDVWGQGTLVTVSSGKPGSGKPGSGKPGSEIVLTQSPATLSVSPGERVTLTCRASQSVGNDVAWYQQKPGQAPRLLINYASHRYTGVPDRFTGSGYGTEFTLTISSVQSEDFAVYYCQQDFSSPRTFGGGTKVEIK

SEQ ID NO: 11268 - protein, 122 aa, synthetic construct; identical to SEQ ID NO: 10845
  source 1..122: note = Description of Artificial Sequence: Synthetic polypeptide; note = VH of XENP019658

SEQ ID NO: 11269 - protein, 107 aa, synthetic construct; identical to SEQ ID NO: 10864
  source 1..107: note = Description of Artificial Sequence: Synthetic polypeptide; note = VL of XENP019658

SEQ ID NO: 11270 - protein, 5 aa, synthetic construct
  source 1..5: note = Description of Artificial Sequence: Synthetic peptide; note = XENP019658 vhCDR1
NYWMN

SEQ ID NO: 11271 - protein, 19 aa, synthetic construct
  source 1..19: note = Description of Artificial Sequence: Synthetic peptide; note = XENP019658 vhCDR2
EIRLYSNNYATHYAESVKG

SEQ ID NO: 11272 - protein, 11 aa, synthetic construct
  source 1..11: note = Description of Artificial Sequence: Synthetic peptide; note = XENP019658 vhCDR3
YYGNYGGYFDV

SEQ ID NO: 11273 - protein, 11 aa, synthetic construct
  source 1..11: note = Description of Artificial Sequence: Synthetic peptide; note = XENP019658 vlCDR1
RASQSVGNDVA

SEQ ID NO: 11274 - protein, 7 aa, synthetic construct
  source 1..7: note = Description of Artificial Sequence: Synthetic peptide; note = XENP019658 vlCDR2
YASHRYT

SEQ ID NO: 11275 - protein, 9 aa, synthetic construct
  source 1..9: note = Description of Artificial Sequence: Synthetic peptide; note = XENP019658 vlCDR3
QQDFSSPRT

SEQ ID NO: 11276 - protein, 251 aa, synthetic construct
  source 1..251: note = Description of Artificial Sequence: Synthetic polypeptide; note = XENP019659 1G6_H1.278_L1.189_scFv_linkerV4
EVQLVESGGGLVKPGGSLRLSCVASGFTFSNYWMNWVRQAPGKGLEWVAEIRLYSNNYATHYAESVKGRFTISRDDSKSTLYLQMNNLKTEDTGVYYCTRYYGNYGGYFDVWGQGTLVTVSSGKPGSGKPGSGKPGSGKPGSGSEIVLTQSPATLSVSPGERVTLTCRASQSVGNDVAWYQQKPGQAPRLLINYASHRYTGVPDRFTGSGYGTEFTLTISSVQSEDFAVYYCQQDFSSPRTFGGGTKVEIK

SEQ ID NO: 11277 - protein, 122 aa, synthetic construct; identical to SEQ ID NO: 10845
  source 1..122: note = Description of Artificial Sequence: Synthetic polypeptide; note = VH of XENP019659

SEQ ID NO: 11278 - protein, 107 aa, synthetic construct; identical to SEQ ID NO: 10864
  source 1..107: note = Description of Artificial Sequence: Synthetic polypeptide; note = VL of XENP019659

SEQ ID NO: 11279 - protein, 5 aa, synthetic construct
  source 1..5: note = Description of Artificial Sequence: Synthetic peptide; note = XENP019659 vhCDR1
NYWMN

SEQ ID NO: 11280 - protein, 19 aa, synthetic construct
  source 1..19: note = Description of Artificial Sequence: Synthetic peptide; note = XENP019659 vhCDR2
EIRLYSNNYATHYAESVKG

SEQ ID NO: 11281 - protein, 11 aa, synthetic construct
  source 1..11: note = Description of Artificial Sequence: Synthetic peptide; note = XENP019659 vhCDR3
YYGNYGGYFDV

SEQ ID NO: 11282 - protein, 11 aa, synthetic construct
  source 1..11: note = Description of Artificial Sequence: Synthetic peptide; note = XENP019659 vlCDR1
RASQSVGNDVA

SEQ ID NO: 11283 - protein, 7 aa, synthetic construct
  source 1..7: note = Description of Artificial Sequence: Synthetic peptide; note = XENP019659 vlCDR2
YASHRYT

SEQ ID NO: 11284 - protein, 9 aa, synthetic construct
  source 1..9: note = Description of Artificial Sequence: Synthetic peptide; note = XENP019659 vlCDR3
QQDFSSPRT

SEQ ID NO: 11285 - protein, 252 aa, synthetic construct
  source 1..252: note = Description of Artificial Sequence: Synthetic polypeptide; note = XENP019660 1G6_H1.278_L1.189_scFv_linkerV5
EVQLVESGGGLVKPGGSLRLSCVASGFTFSNYWMNWVRQAPGKGLEWVAEIRLYSNNYATHYAESVKGRFTISRDDSKSTLYLQMNNLKTEDTGVYYCTRYYGNYGGYFDVWGQGTLVTVSSGKPGSGKPGSGKPGSGKPGSGGSEIVLTQSPATLSVSPGERVTLTCRASQSVGNDVAWYQQKPGQAPRLLINYASHRYTGVPDRFTGSGYGTEFTLTISSVQSEDFAVYYCQQDFSSPRTFGGGTKVEIK

SEQ ID NO: 11286 - protein, 122 aa, synthetic construct; identical to SEQ ID NO: 10845
  source 1..122: note = Description of Artificial Sequence: Synthetic polypeptide; note = VH of XENP019660

SEQ ID NO: 11287 - protein, 108 aa, synthetic construct
  source 1..108: note = Description of Artificial Sequence: Synthetic polypeptide; note = VL of XENP019660
SEIVLTQSPATLSVSPGERVTLTCRASQSVGNDVAWYQQKPGQAPRLLINYASHRYTGVPDRFTGSGYGTEFTLTISSVQSEDFAVYYCQQDFSSPRTFGGGTKVEIK

SEQ ID NO: 11288 - protein, 5 aa, synthetic construct
  source 1..5: note = Description of Artificial Sequence: Synthetic peptide; note = XENP019660 vhCDR1
NYWMN

SEQ ID NO: 11289 - protein, 19 aa, synthetic construct
  source 1..19: note = Description of Artificial Sequence: Synthetic peptide; note = XENP019660 vhCDR2
EIRLYSNNYATHYAESVKG

SEQ ID NO: 11290 - protein, 11 aa, synthetic construct
  source 1..11: note = Description of Artificial Sequence: Synthetic peptide; note = XENP019660 vhCDR3
YYGNYGGYFDV

SEQ ID NO: 11291 - protein, 11 aa, synthetic construct
  source 1..11: note = Description of Artificial Sequence: Synthetic peptide; note = XENP019660 vlCDR1
RASQSVGNDVA

SEQ ID NO: 11292 - protein, 7 aa, synthetic construct
  source 1..7: note = Description of Artificial Sequence: Synthetic peptide; note = XENP019660 vlCDR2
YASHRYT

SEQ ID NO: 11293 - protein, 9 aa, synthetic construct
  source 1..9: note = Description of Artificial Sequence: Synthetic peptide; note = XENP019660 vlCDR3
QQDFSSPRT

SEQ ID NO: 11294 - protein, 253 aa, synthetic construct
  source 1..253: note = Description of Artificial Sequence: Synthetic polypeptide; note = XENP019661 1G6_H1.278_L1.189_scFv_linkerV6
EVQLVESGGGLVKPGGSLRLSCVASGFTFSNYWMNWVRQAPGKGLEWVAEIRLYSNNYATHYAESVKGRFTISRDDSKSTLYLQMNNLKTEDTGVYYCTRYYGNYGGYFDVWGQGTLVTVSSGKPGSGKPGSGKPGSGKPGSGGGSEIVLTQSPATLSVSPGERVTLTCRASQSVGNDVAWYQQKPGQAPRLLINYASHRYTGVPDRFTGSGYGTEFTLTISSVQSEDFAVYYCQQDFSSPRTFGGGTKVEIK

SEQ ID NO: 11295 - protein, 122 aa, synthetic construct; identical to SEQ ID NO: 10845
  source 1..122: note = Description of Artificial Sequence: Synthetic polypeptide; note = VH of XENP019661

SEQ ID NO: 11296 - protein, 107 aa, synthetic construct; identical to SEQ ID NO: 10864
  source 1..107: note = Description of Artificial Sequence: Synthetic polypeptide; note = VL of XENP019661

SEQ ID NO: 11297 - protein, 5 aa, synthetic construct
  source 1..5: note = Description of Artificial Sequence: Synthetic peptide; note = XENP019661 vhCDR1
NYWMN

SEQ ID NO: 11298 - protein, 19 aa, synthetic construct
  source 1..19: note = Description of Artificial Sequence: Synthetic peptide; note = XENP019661 vhCDR2
EIRLYSNNYATHYAESVKG

SEQ ID NO: 11299 - protein, 11 aa, synthetic construct
  source 1..11: note = Description of Artificial Sequence: Synthetic peptide; note = XENP019661 vhCDR3
YYGNYGGYFDV

SEQ ID NO: 11300 - protein, 11 aa, synthetic construct
  source 1..11: note = Description of Artificial Sequence: Synthetic peptide; note = XENP019661 vlCDR1
RASQSVGNDVA

SEQ ID NO: 11301 - protein, 7 aa, synthetic construct
  source 1..7: note = Description of Artificial Sequence: Synthetic peptide; note = XENP019661 vlCDR2
YASHRYT

SEQ ID NO: 11302 - protein, 9 aa, synthetic construct
  source 1..9: note = Description of Artificial Sequence: Synthetic peptide; note = XENP019661 vlCDR3
QQDFSSPRT

SEQ ID NO: 11303 - protein, 254 aa, synthetic construct
  source 1..254: note = Description of Artificial Sequence: Synthetic polypeptide; note = XENP019662 1G6_H1.278_L1.189_scFv_linkerV7
EVQLVESGGGLVKPGGSLRLSCVASGFTFSNYWMNWVRQAPGKGLEWVAEIRLYSNNYATHYAESVKGRFTISRDDSKSTLYLQMNNLKTEDTGVYYCTRYYGNYGGYFDVWGQGTLVTVSSGKPGSGKPGSGKPGSGKPGSGGGGSEIVLTQSPATLSVSPGERVTLTCRASQSVGNDVAWYQQKPGQAPRLLINYASHRYTGVPDRFTGSGYGTEFTLTISSVQSEDFAVYYCQQDFSSPRTFGGGTKVEIK

SEQ ID NO: 11304 - protein, 122 aa, synthetic construct; identical to SEQ ID NO: 10845
  source 1..122: note = Description of Artificial Sequence: Synthetic polypeptide; note = VH of XENP019662

SEQ ID NO: 11305 - protein, 107 aa, synthetic construct; identical to SEQ ID NO: 10864
  source 1..107: note = Description of Artificial Sequence: Synthetic polypeptide; note = VL of XENP019662

SEQ ID NO: 11306 - protein, 5 aa, synthetic construct
  source 1..5: note = Description of Artificial Sequence: Synthetic peptide; note = XENP019662 vhCDR1
NYWMN

SEQ ID NO: 11307 - protein, 19 aa, synthetic construct
  source 1..19: note = Description of Artificial Sequence: Synthetic peptide; note = XENP019662 vhCDR2
EIRLYSNNYATHYAESVKG

SEQ ID NO: 11308 - protein, 11 aa, synthetic construct
  source 1..11: note = Description of Artificial Sequence: Synthetic peptide; note = XENP019662 vhCDR3
YYGNYGGYFDV

SEQ ID NO: 11309 - protein, 11 aa, synthetic construct
  source 1..11: note = Description of Artificial Sequence: Synthetic peptide; note = XENP019662 vlCDR1
RASQSVGNDVA

SEQ ID NO: 11310 - protein, 7 aa, synthetic construct
  source 1..7: note = Description of Artificial Sequence: Synthetic peptide; note = XENP019662 vlCDR2
YASHRYT

SEQ ID NO: 11311 - protein, 9 aa, synthetic construct
  source 1..9: note = Description of Artificial Sequence: Synthetic peptide; note = XENP019662 vlCDR3
QQDFSSPRT

SEQ ID NO: 11312 - protein, 242 aa, synthetic construct
  source 1..242: note = Description of Artificial Sequence: Synthetic polypeptide; note = XENP019663 1G6_H1.278_L1.189_scFv_linkerV8
EVQLVESGGGLVKPGGSLRLSCVASGFTFSNYWMNWVRQAPGKGLEWVAEIRLYSNNYATHYAESVKGRFTISRDDSKSTLYLQMNNLKTEDTGVYYCTRYYGNYGGYFDVWGQGTLVTVSSGKPGSGKPGSGKPEIVLTQSPATLSVSPGERVTLTCRASQSVGNDVAWYQQKPGQAPRLLINYASHRYTGVPDRFTGSGYGTEFTLTISSVQSEDFAVYYCQQDFSSPRTFGGGTKVEIK

SEQ ID NO: 11313 - protein, 122 aa, synthetic construct; identical to SEQ ID NO: 10845
  source 1..122: note = Description of Artificial Sequence: Synthetic polypeptide; note = VH of XENP019663

SEQ ID NO: 11314 - protein, 107 aa, synthetic construct; identical to SEQ ID NO: 10864
  source 1..107: note = Description of Artificial Sequence: Synthetic polypeptide; note = VL of XENP019663

SEQ ID NO: 11315 - protein, 5 aa, synthetic construct
  source 1..5: note = Description of Artificial Sequence: Synthetic peptide; note = XENP019663 vhCDR1
NYWMN

SEQ ID NO: 11316 - protein, 19 aa, synthetic construct
  source 1..19: note = Description of Artificial Sequence: Synthetic peptide; note = XENP019663 vhCDR2
EIRLYSNNYATHYAESVKG

SEQ ID NO: 11317 - protein, 11 aa, synthetic construct
  source 1..11: note = Description of Artificial Sequence: Synthetic peptide; note = XENP019663 vhCDR3
YYGNYGGYFDV

SEQ ID NO: 11318 - protein, 11 aa, synthetic construct
  source 1..11: note = Description of Artificial Sequence: Synthetic peptide; note = XENP019663 vlCDR1
RASQSVGNDVA

SEQ ID NO: 11319 - protein, 7 aa, synthetic construct
  source 1..7: note = Description of Artificial Sequence: Synthetic peptide; note = XENP019663 vlCDR2
YASHRYT

SEQ ID NO: 11320 - protein, 9 aa, synthetic construct
  source 1..9: note = Description of Artificial Sequence: Synthetic peptide; note = XENP019663 vlCDR3
QQDFSSPRT

SEQ ID NO: 11321 - protein, 249 aa, synthetic construct
  source 1..249: note = Description of Artificial Sequence: Synthetic polypeptide; note = XENP019664 1G6_H1.287_L1.209_scFv(GKPGS)4
EVQLVESGGGLVKPGGSLRLSCVASGFTFSNYWMNWVRQAPGKCLEWVAEIRLYSNNYATHYAESVKGRFTISRDDSKSTLYLQMNNLKTEDTGVYYCTRYYGNYGGYFDVWGQGTLVTVSSGKPGSGKPGSGKPGSGKPGSEIVLTQSPATLSVSPGERVTLTCRASQSVGNDVAWYQQKPGQAPRLLINYASHRYTGVPDRFTGSGYGTEFTLTISSVQSEDFAVYYCQQDFSSPRTFGCGTKVEIK

SEQ ID NO: 11322 - protein, 122 aa, synthetic construct
  source 1..122: note = Description of Artificial Sequence: Synthetic polypeptide; note = VH of XENP019664
EVQLVESGGGLVKPGGSLRLSCVASGFTFSNYWMNWVRQAPGKCLEWVAEIRLYSNNYATHYAESVKGRFTISRDDSKSTLYLQMNNLKTEDTGVYYCTRYYGNYGGYFDVWGQGTLVTVSS

SEQ ID NO: 11323 - protein, 107 aa, synthetic construct
  source 1..107: note = Description of Artificial Sequence: Synthetic polypeptide; note = VL of XENP019664
EIVLTQSPATLSVSPGERVTLTCRASQSVGNDVAWYQQKPGQAPRLLINYASHRYTGVPDRFTGSGYGTEFTLTISSVQSEDFAVYYCQQDFSSPRTFGCGTKVEIK

SEQ ID NO: 11324 - protein, 5 aa, synthetic construct
  source 1..5: note = Description of Artificial Sequence: Synthetic peptide; note = XENP019664 vhCDR1
NYWMN

SEQ ID NO: 11325 - protein, 19 aa, synthetic construct
  source 1..19: note = Description of Artificial Sequence: Synthetic peptide; note = XENP019664 vhCDR2
EIRLYSNNYATHYAESVKG

SEQ ID NO: 11326 - protein, 11 aa, synthetic construct
  source 1..11: note = Description of Artificial Sequence: Synthetic peptide; note = XENP019664 vhCDR3
YYGNYGGYFDV

SEQ ID NO: 11327 - protein, 11 aa, synthetic construct
  source 1..11: note = Description of Artificial Sequence: Synthetic peptide; note = XENP019664 vlCDR1
RASQSVGNDVA

SEQ ID NO: 11328 - protein, 7 aa, synthetic construct
  source 1..7: note = Description of Artificial Sequence: Synthetic peptide; note = XENP019664 vlCDR2
YASHRYT

SEQ ID NO: 11329 - protein, 9 aa, synthetic construct
  source 1..9: note = Description of Artificial Sequence: Synthetic peptide; note = XENP019664 vlCDR3
QQDFSSPRT

SEQ ID NO: 11330 - protein, 249 aa, synthetic construct
  source 1..249: note = Description of Artificial Sequence: Synthetic polypeptide; note = XENP019665 1G6_L1.209_H1.287_scFv(GKPGS)4
EIVLTQSPATLSVSPGERVTLTCRASQSVGNDVAWYQQKPGQAPRLLINYASHRYTGVPDRFTGSGYGTEFTLTISSVQSEDFAVYYCQQDFSSPRTFGCGTKVEIKGKPGSGKPGSGKPGSGKPGSEVQLVESGGGLVKPGGSLRLSCVASGFTFSNYWMNWVRQAPGKCLEWVAEIRLYSNNYATHYAESVKGRFTISRDDSKSTLYLQMNNLKTEDTGVYYCTRYYGNYGGYFDVWGQGTLVTVSS

SEQ ID NO: 11331 - protein, 107 aa, synthetic construct; identical to SEQ ID NO: 11323
  source 1..107: note = Description of Artificial Sequence: Synthetic polypeptide; note = VH of XENP019665

SEQ ID NO: 11332 - protein, 122 aa, synthetic construct; identical to SEQ ID NO: 11322
  source 1..122: note = Description of Artificial Sequence: Synthetic polypeptide; note = VL of XENP019665

SEQ ID NO: 11333 - protein, 11 aa, synthetic construct
  source 1..11: note = Description of Artificial Sequence: Synthetic peptide; note = XENP019665 vhCDR1
RASQSVGNDVA

SEQ ID NO: 11334 - protein, 7 aa, synthetic construct
  source 1..7: note = Description of Artificial Sequence: Synthetic peptide; note = XENP019665 vhCDR2
YASHRYT

SEQ ID NO: 11335 - protein, 9 aa, synthetic construct
  source 1..9: note = Description of Artificial Sequence: Synthetic peptide; note = XENP019665 vhCDR3
QQDFSSPRT

SEQ ID NO: 11336 - protein, 5 aa, synthetic construct
  source 1..5: note = Description of Artificial Sequence: Synthetic peptide; note = XENP019665 vlCDR1
NYWMN

SEQ ID NO: 11337 - protein, 19 aa, synthetic construct
  source 1..19: note = Description of Artificial Sequence: Synthetic peptide; note = XENP019665 vlCDR2
EIRLYSNNYATHYAESVKG

SEQ ID NO: 11338 - protein, 11 aa, synthetic construct
  source 1..11: note = Description of Artificial Sequence: Synthetic peptide; note = XENP019665 vlCDR3
YYGNYGGYFDV

SEQ ID NO: 11339 - protein, 249 aa, synthetic construct
  source 1..249: note = Description of Artificial Sequence: Synthetic polypeptide; note = XENP019666 1G6_H1.284_L1.194_scFv(GKPGS)4
EVQLVESGGGLVKPGGSLRLSCVASGFTFSNYWMNWVRQAPGKGLEWVCEIRLYSNNYATHYAESVKGRFTCSRDDSKSTLYLQMNNLKTEDTGVYYCTRYYGNYGGYFDVWGRGTLVTVSSGKPGSGKPGSGKPGSGKPGSEIVLTQSPATLSASPGERVTLTCRASQSVGNDVAWYQQKPGQAPRLLINYASHRYTGVPDRFTGSGYGTEFTLTISSVQSEDFGVYYCQQDFSSPRTFGGGTKVEIK

SEQ ID NO: 11340 - protein, 122 aa, synthetic construct; identical to SEQ ID NO: 10953
  source 1..122: note = Description of Artificial Sequence: Synthetic polypeptide; note = VH of XENP019666

SEQ ID NO: 11341 - protein, 107 aa, synthetic construct; identical to SEQ ID NO: 10999
  source 1..107: note = Description of Artificial Sequence: Synthetic polypeptide; note = VL of XENP019666

SEQ ID NO: 11342 - protein, 5 aa, synthetic construct
  source 1..5: note = Description of Artificial Sequence: Synthetic peptide; note = XENP019666 vhCDR1
NYWMN

SEQ ID NO: 11343 - protein, 19 aa, synthetic construct
  source 1..19: note = Description of Artificial Sequence: Synthetic peptide; note = XENP019666 vhCDR2
EIRLYSNNYATHYAESVKG

SEQ ID NO: 11344 - protein, 11 aa, synthetic construct
  source 1..11: note = Description of Artificial Sequence: Synthetic peptide; note = XENP019666 vhCDR3
YYGNYGGYFDV

SEQ ID NO: 11345 - protein, 11 aa, synthetic construct
  source 1..11: note = Description of Artificial Sequence: Synthetic peptide; note = XENP019666 vlCDR1
RASQSVGNDVA

SEQ ID NO: 11346 - protein, 7 aa, synthetic construct
  source 1..7: note = Description of Artificial Sequence: Synthetic peptide; note = XENP019666 vlCDR2
YASHRYT

SEQ ID NO: 11347 - protein, 9 aa, synthetic construct
  source 1..9: note = Description of Artificial Sequence: Synthetic peptide; note = XENP019666 vlCDR3
QQDFSSPRT

SEQ ID NO: 11348 - protein, 249 aa, synthetic construct
  source 1..249: note = Description of Artificial Sequence: Synthetic polypeptide; note = XENP019667 1G6_L1.194_H1.284_scFv(GKPGS)4
EIVLTQSPATLSASPGERVTLTCRASQSVGNDVAWYQQKPGQAPRLLINYASHRYTGVPDRFTGSGYGTEFTLTISSVQSEDFGVYYCQQDFSSPRTFGGGTKVEIKGKPGSGKPGSGKPGSGKPGSEVQLVESGGGLVKPGGSLRLSCVASGFTFSNYWMNWVRQAPGKGLEWVCEIRLYSNNYATHYAESVKGRFTCSRDDSKSTLYLQMNNLKTEDTGVYYCTRYYGNYGGYFDVWGRGTLVTVSS

SEQ ID NO: 11349 - protein, 107 aa, synthetic construct; identical to SEQ ID NO: 10999
  source 1..107: note = Description of Artificial Sequence: Synthetic polypeptide; note = VH of XENP019667

SEQ ID NO: 11350 - protein, 122 aa, synthetic construct; identical to SEQ ID NO: 10953
  source 1..122: note = Description of Artificial Sequence: Synthetic polypeptide; note = VL of XENP019667

SEQ ID NO: 11351 - protein, 11 aa, synthetic construct
  source 1..11: note = Description of Artificial Sequence: Synthetic peptide; note = XENP019667 vhCDR1
RASQSVGNDVA

SEQ ID NO: 11352 - protein, 7 aa, synthetic construct
  source 1..7: note = Description of Artificial Sequence: Synthetic peptide; note = XENP019667 vhCDR2
YASHRYT

SEQ ID NO: 11353 - protein, 9 aa, synthetic construct
  source 1..9: note = Description of Artificial Sequence: Synthetic peptide; note = XENP019667 vhCDR3
QQDFSSPRT

SEQ ID NO: 11354 - protein, 5 aa, synthetic construct
  source 1..5: note = Description of Artificial Sequence: Synthetic peptide; note = XENP019667 vlCDR1
NYWMN

SEQ ID NO: 11355 - protein, 19 aa, synthetic construct
  source 1..19: note = Description of Artificial Sequence: Synthetic peptide; note = XENP019667 vlCDR2
EIRLYSNNYATHYAESVKG

SEQ ID NO: 11356 - protein, 11 aa, synthetic construct
  source 1..11: note = Description of Artificial Sequence: Synthetic peptide; note = XENP019667 vlCDR3
YYGNYGGYFDV

SEQ ID NO: 11357 - protein, 249 aa, synthetic construct
  source 1..249: note = Description of Artificial Sequence: Synthetic polypeptide; note = XENP019668 1G6_H1.288_L1.210_scFv(GKPGS)4
EVQLVESGGGLVKPGGSLRLSCVASGFTFSNYWMNWVRQAPGKCLEWVAEIRLYSNNYATHYAESVKGRFTISRDDSKSTLYLQMNNLKTEDTGVYYCTRYYGNYGGYFDVWGRGTLVTVSSGKPGSGKPGSGKPGSGKPGSEIVLTQSPATLSASPGERVTLTCRASQSVGNDVAWYQQKPGQAPRLLINYASHRYTGVPDRFTGSGYGTEFTLTISSVQSEDFGVYYCQQDFSSPRTFGCGTKVEIK

SEQ ID NO: 11358 - protein, 122 aa, synthetic construct
  source 1..122: note = Description of Artificial Sequence: Synthetic polypeptide; note = VH of XENP019668
EVQLVESGGGLVKPGGSLRLSCVASGFTFSNYWMNWVRQAPGKCLEWVAEIRLYSNNYATHYAESVKGRFTISRDDSKSTLYLQMNNLKTEDTGVYYCTRYYGNYGGYFDVWGRGTLVTVSS

SEQ ID NO: 11359 - protein, 107 aa, synthetic construct
  source 1..107: note = Description of Artificial Sequence: Synthetic polypeptide; note = VL of XENP019668
EIVLTQSPATLSASPGERVTLTCRASQSVGNDVAWYQQKPGQAPRLLINYASHRYTGVPDRFTGSGYGTEFTLTISSVQSEDFGVYYCQQDFSSPRTFGCGTKVEIK

SEQ ID NO: 11360 - protein, 5 aa, synthetic construct
  source 1..5: note = Description of Artificial Sequence: Synthetic peptide; note = XENP019668 vhCDR1
NYWMN

SEQ ID NO: 11361 - protein, 19 aa, synthetic construct
  source 1..19: note = Description of Artificial Sequence: Synthetic peptide; note = XENP019668 vhCDR2
EIRLYSNNYATHYAESVKG

SEQ ID NO: 11362 - protein, 11 aa, synthetic construct
  source 1..11: note = Description of Artificial Sequence: Synthetic peptide; note = XENP019668 vhCDR3
YYGNYGGYFDV

SEQ ID NO: 11363 - protein, 11 aa, synthetic construct
  source 1..11: note = Description of Artificial Sequence: Synthetic peptide; note = XENP019668 vlCDR1
RASQSVGNDVA

SEQ ID NO: 11364 - protein, 7 aa, synthetic construct
  source 1..7: note = Description of Artificial Sequence: Synthetic peptide; note = XENP019668 vlCDR2
YASHRYT

SEQ ID NO: 11365 - protein, 9 aa, synthetic construct
  source 1..9: note = Description of Artificial Sequence: Synthetic peptide; note = XENP019668 vlCDR3
QQDFSSPRT

SEQ ID NO: 11366 - protein, 249 aa, synthetic construct
  source 1..249: note = Description of Artificial Sequence: Synthetic polypeptide; note = XENP019669 1G6_L1.210_H1.288_scFv(GKPGS)4
EIVLTQSPATLSASPGERVTLTCRASQSVGNDVAWYQQKPGQAPRLLINYASHRYTGVPDRFTGSGYGTEFTLTISSVQSEDFGVYYCQQDFSSPRTFGCGTKVEIKGKPGSGKPGSGKPGSGKPGSEVQLVESGGGLVKPGGSLRLSCVASGFTFSNYWMNWVRQAPGKCLEWVAEIRLYSNNYATHYAESVKGRFTISRDDSKSTLYLQMNNLKTEDTGVYYCTRYYGNYGGYFDVWGRGTLVTVSS

SEQ ID NO: 11367 - protein, 107 aa, synthetic construct; identical to SEQ ID NO: 11359
  source 1..107: note = Description of Artificial Sequence: Synthetic polypeptide; note = VH of XENP019669

SEQ ID NO: 11368 - protein, 122 aa, synthetic construct; identical to SEQ ID NO: 11358
  source 1..122: note = Description of Artificial Sequence: Synthetic polypeptide; note = VL of XENP019669

SEQ ID NO: 11369 - protein, 11 aa, synthetic construct
  source 1..11: note = Description of Artificial Sequence: Synthetic peptide; note = XENP019669 vhCDR1
RASQSVGNDVA

SEQ ID NO: 11370 - protein, 7 aa, synthetic construct
  source 1..7: note = Description of Artificial Sequence: Synthetic peptide; note = XENP019669 vhCDR2
YASHRYT

SEQ ID NO: 11371 - protein, 9 aa, synthetic construct
  source 1..9: note = Description of Artificial Sequence: Synthetic peptide; note = XENP019669 vhCDR3
QQDFSSPRT

SEQ ID NO: 11372 - protein, 5 aa, synthetic construct
  source 1..5: note = Description of Artificial Sequence: Synthetic peptide; note = XENP019669 vlCDR1
NYWMN

SEQ ID NO: 11373 - protein, 19 aa, synthetic construct
  source 1..19: note = Description of Artificial Sequence: Synthetic peptide; note = XENP019669 vlCDR2
EIRLYSNNYATHYAESVKG

SEQ ID NO: 11374 - protein, 11 aa, synthetic construct
  source 1..11: note = Description of Artificial Sequence: Synthetic peptide; note = XENP019669 vlCDR3
YYGNYGGYFDV

SEQ ID NO: 11375 - protein, 249 aa, synthetic construct
  source 1..249: note = Description of Artificial Sequence: Synthetic polypeptide; note = XENP019690 1G6_H1.279_L1.194_scFv(GKPGS)4
EVQLVESGGGLVKPGGSLRLSCVASGFTFSNYWMNWVRQAPGKGLEWVAEIRLYSNNYATHYAESVKGRFTISRDDSKSTLYLQMNNLKTEDTGVYYCTRYYGNYGGYFDVWGRGTLVTVSSGKPGSGKPGSGKPGSGKPGSEIVLTQSPATLSASPGERVTLTCRASQSVGNDVAWYQQKPGQAPRLLINYASHRYTGVPDRFTGSGYGTEFTLTISSVQSEDFGVYYCQQDFSSPRTFGGGTKVEIK

SEQ ID NO: 11376 - protein, 122 aa, synthetic construct; identical to SEQ ID NO: 10908
  source 1..122: note = Description of Artificial Sequence: Synthetic polypeptide; note = VH of XENP019690

SEQ ID NO: 11377 - protein, 107 aa, synthetic construct; identical to SEQ ID NO: 10999
  source 1..107: note = Description of Artificial Sequence: Synthetic polypeptide; note = VL of XENP019690

SEQ ID NO: 11378 - protein, 5 aa, synthetic construct
  source 1..5: note = Description of Artificial Sequence: Synthetic peptide; note = XENP019690 vhCDR1
NYWMN

SEQ ID NO: 11379 - protein, 19 aa, synthetic construct
  source 1..19: note = Description of Artificial Sequence: Synthetic peptide; note = XENP019690 vhCDR2
EIRLYSNNYATHYAESVKG

SEQ ID NO: 11380 - protein, 11 aa, synthetic construct
  source 1..11: note = Description of Artificial Sequence: Synthetic peptide; note = XENP019690 vhCDR3
YYGNYGGYFDV

SEQ ID NO: 11381 - protein, 11 aa, synthetic construct
  source 1..11: note = Description of Artificial Sequence: Synthetic peptide; note = XENP019690 vlCDR1
RASQSVGNDVA

SEQ ID NO: 11382 - protein, 7 aa, synthetic construct
  source 1..7: note = Description of Artificial Sequence: Synthetic peptide; note = XENP019690 vlCDR2
YASHRYT

SEQ ID NO: 11383 - protein, 9 aa, synthetic construct
  source 1..9: note = Description of Artificial Sequence: Synthetic peptide; note = XENP019690 vlCDR3
QQDFSSPRT

SEQ ID NO: 11384 - protein, 249 aa, synthetic construct
  source 1..249: note = Description of Artificial Sequence: Synthetic polypeptide; note = XENP019691 1G6_H1.282_L1.194_scFv(GKPGS)4
EVQLVESGGGLVKPGGSLRLTCVASGFTFSNYWMNWVRQAPGKGLEWVAEIRLYSNNYATHYAESVKGRFTISRDDSKSMLYLQMNNLKTEDTGVYYCTRYYGNYGGYFDVWGRGTLVTVSSGKPGSGKPGSGKPGSGKPGSEIVLTQSPATLSASPGERVTLTCRASQSVGNDVAWYQQKPGQAPRLLINYASHRYTGVPDRFTGSGYGTEFTLTISSVQSEDFGVYYCQQDFSSPRTFGGGTKVEIK

SEQ ID NO: 11385 - protein, 122 aa, synthetic construct; identical to SEQ ID NO: 10935
  source 1..122: note = Description of Artificial Sequence: Synthetic polypeptide; note = VH of XENP019691

SEQ ID NO: 11386 - protein, 107 aa, synthetic construct; identical to SEQ ID NO: 10999
  source 1..107: note = Description of Artificial Sequence: Synthetic polypeptide; note = VL of XENP019691

SEQ ID NO: 11387 - protein, 5 aa, synthetic construct
  source 1..5: note = Description of Artificial Sequence: Synthetic peptide; note = XENP019691 vhCDR1
NYWMN

SEQ ID NO: 11388 - protein, 19 aa, synthetic construct
  source 1..19: note = Description of Artificial Sequence: Synthetic peptide; note = XENP019691 vhCDR2
EIRLYSNNYATHYAESVKG

SEQ ID NO: 11389 - protein, 11 aa, synthetic construct
  source 1..11: note = Description of Artificial Sequence: Synthetic peptide; note = XENP019691 vhCDR3
YYGNYGGYFDV

SEQ ID NO: 11390 - protein, 11 aa, synthetic construct
  source 1..11: note = Description of Artificial Sequence: Synthetic peptide; note = XENP019691 vlCDR1
RASQSVGNDVA

SEQ ID NO: 11391 - protein, 7 aa, synthetic construct
  source 1..7: note = Description of Artificial Sequence: Synthetic peptide; note = XENP019691 vlCDR2
YASHRYT

SEQ ID NO: 11392 - protein, 9 aa, synthetic construct
  source 1..9: note = Description of Artificial Sequence: Synthetic peptide; note = XENP019691 vlCDR3
QQDFSSPRT

SEQ ID NO: 11393 - protein, 249 aa, synthetic construct
  source 1..249: note = Description of Artificial Sequence: Synthetic polypeptide; note = XENP019692 1G6_L1.194_H1.279_scFv(GKPGS)4
EIVLTQSPATLSASPGERVTLTCRASQSVGNDVAWYQQKPGQAPRLLINYASHRYTGVPDRFTGSGYGTEFTLTISSVQSEDFGVYYCQQDFSSPRTFGGGTKVEIKGKPGSGKPGSGKPGSGKPGSEVQLVESGGGLVKPGGSLRLSCVASGFTFSNYWMNWVRQAPGKGLEWVAEIRLYSNNYATHYAESVKGRFTISRDDSKSTLYLQMNNLKTEDTGVYYCTRYYGNYGGYFDVWGRGTLVTVSS

SEQ ID NO: 11394 - protein, 107 aa, synthetic construct; identical to SEQ ID NO: 10999
  source 1..107: note = Description of Artificial Sequence: Synthetic polypeptide; note = VH of XENP019692

SEQ ID NO: 11395 - protein, 122 aa, synthetic construct; identical to SEQ ID NO: 10908
  source 1..122: note = Description of Artificial Sequence: Synthetic polypeptide; note = VL of XENP019692

SEQ ID NO: 11396 - protein, 11 aa, synthetic construct
  source 1..11: note = Description of Artificial Sequence: Synthetic peptide; note = XENP019692 vhCDR1
RASQSVGNDVA

SEQ ID NO: 11397 - protein, 7 aa, synthetic construct
  source 1..7: note = Description of Artificial Sequence: Synthetic peptide; note = XENP019692 vhCDR2
YASHRYT

SEQ ID NO: 11398 - protein, 9 aa, synthetic construct
  source 1..9: note = Description of Artificial Sequence: Synthetic peptide; note = XENP019692 vhCDR3
QQDFSSPRT

SEQ ID NO: 11399 - protein, 5 aa, synthetic construct
  source 1..5: note = Description of Artificial Sequence: Synthetic peptide; note = XENP019692 vlCDR1
NYWMN

SEQ ID NO: 11400 - protein, 19 aa, synthetic construct
  source 1..19: note = Description of Artificial Sequence: Synthetic peptide; note = XENP019692 vlCDR2
EIRLYSNNYATHYAESVKG

SEQ ID NO: 11401 - protein, 11 aa, synthetic construct
  source 1..11: note = Description of Artificial Sequence: Synthetic peptide; note = XENP019692 vlCDR3
YYGNYGGYFDV

SEQ ID NO: 11402 - protein, 249 aa, synthetic construct
  source 1..249: note = Description of Artificial Sequence: Synthetic polypeptide; note = XENP019693 1G6_L1.194_H1.282_scFv(GKPGS)4
EIVLTQSPATLSASPGERVTLTCRASQSVGNDVAWYQQKPGQAPRLLINYASHRYTGVPDRFTGSGYGTEFTLTISSVQSEDFGVYYCQQDFSSPRTFGGGTKVEIKGKPGSGKPGSGKPGSGKPGSEVQLVESGGGLVKPGGSLRLTCVASGFTFSNYWMNWVRQAPGKGLEWVAEIRLYSNNYATHYAESVKGRFTISRDDSKSMLYLQMNNLKTEDTGVYYCTRYYGNYGGYFDVWGRGTLVTVSS

SEQ ID NO: 11403 - protein, 107 aa, synthetic construct; identical to SEQ ID NO: 10999
  source 1..107: note = Description of Artificial Sequence: Synthetic polypeptide; note = VH of XENP019693

SEQ ID NO: 11404 - protein, 122 aa, synthetic construct; identical to SEQ ID NO: 10935
  source 1..122: note = Description of Artificial Sequence: Synthetic polypeptide; note = VL of XENP019693

SEQ ID NO: 11405 - protein, 11 aa, synthetic construct
  source 1..11: note = Description of Artificial Sequence: Synthetic peptide; note = XENP019693 vhCDR1
RASQSVGNDVA

SEQ ID NO: 11406 - protein, 7 aa, synthetic construct
  source 1..7: note = Description of Artificial Sequence: Synthetic peptide; note = XENP019693 vhCDR2
YASHRYT

SEQ ID NO: 11407 - protein, 9 aa, synthetic construct
  source 1..9: note = Description of Artificial Sequence: Synthetic peptide; note = XENP019693 vhCDR3
QQDFSSPRT

SEQ ID NO: 11408 - protein, 5 aa, synthetic construct
  source 1..5: note = Description of Artificial Sequence: Synthetic peptide; note = XENP019693 vlCDR1
NYWMN

SEQ ID NO: 11409 - protein, 19 aa, synthetic construct
  source 1..19: note = Description of Artificial Sequence: Synthetic peptide; note = XENP019693 vlCDR2
EIRLYSNNYATHYAESVKG

SEQ ID NO: 11410 - protein, 11 aa, synthetic construct
  source 1..11: note = Description of Artificial Sequence: Synthetic peptide; note = XENP019693 vlCDR3
YYGNYGGYFDV

SEQ ID NO: 11411 - protein, 247 aa, synthetic construct
  source 1..247: note = Description of Artificial Sequence: Synthetic polypeptide; note = XENP020162 2E9_H1L1_scFv(GKPGS)4
QVQLVQSGAEVKKPGASVKVSCKASGYAFTNYWLGWVRQAPGQGLEWMGNFYPGSSNTYYNEKFQGRVTMTADKSISTAYMELSRLRSDDTAVYFCARHYGTNYRYFDVWGAGTLVTVSSGKPGSGKPGSGKPGSGKPGSDIVLTQSPGTLSLSPGERATLSCRASQSVSNDVAWYQQKPGQSPRLLIYYASNRYTGVPDRFTGSGYGTDFTLTISRLEPEDFAVYFCQQDYSSPYTFGGGTKVEIK

SEQ ID NO: 11412 - protein, 120 aa, synthetic construct
  source 1..120: note = Description of Artificial Sequence: Synthetic polypeptide; note = VH of XENP020162
QVQLVQSGAEVKKPGASVKVSCKASGYAFTNYWLGWVRQAPGQGLEWMGNFYPGSSNTYYNEKFQGRVTMTADKSISTAYMELSRLRSDDTAVYFCARHYGTNYRYFDVWGAGTLVTVSS

SEQ ID NO: 11413 - protein, 107 aa, synthetic construct
  source 1..107: note = Description of Artificial Sequence: Synthetic polypeptide; note = VL of XENP020162
DIVLTQSPGTLSLSPGERATLSCRASQSVSNDVAWYQQKPGQSPRLLIYYASNRYTGVPDRFTGSGYGTDFTLTISRLEPEDFAVYFCQQDYSSPYTFGGGTKVEIK

SEQ ID NO: 11414 - protein, 5 aa, synthetic construct
  source 1..5: note = Description of Artificial Sequence: Synthetic peptide; note = XENP020162 vhCDR1
NYWLG

SEQ ID NO: 11415 - protein, 17 aa, synthetic construct
  source 1..17: note = Description of Artificial Sequence: Synthetic peptide; note = XENP020162 vhCDR2
NFYPGSSNTYYNEKFQG

SEQ ID NO: 11416 - protein, 11 aa, synthetic construct
  source 1..11: note = Description of Artificial Sequence: Synthetic peptide; note = XENP020162 vhCDR3
HYGTNYRYFDV

SEQ ID NO: 11417 - protein, 11 aa, synthetic construct
  source 1..11: note = Description of Artificial Sequence: Synthetic peptide; note = XENP020162 vlCDR1
RASQSVSNDVA

SEQ ID NO: 11418 - protein, 7 aa, synthetic construct
  source 1..7: note = Description of Artificial Sequence: Synthetic peptide; note = XENP020162 vlCDR2
YASNRYT

SEQ ID NO: 11419 - protein, 9 aa, synthetic construct
  source 1..9: note = Description of Artificial Sequence: Synthetic peptide; note = XENP020162 vlCDR3
QQDYSSPYT

SEQ ID NO: 11420 - protein, 247 aa, synthetic construct
  source 1..247: note = Description of Artificial Sequence: Synthetic polypeptide; note = XENP020163 2E9_H2L1_scFv(GKPGS)4
EVQLVQSGAEVKKPGESLKISCKASGYAFTNYWLGWVRQMPGKGLEWMGNFYPGSSNTYYNPSFQGQVTISADKSISTAYLQWSSLKASDTAMYFCARHYGTNYRYFDVWGAGTLVTVSSGKPGSGKPGSGKPGSGKPGSDIVLTQSPGTLSLSPGERATLSCRASQSVSNDVAWYQQKPGQSPRLLIYYASNRYTGVPDRFTGSGYGTDFTLTISRLEPEDFAVYFCQQDYSSPYTFGGGTKVEIK

SEQ ID NO: 11421 - protein, 120 aa, synthetic construct
  source 1..120: note = Description of Artificial Sequence: Synthetic polypeptide; note = VH of XENP020163
EVQLVQSGAEVKKPGESLKISCKASGYAFTNYWLGWVRQMPGKGLEWMGNFYPGSSNTYYNPSFQGQVTISADKSISTAYLQWSSLKASDTAMYFCARHYGTNYRYFDVWGAGTLVTVSS

SEQ ID NO: 11422 - protein, 107 aa, synthetic construct; identical to SEQ ID NO: 11413
  source 1..107: note = Description of Artificial Sequence: Synthetic polypeptide; note = VL of XENP020163

SEQ ID NO: 11423 - protein, 5 aa, synthetic construct
  source 1..5: note = Description of Artificial Sequence: Synthetic peptide; note = XENP020163 vhCDR1
NYWLG

SEQ ID NO: 11424 - protein, 17 aa, synthetic construct
  source 1..17: note = Description of Artificial Sequence: Synthetic peptide; note = XENP020163 vhCDR2
NFYPGSSNTYYNPSFQG

SEQ ID NO: 11425 - protein, 11 aa, synthetic construct
  source 1..11: note = Description of Artificial Sequence: Synthetic peptide; note = XENP020163 vhCDR3
HYGTNYRYFDV

SEQ ID NO: 11426 - protein, 11 aa, synthetic construct
  source 1..11: note = Description of Artificial Sequence: Synthetic peptide; note = XENP020163 vlCDR1
RASQSVSNDVA

SEQ ID NO: 11427 - protein, 7 aa, synthetic construct
  source 1..7: note = Description of Artificial Sequence: Synthetic peptide; note = XENP020163 vlCDR2
YASNRYT

SEQ ID NO: 11428 - protein, 9 aa, synthetic construct
  source 1..9: note = Description of Artificial Sequence: Synthetic peptide; note = XENP020163 vlCDR3
QQDYSSPYT

SEQ ID NO: 11429 - protein, 242 aa, synthetic construct
  source 1..242: note = Description of Artificial Sequence: Synthetic polypeptide; note = XENP020164 3C11(PD-1)_H1L1_scFv(GKPGS)4
QVQLVQSGAEVKKPGASVKVSCKASGYTFTSYWMHWVRQAPGQGLEWMGAIYPGNIATSYNQKFQGRVTMTADTSTSTAYMELSSLRSEDTAVYYCTTSYVMDYWGQGTLVTVSSGKPGSGKPGSGKPGSGKPGSDIVMTQSPSSLSASVGDRVTITCQASQDINSYLSWFQQKPGKSPKTLIYRANRLVDGVPSRFSGSGSGQDYTFTISSLQPEDIATYYCLQYDEFPYTFGGGTKVEIK

SEQ ID NO: 11430 - protein, 115 aa, synthetic construct
  source 1..115: note = Description of Artificial Sequence: Synthetic polypeptide; note = VH of XENP020164
QVQLVQSGAEVKKPGASVKVSCKASGYTFTSYWMHWVRQAPGQGLEWMGAIYPGNIATSYNQKFQGRVTMTADTSTSTAYMELSSLRSEDTAVYYCTTSYVMDYWGQGTLVTVSS

SEQ ID NO: 11431 - protein, 107 aa, synthetic construct
  source 1..107: note = Description of Artificial Sequence: Synthetic polypeptide; note = VL of XENP020164
DIVMTQSPSSLSASVGDRVTITCQASQDINSYLSWFQQKPGKSPKTLIYRANRLVDGVPSRFSGSGSGQDYTFTISSLQPEDIATYYCLQYDEFPYTFGGGTKVEIK

SEQ ID NO: 11432 - protein, 5 aa, synthetic construct
  source 1..5: note = Description of Artificial Sequence: Synthetic peptide; note = XENP020164 vhCDR1
SYWMH

SEQ ID NO: 11433 - protein, 17 aa, synthetic construct
  source 1..17: note = Description of Artificial Sequence: Synthetic peptide; note = XENP020164 vhCDR2
AIYPGNIATSYNQKFQG

SEQ ID NO: 11434 - protein, 6 aa, synthetic construct
  source 1..6: note = Description of Artificial Sequence: Synthetic peptide; note = XENP020164 vhCDR3
SYVMDY

SEQ ID NO: 11435 - protein, 11 aa, synthetic construct
  source 1..11: note = Description of Artificial Sequence: Synthetic peptide; note = XENP020164 vlCDR1
QASQDINSYLS

SEQ ID NO: 11436 - protein, 7 aa, synthetic construct
  source 1..7: note = Description of Artificial Sequence: Synthetic peptide; note = XENP020164 vlCDR2
RANRLVD

SEQ ID NO: 11437 - protein, 9 aa, synthetic construct
  source 1..9: note = Description of Artificial Sequence: Synthetic peptide; note = XENP020164 vlCDR3
LQYDEFPYT

SEQ ID NO: 11438 - protein, 239 aa, synthetic construct
  source 1..239: note = Description of Artificial Sequence: Synthetic polypeptide; note = XENP020165 3G12_H1L1_scFv(GKPGS)4
QVQLVQSGAEVKKPGASVKVSCKASGYTFTSYWMHWVRQAPGQGLEWMGVIDPSDSYTSYNQKFQGRVTMTVDTSTSTAYMELSSLRSEDTAVYYCTGAYYWGQGTLVTVSSGKPGSGKPGSGKPGSGKPGSDIVLTQSPSSLSASVGDRVTITCRASQGISSNIGWLQQKPGKSFKGLIYHGTNLEDGVPSRFTGSGSGADYTLTISSLQPEDFATYYCVQYAQSPWTFGGGTKVEIK

SEQ ID NO: 11439 - protein, 112 aa, synthetic construct
  source 1..112: note = Description of Artificial Sequence: Synthetic polypeptide; note = VH of XENP020165
QVQLVQSGAEVKKPGASVKVSCKASGYTFTSYWMHWVRQAPGQGLEWMGVIDPSDSYTSYNQKFQGRVTMTVDTSTSTAYMELSSLRSEDTAVYYCTGAYYWGQGTLVTVSS

SEQ ID NO: 11440 - protein, 107 aa, synthetic construct
  source 1..107: note = Description of Artificial Sequence: Synthetic polypeptide; note = VL of XENP020165
DIVLTQSPSSLSASVGDRVTITCRASQGISSNIGWLQQKPGKSFKGLIYHGTNLEDGVPSRFTGSGSGADYTLTISSLQPEDFATYYCVQYAQSPWTFGGGTKVEIK

SEQ ID NO: 11441 - protein, 5 aa, synthetic construct
  source 1..5: note = Description of Artificial Sequence: Synthetic peptide; note = XENP020165 vhCDR1
SYWMH

SEQ ID NO: 11442 - protein, 17 aa, synthetic construct
  source 1..17: note = Description of Artificial Sequence: Synthetic peptide; note = XENP020165 vhCDR2
VIDPSDSYTSYNQKFQG

SEQ ID NO: 11443 - skipped

SEQ ID NO: 11444 - protein, 11 aa, synthetic construct
  source 1..11: note = Description of Artificial Sequence: Synthetic peptide; note = XENP020165 vlCDR1
RASQGISSNIG

SEQ ID NO: 11445 - protein, 7 aa, synthetic construct
  source 1..7: note = Description of Artificial Sequence: Synthetic peptide; note = XENP020165 vlCDR2
HGTNLED

SEQ ID NO: 11446 - protein, 9 aa, synthetic construct
  source 1..9: note = Description of Artificial Sequence: Synthetic peptide; note = XENP020165 vlCDR3
VQYAQSPWT

SEQ ID NO: 11447 - protein, 239 aa, synthetic construct
  source 1..239: note = Description of Artificial Sequence: Synthetic polypeptide; note = XENP020166 5C4_H1L1_scFv(GKPGS)4
QVQLVQSGAEVKKPGASVKVSCKASGYTFTDYWMHWLRQAPGQGLEWMGAIDTSDSYPTYNQKFQGRVTMTVDDSTSTAYMELSSLRSEDTAVYYCTRFDYWGQGTLVTVSSGKPGSGKPGSGKPGSGKPGSDIVMTQSPDSLAVSLGERATINCKASQSVSNDVAWYQQKPGQSPKLLIYYASNRYTGVPDRFTGSGYGTDFTLTISSLQAEDVAVYFCQQDYSSPYTFGGGTKVEIK

SEQ ID NO: 11448 - protein, 112 aa, synthetic construct
  source 1..112: note = Description of Artificial Sequence: Synthetic polypeptide; note = VH of XENP020166
QVQLVQSGAEVKKPGASVKVSCKASGYTFTDYWMHWLRQAPGQGLEWMGAIDTSDSYPTYNQKFQGRVTMTVDDSTSTAYMELSSLRSEDTAVYYCTRFDYWGQGTLVTVSS

SEQ ID NO: 11449 - protein, 107 aa, synthetic construct
  source 1..107: note = Description of Artificial Sequence: Synthetic polypeptide; note = VL of XENP020166
DIVMTQSPDSLAVSLGERATINCKASQSVSNDVAWYQQKPGQSPKLLIYYASNRYTGVPDRFTGSGYGTDFTLTISSLQAEDVAVYFCQQDYSSPYTFGGGTKVEIK

SEQ ID NO: 11450 - protein, 5 aa, synthetic construct
  source 1..5: note = Description of Artificial Sequence: Synthetic peptide; note = XENP020166 vhCDR1
DYWMH

SEQ ID NO: 11451 - protein, 17 aa, synthetic construct
  source 1..17: note = Description of Artificial Sequence: Synthetic peptide; note = XENP020166 vhCDR2
AIDTSDSYPTYNQKFQG

SEQ ID NO: 11452 - skipped

SEQ ID NO: 11453 - protein, 11 aa, synthetic construct
  source 1..11: note = Description of Artificial Sequence: Synthetic peptide; note = XENP020166 vlCDR1
KASQSVSNDVA

SEQ ID NO: 11454 - protein, 7 aa, synthetic construct
  source 1..7: note = Description of Artificial Sequence: Synthetic peptide; note = XENP020166 vlCDR2
YASNRYT

SEQ ID NO: 11455 - protein, 9 aa, synthetic construct
  source 1..9: note = Description of Artificial Sequence: Synthetic peptide; note = XENP020166 vlCDR3
QQDYSSPYT

SEQ ID NO: 11456 - protein, 239 aa, synthetic construct
  source 1..239: note = Description of Artificial Sequence: Synthetic polypeptide; note = XENP020167 5C4_H2L1_scFv(GKPGS)4
QVQLVQSGSELKKPGASVKVSCKASGYTFTDYWMHWLRQAPGQGLEWMGAIDTSDSYPTYNQGFTGRFVFSVDDSVSTAYLQISSLKAEDTAVYYCTRFDYWGQGTLVTVSSGKPGSGKPGSGKPGSGKPGSDIVMTQSPDSLAVSLGERATINCKASQSVSNDVAWYQQKPGQSPKLLIYYASNRYTGVPDRFTGSGYGTDFTLTISSLQAEDVAVYFCQQDYSSPYTFGGGTKVEIK

SEQ ID NO: 11457 - protein, 112 aa, synthetic construct
  source 1..112: note = Description of Artificial Sequence: Synthetic polypeptide; note = VH of XENP020167
QVQLVQSGSELKKPGASVKVSCKASGYTFTDYWMHWLRQAPGQGLEWMGAIDTSDSYPTYNQGFTGRFVFSVDDSVSTAYLQISSLKAEDTAVYYCTRFDYWGQGTLVTVSS

SEQ ID NO: 11458 - protein, 107 aa, synthetic construct; identical to SEQ ID NO: 11449
  source 1..107: note = Description of Artificial Sequence: Synthetic polypeptide; note = VL of XENP020167

SEQ ID NO: 11459 - protein, 5 aa, synthetic construct
  source 1..5: note = Description of Artificial Sequence: Synthetic peptide; note = XENP020167 vhCDR1
DYWMH

SEQ ID NO: 11460 - protein, 17 aa, synthetic construct
  source 1..17: note = Description of Artificial Sequence: Synthetic peptide; note = XENP020167 vhCDR2
AIDTSDSYPTYNQGFTG

SEQ ID NO: 11461 - skipped

SEQ ID NO: 11462 - protein, 11 aa, synthetic construct
  source 1..11: note = Description of Artificial Sequence: Synthetic peptide; note = XENP020167 vlCDR1
KASQSVSNDVA

SEQ ID NO: 11463 - protein, 7 aa, synthetic construct
  source 1..7: note = Description of Artificial Sequence: Synthetic peptide; note = XENP020167 vlCDR2
YASNRYT

SEQ ID NO: 11464 - protein, 9 aa, synthetic construct
  source 1..9: note = Description of Artificial Sequence: Synthetic peptide; note = XENP020167 vlCDR3
QQDYSSPYT

SEQ ID NO: 11465 - protein, 443 aa, synthetic construct
  source 1..443: note = Description of Artificial Sequence: Synthetic polypeptide; note = XENP013810 Nivolumab_H0L0_IgG1 Heavy Chain
QVQLVESGGGVVQPGRSLRLDCKASGITFSNSGMHWVRQAPGKGLEWVAVIWYDGSKRYYADSVKGRFTISRDNSKNTLFLQMNSLRAEDTAVYYCATNDDYWGQGTLVTVSSASTKGPSVFPLAPSSKSTSGGTAALGCLVKDYFPEPVTVSWNSGALTSGVHTFPAVLQSSGLYSLSSVVTVPSSSLGTQTYICNVNHKPSNTKVDKKVEPKSCDKTHTCPPCPAPELLGGPSVFLFPPKPKDTLMISRTPEVTCVVVDVSHEDPEVKFNWYVDGVEVHNAKTKPREEQYNSTYRVVSVLTVLHQDWLNGKEYKCKVSNKALPAPIEKTISKAKGQPREPQVYTLPPSREEMTKNQVSLTCLVKGFYPSDIAVEWESNGQPENNYKTTPPVLDSDGSFFLYSKLTVDKSRWQQGNVFSCSVMHEALHNHYTQKSLSLSPGK

SEQ ID NO: 11466 - protein, 113 aa, synthetic construct [sequence omitted]

SEQ ID NO: 11467 - protein, 5 aa, synthetic construct
  source 1..5: note = Description of Artificial Sequence: Synthetic peptide; note = XENP013810 vhCDR1
NSGMH

SEQ ID NO: 11468 - protein, 17 aa, synthetic construct
  source 1..17: note = Description of Artificial Sequence: Synthetic peptide; note = XENP013810 vhCDR2
VIWYDGSKRYYADSVKG

SEQ ID NO: 11469 - protein, 4 aa, synthetic construct
  source 1..4: note = Description of Artificial Sequence: Synthetic peptide; note = XENP013810 vhCDR3
NDDY

SEQ ID NO: 11470 - protein, 214 aa, synthetic construct
  source 1..214: note = Description of Artificial Sequence: Synthetic polypeptide; note = XENP013810 Nivolumab_H0L0_IgG1 Light Chain
EIVLTQSPATLSLSPGERATLSCRASQSVSSYLAWYQQKPGQAPRLLIYDASNRATGIPARFSGSGSGTDFTLTISSLEPEDFAVYYCQQSSNWPRTFGQGTKVEIKRTVAAPSVFIFPPSDEQLKSGTASVVCLLNNFYPREAKVQWKVDNALQSGNSQESVTEQDSKDSTYSLSSTLTLSKADYEKHKVYACEVTHQGLSSPVTKSFNRGEC

SEQ ID NO: 11471 - protein, 107 aa, synthetic construct [sequence omitted]

SEQ ID NO: 11472 - protein, 11 aa, synthetic construct
  source 1..11: note = Description of Artificial Sequence: Synthetic peptide; note = XENP013810 vlCDR1
RASQSVSSYLA

SEQ ID NO: 11473 - protein, 7 aa, synthetic construct
  source 1..7: note = Description of Artificial Sequence: Synthetic peptide; note = XENP013810 vlCDR2
DASNRAT

SEQ ID NO: 11474 - protein, 9 aa, synthetic construct
  source 1..9: note = Description of Artificial Sequence: Synthetic peptide; note = XENP013810 vlCDR3
QQSSNWPRT

SEQ ID NO: 11475 - protein, 443 aa, synthetic construct
  source 1..443: note = Description of Artificial Sequence: Synthetic polypeptide; note = XENP013960 Nivolumab_H0L0_IgG1_G236R/L328R Heavy Chain
QVQLVESGGGVVQPGRSLRLDCKASGITFSNSGMHWVRQAPGKGLEWVAVIWYDGSKRYYADSVKGRFTISRDNSKNTLFLQMNSLRAEDTAVYYCATNDDYWGQGTLVTVSSASTKGPSVFPLAPSSKSTSGGTAALGCLVKDYFPEPVTVSWNSGALTSGVHTFPAVLQSSGLYSLSSVVTVPSSSLGTQTYICNVNHKPSNTKVDKKVEPKSCDKTHTCPPCPAPELLRGPSVFLFPPKPKDTLMISRTPEVTCVVVDVSHEDPEVKFNWYVDGVEVHNAKTKPREEQYNSTYRVVSVLTVLHQDWLNGKEYKCKVSNKARPAPIEKTISKAKGQPREPQVYTLPPSREEMTKNQVSLTCLVKGFYPSDIAVEWESNGQPENNYKTTPPVLDSDGSFFLYSKLTVDKSRWQQGNVFSCSVMHEALHNHYTQKSLSLSPGK

SEQ ID NO: 11476 - protein, 113 aa, synthetic construct [sequence omitted]

SEQ ID NO: 11477 - protein, 5 aa, synthetic construct
  source 1..5: note = Description of Artificial Sequence: Synthetic peptide; note = XENP013960 vhCDR1
NSGMH

SEQ ID NO: 11478 - protein, 17 aa, synthetic construct
  source 1..17: note = Description of Artificial Sequence: Synthetic peptide; note = XENP013960 vhCDR2
VIWYDGSKRYYADSVKG

SEQ ID NO: 11479 - protein, 4 aa, synthetic construct
  source 1..4: note = Description of Artificial Sequence: Synthetic peptide; note = XENP013960 vhCDR3
NDDY

SEQ ID NO: 11480 - protein, 214 aa, synthetic construct; identical to SEQ ID NO: 11470
  source 1..214: note = Description of Artificial Sequence: Synthetic polypeptide; note = XENP013960 Nivolumab_H0L0_IgG1_G236R/L328R Light Chain

SEQ ID NO: 11481 - protein, 107 aa, synthetic construct [sequence omitted]

SEQ ID NO: 11482 - protein, 11 aa, synthetic construct
  source 1..11: note = Description of Artificial Sequence: Synthetic peptide; note = XENP013960 vlCDR1
RASQSVSSYLA

SEQ ID NO: 11483 - protein, 7 aa, synthetic construct
  source 1..7: note = Description of Artificial Sequence: Synthetic peptide; note = XENP013960 vlCDR2
DASNRAT

SEQ ID NO: 11484 - protein, 9 aa, synthetic construct
  source 1..9: note = Description of Artificial Sequence: Synthetic peptide; note = XENP013960 vlCDR3
QQSSNWPRT

SEQ ID NO: 11485 - protein, 442 aa, synthetic construct
  source 1..442: note = Description of Artificial Sequence: Synthetic polypeptide; note = XENP016432 Nivolumab_H0L0_IgG1_PVA_/S267K Heavy Chain
QVQLVESGGGVVQPGRSLRLDCKASGITFSNSGMHWVRQAPGKGLEWVAVIWYDGSKRYYADSVKGRFTISRDNSKNTLFLQMNSLRAEDTAVYYCATNDDYWGQGTLVTVSSASTKGPSVFPLAPSSKSTSGGTAALGCLVKDYFPEPVTVSWNSGALTSGVHTFPAVLQSSGLYSLSSVVTVPSSSLGTQTYICNVNHKPSNTKVDKKVEPKSCDKTHTCPPCPAPPVAGPSVFLFPPKPKDTLMISRTPEVTCVVVDVKHEDPEVKFNWYVDGVEVHNAKTKPREEQYNSTYRVVSVLTVLHQDWLNGKEYKCKVSNKALPAPIEKTISKAKGQPREPQVYTLPPSREEMTKNQVSLTCLVKGFYPSDIAVEWESNGQPENNYKTTPPVLDSDGSFFLYSKLTVDKSRWQQGNVFSCSVMHEALHNHYTQKSLSLSPGK

SEQ ID NO: 11486 - protein, 113 aa, synthetic construct [sequence omitted]

SEQ ID NO: 11487 - protein, 5 aa, synthetic construct
  source 1..5: note = Description of Artificial Sequence: Synthetic peptide; note = XENP016432 vhCDR1
NSGMH

SEQ ID NO: 11488 - protein, 17 aa, synthetic construct
  source 1..17: note = Description of Artificial Sequence: Synthetic peptide; note = XENP016432 vhCDR2
VIWYDGSKRYYADSVKG

SEQ ID NO: 11489 - protein, 4 aa, synthetic construct
  source 1..4: note = Description of Artificial Sequence: Synthetic peptide; note = XENP016432 vhCDR3
NDDY

SEQ ID NO: 11490 - protein, 214 aa, synthetic construct; identical to SEQ ID NO: 11470
  source 1..214: note = Description of Artificial Sequence: Synthetic polypeptide; note = XENP016432 Nivolumab_H0L0_IgG1_PVA_/S267K Light Chain

SEQ ID NO: 11491 - protein, 107 aa, synthetic construct [sequence omitted]

SEQ ID NO: 11492 - protein, 11 aa, synthetic construct
  source 1..11: note = Description of Artificial Sequence: Synthetic peptide; note = XENP016432 vlCDR1
RASQSVSSYLA

SEQ ID NO: 11493 - protein, 7 aa, synthetic construct
  source 1..7: note = Description of Artificial Sequence: Synthetic peptide; note = XENP016432 vlCDR2
DASNRAT

SEQ ID NO: 11494 - protein, 9 aa, synthetic construct
  source 1..9: note = Description of Artificial Sequence: Synthetic peptide; note = XENP016432 vlCDR3
QQSSNWPRT

SEQ ID NO: 11495 - protein, 440 aa, synthetic construct
  source 1..440: note = Description of Artificial Sequence: Synthetic polypeptide; note = XENP016602 Nivolumab_H0_IgG4_S228P Heavy Chain
QVQLVESGGGVVQPGRSLRLDCKASGITFSNSGMHWVRQAPGKGLEWVAVIWYDGSKRYYADSVKGRFTISRDNSKNTLFLQMNSLRAEDTAVYYCATNDDYWGQGTLVTVSSASTKGPSVFPLAPSSKSTSGGTAALGCLVKDYFPEPVTVSWNSGALTSGVHTFPAVLQSSGLYSLSSVVTVPSSSLGTKTYTCNVDHKPSNTKVDKRVESKYGPPCPPCPAPEFLGGPSVFLFPPKPKDTLMISRTPEVTCVVVDVSQEDPEVQFNWYVDGVEVHNAKTKPREEQFNSTYRVVSVLTVLHQDWLNGKEYKCKVSNKGLPSSIEKTISKAKGQPREPQVYTLPPSQEEMTKNQVSLTCLVKGFYPSDIAVEWESNGQPENNYKTTPPVLDSDGSFFLYSRLTVDKSRWQEGNVFSCSVMHEALHNHYTQKSLSLSLGK

SEQ ID NO: 11496 - protein, 113 aa, synthetic construct [sequence omitted]

SEQ ID NO: 11497 - protein, 5 aa, synthetic construct
  source 1..5: note = Description of Artificial Sequence: Synthetic peptide; note = XENP016602 vhCDR1
NSGMH

SEQ ID NO: 11498 - protein, 17 aa, synthetic construct
  source 1..17: note = Description of Artificial Sequence: Synthetic peptide; note = XENP016602 vhCDR2
VIWYDGSKRYYADSVKG

SEQ ID NO: 11499 - protein, 4 aa, synthetic construct
  source 1..4: note = Description of Artificial Sequence: Synthetic peptide; note = XENP016602 vhCDR3
NDDY

SEQ ID NO: 11500 - protein, 214 aa, synthetic construct; identical to SEQ ID NO: 11470
  source 1..214: note = Description of Artificial Sequence: Synthetic polypeptide; note = XENP016602 Nivolumab_H0_IgG4_S228P Light Chain

SEQ ID NO: 11501 - protein, 107 aa, synthetic construct [sequence omitted]

SEQ ID NO: 11502 - protein, 11 aa, synthetic construct
  source 1..11: note = Description of Artificial Sequence: Synthetic peptide; note = XENP016602 vlCDR1
RASQSVSSYLA

SEQ ID NO: 11503 - protein, 7 aa, synthetic construct
  source 1..7: note = Description of Artificial Sequence: Synthetic peptide; note = XENP016602 vlCDR2
DASNRAT

SEQ ID NO: 11504 - protein, 9 aa, synthetic construct
  source 1..9: note = Description of Artificial Sequence: Synthetic peptide; note = XENP016602 vlCDR3
QQSSNWPRT

SEQ ID NO: 11505 - protein, 447 aa, synthetic construct
  source 1..447: note = Description of Artificial Sequence: Synthetic polypeptide; note = XENP016603 Pembrolizumab_H0_IgG4_S228P Heavy Chain
QVQLVQSGVEVKKPGASVKVSCKASGYTFTNYYMYWVRQAPGQGLEWMGGINPSNGGTNFNEKFKNRVTLTTDSSTTTAYMELKSLQFDDTAVYYCARRDYRFDMGFDYWGQGTTVTVSSASTKGPSVFPLAPSSKSTSGGTAALGCLVKDYFPEPVTVSWNSGALTSGVHTFPAVLQSSGLYSLSSVVTVPSSSLGTKTYTCNVDHKPSNTKVDKRVESKYGPPCPPCPAPEFLGGPSVFLFPPKPKDTLMISRTPEVTCVVVDVSQEDPEVQFNWYVDGVEVHNAKTKPREEQFNSTYRVVSVLTVLHQDWLNGKEYKCKVSNKGLPSSIEKTISKAKGQPREPQVYTLPPSQEEMTKNQVSLTCLVKGFYPSDIAVEWESNGQPENNYKTTPPVLDSDGSFFLYSRLTVDKSRWQEGNVFSCSVMHEALHNHYTQKSLSLSLGK

SEQ ID NO: 11506 - protein, 120 aa, synthetic construct [sequence omitted]

SEQ ID NO: 11507 - protein, 5 aa, synthetic construct
  source 1..5: note = Description of Artificial Sequence: Synthetic peptide; note = XENP016603 vhCDR1
NYYMY

SEQ ID NO: 11508 - protein, 17 aa, synthetic construct
  source 1..17: note = Description of Artificial Sequence: Synthetic peptide; note = XENP016603 vhCDR2
GINPSNGGTNFNEKFKN

SEQ ID NO: 11509 - protein, 11 aa, synthetic construct
  source 1..11: note = Description of Artificial Sequence: Synthetic peptide; note = XENP016603 vhCDR3
RDYRFDMGFDY

SEQ ID NO: 11510 - protein, 218 aa, synthetic construct
  source 1..218: note = Description of Artificial Sequence: Synthetic polypeptide; note = XENP016603 Pembrolizumab_H0_IgG4_S228P Light Chain
EIVLTQSPATLSLSPGERATLSCRASKGVSTSGYSYLHWYQQKPGQAPRLLIYLASYLESGVPARFSGSGSGTDFTLTISSLEPEDFAVYYCQHSRDLPLTFGGGTKVEIKRTVAAPSVFIFPPSDEQLKSGTASVVCLLNNFYPREAKVQWKVDNALQSGNSQESVTEQDSKDSTYSLSSTLTLSKADYEKHKVYACEVTHQGLSSPVTKSFNRGEC

SEQ ID NO: 11511 - protein, 111 aa, synthetic construct [sequence omitted]

SEQ ID NO: 11512 - protein, 15 aa, synthetic construct
  source 1..15: note = Description of Artificial Sequence: Synthetic peptide; note = XENP016603 vlCDR1
RASKGVSTSGYSYLH

SEQ ID NO: 11513 - protein, 7 aa, synthetic construct
  source 1..7: note = Description of Artificial Sequence: Synthetic peptide; note = XENP016603 vlCDR2
LASYLES

SEQ ID NO: 11514 - protein, 9 aa, synthetic construct
  source 1..9: note = Description of Artificial Sequence: Synthetic peptide; note = XENP016603 vlCDR3
QHSRDLPLT

SEQ ID NO: 11515 - protein, 443 aa, synthetic construct
  source 1..443: note = Description of Artificial Sequence: Synthetic polypeptide; note = XENP017903 1A2_H1L1_IgG1_PVA_/S267K Heavy Chain
QIQLVQSGAEVKKPGASVKVSCKASGYTFTDYSMHWVRQAPGQGLEWMGWINTETGEPTYADKFQGRVTMTLDTSTSTAYMELSSLRSEDTAVYFCASSPLDYWGQGTLVTVSSASTKGPSVFPLAPSSKSTSGGTAALGCLVKDYFPEPVTVSWNSGALTSGVHTFPAVLQSSGLYSLSSVVTVPSSSLGTQTYICNVNHKPSNTKVDKKVEPKSCDKTHTCPPCPAPPVAGPSVFLFPPKPKDTLMISRTPEVTCVVVDVKHEDPEVKFNWYVDGVEVHNAKTKPREEQYNSTYRVVSVLTVLHQDWLNGKEYKCKVSNKALPAPIEKTISKAKGQPREPQVYTLPPSREEMTKNQVSLTCLVKGFYPSDIAVEWESNGQPENNYKTTPPVLDSDGSFFLYSKLTVDKSRWQQGNVFSCSVMHEALHNHYTQKSLSLSPGK

SEQ ID NO: 11516 - protein, 114 aa, synthetic construct; identical to SEQ ID NO: 6219
  source 1..114: note = Description of Artificial Sequence: Synthetic polypeptide; note = VH of XENP017903

SEQ ID NO: 11517 - protein, 5 aa, synthetic construct
  source 1..5: note = Description of Artificial Sequence: Synthetic peptide; note = XENP017903 vhCDR1
DYSMH

SEQ ID NO: 11518 - protein, 17 aa, synthetic construct
  source 1..17: note = Description of Artificial Sequence: Synthetic peptide; note = XENP017903 vhCDR2
WINTETGEPTYADKFQG

SEQ ID NO: 11519 - protein, 5 aa, synthetic construct
  source 1..5: note = Description of Artificial Sequence: Synthetic peptide; note = XENP017903 vhCDR3
SPLDY

SEQ ID NO: 11520 - protein, 219 aa, synthetic construct
  source 1..219: note = Description of Artificial Sequence: Synthetic polypeptide; note = XENP017903 1A2_H1L1_IgG1_PVA_/S267K Light Chain
DLLLTQSPLSLPVTPGEPASISCRSSQSIVHSNGNTYLEWFLQKPGQSPQLLIYKVFNRFSGVPDRFSGSGSGTDFTLKISRVEAEDVGVYYCFQGSHVPFTFGSGTKLEIKRTVAAPSVFIFPPSDEQLKSGTASVVCLLNNFYPREAKVQWKVDNALQSGNSQESVTEQDSKDSTYSLSSTLTLSKADYEKHKVYACEVTHQGLSSPVTKSFNRGEC

SEQ ID NO: 11521 - protein, 112 aa, synthetic construct; identical to SEQ ID NO: 6220
  source 1..112: note = Description of Artificial Sequence: Synthetic polypeptide; note = VL of XENP017903

SEQ ID NO: 11522 - protein, 16 aa, synthetic construct
  source 1..16: note = Description of Artificial Sequence: Synthetic peptide; note = XENP017903 vlCDR1
RSSQSIVHSNGNTYLE

SEQ ID NO: 11523 - protein, 7 aa, synthetic construct
  source 1..7: note = Description of Artificial Sequence: Synthetic peptide; note = XENP017903 vlCDR2
KVFNRFS

SEQ ID NO: 11524 - protein, 9 aa, synthetic construct
  source 1..9: note = Description of Artificial Sequence: Synthetic peptide; note = XENP017903 vlCDR3
FQGSHVPFT

SEQ ID NO: 11525 - protein, 449 aa, synthetic construct
  source 1..449: note = Description of Artificial Sequence: Synthetic polypeptide; note = XENP017904 1C7_H1L1_IgG1_PVA_/S267K Heavy Chain
EVQLLESGGGLVQPGGSLRLSCAASGFAFSSYDMSWVRQAPGKRLEWVSYISSGGGSTYYPDSVKGRFTISRDNSKNTLYLQMNSLRAEDTAVYYCARPLDDYYAPFAYWGQGTLVTVSSASTKGPSVFPLAPSSKSTSGGTAALGCLVKDYFPEPVTVSWNSGALTSGVHTFPAVLQSSGLYSLSSVVTVPSSSLGTQTYICNVNHKPSNTKVDKKVEPKSCDKTHTCPPCPAPPVAGPSVFLFPPKPKDTLMISRTPEVTCVVVDVKHEDPEVKFNWYVDGVEVHNAKTKPREEQYNSTYRVVSVLTVLHQDWLNGKEYKCKVSNKALPAPIEKTISKAKGQPREPQVYTLPPSREEMTKNQVSLTCLVKGFYPSDIAVEWESNGQPENNYKTTPPVLDSDGSFFLYSKLTVDKSRWQQGNVFSCSVMHEALHNHYTQKSLSLSPGK

SEQ ID NO: 11526 - protein, 120 aa, synthetic construct; identical to SEQ ID NO: 6228
  source 1..120: note = Description of Artificial Sequence: Synthetic polypeptide; note = VH of XENP017904

SEQ ID NO: 11527 - protein, 5 aa, synthetic construct
  source 1..5: note = Description of Artificial Sequence: Synthetic peptide; note = XENP017904 vhCDR1
SYDMS

SEQ ID NO: 11528 - protein, 17 aa, synthetic construct
  source 1..17: note = Description of Artificial Sequence: Synthetic peptide; note = XENP017904 vhCDR2
YISSGGGSTYYPDSVKG

SEQ ID NO: 11529 - protein, 11 aa, synthetic construct
  source 1..11: note = Description of Artificial Sequence: Synthetic peptide; note = XENP017904 vhCDR3
PLDDYYAPFAY

SEQ ID NO: 11530 - protein, 218 aa, synthetic construct
  source 1..218: note = Description of Artificial Sequence: Synthetic polypeptide; note = XENP017904 1C7_H1L1_IgG1_PVA_/S267K Light Chain
DIVLTQSPSSLSASVGDRVTITCRASESVDNDGISFMNWFQQKPGKPPKLLIYAASNQGSGVPARFSGSGSGTDFTLTISSLQPEDFATYFCQQSKEVPWTFGGGTKVEIKRTVAAPSVFIFPPSDEQLKSGTASVVCLLNNFYPREAKVQWKVDNALQSGNSQESVTEQDSKDSTYSLSSTLTLSKADYEKHKVYACEVTHQGLSSPVTKSFNRGEC

SEQ ID NO: 11531 - protein, 111 aa, synthetic construct; identical to SEQ ID NO: 6229
  source 1..111: note = Description of Artificial Sequence: Synthetic polypeptide; note = VL of XENP017904

SEQ ID NO: 11532 - protein, 15 aa, synthetic construct
  source 1..15: note = Description of Artificial Sequence: Synthetic peptide; note = XENP017904 vlCDR1
RASESVDNDGISFMN

SEQ ID NO: 11533 - protein, 7 aa, synthetic construct
  source 1..7: note = Description of Artificial Sequence: Synthetic peptide; note = XENP017904 vlCDR2
AASNQGS

SEQ ID NO: 11534 - protein, 9 aa, synthetic construct
  source 1..9: note = Description of Artificial Sequence: Synthetic peptide; note = XENP017904 vlCDR3
QQSKEVPWT

SEQ ID NO: 11535 - protein, 443 aa, synthetic construct
  source 1..443: note = Description of Artificial Sequence: Synthetic polypeptide; note = XENP017905 1G2_H1L1_IgG1_PVA_/S267K Heavy Chain
QVQLVQSGAEVKKPGASVKVSCKVSGFSLTDYGVNWVRQAPGQGLEWMGMIWGDGSTDYNSKFQGRVTMTKDISTSTVYMELSSLRSEDTAVYYCAREYAMDYWGQGTLVTVSSASTKGPSVFPLAPSSKSTSGGTAALGCLVKDYFPEPVTVSWNSGALTSGVHTFPAVLQSSGLYSLSSVVTVPSSSLGTQTYICNVNHKPSNTKVDKKVEPKSCDKTHTCPPCPAPPVAGPSVFLFPPKPKDTLMISRTPEVTCVVVDVKHEDPEVKFNWYVDGVEVHNAKTKPREEQYNSTYRVVSVLTVLHQDWLNGKEYKCKVSNKALPAPIEKTISKAKGQPREPQVYTLPPSREEMTKNQVSLTCLVKGFYPSDIAVEWESNGQPENNYKTTPPVLDSDGSFFLYSKLTVDKSRWQQGNVFSCSVMHEALHNHYTQKSLSLSPGK

SEQ ID NO: 11536 - protein, 114 aa, synthetic construct; identical to SEQ ID NO: 6237
  source 1..114: note = Description of Artificial Sequence: Synthetic polypeptide; note = VH of XENP017905

SEQ ID NO: 11537 - protein, 5 aa, synthetic construct
  source 1..5: note = Description of Artificial Sequence: Synthetic peptide; note = XENP017905 vhCDR1
DYGVN

SEQ ID NO: 11538 - protein, 16 aa, synthetic construct
  source 1..16: note = Description of Artificial Sequence: Synthetic peptide; note = XENP017905 vhCDR2
MIWGDGSTDYNSKFQG

SEQ ID NO: 11539 - protein, 6 aa, synthetic construct
  source 1..6: note = Description of Artificial Sequence: Synthetic peptide; note = XENP017905 vhCDR3
EYAMDY

SEQ ID NO: 11540 - protein, 219 aa, synthetic construct
  source 1..219: note = Description of Artificial Sequence: Synthetic polypeptide; note = XENP017905 1G2_H1L1_IgG1_PVA_/S267K Light Chain
DIVMTQSPDSLAVSLGERATINCKSSQSLLNSRTRKNYLAWYQQKPGQSPKLLIFWASTRESGVPDRFTGSGSGTDFTLTISSLQAEDVAVYYCKQSYNLRTFGGGTKVEIKRTVAAPSVFIFPPSDEQLKSGTASVVCLLNNFYPREAKVQWKVDNALQSGNSQESVTEQDSKDSTYSLSSTLTLSKADYEKHKVYACEVTHQGLSSPVTKSFNRGEC

SEQ ID NO: 11541 - protein, 112 aa, synthetic construct; identical to SEQ ID NO: 6238
  source 1..112: note = Description of Artificial Sequence: Synthetic polypeptide; note = VL of XENP017905

SEQ ID NO: 11542 - protein, 17 aa, synthetic construct
  source 1..17: note = Description of Artificial Sequence: Synthetic peptide; note = XENP017905 vlCDR1
KSSQSLLNSRTRKNYLA

SEQ ID NO: 11543 - protein, 7 aa, synthetic construct
  source 1..7: note = Description of Artificial Sequence: Synthetic peptide; note = XENP017905 vlCDR2
WASTRES

SEQ ID NO: 11544 - protein, 8 aa, synthetic construct
  source 1..8: note = Description of Artificial Sequence: Synthetic peptide; note = XENP017905 vlCDR3
KQSYNLRT

SEQ ID NO: 11545 - protein, 451 aa, synthetic construct
  source 1..451: note = Description of Artificial Sequence: Synthetic polypeptide; note = XENP017906 1G6_H1L1_IgG1_PVA_/S267K Heavy Chain
EVQLVESGGGLVKPGGSLRLSCAASGFTFSNYWMNWVRQAPGKGLEWVGEIRLKSNNYATHYAEPVKGRFTISRDDSKSTVYLQMNSLKTEDTAVYYCTRYYGNYGGYFDVWGAGTLVTVSSASTKGPSVFPLAPSSKSTSGGTAALGCLVKDYFPEPVTVSWNSGALTSGVHTFPAVLQSSGLYSLSSVVTVPSSSLGTQTYICNVNHKPSNTKVDKKVEPKSCDKTHTCPPCPAPPVAGPSVFLFPPKPKDTLMISRTPEVTCVVVDVKHEDPEVKFNWYVDGVEVHNAKTKPREEQYNSTYRVVSVLTVLHQDWLNGKEYKCKVSNKALPAPIEKTISKAKGQPREPQVYTLPPSREEMTKNQVSLTCLVKGFYPSDIAVEWESNGQPENNYKTTPPVLDSDGSFFLYSKLTVDKSRWQQGNVFSCSVMHEALHNHYTQKSLSLSPGK

SEQ ID NO: 11546 - protein, 122 aa, synthetic construct; identical to SEQ ID NO: 6246
  source 1..122: note = Description of Artificial Sequence: Synthetic polypeptide; note = VH of XENP017906

SEQ ID NO: 11547 - protein, 5 aa, synthetic construct
  source 1..5: note = Description of Artificial Sequence: Synthetic peptide; note = XENP017906 vhCDR1
NYWMN

SEQ ID NO: 11548 - protein, 19 aa, synthetic construct
  source 1..19: note = Description of Artificial Sequence: Synthetic peptide; note = XENP017906 vhCDR2
EIRLKSNNYATHYAEPVKG

SEQ ID NO: 11549 - protein, 11 aa, synthetic construct
  source 1..11: note = Description of Artificial Sequence: Synthetic peptide; note = XENP017906 vhCDR3
YYGNYGGYFDV

SEQ ID NO: 11550 - protein, 214 aa, synthetic construct
  source 1..214: note = Description of Artificial Sequence: Synthetic polypeptide; note = XENP017906 1G6_H1L1_IgG1_PVA_/S267K Light Chain
SIVMTQSPATLSVSPGERATLSCRASQSVSNDVAWYQQKPGQSPRLLINYASHRYTGVPDRFTGSGYGTEFTLTISSLQSEDFAVYFCQQDYSSPRTFGGGTKVEIKRTVAAPSVFIFPPSDEQLKSGTASVVCLLNNFYPREAKVQWKVDNALQSGNSQESVTEQDSKDSTYSLSSTLTLSKADYEKHKVYACEVTHQGLSSPVTKSFNRGEC

SEQ ID NO: 11551 - protein, 107 aa, synthetic construct; identical to SEQ ID NO: 6247
  source 1..107: note = Description of Artificial Sequence: Synthetic polypeptide; note = VL of XENP017906

SEQ ID NO: 11552 - protein, 11 aa, synthetic construct
  source 1..11: note = Description of Artificial Sequence: Synthetic peptide; note = XENP017906 vlCDR1
RASQSVSNDVA

SEQ ID NO: 11553 - protein, 7 aa, synthetic construct
  source 1..7: note = Description of Artificial Sequence: Synthetic peptide; note = XENP017906 vlCDR2
YASHRYT

SEQ ID NO: 11554 - protein, 9 aa, synthetic construct
  source 1..9: note = Description of Artificial Sequence: Synthetic peptide; note = XENP017906 vlCDR3
QQDYSSPRT

SEQ ID NO: 11555 - protein, 451 aa, synthetic construct; identical to SEQ ID NO: 11545
  source 1..451: note = Description of Artificial Sequence: Synthetic polypeptide; note = XENP017907 1G6_H1L2_IgG1_PVA_/S267K Heavy Chain

SEQ ID NO: 11556 - protein, 122 aa, synthetic construct; identical to SEQ ID NO: 6246
  source 1..122: note = Description of Artificial Sequence: Synthetic polypeptide; note = VH of XENP017907

SEQ ID NO: 11557 - protein, 5 aa, synthetic construct
  source 1..5: note = Description of Artificial Sequence: Synthetic peptide; note = XENP017907 vhCDR1
NYWMN

SEQ ID NO: 11558 - protein, 19 aa, synthetic construct
  source 1..19: note = Description of Artificial Sequence: Synthetic peptide; note = XENP017907 vhCDR2
EIRLKSNNYATHYAEPVKG

SEQ ID NO: 11559 - protein, 11 aa, synthetic construct
  source 1..11: note = Description of Artificial Sequence: Synthetic peptide; note = XENP017907 vhCDR3
YYGNYGGYFDV

SEQ ID NO: 11560 - protein, 214 aa, synthetic construct
  source 1..214: note = Description of Artificial Sequence: Synthetic polypeptide; note = XENP017907 1G6_H1L2_IgG1_PVA_/S267K Light Chain
SIVMTQSPSSLSASVGDRVTITCRASQSVSNDVAWYQQKPGKSPKLLINYASHRYTGVPDRFTGSGYGTDFTLTISSLQPEDFATYFCQQDYSSPRTFGGGTKVEIKRTVAAPSVFIFPPSDEQLKSGTASVVCLLNNFYPREAKVQWKVDNALQSGNSQESVTEQDSKDSTYSLSSTLTLSKADYEKHKVYACEVTHQGLSSPVTKSFNRGEC

SEQ ID NO: 11561 - protein, 107 aa, synthetic construct; identical to SEQ ID NO: 6256
  source 1..107: note = Description of Artificial Sequence: Synthetic polypeptide; note = VL of XENP017907

SEQ ID NO: 11562 - protein, 11 aa, synthetic construct
  source 1..11: note = Description of Artificial Sequence: Synthetic peptide; note = XENP017907 vlCDR1
RASQSVSNDVA

SEQ ID NO: 11563 - protein, 7 aa, synthetic construct
  source 1..7: note = Description of Artificial Sequence: Synthetic peptide; note = XENP017907 vlCDR2
YASHRYT

SEQ ID NO: 11564 - protein, 9 aa, synthetic construct
  source 1..9: note = Description of Artificial Sequence: Synthetic peptide; note = XENP017907 vlCDR3
QQDYSSPRT

SEQ ID NO: 11565 - protein, 444 aa, synthetic construct
  source 1..444: note = Description of Artificial Sequence: Synthetic polypeptide; note = XENP017908 2A2_H1L1_IgG1_PVA_/S267K Heavy Chain
QVQLVQSGAEVKKPGASVKVSCKASGYTFTNYWMHWVRQAPGQGLEWMGYINPSTGYTEYNQKFQGRVTMTADKSTSTAYMELSSLRSEDTAVYYCATGNYFAYWGQGTLVTVSSASTKGPSVFPLAPSSKSTSGGTAALGCLVKDYFPEPVTVSWNSGALTSGVHTFPAVLQSSGLYSLSSVVTVPSSSLGTQTYICNVNHKPSNTKVDKKVEPKSCDKTHTCPPCPAPPVAGPSVFLFPPKPKDTLMISRTPEVTCVVVDVKHEDPEVKFNWYVDGVEVHNAKTKPREEQYNSTYRVVSVLTVLHQDWLNGKEYKCKVSNKALPAPIEKTISKAKGQPREPQVYTLPPSREEMTKNQVSLTCLVKGFYPSDIAVEWESNGQPENNYKTTPPVLDSDGSFFLYSKLTVDKSRWQQGNVFSCSVMHEALHNHYTQKSLSLSPGK

SEQ ID NO: 11566 - protein, 115 aa, synthetic construct; identical to SEQ ID NO: 6264
  source 1..115: note = Description of Artificial Sequence: Synthetic polypeptide; note = VH of XENP017908

SEQ ID NO: 11567 - protein, 5 aa, synthetic construct
  source 1..5: note = Description of Artificial Sequence: Synthetic peptide; note = XENP017908 vhCDR1
NYWMH

SEQ ID NO: 11568 - protein, 17 aa, synthetic construct
  source 1..17: note = Description of Artificial Sequence: Synthetic peptide; note = XENP017908 vhCDR2
YINPSTGYTEYNQKFQG

SEQ ID NO: 11569 - protein, 6 aa, synthetic construct
  source 1..6: note = Description of Artificial Sequence: Synthetic peptide; note = XENP017908 vhCDR3
GNYFAY

SEQ ID NO: 11570 - protein, 214 aa, synthetic construct
  source 1..214: note = Description of Artificial Sequence: Synthetic polypeptide; note = XENP017908 2A2_H1L1_IgG1_PVA_/S267K Light Chain
DIQMTQSPSSLSASVGDRVTITCRPSESLYSYLAWYQQKPGKSPKLLVYNAKTLVEGVPSRFSGSGSGTDFTLTISSLQPEDFATYYCQHHYGTPFTFGSGTKLEIKRTVAAPSVFIFPPSDEQLKSGTASVVCLLNNFYPREAKVQWKVDNALQSGNSQESVTEQDSKDSTYSLSSTLTLSKADYEKHKVYACEVTHQGLSSPVTKSFNRGEC

SEQ ID NO: 11571 - protein, 107 aa, synthetic construct; identical to SEQ ID NO: 6265
  source 1..107: note = Description of Artificial Sequence: Synthetic polypeptide; note = VL of XENP017908

SEQ ID NO: 11572 - protein, 11 aa, synthetic construct
  source 1..11: note = Description of Artificial Sequence: Synthetic peptide; note = XENP017908 vlCDR1
RPSESLYSYLA

SEQ ID NO: 11573 - protein, 7 aa, synthetic construct
  source 1..7: note = Description of Artificial Sequence: Synthetic peptide; note = XENP017908 vlCDR2
NAKTLVE

SEQ ID NO: 11574 - protein, 9 aa, synthetic construct
  source 1..9: note = Description of Artificial Sequence: Synthetic peptide; note = XENP017908 vlCDR3
QHHYGTPFT

SEQ ID NO: 11575 - protein, 449 aa, synthetic construct
  source 1..449: note = Description of Artificial Sequence: Synthetic polypeptide; note = XENP017909 2F11_H1L1_IgG1_PVA_/S267K Heavy Chain
QVQLVQSGAEVKKPGASVKVSCKGSGYTFTDYVMHWVRQAPGQSLEWMGVISTYYGDASYNQKFQGRVTMTVDKSTSTAYMELSSLRSEDTAVYYCAREGYDGYLYFDVWGAGTLVTVSSASTKGPSVFPLAPSSKSTSGGTAALGCLVKDYFPEPVTVSWNSGALTSGVHTFPAVLQSSGLYSLSSVVTVPSSSLGTQTYICNVNHKPSNTKVDKKVEPKSCDKTHTCPPCPAPPVAGPSVFLFPPKPKDTLMISRTPEVTCVVVDVKHEDPEVKFNWYVDGVEVHNAKTKPREEQYNSTYRVVSVLTVLHQDWLNGKEYKCKVSNKALPAPIEKTISKAKGQPREPQVYTLPPSREEMTKNQVSLTCLVKGFYPSDIAVEWESNGQPENNYKTTPPVLDSDGSFFLYSKLTVDKSRWQQGNVFSCSVMHEALHNHYTQKSLSLSPGK

SEQ ID NO: 11576 - protein, 120 aa, synthetic construct; identical to SEQ ID NO: 6273
  source 1..120: note = Description of Artificial Sequence: Synthetic polypeptide; note = VH of XENP017909

SEQ ID NO: 11577 - protein, 5 aa, synthetic construct
  source 1..5: note = Description of Artificial Sequence: Synthetic peptide; note = XENP017909 vhCDR1
DYVMH

SEQ ID NO: 11578 - protein, 17 aa, synthetic construct
  source 1..17: note = Description of Artificial Sequence: Synthetic peptide; note = XENP017909 vhCDR2
VISTYYGDASYNQKFQG

SEQ ID NO: 11579 - protein, 11 aa, synthetic construct
  source 1..11: note = Description of Artificial Sequence: Synthetic peptide; note = XENP017909 vhCDR3
EGYDGYLYFDV

SEQ ID NO: 11580 - protein, 219 aa, synthetic construct
  source 1..219: note = Description of Artificial Sequence: Synthetic polypeptide; note = XENP017909 2F11_H1L1_IgG1_PVA_/S267K Light Chain
DVLMTQTPLSSPVTLGQPASISCRSSQSIVHSNGNTYLEWYQQRPGQSPRLLIYKVSNRFSGVPDRFSGSGSGTDFTLKISRVEAEDVGVYYCFQGSHVPYTFGGGTKVEIKRTVAAPSVFIFPPSDEQLKSGTASVVCLLNNFYPREAKVQWKVDNALQSGNSQESVTEQDSKDSTYSLSSTLTLSKADYEKHKVYACEVTHQGLSSPVTKSFNRGEC

SEQ ID NO: 11581 - protein, 112 aa, synthetic construct; identical to SEQ ID NO: 6274
  source 1..112: note = Description of Artificial Sequence: Synthetic polypeptide; note = VL of XENP017909

SEQ ID NO: 11582 - protein, 16 aa, synthetic construct
  source 1..16: note = Description of Artificial Sequence: Synthetic peptide; note = XENP017909 vlCDR1
RSSQSIVHSNGNTYLE

SEQ ID NO: 11583 - protein, 7 aa, synthetic construct
  source 1..7: note = Description of Artificial Sequence: Synthetic peptide; note = XENP017909 vlCDR2
KVSNRFS

SEQ ID NO: 11584 - protein, 9 aa, synthetic construct
  source 1..9: note = Description of Artificial Sequence: Synthetic peptide; note = XENP017909 vlCDR3
FQGSHVPYT

SEQ ID NO: 11585 - protein, 449 aa, synthetic construct
  source 1..449: note = Description of Artificial Sequence: Synthetic polypeptide; note = XENP017910 5H1_H1L1_IgG1_PVA_/S267K Heavy Chain
QVQLVQSGAEVKKPGASVKVSCKGSGYTFTDYVMHWVRQAPGQSLEWMGVISIHYGDGRYNQKFQGRVTMTVDKSTSTAYMELSSLRSEDTAVYYCAREVYDGYLYFDVWGAGTLVTVSSASTKGPSVFPLAPSSKSTSGGTAALGCLVKDYFPEPVTVSWNSGALTSGVHTFPAVLQSSGLYSLSSVVTVPSSSLGTQTYICNVNHKPSNTKVDKKVEPKSCDKTHTCPPCPAPPVAGPSVFLFPPKPKDTLMISRTPEVTCVVVDVKHEDPEVKFNWYVDGVEVHNAKTKPREEQYNSTYRVVSVLTVLHQDWLNGKEYKCKVSNKALPAPIEKTISKAKGQPREPQVYTLPPSREEMTKNQVSLTCLVKGFYPSDIAVEWESNGQPENNYKTTPPVLDSDGSFFLYSKLTVDKSRWQQGNVFSCSVMHEALHNHYTQKSLSLSPGK

SEQ ID NO: 11586 - protein, 120 aa, synthetic construct; identical to SEQ ID NO: 6282
  source 1..120: note = Description of Artificial Sequence: Synthetic polypeptide; note = VH of XENP017910

SEQ ID NO: 11587 - protein, 5 aa, synthetic construct
  source 1..5: note = Description of Artificial Sequence: Synthetic peptide; note = XENP017910 vhCDR1
DYVMH

SEQ ID NO: 11588 - protein, 17 aa, synthetic construct
  source 1..17: note = Description of Artificial Sequence: Synthetic peptide; note = XENP017910 vhCDR2
VISIHYGDGRYNQKFQG

SEQ ID NO: 11589 - protein, 11 aa, synthetic construct
  source 1..11: note = Description of Artificial Sequence: Synthetic peptide; note = XENP017910 vhCDR3
EVYDGYLYFDV

SEQ ID NO: 11590 - protein, 219 aa, synthetic construct
  source 1..219: note = Description of Artificial Sequence: Synthetic polypeptide; note = XENP017910 5H1_H1L1_IgG1_PVA_/S267K Light Chain
DVLMTQSPLSLPVTPGEPASISCRSSQSIVHSNGNTYLEWYLQKPGQSPQLLIYKVSNRFSGVPDRFGGRGSGTDFTLKISRVEAEDVGVYYCFQGSHVPYTFGGGTKVEIKRTVAAPSVFIFPPSDEQLKSGTASVVCLLNNFYPREAKVQWKVDNALQSGNSQESVTEQDSKDSTYSLSSTLTLSKADYEKHKVYACEVTHQGLSSPVTKSFNRGEC

SEQ ID NO: 11591 - protein, 112 aa, synthetic construct; identical to SEQ ID NO: 6283
  source 1..112: note = Description of Artificial Sequence: Synthetic polypeptide; note = VL of XENP017910

SEQ ID NO: 11592 - protein, 16 aa, synthetic construct
  source 1..16: note = Description of Artificial Sequence: Synthetic peptide; note = XENP017910 vlCDR1
RSSQSIVHSNGNTYLE

SEQ ID NO: 11593 - protein, 7 aa, synthetic construct
  source 1..7: note = Description of Artificial Sequence: Synthetic peptide; note = XENP017910 vlCDR2
KVSNRFS

SEQ ID NO: 11594 - protein, 9 aa, synthetic construct
  source 1..9: note = Description of Artificial Sequence: Synthetic peptide; note = XENP017910 vlCDR3
FQGSHVPYT

SEQ ID NO: 11595 - protein, 449 aa, synthetic construct; identical to SEQ ID NO: 11585
  source 1..449: note = Description of Artificial Sequence: Synthetic polypeptide; note = XENP017911 5H1_H1L2_IgG1_PVA_/S267K Heavy Chain

SEQ ID NO: 11596 - protein, 120 aa, synthetic construct; identical to SEQ ID NO: 6282
  source 1..120: note = Description of Artificial Sequence: Synthetic polypeptide; note = VH of XENP017911

SEQ ID NO: 11597 - protein, 5 aa, synthetic construct
  source 1..5: note = Description of Artificial Sequence: Synthetic peptide; note = XENP017911 vhCDR1
DYVMH

SEQ ID NO: 11598 - protein, 17 aa, synthetic construct
  source 1..17: note = Description of Artificial Sequence: Synthetic peptide; note = XENP017911 vhCDR2
VISIHYGDGRYNQKFQG

SEQ ID NO: 11599 - protein, 11 aa, synthetic construct
  source 1..11: note = Description of Artificial Sequence: Synthetic peptide; note = XENP017911 vhCDR3
EVYDGYLYFDV

SEQ ID NO: 11600 - protein, 219 aa, synthetic construct
  source 1..219: note = Description of Artificial Sequence: Synthetic polypeptide; note = XENP017911 5H1_H1L2_IgG1_PVA_/S267K Light Chain
DVLMTQSPLSLPVTLGQPASISCRSSQSIVHSNGNTYLEWYQQRPGQSPRLLIYKVSNRFSGVPDRFGGRGSGTDFTLKISRVEAEDVGVYYCFQGSHVPYTFGGGTKVEIKRTVAAPSVFIFPPSDEQLKSGTASVVCLLNNFYPREAKVQWKVDNALQSGNSQESVTEQDSKDSTYSLSSTLTLSKADYEKHKVYACEVTHQGLSSPVTKSFNRGEC

SEQ ID NO: 11601 - protein, 112 aa, synthetic construct; identical to SEQ ID NO: 6292
  source 1..112: note = Description of Artificial Sequence: Synthetic polypeptide; note = VL of XENP017911

SEQ ID NO: 11602 - protein, 16 aa, synthetic construct
  source 1..16: note = Description of Artificial Sequence: Synthetic peptide; note = XENP017911 vlCDR1
RSSQSIVHSNGNTYLE

SEQ ID NO: 11603 - protein, 7 aa, synthetic construct
  source 1..7: note = Description of Artificial Sequence: Synthetic peptide; note = XENP017911 vlCDR2
KVSNRFS

SEQ ID NO: 11604 - protein, 9 aa, synthetic construct
  source 1..9: note = Description of Artificial Sequence: Synthetic peptide; note = XENP017911 vlCDR3
FQGSHVPYT

SEQ ID NO: 11605 - protein, 449 aa, synthetic construct
  source 1..449: note = Description of Artificial Sequence: Synthetic polypeptide; note = XENP017912 10E4_H1L1_IgG1_PVA_/S267K Heavy Chain
QVQLVQSGAEVKKPGASVKVSCKASGYSFTSYWMHWVRQAPGQGLEWMGAIYPGNSDTSYNQKFQGRVTMTADTSTSTAYMELSSLRSEDTAVYYCTRDGNYVRYYFDYWGQGTLVTVSSASTKGPSVFPLAPSSKSTSGGTAALGCLVKDYFPEPVTVSWNSGALTSGVHTFPAVLQSSGLYSLSSVVTVPSSSLGTQTYICNVNHKPSNTKVDKKVEPKSCDKTHTCPPCPAPPVAGPSVFLFPPKPKDTLMISRTPEVTCVVVDVKHEDPEVKFNWYVDGVEVHNAKTKPREEQYNSTYRVVSVLTVLHQDWLNGKEYKCKVSNKALPAPIEKTISKAKGQPREPQVYTLPPSREEMTKNQVSLTCLVKGFYPSDIAVEWESNGQPENNYKTTPPVLDSDGSFFLYSKLTVDKSRWQQGNVFSCSVMHEALHNHYTQKSLSLSPGK

SEQ ID NO: 11606 - protein, 120 aa, synthetic construct; identical to SEQ ID NO: 6300
  source 1..120: note = Description of Artificial Sequence: Synthetic polypeptide; note = VH of XENP017912

SEQ ID NO: 11607 - protein, 5 aa, synthetic construct
  source 1..5: note = Description of Artificial Sequence: Synthetic peptide; note = XENP017912 vhCDR1
SYWMH

SEQ ID NO: 11608 - protein, 17 aa, synthetic construct
  source 1..17: note = Description of Artificial Sequence: Synthetic peptide; note = XENP017912 vhCDR2
AIYPGNSDTSYNQKFQG

SEQ ID NO: 11609 - protein, 11 aa, synthetic construct
  source 1..11: note = Description of Artificial Sequence: Synthetic peptide; note = XENP017912 vhCDR3
DGNYVRYYFDY

SEQ ID NO: 11610 - protein, 214 aa, synthetic construct
  source 1..214: note = Description of Artificial Sequence: Synthetic polypeptide; note = XENP017912 10E4_H1L1_IgG1_PVA_/S267K Light Chain
DIQMTQSPSSLSASVGDRVTITCRASQDIGSNLNWLQQKPGKTIKRLIYATSNLDSGVPKRFSGRRSGSDYTLTISSLQPEDFATYYCLQYASSPLTFGTGTKLEIKRTVAAPSVFIFPPSDEQLKSGTASVVCLLNNFYPREAKVQWKVDNALQSGNSQESVTEQDSKDSTYSLSSTLTLSKADYEKHKVYACEVTHQGLSSPVTKSFNRGEC

SEQ ID NO: 11611 - protein, 107 aa, synthetic construct; identical to SEQ ID NO: 6301
  source 1..107: note = Description of Artificial Sequence: Synthetic polypeptide; note = VL of XENP017912

SEQ ID NO: 11612 - protein, 11 aa, synthetic construct
  source 1..11: note = Description of Artificial Sequence: Synthetic peptide; note = XENP017912 vlCDR1
RASQDIGSNLN

SEQ ID NO: 11613 - protein, 7 aa, synthetic construct
  source 1..7: note = Description of Artificial Sequence: Synthetic peptide; note = XENP017912 vlCDR2
ATSNLDS

SEQ ID NO: 11614 - protein, 9 aa, synthetic construct
  source 1..9: note = Description of Artificial Sequence: Synthetic peptide; note = XENP017912 vlCDR3
LQYASSPLT

SEQ ID NO: 11615 - protein, 449 aa, synthetic construct
  source 1..449: note = Description of Artificial Sequence: Synthetic polypeptide; note = XENP017913 4C11_H1L1_IgG1_PVA_/S267K Heavy Chain
QIQLVQSGAEVKKPGASVKVSCKASGYTFTSYWMHWVRQAPGQGLEWMGAIYPGNSDTSYNQKFQGRVTMTADTSTSTAYMELSSLRSEDTAVYYCTNLYYGSSFAMDYWGQGTLVTVSSASTKGPSVFPLAPSSKSTSGGTAALGCLVKDYFPEPVTVSWNSGALTSGVHTFPAVLQSSGLYSLSSVVTVPSSSLGTQTYICNVNHKPSNTKVDKKVEPKSCDKTHTCPPCPAPPVAGPSVFLFPPKPKDTLMISRTPEVTCVVVDVKHEDPEVKFNWYVDGVEVHNAKTKPREEQYNSTYRVVSVLTVLHQDWLNGKEYKCKVSNKALPAPIEKTISKAKGQPREPQVYTLPPSREEMTKNQVSLTCLVKGFYPSDIAVEWESNGQPENNYKTTPPVLDSDGSFFLYSKLTVDKSRWQQGNVFSCSVMHEALHNHYTQKSLSLSPGK

SEQ ID NO: 11616 - protein, 120 aa, synthetic construct; identical to SEQ ID NO: 6309
  source 1..120: note = Description of Artificial Sequence: Synthetic polypeptide; note = VH of XENP017913

SEQ ID NO: 11617 - protein, 5 aa, synthetic construct
  source 1..5: note = Description of Artificial Sequence: Synthetic peptide; note = XENP017913 vhCDR1
SYWMH

SEQ ID NO: 11618 - protein, 17 aa, synthetic construct
  source 1..17: note = Description of Artificial Sequence: Synthetic peptide; note = XENP017913 vhCDR2
AIYPGNSDTSYNQKFQG

SEQ ID NO: 11619 - protein, 11 aa, synthetic construct
  source 1..11: note = Description of Artificial Sequence: Synthetic peptide; note = XENP017913 vhCDR3
LYYGSSFAMDY

SEQ ID NO: 11620 - protein, 214 aa, synthetic construct
  source 1..214: note = Description of Artificial Sequence: Synthetic polypeptide; note = XENP017913 4C11_H1L1_IgG1_PVA_/S267K Light Chain
DIKMTQSPSSLSASVGDRVTITCRASQDINTYLSWFQQKPGKSPKTLIYRANRLVDGVPSRFSGSGSGQDYTLTISSLQPEDFATYYCLHYDDFPYTFGGGTKVEIKRTVAAPSVFIFPPSDEQLKSGTASVVCLLNNFYPREAKVQWKVDNALQSGNSQESVTEQDSKDSTYSLSSTLTLSKADYEKHKVYACEVTHQGLSSPVTKSFNRGEC

SEQ ID NO: 11621 - protein, 107 aa, synthetic construct; identical to SEQ ID NO: 6310
  source 1..107: note = Description of Artificial Sequence: Synthetic polypeptide; note = VL of XENP017913

SEQ ID NO: 11622 - protein, 11 aa, synthetic construct
  source 1..11: note = Description of Artificial Sequence: Synthetic peptide; note = XENP017913 vlCDR1
RASQDINTYLS

SEQ ID NO: 11623 - protein, 7 aa, synthetic construct
  source 1..7: note = Description of Artificial Sequence: Synthetic peptide; note = XENP017913 vlCDR2
RANRLVD

SEQ ID NO: 11624 - protein, 9 aa, synthetic construct
  source 1..9: note = Description of Artificial Sequence: Synthetic peptide; note = XENP017913 vlCDR3
LHYDDFPYT

SEQ ID NO: 11625 - protein, 446 aa, synthetic construct
  source 1..446: note = Description of Artificial Sequence: Synthetic polypeptide; note = XENP017914 6A3_H1L1_IgG1_PVA_/S267K Heavy Chain
EVQLLESGGGLVQPGGSLRLSCAASGFTFSSYGMSWVRQAPGKRLEWVSTISGGGRYTYYPDSVKGRFTISRDNSKNTLYLQMNSLRAEDTAVYYCASYYDSSFDYWGQGTLVTVSSASTKGPSVFPLAPSSKSTSGGTAALGCLVKDYFPEPVTVSWNSGALTSGVHTFPAVLQSSGLYSLSSVVTVPSSSLGTQTYICNVNHKPSNTKVDKKVEPKSCDKTHTCPPCPAPPVAGPSVFLFPPKPKDTLMISRTPEVTCVVVDVKHEDPEVKFNWYVDGVEVHNAKTKPREEQYNSTYRVVSVLTVLHQDWLNGKEYKCKVSNKALPAPIEKTISKAKGQPREPQVYTLPPSREEMTKNQVSLTCLVKGFYPSDIAVEWESNGQPENNYKTTPPVLDSDGSFFLYSKLTVDKSRWQQGNVFSCSVMHEALHNHYTQKSLSLSPGK

SEQ ID NO: 11626 - protein, 117 aa, synthetic construct; identical to SEQ ID NO: 6318
  source 1..117: note = Description of Artificial Sequence: Synthetic polypeptide; note = VH of XENP017914

SEQ ID NO: 11627 - protein, 5 aa, synthetic construct
  source 1..5: note = Description of Artificial Sequence: Synthetic peptide; note = XENP017914 vhCDR1
SYGMS

SEQ ID NO: 11628 - protein, 17 aa, synthetic construct
  source 1..17: note = Description of Artificial Sequence: Synthetic peptide; note = XENP017914 vhCDR2
TISGGGRYTYYPDSVKG

SEQ ID NO: 11629 - protein, 8 aa, synthetic construct
  source 1..8: note = Description of Artificial Sequence: Synthetic peptide; note = XENP017914 vhCDR3
YYDSSFDY

SEQ ID NO: 11630 - protein, 214 aa, synthetic construct
  source 1..214: note = Description of Artificial Sequence: Synthetic polypeptide; note = XENP017914 6A3_H1L1_IgG1_PVA_/S267K Light Chain
DIVMTQSPDSLAVSLGERATINCKASQDVGTAVAWYQQKPGQSPKLLIYWASTRHTGVPDRFTGSGSGTDFTLTISSLQAEDVAVYFCQHYSIYPWTFGGGTKVEIKRTVAAPSVFIFPPSDEQLKSGTASVVCLLNNFYPREAKVQWKVDNALQSGNSQESVTEQDSKDSTYSLSSTLTLSKADYEKHKVYACEVTHQGLSSPVTKSFNRGEC

SEQ ID NO: 11631 - protein, 107 aa, synthetic construct; identical to SEQ ID NO: 6319
  source 1..107: note = Description of Artificial Sequence: Synthetic polypeptide; note = VL of XENP017914

SEQ ID NO: 11632 - protein, 11 aa, synthetic construct
  source 1..11: note = Description of Artificial Sequence: Synthetic peptide; note = XENP017914 vlCDR1
KASQDVGTAVA

SEQ ID NO: 11633 - protein, 7 aa, synthetic construct
  source 1..7: note = Description of Artificial Sequence: Synthetic peptide; note = XENP017914 vlCDR2
WASTRHT

SEQ ID NO: 11634 - protein, 9 aa, synthetic construct
  source 1..9: note = Description of Artificial Sequence: Synthetic peptide; note = XENP017914 vlCDR3
QHYSIYPWT

SEQ ID NO: 11635 - protein, 446 aa, synthetic construct; identical to SEQ ID NO: 11625
  source 1..446: note = Description of Artificial Sequence: Synthetic polypeptide; note = XENP017915 6A3_H1L2_IgG1_PVA_/S267K Heavy Chain

SEQ ID NO: 11636 - protein, 117 aa, synthetic construct; identical to SEQ ID NO: 6318
  source 1..117: note = Description of Artificial Sequence: Synthetic polypeptide; note = VH of XENP017915

SEQ ID NO: 11637 - protein, 5 aa, synthetic construct
  source 1..5: note = Description of Artificial Sequence: Synthetic peptide; note = XENP017915 vhCDR1
SYGMS

SEQ ID NO: 11638 - protein, 17 aa, synthetic construct
  source 1..17: note = Description of Artificial Sequence: Synthetic peptide; note = XENP017915 vhCDR2
TISGGGRYTYYPDSVKG

SEQ ID NO: 11639 - protein, 8 aa, synthetic construct
  source 1..8: note = Description of Artificial Sequence: Synthetic peptide; note = XENP017915 vhCDR3
YYDSSFDY

SEQ ID NO: 11640 - protein, 214 aa, synthetic construct
  source 1..214: note = Description of Artificial Sequence: Synthetic polypeptide; note = XENP017915 6A3_H1L2_IgG1_PVA_/S267K Light Chain
DIVMTQSPATLSVSPGERATLSCRASQDVGTAVAWYQQKPGQSPRLLIYWASTRHTGVPDRFTGSGSGTEFTLTISSLQSEDFAVYFCQHYSIYPWTFGGGTKVEIKRTVAAPSVFIFPPSDEQLKSGTASVVCLLNNFYPREAKVQWKVDNALQSGNSQESVTEQDSKDSTYSLSSTLTLSKADYEKHKVYACEVTHQGLSSPVTKSFNRGEC

SEQ ID NO: 11641 - protein, 107 aa, synthetic construct; identical to SEQ ID NO: 6328
  source 1..107: note = Description of Artificial Sequence: Synthetic polypeptide; note = VL of XENP017915

SEQ ID NO: 11642 - protein, 11 aa, synthetic construct
  source 1..11: note = Description of Artificial Sequence: Synthetic peptide; note = XENP017915 vlCDR1
RASQDVGTAVA

SEQ ID NO: 11643 - protein, 7 aa, synthetic construct
  source 1..7: note = Description of Artificial Sequence: Synthetic peptide; note = XENP017915 vlCDR2
WASTRHT

SEQ ID NO: 11644 - protein, 9 aa, synthetic construct
  source 1..9: note = Description of Artificial Sequence: Synthetic peptide; note = XENP017915 vlCDR3
QHYSIYPWT

SEQ ID NO: 11645 - protein, 446 aa, synthetic construct; identical to SEQ ID NO: 11625
  source 1..446: note = Description of Artificial Sequence: Synthetic polypeptide; note = XENP017916 6A3_H1L3_IgG1_PVA_/S267K Heavy Chain

SEQ ID NO: 11646 - protein, 117 aa, synthetic construct; identical to SEQ ID NO: 6318
  source 1..117: note = Description of Artificial Sequence: Synthetic polypeptide; note = VH of XENP017916

SEQ ID NO: 11647 - protein, 5 aa, synthetic construct
  source 1..5: note = Description of Artificial Sequence: Synthetic peptide; note = XENP017916 vhCDR1
SYGMS

SEQ ID NO: 11648 - protein, 17 aa, synthetic construct
  source 1..17: note = Description of Artificial Sequence: Synthetic peptide; note = XENP017916 vhCDR2
TISGGGRYTYYPDSVKG

SEQ ID NO: 11649 - protein, 8 aa, synthetic construct
  source 1..8: note = Description of Artificial Sequence: Synthetic peptide; note = XENP017916 vhCDR3
YYDSSFDY

SEQ ID NO: 11650 - protein, 214 aa, synthetic construct
  source 1..214: note = Description of Artificial Sequence: Synthetic polypeptide; note = XENP017916 6A3_H1L3_IgG1_PVA_/S267K Light Chain
DIVMTQSPSSLSASVGDRVTITCRASQDVGTAVAWYQQKPGKSPKLLIYWASTRHTGVPDRFTGSGSGTDFTLTISSLQPEDFATYFCQHYSIYPWTFGGGTKVEIKRTVAAPSVFIFPPSDEQLKSGTASVVCLLNNFYPREAKVQWKVDNALQSGNSQESVTEQDSKDSTYSLSSTLTLSKADYEKHKVYACEVTHQGLSSPVTKSFNRGEC

SEQ ID NO: 11651 - protein, 107 aa, synthetic construct; identical to SEQ ID NO: 6337
  source 1..107: note = Description of Artificial Sequence: Synthetic polypeptide; note = VL of XENP017916

SEQ ID NO: 11652 - protein, 11 aa, synthetic construct
  source 1..11: note = Description of Artificial Sequence: Synthetic peptide; note = XENP017916 vlCDR1
RASQDVGTAVA

SEQ ID NO: 11653 - protein, 7 aa, synthetic construct
  source 1..7: note = Description of Artificial Sequence: Synthetic peptide; note = XENP017916 vlCDR2
WASTRHT

SEQ ID NO: 11654 - protein, 9 aa, synthetic construct
  source 1..9: note = Description of Artificial Sequence: Synthetic peptide; note = XENP017916 vlCDR3
QHYSIYPWT

SEQ ID NO: 11655 - protein, 446 aa, synthetic construct
  source 1..446: note = Description of Artificial Sequence: Synthetic polypeptide; note = XENP017917 6A3_H2L3_IgG1_PVA_/S267K Heavy Chain
EVQLLESGGGLVQPGGSLRLSCAASGFTFSSYGMSWVRQAPGKGLEWVSTISGGGRYTYYPDSVKGRFTISRDNSKNTLYLQMNSLRAEDTAVYYCASYYDSSFDYWGQGTLVTVSSASTKGPSVFPLAPSSKSTSGGTAALGCLVKDYFPEPVTVSWNSGALTSGVHTFPAVLQSSGLYSLSSVVTVPSSSLGTQTYICNVNHKPSNTKVDKKVEPKSCDKTHTCPPCPAPPVAGPSVFLFPPKPKDTLMISRTPEVTCVVVDVKHEDPEVKFNWYVDGVEVHNAKTKPREEQYNSTYRVVSVLTVLHQDWLNGKEYKCKVSNKALPAPIEKTISKAKGQPREPQVYTLPPSREEMTKNQVSLTCLVKGFYPSDIAVEWESNGQPENNYKTTPPVLDSDGSFFLYSKLTVDKSRWQQGNVFSCSVMHEALHNHYTQKSLSLSPGK

SEQ ID NO: 11656 - protein, 117 aa, synthetic construct; identical to SEQ ID NO: 6354
  source 1..117: note = Description of Artificial Sequence: Synthetic polypeptide; note = VH of XENP017917

SEQ ID NO: 11657 - protein, 5 aa, synthetic construct
  source 1..5: note = Description of Artificial Sequence: Synthetic peptide; note = XENP017917 vhCDR1
SYGMS

SEQ ID NO: 11658 - protein, 17 aa, synthetic construct
  source 1..17: note = Description of Artificial Sequence: Synthetic peptide; note = XENP017917 vhCDR2
TISGGGRYTYYPDSVKG

SEQ ID NO: 11659 - protein, 8 aa, synthetic construct
  source 1..8: note = Description of Artificial Sequence: Synthetic peptide; note = XENP017917 vhCDR3
YYDSSFDY

SEQ ID NO: 11660 - protein, 214 aa, synthetic construct; identical to SEQ ID NO: 11650
  source 1..214: note = Description of Artificial Sequence: Synthetic polypeptide; note = XENP017917 6A3_H2L3_IgG1_PVA_/S267K Light Chain

SEQ ID NO: 11661 - protein, 107 aa, synthetic construct; identical to SEQ ID NO: 6337
  source 1..107: note = Description of Artificial Sequence: Synthetic polypeptide; note = VL of XENP017917

SEQ ID NO: 11662 - protein, 11 aa, synthetic construct
  source 1..11: note = Description of Artificial Sequence: Synthetic peptide; note = XENP017917 vlCDR1
RASQDVGTAVA

SEQ ID NO: 11663 - protein, 7 aa, synthetic construct
  source 1..7: note = Description of Artificial Sequence: Synthetic peptide; note = XENP017917 vlCDR2
WASTRHT

SEQ ID NO: 11664 - protein, 9 aa, synthetic construct
  source 1..9: note = Description of Artificial Sequence: Synthetic peptide; note = XENP017917 vlCDR3
QHYSIYPWT

SEQ ID NO: 11665 - protein, 446 aa, synthetic construct
  source 1..446: note = Description of Artificial Sequence: Synthetic polypeptide; note = XENP017918 6A3_H1.1_L3_IgG1_PVA_/S267K Heavy Chain
QVQLVESGGGLVKPGGSLRLSCAASGFTFSSYGMSWVRQAPGKRLEWVSTISGGGRYTYYPDSVKGRFTISRDNAKNSLYLQMNSLRAEDTAVYYCASYYDSSFDYWGQGTLVTVSSASTKGPSVFPLAPSSKSTSGGTAALGCLVKDYFPEPVTVSWNSGALTSGVHTFPAVLQSSGLYSLSSVVTVPSSSLGTQTYICNVNHKPSNTKVDKKVEPKSCDKTHTCPPCPAPPVAGPSVFLFPPKPKDTLMISRTPEVTCVVVDVKHEDPEVKFNWYVDGVEVHNAKTKPREEQYNSTYRVVSVLTVLHQDWLNGKEYKCKVSNKALPAPIEKTISKAKGQPREPQVYTLPPSREEMTKNQVSLTCLVKGFYPSDIAVEWESNGQPENNYKTTPPVLDSDGSFFLYSKLTVDKSRWQQGNVFSCSVMHEALHNHYTQKSLSLSPGK

SEQ ID NO: 11666 - protein, 117 aa, synthetic construct; identical to SEQ ID NO: 6345
  source 1..117: note = Description of Artificial Sequence: Synthetic polypeptide; note = VH of XENP017918

SEQ ID NO: 11667 - protein, 5 aa, synthetic construct
  source 1..5: note = Description of Artificial Sequence: Synthetic peptide; note = XENP017918 vhCDR1
SYGMS

SEQ ID NO: 11668 - protein, 17 aa, synthetic construct
  source 1..17: note = Description of Artificial Sequence: Synthetic peptide; note = XENP017918 vhCDR2
TISGGGRYTYYPDSVKG

SEQ ID NO: 11669 - protein, 8 aa, synthetic construct
  source 1..8: note = Description of Artificial Sequence: Synthetic peptide; note = XENP017918 vhCDR3
YYDSSFDY

SEQ ID NO: 11670 - protein, 214 aa, synthetic construct; identical to SEQ ID NO: 11650
  source 1..214: note = Description of Artificial Sequence: Synthetic polypeptide; note = XENP017918 6A3_H1.1_L3_IgG1_PVA_/S267K Light Chain

SEQ ID NO: 11671 - protein, 107 aa, synthetic construct; identical to SEQ ID NO: 6337
  source 1..107: note = Description of Artificial Sequence: Synthetic polypeptide; note = VL of XENP017918

SEQ ID NO: 11672 - protein, 11 aa, synthetic construct
  source 1..11: note = Description of Artificial Sequence: Synthetic peptide; note = XENP017918 vlCDR1
RASQDVGTAVA

SEQ ID NO: 11673 - protein, 7 aa, synthetic construct
  source 1..7: note = Description of Artificial Sequence: Synthetic peptide; note = XENP017918 vlCDR2
WASTRHT

SEQ ID NO: 11674 - protein, 9 aa, synthetic construct
  source 1..9: note = Description of Artificial Sequence: Synthetic peptide; note = XENP017918 vlCDR3
QHYSIYPWT

SEQ ID NO: 11675 - protein, 451 aa, synthetic construct
  source 1..451: note = Description of Artificial Sequence: Synthetic polypeptide; note = XENP018089 H1M7789N_H0L0_IgG1 Heavy Chain
EVQLLESGGGLVQPGGSLRLSCSASGFTFSSYTMNWVRQAPGKGLEWVSGISDTGGNTYYTDSVKGRFTVSRDNSKNTLSLQMNSLRAEDTAVYYCAKDQGGSYPYYFHYWGQGSLVTVSSASTKGPSVFPLAPSSKSTSGGTAALGCLVKDYFPEPVTVSWNSGALTSGVHTFPAVLQSSGLYSLSSVVTVPSSSLGTQTYICNVNHKPSNTKVDKKVEPKSCDKTHTCPPCPAPELLGGPSVFLFPPKPKDTLMISRTPEVTCVVVDVSHEDPEVKFNWYVDGVEVHNAKTKPREEQYNSTYRVVSVLTVLHQDWLNGKEYKCKVSNKALPAPIEKTISKAKGQPREPQVYTLPPSREEMTKNQVSLTCLVKGFYPSDIAVEWESNGQPENNYKTTPPVLDSDGSFFLYSKLTVDKSRWQQGNVFSCSVMHEALHNHYTQKSLSLSPGK

SEQ ID NO: 11676 - protein, 121 aa, synthetic construct
  source 1..121: note = Description of Artificial Sequence: Synthetic polypeptide; note = VH of XENP018089
EVQLLESGGGLVQPGGSLRLSCSASGFTFSSYTMNWVRQAPGKGLEWVSGISDTGGNTYYTDSVKGRFTVSRDNSKNTLSLQMNSLRAEDTAVYYCAKDQGGSYPYYFHYWGQGSLVTVSS

SEQ ID NO: 11677 - protein, 5 aa, synthetic construct
  source 1..5: note = Description of Artificial Sequence: Synthetic peptide; note = XENP018089 vhCDR1
SYTMN

SEQ ID NO: 11678 - protein, 17 aa, synthetic construct
  source 1..17: note = Description of Artificial Sequence: Synthetic peptide; note = XENP018089 vhCDR2
GISDTGGNTYYTDSVKG

SEQ ID NO: 11679 - protein, 12 aa, synthetic construct
  source 1..12: note = Description of Artificial Sequence: Synthetic peptide; note = XENP018089 vhCDR3
DQGGSYPYYFHY

SEQ ID NO: 11680 - protein, 215 aa, synthetic construct
  source 1..215: note = Description of Artificial Sequence: Synthetic polypeptide; note = XENP018089 H1M7789N_H0L0_IgG1 Light Chain
DIQMTQSPSSLSASVGDRVTITCRASQSISSYLIWYQQKPGTAPKFLIYAASSLQSGVPSRFSGSGSGTDFTLTISSLQPEDFATYYCQQSYSTPPITFGQGTRLEIKRTVAAPSVFIFPPSDEQLKSGTASVVCLLNNFYPREAKVQWKVDNALQSGNSQESVTEQDSKDSTYSLSSTLTLSKADYEKHKVYACEVTHQGLSSPVTKSFNRGEC

SEQ ID NO: 11681 - protein, 108 aa, synthetic construct
  source 1..108: note = Description of Artificial Sequence: Synthetic polypeptide; note = VL of XENP018089
DIQMTQSPSSLSASVGDRVTITCRASQSISSYLIWYQQKPGTAPKFLIYAASSLQSGVPSRFSGSGSGTDFTLTISSLQPEDFATYYCQQSYSTPPITFGQGTRLEIK

SEQ ID NO: 11682 - protein, 11 aa, synthetic construct
  source 1..11: note = Description of Artificial Sequence: Synthetic peptide; note = XENP018089 vlCDR1
RASQSISSYLI

SEQ ID NO: 11683 - protein, 7 aa, synthetic construct
  source 1..7: note = Description of Artificial Sequence: Synthetic peptide; note = XENP018089 vlCDR2
AASSLQS

SEQ ID NO: 11684 - protein, 10 aa, synthetic construct
  source 1..10: note = Description of Artificial Sequence: Synthetic peptide; note = XENP018089 vlCDR3
QQSYSTPPIT

SEQ ID NO: 11685 - protein, 446 aa, synthetic construct
  source 1..446: note = Description of Artificial Sequence: Synthetic polypeptide; note = XENP018090 H2aM7791N_H0L0_IgG1 Heavy Chain
QMQLQQWGAGLLKPSETLSLTCVVYGGSLNGYYWSWIRQSPGKGLEWIGEIDHSGSTNYNPSLKNRVTMSVDTSKIQFSLKLTSVTVADTAVYYCAREGLLPFDYWGQGTLVTVSSASTKGPSVFPLAPSSKSTSGGTAALGCLVKDYFPEPVTVSWNSGALTSGVHTFPAVLQSSGLYSLSSVVTVPSSSLGTQTYICNVNHKPSNTKVDKKVEPKSCDKTHTCPPCPAPELLGGPSVFLFPPKPKDTLMISRTPEVTCVVVDVSHEDPEVKFNWYVDGVEVHNAKTKPREEQYNSTYRVVSVLTVLHQDWLNGKEYKCKVSNKALPAPIEKTISKAKGQPREPQVYTLPPSREEMTKNQVSLTCLVKGFYPSDIAVEWESNGQPENNYKTTPPVLDSDGSFFLYSKLTVDKSRWQQGNVFSCSVMHEALHNHYTQKSLSLSPGK

SEQ ID NO: 11686 - protein, 116 aa, synthetic construct
  source 1..116: note = Description of Artificial Sequence: Synthetic polypeptide; note = VH of XENP018090
QMQLQQWGAGLLKPSETLSLTCVVYGGSLNGYYWSWIRQSPGKGLEWIGEIDHSGSTNYNPSLKNRVTMSVDTSKIQFSLKLTSVTVADTAVYYCAREGLLPFDYWGQGTLVTVSS

SEQ ID NO: 11687 - protein, 5 aa, synthetic construct
  source 1..5: note = Description of Artificial Sequence: Synthetic peptide; note = XENP018090 vhCDR1
GYYWS

SEQ ID NO: 11688 - protein, 16 aa, synthetic construct
  source 1..16: note = Description of Artificial Sequence: Synthetic peptide; note = XENP018090 vhCDR2
EIDHSGSTNYNPSLKN

SEQ ID NO: 11689 - protein, 8 aa, synthetic construct
  source 1..8: note = Description of Artificial Sequence: Synthetic peptide; note = XENP018090 vhCDR3
EGLLPFDY

SEQ ID NO: 11690 - protein, 215 aa, synthetic construct
  source 1..215: note = Description of Artificial Sequence: Synthetic polypeptide; note = XENP018090 H2aM7791N_H0L0_IgG1 Light Chain
EIVLTQSPGTLSLSPGERVTLSCRASQSVYSNYLAWYQQNPGQAPRLLIYAASNRATGIPDRFSGSGSGTDFTLTISRLEPEDFAVYYCHQYATSPWTFGQGTKVEIKRTVAAPSVFIFPPSDEQLKSGTASVVCLLNNFYPREAKVQWKVDNALQSGNSQESVTEQDSKDSTYSLSSTLTLSKADYEKHKVYACEVTHQGLSSPVTKSFNRGEC

SEQ ID NO: 11691 - protein, 108 aa, synthetic construct
  source 1..108: note = Description of Artificial Sequence: Synthetic polypeptide; note = VL of XENP018090
EIVLTQSPGTLSLSPGERVTLSCRASQSVYSNYLAWYQQNPGQAPRLLIYAASNRATGIPDRFSGSGSGTDFTLTISRLEPEDFAVYYCHQYATSPWTFGQGTKVEIK

SEQ ID NO: 11692 - protein, 12 aa, synthetic construct
  source 1..12: note = Description of Artificial Sequence: Synthetic peptide; note = XENP018090 vlCDR1
RASQSVYSNYLA

SEQ ID NO: 11693 - protein, 7 aa, synthetic construct
  source 1..7: note = Description of Artificial Sequence: Synthetic peptide; note = XENP018090 vlCDR2
AASNRAT

SEQ ID NO: 11694 - protein, 9 aa, synthetic construct
  source 1..9: note = Description of Artificial Sequence: Synthetic peptide; note = XENP018090 vlCDR3
HQYATSPWT

SEQ ID NO: 11695 - protein, 446 aa, synthetic construct
  source 1..446: note = Description of Artificial Sequence: Synthetic polypeptide; note = XENP018091 H2aM7796N_H0L0_IgG1 Heavy Chain
QVQLVESGGGVVQPGRSLRLSCAASGFTFSSYGMHWVRQAPGKGLEWVAIIWSDGDSEYNLDSVKGRFTISRDNSKNTLYLQMNSLRVEDSAVYYCARDRDLEDIWGQGTMVTVSSASTKGPSVFPLAPSSKSTSGGTAALGCLVKDYFPEPVTVSWNSGALTSGVHTFPAVLQSSGLYSLSSVVTVPSSSLGTQTYICNVNHKPSNTKVDKKVEPKSCDKTHTCPPCPAPELLGGPSVFLFPPKPKDTLMISRTPEVTCVVVDVSHEDPEVKFNWYVDGVEVHNAKTKPREEQYNSTYRVVSVLTVLHQDWLNGKEYKCKVSNKALPAPIEKTISKAKGQPREPQVYTLPPSREEMTKNQVSLTCLVKGFYPSDIAVEWESNGQPENNYKTTPPVLDSDGSFFLYSKLTVDKSRWQQGNVFSCSVMHEALHNHYTQKSLSLSPGK

SEQ ID NO: 11696 - protein, 116 aa, synthetic construct
  source 1..116: note = Description of Artificial Sequence: Synthetic polypeptide; note = VH of XENP018091
QVQLVESGGGVVQPGRSLRLSCAASGFTFSSYGMHWVRQAPGKGLEWVAIIWSDGDSEYNLDSVKGRFTISRDNSKNTLYLQMNSLRVEDSAVYYCARDRDLEDIWGQGTMVTVSS

SEQ ID NO: 11697 - protein, 5 aa, synthetic construct
  source 1..5: note = Description of Artificial Sequence: Synthetic peptide; note = XENP018091 vhCDR1
SYGMH

SEQ ID NO: 11698 - protein, 17 aa, synthetic construct
  source 1..17: note = Description of Artificial Sequence: Synthetic peptide; note = XENP018091 vhCDR2
IIWSDGDSEYNLDSVKG

SEQ ID NO: 11699 - protein, 7 aa, synthetic construct
  source 1..7: note = Description of Artificial Sequence: Synthetic peptide; note = XENP018091 vhCDR3
DRDLEDI

SEQ ID NO: 11700 - protein, 214 aa, synthetic construct
  source 1..214: note = Description of Artificial Sequence: Synthetic polypeptide; note = XENP018091 H2aM7796N_H0L0_IgG1 Light Chain
DIQMTQSPSSLSASVGDRVTITCRASQGIRNDLGWYQQKPGKAPKRLIYAASNLQSGVPSRFSGSGSGTEFTLTISSLQPEDFATYYCLQHNSYPLTFGGGTKVEIKRTVAAPSVFIFPPSDEQLKSGTASVVCLLNNFYPREAKVQWKVDNALQSGNSQESVTEQDSKDSTYSLSSTLTLSKADYEKHKVYACEVTHQGLSSPVTKSFNRGEC

SEQ ID NO: 11701 - protein, 107 aa, synthetic construct
  source 1..107: note = Description of Artificial Sequence: Synthetic polypeptide; note = VL of XENP018091
DIQMTQSPSSLSASVGDRVTITCRASQGIRNDLGWYQQKPGKAPKRLIYAASNLQSGVPSRFSGSGSGTEFTLTISSLQPEDFATYYCLQHNSYPLTFGGGTKVEIK

SEQ ID NO: 11702 - protein, 11 aa, synthetic construct
  source 1..11: note = Description of Artificial Sequence: Synthetic peptide; note = XENP018091 vlCDR1
RASQGIRNDLG

SEQ ID NO: 11703 - protein, 7 aa, synthetic construct
  source 1..7: note = Description of Artificial Sequence: Synthetic peptide; note = XENP018091 vlCDR2
AASNLQS

SEQ ID NO: 11704 - protein, 9 aa, synthetic construct
  source 1..9: note = Description of Artificial Sequence: Synthetic peptide; note = XENP018091 vlCDR3
LQHNSYPLT

SEQ ID NO: 11705 - protein, 451 aa, synthetic construct
  source 1..451: note = Description of Artificial Sequence: Synthetic polypeptide; note = XENP018092 H4H9057P2_H0L0_IgG1 Heavy Chain
EVQLVESGGGLVQSGRSLRLSCAASGFTFDDYAMHWVRQPPGKGLEWVSGINWNRGRTGYADSVKGRFTISRDNAKNSLYLQMNDLRVEDTALYYCAKAEQWLDEGYFDYWGQGTLVTVSSASTKGPSVFPLAPSSKSTSGGTAALGCLVKDYFPEPVTVSWNSGALTSGVHTFPAVLQSSGLYSLSSVVTVPSSSLGTQTYICNVNHKPSNTKVDKKVEPKSCDKTHTCPPCPAPELLGGPSVFLFPPKPKDTLMISRTPEVTCVVVDVSHEDPEVKFNWYVDGVEVHNAKTKPREEQYNSTYRVVSVLTVLHQDWLNGKEYKCKVSNKALPAPIEKTISKAKGQPREPQVYTLPPSREEMTKNQVSLTCLVKGFYPSDIAVEWESNGQPENNYKTTPPVLDSDGSFFLYSKLTVDKSRWQQGNVFSCSVMHEALHNHYTQKSLSLSPGK

SEQ ID NO: 11706 - protein, 121 aa, synthetic construct
  source 1..121: note = Description of Artificial Sequence: Synthetic polypeptide; note = VH of XENP018092
EVQLVESGGGLVQSGRSLRLSCAASGFTFDDYAMHWVRQPPGKGLEWVSGINWNRGRTGYADSVKGRFTISRDNAKNSLYLQMNDLRVEDTALYYCAKAEQWLDEGYFDYWGQGTLVTVSS

SEQ ID NO: 11707 - protein, 5 aa, synthetic construct
  source 1..5: note = Description of Artificial Sequence: Synthetic peptide; note = XENP018092 vhCDR1
DYAMH

SEQ ID NO: 11708 - protein, 17 aa, synthetic construct
  source 1..17: note = Description of Artificial Sequence: Synthetic peptide; note = XENP018092 vhCDR2
GINWNRGRTGYADSVKG

SEQ ID NO: 11709 - protein, 12 aa, synthetic construct
  source 1..12: note = Description of Artificial Sequence: Synthetic peptide; note = XENP018092 vhCDR3
AEQWLDEGYFDY

SEQ ID NO: 11710 - protein, 215 aa, synthetic construct
  source 1..215: note = Description of Artificial Sequence: Synthetic polypeptide; note = XENP018092 H4H9057P2_H0L0_IgG1 Light Chain
DIQMTQSPSSLSASVGDRVTITCRASQSISSYLNWYQQKPGKAPKLLIYAASSLQSGVPSRFSGSGSGTDFTLTISSLQPEDFATYYCQQSYSTPPITFGQGTRLEIKRTVAAPSVFIFPPSDEQLKSGTASVVCLLNNFYPREAKVQWKVDNALQSGNSQESVTEQDSKDSTYSLSSTLTLSKADYEKHKVYACEVTHQGLSSPVTKSFNRGEC

SEQ ID NO: 11711 - protein, 108 aa, synthetic construct
  source 1..108: note = Description of Artificial Sequence: Synthetic polypeptide; note = VL of XENP018092
DIQMTQSPSSLSASVGDRVTITCRASQSISSYLNWYQQKPGKAPKLLIYAASSLQSGVPSRFSGSGSGTDFTLTISSLQPEDFATYYCQQSYSTPPITFGQGTRLEIK

SEQ ID NO: 11712 - protein, 11 aa, synthetic construct
  source 1..11: note = Description of Artificial Sequence: Synthetic peptide; note = XENP018092 vlCDR1
RASQSISSYLN

SEQ ID NO: 11713 - protein, 7 aa, synthetic construct
  source 1..7: note = Description of Artificial Sequence: Synthetic peptide; note = XENP018092 vlCDR2
AASSLQS

SEQ ID NO: 11714 - protein, 10 aa, synthetic construct
  source 1..10: note = Description of Artificial Sequence: Synthetic peptide; note = XENP018092 vlCDR3
QQSYSTPPIT

SEQ ID NO: 11715 - protein, 451 aa, synthetic construct
  source 1..451: note = Description of Artificial Sequence: Synthetic polypeptide; note = XENP018093 H4H9068P2_H0L0_IgG1 Heavy Chain
EVQLVESGGGLVQPGGSLRLSCAASGFSFSSYAMNWVRQAPGKGLEWVSTISDSGGSTYYADSVKGRFTISRDNSKNTLSLQMNSLRAEDTAVYYCAKDQGGSYPYYFHYWGQGTLVTVSSASTKGPSVFPLAPSSKSTSGGTAALGCLVKDYFPEPVTVSWNSGALTSGVHTFPAVLQSSGLYSLSSVVTVPSSSLGTQTYICNVNHKPSNTKVDKKVEPKSCDKTHTCPPCPAPELLGGPSVFLFPPKPKDTLMISRTPEVTCVVVDVSHEDPEVKFNWYVDGVEVHNAKTKPREEQYNSTYRVVSVLTVLHQDWLNGKEYKCKVSNKALPAPIEKTISKAKGQPREPQVYTLPPSREEMTKNQVSLTCLVKGFYPSDIAVEWESNGQPENNYKTTPPVLDSDGSFFLYSKLTVDKSRWQQGNVFSCSVMHEALHNHYTQKSLSLSPGK

SEQ ID NO: 11716 - protein, 121 aa, synthetic construct
  source 1..121: note = Description of Artificial Sequence: Synthetic polypeptide; note = VH of XENP018093
EVQLVESGGGLVQPGGSLRLSCAASGFSFSSYAMNWVRQAPGKGLEWVSTISDSGGSTYYADSVKGRFTISRDNSKNTLSLQMNSLRAEDTAVYYCAKDQGGSYPYYFHYWGQGTLVTVSS

SEQ ID NO: 11717 - protein, 5 aa, synthetic construct
  source 1..5: note = Description of Artificial Sequence: Synthetic peptide; note = XENP018093 vhCDR1
SYAMN

SEQ ID NO: 11718 - protein, 17 aa, synthetic construct
  source 1..17: note = Description of Artificial Sequence: Synthetic peptide; note = XENP018093 vhCDR2
TISDSGGSTYYADSVKG

SEQ ID NO: 11719 - protein, 12 aa, synthetic construct
  source 1..12: note = Description of Artificial Sequence: Synthetic peptide; note = XENP018093 vhCDR3
DQGGSYPYYFHY

SEQ ID NO: 11720 - protein, 215 aa, synthetic construct; identical to SEQ ID NO: 11710
  source 1..215: note = Description of Artificial Sequence: Synthetic polypeptide; note = XENP018093 H4H9068P2_H0L0_IgG1 Light Chain

SEQ ID NO: 11721 - protein, 108 aa, synthetic construct; identical to SEQ ID NO: 11711
  source 1..108: note = Description of Artificial Sequence: Synthetic polypeptide; note = VL of XENP018093

SEQ ID NO: 11722 - protein, 11 aa, synthetic construct
  source 1..11: note = Description of Artificial Sequence: Synthetic peptide; note = XENP018093 vlCDR1
RASQSISSYLN

SEQ ID NO: 11723 - protein, 7 aa, synthetic construct
  source 1..7: note = Description of Artificial Sequence: Synthetic peptide; note = XENP018093 vlCDR2
AASSLQS

SEQ ID NO: 11724 - protein, 10 aa, synthetic construct
  source 1..10: note = Description of Artificial Sequence: Synthetic peptide; note = XENP018093 vlCDR3
QQSYSTPPIT

SEQ ID NO: 11725 - protein, 451 aa, synthetic construct
  source 1..451: note = Description of Artificial Sequence: Synthetic polypeptide; note = XENP018094 1G6_H1.1_L1_IgG1_PVA_/S267K Heavy Chain
QVQLVESGGGLVKPGGSLRLSCAASGFTFSNYWMNWVRQAPGKGLEWVGEIRLKSNNYATHYAEPVKGRFTISRDDSKSTVYLQMNSLKTEDTAVYYCTRYYGNYGGYFDVWGAGTLVTVSSASTKGPSVFPLAPSSKSTSGGTAALGCLVKDYFPEPVTVSWNSGALTSGVHTFPAVLQSSGLYSLSSVVTVPSSSLGTQTYICNVNHKPSNTKVDKKVEPKSCDKTHTCPPCPAPPVAGPSVFLFPPKPKDTLMISRTPEVTCVVVDVKHEDPEVKFNWYVDGVEVHNAKTKPREEQYNSTYRVVSVLTVLHQDWLNGKEYKCKVSNKALPAPIEKTISKAKGQPREPQVYTLPPSREEMTKNQVSLTCLVKGFYPSDIAVEWESNGQPENNYKTTPPVLDSDGSFFLYSKLTVDKSRWQQGNVFSCSVMHEALHNHYTQKSLSLSPGK

SEQ ID NO: 11726 - protein, 122 aa, synthetic construct; identical to SEQ ID NO: 6363
  source 1..122: note = Description of Artificial Sequence: Synthetic polypeptide; note = VH of XENP018094

SEQ ID NO: 11727 - protein, 5 aa, synthetic construct
  source 1..5: note = Description of Artificial Sequence: Synthetic peptide; note = XENP018094 vhCDR1
NYWMN

SEQ ID NO: 11728 - protein, 19 aa, synthetic construct
  source 1..19: note = Description of Artificial Sequence: Synthetic peptide; note = XENP018094 vhCDR2
EIRLKSNNYATHYAEPVKG

SEQ ID NO: 11729 - protein, 11 aa, synthetic construct
  source 1..11: note = Description of Artificial Sequence: Synthetic peptide; note = XENP018094 vhCDR3
YYGNYGGYFDV

SEQ ID NO: 11730 - protein, 214 aa, synthetic construct; identical to SEQ ID NO: 11550
  source 1..214: note = Description of Artificial Sequence: Synthetic polypeptide; note = XENP018094 1G6_H1.1_L1_IgG1_PVA_/S267K Light Chain

SEQ ID NO: 11731 - protein, 107 aa, synthetic construct; identical to SEQ ID NO: 6247
  source 1..107: note = Description of Artificial Sequence: Synthetic polypeptide; note = VL of XENP018094

SEQ ID NO: 11732 - protein, 11 aa, synthetic construct
  source 1..11: note = Description of Artificial Sequence: Synthetic peptide; note = XENP018094 vlCDR1
RASQSVSNDVA

SEQ ID NO: 11733 - protein, 7 aa, synthetic construct
  source 1..7: note = Description of Artificial Sequence: Synthetic peptide; note = XENP018094 vlCDR2
YASHRYT

SEQ ID NO: 11734 - protein, 9 aa, synthetic construct
  source 1..9: note = Description of Artificial Sequence: Synthetic peptide; note = XENP018094 vlCDR3
QQDYSSPRT

SEQ ID NO: 11735 - protein, 451 aa, synthetic construct
  source 1..451: note = Description of Artificial Sequence: Synthetic polypeptide; note = XENP018095 1G6_H1.2_L1_IgG1_PVA_/S267K Heavy Chain
EVKLVESGGGLVKPGGSLRLSCAASGFTFSNYWMNWVRQAPGKGLEWVGEIRLKSNNYATHYAEPVKGRFTISRDDSKSTVYLQMNSLKTEDTAVYYCTRYYGNYGGYFDVWGAGTLVTVSSASTKGPSVFPLAPSSKSTSGGTAALGCLVKDYFPEPVTVSWNSGALTSGVHTFPAVLQSSGLYSLSSVVTVPSSSLGTQTYICNVNHKPSNTKVDKKVEPKSCDKTHTCPPCPAPPVAGPSVFLFPPKPKDTLMISRTPEVTCVVVDVKHEDPEVKFNWYVDGVEVHNAKTKPREEQYNSTYRVVSVLTVLHQDWLNGKEYKCKVSNKALPAPIEKTISKAKGQPREPQVYTLPPSREEMTKNQVSLTCLVKGFYPSDIAVEWESNGQPENNYKTTPPVLDSDGSFFLYSKLTVDKSRWQQGNVFSCSVMHEALHNHYTQKSLSLSPGK

SEQ ID NO: 11736 - protein, 122 aa, synthetic construct; identical to SEQ ID NO: 6372
  source 1..122: note = Description of Artificial Sequence: Synthetic polypeptide; note = VH of XENP018095

SEQ ID NO: 11737 - protein, 5 aa, synthetic construct
  source 1..5: note = Description of Artificial Sequence: Synthetic peptide; note = XENP018095 vhCDR1
NYWMN

SEQ ID NO: 11738 - protein, 19 aa, synthetic construct
  source 1..19: note = Description of Artificial Sequence: Synthetic peptide; note = XENP018095 vhCDR2
EIRLKSNNYATHYAEPVKG

SEQ ID NO: 11739 - protein, 11 aa, synthetic construct
  source 1..11: note = Description of Artificial Sequence: Synthetic peptide; note = XENP018095 vhCDR3
YYGNYGGYFDV

SEQ ID NO: 11740 - protein, 214 aa, synthetic construct; identical to SEQ ID NO: 11550
  source 1..214: note = Description of Artificial Sequence: Synthetic polypeptide; note = XENP018095 1G6_H1.2_L1_IgG1_PVA_/S267K Light Chain

SEQ ID NO: 11741 - protein, 107 aa, synthetic construct; identical to SEQ ID NO: 6247
  source 1..107: note = Description of Artificial Sequence: Synthetic polypeptide; note = VL of XENP018095

SEQ ID NO: 11742 - protein, 11 aa, synthetic construct
  source 1..11: note = Description of Artificial Sequence: Synthetic peptide; note = XENP018095 vlCDR1
RASQSVSNDVA

SEQ ID NO: 11743 - protein, 7 aa, synthetic construct
  source 1..7: note = Description of Artificial Sequence: Synthetic peptide; note = XENP018095 vlCDR2
YASHRYT

SEQ ID NO: 11744 - protein, 9 aa, synthetic construct
  source 1..9: note = Description of Artificial Sequence: Synthetic peptide; note = XENP018095 vlCDR3
QQDYSSPRT

SEQ ID NO: 11745 - protein, 451 aa, synthetic construct
  source 1..451: note = Description of Artificial Sequence: Synthetic polypeptide; note = XENP018096 1G6_H1.3_L1_IgG1_PVA_/S267K Heavy Chain
EVQLEESGGGLVKPGGSLRLSCAASGFTFSNYWMNWVRQAPGKGLEWVGEIRLKSNNYATHYAEPVKGRFTISRDDSKSTVYLQMNSLKTEDTAVYYCTRYYGNYGGYFDVWGAGTLVTVSSASTKGPSVFPLAPSSKSTSGGTAALGCLVKDYFPEPVTVSWNSGALTSGVHTFPAVLQSSGLYSLSSVVTVPSSSLGTQTYICNVNHKPSNTKVDKKVEPKSCDKTHTCPPCPAPPVAGPSVFLFPPKPKDTLMISRTPEVTCVVVDVKHEDPEVKFNWYVDGVEVHNAKTKPREEQYNSTYRVVSVLTVLHQDWLNGKEYKCKVSNKALPAPIEKTISKAKGQPREPQVYTLPPSREEMTKNQVSLTCLVKGFYPSDIAVEWESNGQPENNYKTTPPVLDSDGSFFLYSKLTVDKSRWQQGNVFSCSVMHEALHNHYTQKSLSLSPGK

SEQ ID NO: 11746 - protein, 122 aa, synthetic construct; identical to SEQ ID NO: 6381
  source 1..122: note = Description of Artificial Sequence: Synthetic polypeptide; note = VH of XENP018096

SEQ ID NO: 11747 - protein, 5 aa, synthetic construct
  source 1..5: note = Description of Artificial Sequence: Synthetic peptide; note = XENP018096 vhCDR1
NYWMN

SEQ ID NO: 11748 - protein, 19 aa, synthetic construct
  source 1..19: note = Description of Artificial Sequence: Synthetic peptide; note = XENP018096 vhCDR2
EIRLKSNNYATHYAEPVKG

SEQ ID NO: 11749 - protein, 11 aa, synthetic construct
  source 1..11: note = Description of Artificial Sequence: Synthetic peptide; note = XENP018096 vhCDR3
YYGNYGGYFDV

SEQ ID NO: 11750 - protein, 214 aa, synthetic construct; identical to SEQ ID NO: 11550
  source 1..214: note = Description of Artificial Sequence: Synthetic polypeptide; note = XENP018096 1G6_H1.3_L1_IgG1_PVA_/S267K Light Chain

SEQ ID NO: 11751 - protein, 107 aa, synthetic construct; identical to SEQ ID NO: 6247
  source 1..107: note = Description of Artificial Sequence: Synthetic polypeptide; note = VL of XENP018096

SEQ ID NO: 11752 - protein, 11 aa, synthetic construct
  source 1..11: note = Description of Artificial Sequence: Synthetic peptide; note = XENP018096 vlCDR1
RASQSVSNDVA

SEQ ID NO: 11753 - protein, 7 aa, synthetic construct
  source 1..7: note = Description of Artificial Sequence: Synthetic peptide; note = XENP018096 vlCDR2
YASHRYT

SEQ ID NO: 11754 - protein, 9 aa, synthetic construct
  source 1..9: note = Description of Artificial Sequence: Synthetic peptide; note = XENP018096 vlCDR3
QQDYSSPRT

SEQ ID NO: 11755 - protein, 451 aa, synthetic construct
  source 1..451: note = Description of Artificial Sequence: Synthetic polypeptide; note = XENP018101 1G6_H1.4_L1_IgG1_PVA_/S267K Heavy Chain
EVQLVESGGGLVQPGGSLRLSCAASGFTFSNYWMNWVRQAPGKGLEWVGEIRLKSNNYATHYAEPVKGRFTISRDDSKSTVYLQMNSLKTEDTAVYYCTRYYGNYGGYFDVWGAGTLVTVSSASTKGPSVFPLAPSSKSTSGGTAALGCLVKDYFPEPVTVSWNSGALTSGVHTFPAVLQSSGLYSLSSVVTVPSSSLGTQTYICNVNHKPSNTKVDKKVEPKSCDKTHTCPPCPAPPVAGPSVFLFPPKPKDTLMISRTPEVTCVVVDVKHEDPEVKFNWYVDGVEVHNAKTKPREEQYNSTYRVVSVLTVLHQDWLNGKEYKCKVSNKALPAPIEKTISKAKGQPREPQVYTLPPSREEMTKNQVSLTCLVKGFYPSDIAVEWESNGQPENNYKTTPPVLDSDGSFFLYSKLTVDKSRWQQGNVFSCSVMHEALHNHYTQKSLSLSPGK

SEQ ID NO: 11756 - protein, 122 aa, synthetic construct; identical to SEQ ID NO: 6390
  source 1..122: note = Description of Artificial Sequence: Synthetic polypeptide; note = VH of XENP018101

SEQ ID NO: 11757 - protein, 5 aa, synthetic construct
  source 1..5: note = Description of Artificial Sequence: Synthetic peptide; note = XENP018101 vhCDR1
NYWMN

SEQ ID NO: 11758 - protein, 19 aa, synthetic construct
  source 1..19: note = Description of Artificial Sequence: Synthetic peptide; note = XENP018101 vhCDR2
EIRLKSNNYATHYAEPVKG

SEQ ID NO: 11759 - protein, 11 aa, synthetic construct
  source 1..11: note = Description of Artificial Sequence: Synthetic peptide; note = XENP018101 vhCDR3
YYGNYGGYFDV

SEQ ID NO: 11760 - protein, 214 aa, synthetic construct; identical to SEQ ID NO: 11550
  source 1..214: note = Description of Artificial Sequence: Synthetic polypeptide; note = XENP018101 1G6_H1.4_L1_IgG1_PVA_/S267K Light Chain

SEQ ID NO: 11761 - protein, 107 aa, synthetic construct; identical to SEQ ID NO: 6247
  source 1..107: note = Description of Artificial Sequence: Synthetic polypeptide; note = VL of XENP018101

SEQ ID NO: 11762 - protein, 11 aa, synthetic construct
  source 1..11: note = Description of Artificial Sequence: Synthetic peptide; note = XENP018101 vlCDR1
RASQSVSNDVA

SEQ ID NO: 11763 - protein, 7 aa, synthetic construct
  source 1..7: note = Description of Artificial Sequence: Synthetic peptide; note = XENP018101 vlCDR2
YASHRYT

SEQ ID NO: 11764 - protein, 9 aa, synthetic construct
  source 1..9: note = Description of Artificial Sequence: Synthetic peptide; note = XENP018101 vlCDR3
QQDYSSPRT

SEQ ID NO: 11765 - protein, 451 aa, synthetic construct
  source 1..451: note = Description of Artificial Sequence: Synthetic polypeptide; note = XENP018102 1G6_H1.5_L1_IgG1_PVA_/S267K Heavy Chain
EVQLVESGGGLVRPGGSLRLSCAASGFTFSNYWMNWVRQAPGKGLEWVGEIRLKSNNYATHYAEPVKGRFTISRDDSKSTVYLQMNSLKTEDTAVYYCTRYYGNYGGYFDVWGAGTLVTVSSASTKGPSVFPLAPSSKSTSGGTAALGCLVKDYFPEPVTVSWNSGALTSGVHTFPAVLQSSGLYSLSSVVTVPSSSLGTQTYICNVNHKPSNTKVDKKVEPKSCDKTHTCPPCPAPPVAGPSVFLFPPKPKDTLMISRTPEVTCVVVDVKHEDPEVKFNWYVDGVEVHNAKTKPREEQYNSTYRVVSVLTVLHQDWLNGKEYKCKVSNKALPAPIEKTISKAKGQPREPQVYTLPPSREEMTKNQVSLTCLVKGFYPSDIAVEWESNGQPENNYKTTPPVLDSDGSFFLYSKLTVDKSRWQQGNVFSCSVMHEALHNHYTQKSLSLSPGK

SEQ ID NO: 11766 - protein, 122 aa, synthetic construct; identical to SEQ ID NO: 6399
  source 1..122: note = Description of Artificial Sequence: Synthetic polypeptide; note = VH of XENP018102

SEQ ID NO: 11767 - protein, 5 aa, synthetic construct
  source 1..5: note = Description of Artificial Sequence: Synthetic peptide; note = XENP018102 vhCDR1
NYWMN

SEQ ID NO: 11768 - protein, 19 aa, synthetic construct
  source 1..19: note = Description of Artificial Sequence: Synthetic peptide; note = XENP018102 vhCDR2
EIRLKSNNYATHYAEPVKG

SEQ ID NO: 11769 - protein, 11 aa, synthetic construct
  source 1..11: note = Description of Artificial Sequence: Synthetic peptide; note = XENP018102 vhCDR3
YYGNYGGYFDV

SEQ ID NO: 11770 - protein, 214 aa, synthetic construct; identical to SEQ ID NO: 11550
  source 1..214: note = Description of Artificial Sequence: Synthetic polypeptide; note = XENP018102 1G6_H1.5_L1_IgG1_PVA_/S267K Light Chain

SEQ ID NO: 11771 - protein, 107 aa, synthetic construct; identical to SEQ ID NO: 6247
  source 1..107: note = Description of Artificial Sequence: Synthetic polypeptide; note = VL of XENP018102

SEQ ID NO: 11772 - protein, 11 aa, synthetic construct
  source 1..11: note = Description of Artificial Sequence: Synthetic peptide; note = XENP018102 vlCDR1
RASQSVSNDVA

SEQ ID NO: 11773 - protein, 7 aa, synthetic construct
  source 1..7: note = Description of Artificial Sequence: Synthetic peptide; note = XENP018102 vlCDR2
YASHRYT

SEQ ID NO: 11774 - protein, 9 aa, synthetic construct
  source 1..9: note = Description of Artificial Sequence: Synthetic peptide; note = XENP018102 vlCDR3
QQDYSSPRT

SEQ ID NO: 11775 - protein, 451 aa, synthetic construct
  source 1..451: note = Description of Artificial Sequence: Synthetic polypeptide; note = XENP018103 1G6_H1.6_L1_IgG1_PVA_/S267K Heavy Chain
EVQLVESGGGLVKPGGSMRLSCAASGFTFSNYWMNWVRQAPGKGLEWVGEIRLKSNNYATHYAEPVKGRFTISRDDSKSTVYLQMNSLKTEDTAVYYCTRYYGNYGGYFDVWGAGTLVTVSSASTKGPSVFPLAPSSKSTSGGTAALGCLVKDYFPEPVTVSWNSGALTSGVHTFPAVLQSSGLYSLSSVVTVPSSSLGTQTYICNVNHKPSNTKVDKKVEPKSCDKTHTCPPCPAPPVAGPSVFLFPPKPKDTLMISRTPEVTCVVVDVKHEDPEVKFNWYVDGVEVHNAKTKPREEQYNSTYRVVSVLTVLHQDWLNGKEYKCKVSNKALPAPIEKTISKAKGQPREPQVYTLPPSREEMTKNQVSLTCLVKGFYPSDIAVEWESNGQPENNYKTTPPVLDSDGSFFLYSKLTVDKSRWQQGNVFSCSVMHEALHNHYTQKSLSLSPGK

SEQ ID NO: 11776 - protein, 122 aa, synthetic construct; identical to SEQ ID NO: 6408
  source 1..122: note = Description of Artificial Sequence: Synthetic polypeptide; note = VH of XENP018103

SEQ ID NO: 11777 - protein, 5 aa, synthetic construct
  source 1..5: note = Description of Artificial Sequence: Synthetic peptide; note = XENP018103 vhCDR1
NYWMN

SEQ ID NO: 11778 - protein, 19 aa, synthetic construct
  source 1..19: note = Description of Artificial Sequence: Synthetic peptide; note = XENP018103 vhCDR2
EIRLKSNNYATHYAEPVKG

SEQ ID NO: 11779 - protein, 11 aa, synthetic construct
  source 1..11: note = Description of Artificial Sequence: Synthetic peptide; note = XENP018103 vhCDR3
YYGNYGGYFDV

SEQ ID NO: 11780 - protein, 214 aa, synthetic construct; identical to SEQ ID NO: 11550
  source 1..214: note = Description of Artificial Sequence: Synthetic polypeptide; note = XENP018103 1G6_H1.6_L1_IgG1_PVA_/S267K Light Chain

SEQ ID NO: 11781 - protein, 107 aa, synthetic construct; identical to SEQ ID NO: 6247
  source 1..107: note = Description of Artificial Sequence: Synthetic polypeptide; note = VL of XENP018103

SEQ ID NO: 11782 - protein, 11 aa, synthetic construct
  source 1..11: note = Description of Artificial Sequence: Synthetic peptide; note = XENP018103 vlCDR1
RASQSVSNDVA

SEQ ID NO: 11783 - protein, 7 aa, synthetic construct
  source 1..7: note = Description of Artificial Sequence: Synthetic peptide; note = XENP018103 vlCDR2
YASHRYT

SEQ ID NO: 11784 - protein, 9 aa, synthetic construct
  source 1..9: note = Description of Artificial Sequence: Synthetic peptide; note = XENP018103 vlCDR3
QQDYSSPRT

SEQ ID NO: 11785 - protein, 451 aa, synthetic construct
  source 1..451: note = Description of Artificial Sequence: Synthetic polypeptide; note = XENP018104 1G6_H1.7_L1_IgG1_PVA_/S267K Heavy Chain
EVQLVESGGGLVKPGGSLKLSCAASGFTFSNYWMNWVRQAPGKGLEWVGEIRLKSNNYATHYAEPVKGRFTISRDDSKSTVYLQMNSLKTEDTAVYYCTRYYGNYGGYFDVWGAGTLVTVSSASTKGPSVFPLAPSSKSTSGGTAALGCLVKDYFPEPVTVSWNSGALTSGVHTFPAVLQSSGLYSLSSVVTVPSSSLGTQTYICNVNHKPSNTKVDKKVEPKSCDKTHTCPPCPAPPVAGPSVFLFPPKPKDTLMISRTPEVTCVVVDVKHEDPEVKFNWYVDGVEVHNAKTKPREEQYNSTYRVVSVLTVLHQDWLNGKEYKCKVSNKALPAPIEKTISKAKGQPREPQVYTLPPSREEMTKNQVSLTCLVKGFYPSDIAVEWESNGQPENNYKTTPPVLDSDGSFFLYSKLTVDKSRWQQGNVFSCSVMHEALHNHYTQKSLSLSPGK

SEQ ID NO: 11786 - protein, 122 aa, synthetic construct; identical to SEQ ID NO: 6417
  source 1..122: note = Description of Artificial Sequence: Synthetic polypeptide; note = VH of XENP018104

SEQ ID NO: 11787 - protein, 5 aa, synthetic construct
  source 1..5: note = Description of Artificial Sequence: Synthetic peptide; note = XENP018104 vhCDR1
NYWMN

SEQ ID NO: 11788 - protein, 19 aa, synthetic construct
  source 1..19: note = Description of Artificial Sequence: Synthetic peptide; note = XENP018104 vhCDR2
EIRLKSNNYATHYAEPVKG

SEQ ID NO: 11789 - protein, 11 aa, synthetic construct
  source 1..11: note = Description of Artificial Sequence: Synthetic peptide; note = XENP018104 vhCDR3
YYGNYGGYFDV

SEQ ID NO: 11790 - protein, 214 aa, synthetic construct; identical to SEQ ID NO: 11550
  source 1..214: note = Description of Artificial Sequence: Synthetic polypeptide; note = XENP018104 1G6_H1.7_L1_IgG1_PVA_/S267K Light Chain

SEQ ID NO: 11791 - protein, 107 aa, synthetic construct; identical to SEQ ID NO: 6247
  source 1..107: note = Description of Artificial Sequence: Synthetic polypeptide; note = VL of XENP018104

SEQ ID NO: 11792 - protein, 11 aa, synthetic construct
  source 1..11: note = Description of Artificial Sequence: Synthetic peptide; note = XENP018104 vlCDR1
RASQSVSNDVA

SEQ ID NO: 11793 - protein, 7 aa, synthetic construct
  source 1..7: note = Description of Artificial Sequence: Synthetic peptide; note = XENP018104 vlCDR2
YASHRYT

SEQ ID NO: 11794 - protein, 9 aa, synthetic construct
  source 1..9: note = Description of Artificial Sequence: Synthetic peptide; note = XENP018104 vlCDR3
QQDYSSPRT

SEQ ID NO: 11795 - protein, 451 aa, synthetic construct
  source 1..451: note = Description of Artificial Sequence: Synthetic polypeptide; note = XENP018105 1G6_H1.8_L1_IgG1_PVA_/S267K Heavy Chain
EVQLVESGGGLVKPGGSLRLSCVASGFTFSNYWMNWVRQAPGKGLEWVGEIRLKSNNYATHYAEPVKGRFTISRDDSKSTVYLQMNSLKTEDTAVYYCTRYYGNYGGYFDVWGAGTLVTVSSASTKGPSVFPLAPSSKSTSGGTAALGCLVKDYFPEPVTVSWNSGALTSGVHTFPAVLQSSGLYSLSSVVTVPSSSLGTQTYICNVNHKPSNTKVDKKVEPKSCDKTHTCPPCPAPPVAGPSVFLFPPKPKDTLMISRTPEVTCVVVDVKHEDPEVKFNWYVDGVEVHNAKTKPREEQYNSTYRVVSVLTVLHQDWLNGKEYKCKVSNKALPAPIEKTISKAKGQPREPQVYTLPPSREEMTKNQVSLTCLVKGFYPSDIAVEWESNGQPENNYKTTPPVLDSDGSFFLYSKLTVDKSRWQQGNVFSCSVMHEALHNHYTQKSLSLSPGK

SEQ ID NO: 11796 - protein, 122 aa, synthetic construct; identical to SEQ ID NO: 6426
  source 1..122: note = Description of Artificial Sequence: Synthetic polypeptide; note = VH of XENP018105

SEQ ID NO: 11797 - protein, 5 aa, synthetic construct
  source 1..5: note = Description of Artificial Sequence: Synthetic peptide; note = XENP018105 vhCDR1
NYWMN

SEQ ID NO: 11798 - protein, 19 aa, synthetic construct
  source 1..19: note = Description of Artificial Sequence: Synthetic peptide; note = XENP018105 vhCDR2
EIRLKSNNYATHYAEPVKG

SEQ ID NO: 11799 - protein, 11 aa, synthetic construct
  source 1..11: note = Description of Artificial Sequence: Synthetic peptide; note = XENP018105 vhCDR3
YYGNYGGYFDV

SEQ ID NO: 11800 - protein, 214 aa, synthetic construct; identical to SEQ ID NO: 11550
  source 1..214: note = Description of Artificial Sequence: Synthetic polypeptide; note = XENP018105 1G6_H1.8_L1_IgG1_PVA_/S267K Light Chain

SEQ ID NO: 11801 - protein, 107 aa, synthetic construct; identical to SEQ ID NO: 6247
  source 1..107: note = Description of Artificial Sequence: Synthetic polypeptide; note = VL of XENP018105

SEQ ID NO: 11802 - protein, 11 aa, synthetic construct
  source 1..11: note = Description of Artificial Sequence: Synthetic peptide; note = XENP018105 vlCDR1
RASQSVSNDVA

SEQ ID NO: 11803 - protein, 7 aa, synthetic construct
  source 1..7: note = Description of Artificial Sequence: Synthetic peptide; note = XENP018105 vlCDR2
YASHRYT

SEQ ID NO: 11804 - protein, 9 aa, synthetic construct
  source 1..9: note = Description of Artificial Sequence: Synthetic peptide; note = XENP018105 vlCDR3
QQDYSSPRT

SEQ ID NO: 11805 - protein, 451 aa, synthetic construct
  source 1..451: note = Description of Artificial Sequence: Synthetic polypeptide; note = XENP018106 1G6_H1.9_L1_IgG1_PVA_/S267K Heavy Chain
EVQLVESGGGLVKPGGSLRLSCAASGFTVSNYWMNWVRQAPGKGLEWVGEIRLKSNNYATHYAEPVKGRFTISRDDSKSTVYLQMNSLKTEDTAVYYCTRYYGNYGGYFDVWGAGTLVTVSSASTKGPSVFPLAPSSKSTSGGTAALGCLVKDYFPEPVTVSWNSGALTSGVHTFPAVLQSSGLYSLSSVVTVPSSSLGTQTYICNVNHKPSNTKVDKKVEPKSCDKTHTCPPCPAPPVAGPSVFLFPPKPKDTLMISRTPEVTCVVVDVKHEDPEVKFNWYVDGVEVHNAKTKPREEQYNSTYRVVSVLTVLHQDWLNGKEYKCKVSNKALPAPIEKTISKAKGQPREPQVYTLPPSREEMTKNQVSLTCLVKGFYPSDIAVEWESNGQPENNYKTTPPVLDSDGSFFLYSKLTVDKSRWQQGNVFSCSVMHEALHNHYTQKSLSLSPGK

SEQ ID NO: 11806 - protein, 122 aa, synthetic construct; identical to SEQ ID NO: 6435
  source 1..122: note = Description of Artificial Sequence: Synthetic polypeptide; note = VH of XENP018106

SEQ ID NO: 11807 - protein, 5 aa, synthetic construct
  source 1..5: note = Description of Artificial Sequence: Synthetic peptide; note = XENP018106 vhCDR1
NYWMN

SEQ ID NO: 11808 - protein, 19 aa, synthetic construct
  source 1..19: note = Description of Artificial Sequence: Synthetic peptide; note = XENP018106 vhCDR2
EIRLKSNNYATHYAEPVKG

SEQ ID NO: 11809 - protein, 11 aa, synthetic construct
  source 1..11: note = Description of Artificial Sequence: Synthetic peptide; note = XENP018106 vhCDR3
YYGNYGGYFDV

SEQ ID NO: 11810 - protein, 214 aa, synthetic construct; identical to SEQ ID NO: 11550
  source 1..214: note = Description of Artificial Sequence: Synthetic polypeptide; note = XENP018106 1G6_H1.9_L1_IgG1_PVA_/S267K Light Chain

SEQ ID NO: 11811 - protein, 107 aa, synthetic construct; identical to SEQ ID NO: 6247
  source 1..107: note = Description of Artificial Sequence: Synthetic polypeptide; note = VL of XENP018106

SEQ ID NO: 11812 - protein, 11 aa, synthetic construct
  source 1..11: note = Description of Artificial Sequence: Synthetic peptide; note = XENP018106 vlCDR1
RASQSVSNDVA

SEQ ID NO: 11813 - protein, 7 aa, synthetic construct
  source 1..7: note = Description of Artificial Sequence: Synthetic peptide; note = XENP018106 vlCDR2
YASHRYT

SEQ ID NO: 11814 - protein, 9 aa, synthetic construct
  source 1..9: note = Description of Artificial Sequence: Synthetic peptide; note = XENP018106 vlCDR3
QQDYSSPRT

SEQ ID NO: 11815 - protein, 451 aa, synthetic construct
  source 1..451: note = Description of Artificial Sequence: Synthetic polypeptide; note = XENP018107 1G6_H1.10_L1_IgG1_PVA_/S267K Heavy Chain
EVQLVESGGGLVKPGGSLRLSCAASGFTFTNYWMNWVRQAPGKGLEWVGEIRLKSNNYATHYAEPVKGRFTISRDDSKSTVYLQMNSLKTEDTAVYYCTRYYGNYGGYFDVWGAGTLVTVSSASTKGPSVFPLAPSSKSTSGGTAALGCLVKDYFPEPVTVSWNSGALTSGVHTFPAVLQSSGLYSLSSVVTVPSSSLGTQTYICNVNHKPSNTKVDKKVEPKSCDKTHTCPPCPAPPVAGPSVFLFPPKPKDTLMISRTPEVTCVVVDVKHEDPEVKFNWYVDGVEVHNAKTKPREEQYNSTYRVVSVLTVLHQDWLNGKEYKCKVSNKALPAPIEKTISKAKGQPREPQVYTLPPSREEMTKNQVSLTCLVKGFYPSDIAVEWESNGQPENNYKTTPPVLDSDGSFFLYSKLTVDKSRWQQGNVFSCSVMHEALHNHYTQKSLSLSPGK

SEQ ID NO: 11816 - protein, 122 aa, synthetic construct; identical to SEQ ID NO: 6444
  source 1..122: note = Description of Artificial Sequence: Synthetic polypeptide; note = VH of XENP018107

SEQ ID NO: 11817 - protein, 5 aa, synthetic construct
  source 1..5: note = Description of Artificial Sequence: Synthetic peptide; note = XENP018107 vhCDR1
NYWMN

SEQ ID NO: 11818 - protein, 19 aa, synthetic construct
  source 1..19: note = Description of Artificial Sequence: Synthetic peptide; note = XENP018107 vhCDR2
EIRLKSNNYATHYAEPVKG

SEQ ID NO: 11819 - protein, 11 aa, synthetic construct
  source 1..11: note = Description of Artificial Sequence: Synthetic peptide; note = XENP018107 vhCDR3
YYGNYGGYFDV

SEQ ID NO: 11820 - protein, 214 aa, synthetic construct; identical to SEQ ID NO: 11550
  source 1..214: note = Description of Artificial Sequence: Synthetic polypeptide; note = XENP018107 1G6_H1.10_L1_IgG1_PVA_/S267K Light Chain

SEQ ID NO: 11821 - protein, 107 aa, synthetic construct; identical to SEQ ID NO: 6247
  source 1..107: note = Description of Artificial Sequence: Synthetic polypeptide; note = VL of XENP018107

SEQ ID NO: 11822 - protein, 11 aa, synthetic construct
  source 1..11: note = Description of Artificial Sequence: Synthetic peptide; note = XENP018107 vlCDR1
RASQSVSNDVA

SEQ ID NO: 11823 - protein, 7 aa, synthetic construct
  source 1..7: note = Description of Artificial Sequence: Synthetic peptide; note = XENP018107 vlCDR2
YASHRYT

SEQ ID NO: 11824 - protein, 9 aa, synthetic construct
  source 1..9: note = Description of Artificial Sequence: Synthetic peptide; note = XENP018107 vlCDR3
QQDYSSPRT

SEQ ID NO: 11825 - protein, 451 aa, synthetic construct
  source 1..451: note = Description of Artificial Sequence: Synthetic polypeptide; note = XENP018108 1G6_H1.11_L1_IgG1_PVA_/S267K Heavy Chain
EVQLVESGGGLVKPGGSLRLSCAASGFTFANYWMNWVRQAPGKGLEWVGEIRLKSNNYATHYAEPVKGRFTISRDDSKSTVYLQMNSLKTEDTAVYYCTRYYGNYGGYFDVWGAGTLVTVSSASTKGPSVFPLAPSSKSTSGGTAALGCLVKDYFPEPVTVSWNSGALTSGVHTFPAVLQSSGLYSLSSVVTVPSSSLGTQTYICNVNHKPSNTKVDKKVEPKSCDKTHTCPPCPAPPVAGPSVFLFPPKPKDTLMISRTPEVTCVVVDVKHEDPEVKFNWYVDGVEVHNAKTKPREEQYNSTYRVVSVLTVLHQDWLNGKEYKCKVSNKALPAPIEKTISKAKGQPREPQVYTLPPSREEMTKNQVSLTCLVKGFYPSDIAVEWESNGQPENNYKTTPPVLDSDGSFFLYSKLTVDKSRWQQGNVFSCSVMHEALHNHYTQKSLSLSPGK

SEQ ID NO: 11826 - protein, 122 aa, synthetic construct; identical to SEQ ID NO: 6453
  source 1..122: note = Description of Artificial Sequence: Synthetic polypeptide; note = VH of XENP018108

SEQ ID NO: 11827 - protein, 5 aa, synthetic construct
  source 1..5: note = Description of Artificial Sequence: Synthetic peptide; note = XENP018108 vhCDR1
NYWMN

SEQ ID NO: 11828 - protein, 19 aa, synthetic construct
  source 1..19: note = Description of Artificial Sequence: Synthetic peptide; note = XENP018108 vhCDR2
EIRLKSNNYATHYAEPVKG

SEQ ID NO: 11829 - protein, 11 aa, synthetic construct
  source 1..11: note = Description of Artificial Sequence: Synthetic peptide; note = XENP018108 vhCDR3
YYGNYGGYFDV

SEQ ID NO: 11830 - protein, 214 aa, synthetic construct; identical to SEQ ID NO: 11550
  source 1..214: note = Description of Artificial Sequence: Synthetic polypeptide; note = XENP018108 1G6_H1.11_L1_IgG1_PVA_/S267K Light Chain

SEQ ID NO: 11831 - protein, 107 aa, synthetic construct; identical to SEQ ID NO: 6247
  source 1..107: note = Description of Artificial Sequence: Synthetic polypeptide; note = VL of XENP018108

SEQ ID NO: 11832 - protein, 11 aa, synthetic construct
  source 1..11: note = Description of Artificial Sequence: Synthetic peptide; note = XENP018108 vlCDR1
RASQSVSNDVA

SEQ ID NO: 11833 - protein, 7 aa, synthetic construct
  source 1..7: note = Description of Artificial Sequence: Synthetic peptide; note = XENP018108 vlCDR2
YASHRYT

SEQ ID NO: 11834 - protein, 9 aa, synthetic construct
  source 1..9: note = Description of Artificial Sequence: Synthetic peptide; note = XENP018108 vlCDR3
QQDYSSPRT

SEQ ID NO: 11835 - protein, 451 aa, synthetic construct
  source 1..451: note = Description of Artificial Sequence: Synthetic polypeptide; note = XENP018109 1G6_H1.12_L1_IgG1_PVA_/S267K Heavy Chain
EVQLVESGGGLVKPGGSLRLSCAASGFTFQNYWMNWVRQAPGKGLEWVGEIRLKSNNYATHYAEPVKGRFTISRDDSKSTVYLQMNSLKTEDTAVYYCTRYYGNYGGYFDVWGAGTLVTVSSASTKGPSVFPLAPSSKSTSGGTAALGCLVKDYFPEPVTVSWNSGALTSGVHTFPAVLQSSGLYSLSSVVTVPSSSLGTQTYICNVNHKPSNTKVDKKVEPKSCDKTHTCPPCPAPPVAGPSVFLFPPKPKDTLMISRTPEVTCVVVDVKHEDPEVKFNWYVDGVEVHNAKTKPREEQYNSTYRVVSVLTVLHQDWLNGKEYKCKVSNKALPAPIEKTISKAKGQPREPQVYTLPPSREEMTKNQVSLTCLVKGFYPSDIAVEWESNGQPENNYKTTPPVLDSDGSFFLYSKLTVDKSRWQQGNVFSCSVMHEALHNHYTQKSLSLSPGK

SEQ ID NO: 11836 - protein, 122 aa, synthetic construct; identical to SEQ ID NO: 6462
  source 1..122: note = Description of Artificial Sequence: Synthetic polypeptide; note = VH of XENP018109

SEQ ID NO: 11837 - protein, 5 aa, synthetic construct
  source 1..5: note = Description of Artificial Sequence: Synthetic peptide; note = XENP018109 vhCDR1
NYWMN

SEQ ID NO: 11838 - protein, 19 aa, synthetic construct
  source 1..19: note = Description of Artificial Sequence: Synthetic peptide; note = XENP018109 vhCDR2
EIRLKSNNYATHYAEPVKG

SEQ ID NO: 11839 - protein, 11 aa, synthetic construct
  source 1..11: note = Description of Artificial Sequence: Synthetic peptide; note = XENP018109 vhCDR3
YYGNYGGYFDV

SEQ ID NO: 11840 - protein, 214 aa, synthetic construct; identical to SEQ ID NO: 11550
  source 1..214: note = Description of Artificial Sequence: Synthetic polypeptide; note = XENP018109 1G6_H1.12_L1_IgG1_PVA_/S267K Light Chain

SEQ ID NO: 11841 - protein, 107 aa, synthetic construct; identical to SEQ ID NO: 6247
  source 1..107: note = Description of Artificial Sequence: Synthetic polypeptide; note = VL of XENP018109

SEQ ID NO: 11842 - protein, 11 aa, synthetic construct
  source 1..11: note = Description of Artificial Sequence: Synthetic peptide; note = XENP018109 vlCDR1
RASQSVSNDVA

SEQ ID NO: 11843 - protein, 7 aa, synthetic construct
  source 1..7: note = Description of Artificial Sequence: Synthetic peptide; note = XENP018109 vlCDR2
YASHRYT

SEQ ID NO: 11844 - protein, 9 aa, synthetic construct
  source 1..9: note = Description of Artificial Sequence: Synthetic peptide; note = XENP018109 vlCDR3
QQDYSSPRT

SEQ ID NO: 11845 - protein, 451 aa, synthetic construct
  source 1..451: note = Description of Artificial Sequence: Synthetic polypeptide; note = XENP018110 1G6_H1.13_L1_IgG1_PVA_/S267K Heavy Chain
EVQLVESGGGLVKPGGSLRLSCAASGFTFGNYWMNWVRQAPGKGLEWVGEIRLKSNNYATHYAEPVKGRFTISRDDSKSTVYLQMNSLKTEDTAVYYCTRYYGNYGGYFDVWGAGTLVTVSSASTKGPSVFPLAPSSKSTSGGTAALGCLVKDYFPEPVTVSWNSGALTSGVHTFPAVLQSSGLYSLSSVVTVPSSSLGTQTYICNVNHKPSNTKVDKKVEPKSCDKTHTCPPCPAPPVAGPSVFLFPPKPKDTLMISRTPEVTCVVVDVKHEDPEVKFNWYVDGVEVHNAKTKPREEQYNSTYRVVSVLTVLHQDWLNGKEYKCKVSNKALPAPIEKTISKAKGQPREPQVYTLPPSREEMTKNQVSLTCLVKGFYPSDIAVEWESNGQPENNYKTTPPVLDSDGSFFLYSKLTVDKSRWQQGNVFSCSVMHEALHNHYTQKSLSLSPGK

SEQ ID NO: 11846 - protein, 122 aa, synthetic construct; identical to SEQ ID NO: 6471
  source 1..122: note = Description of Artificial Sequence: Synthetic polypeptide; note = VH of XENP018110

SEQ ID NO: 11847 - protein, 5 aa, synthetic construct
  source 1..5: note = Description of Artificial Sequence: Synthetic peptide; note = XENP018110 vhCDR1
NYWMN

SEQ ID NO: 11848 - protein, 19 aa, synthetic construct
  source 1..19: note = Description of Artificial Sequence: Synthetic peptide; note = XENP018110 vhCDR2
EIRLKSNNYATHYAEPVKG

SEQ ID NO: 11849 - protein, 11 aa, synthetic construct
  source 1..11: note = Description of Artificial Sequence: Synthetic peptide; note = XENP018110 vhCDR3
YYGNYGGYFDV

SEQ ID NO: 11850 - protein, 214 aa, synthetic construct; identical to SEQ ID NO: 11550
  source 1..214: note = Description of Artificial Sequence: Synthetic polypeptide; note = XENP018110 1G6_H1.13_L1_IgG1_PVA_/S267K Light Chain

SEQ ID NO: 11851 - protein, 107 aa, synthetic construct; identical to SEQ ID NO: 6247
  source 1..107: note = Description of Artificial Sequence: Synthetic polypeptide; note = VL of XENP018110

SEQ ID NO: 11852 - protein, 11 aa, synthetic construct
  source 1..11: note = Description of Artificial Sequence: Synthetic peptide; note = XENP018110 vlCDR1
RASQSVSNDVA

SEQ ID NO: 11853 - protein, 7 aa, synthetic construct
  source 1..7: note = Description of Artificial Sequence: Synthetic peptide; note = XENP018110 vlCDR2
YASHRYT

SEQ ID NO: 11854 - protein, 9 aa, synthetic construct
  source 1..9: note = Description of Artificial Sequence: Synthetic peptide; note = XENP018110 vlCDR3
QQDYSSPRT

SEQ ID NO: 11855 - protein, 451 aa, synthetic construct
  source 1..451: note = Description of Artificial Sequence: Synthetic polypeptide; note = XENP018111 1G6_H1.14_L1_IgG1_PVA_/S267K Heavy Chain
EVQLVESGGGLVKPGGSLRLSCAASGFTFVNYWMNWVRQAPGKGLEWVGEIRLKSNNYATHYAEPVKGRFTISRDDSKSTVYLQMNSLKTEDTAVYYCTRYYGNYGGYFDVWGAGTLVTVSSASTKGPSVFPLAPSSKSTSGGTAALGCLVKDYFPEPVTVSWNSGALTSGVHTFPAVLQSSGLYSLSSVVTVPSSSLGTQTYICNVNHKPSNTKVDKKVEPKSCDKTHTCPPCPAPPVAGPSVFLFPPKPKDTLMISRTPEVTCVVVDVKHEDPEVKFNWYVDGVEVHNAKTKPREEQYNSTYRVVSVLTVLHQDWLNGKEYKCKVSNKALPAPIEKTISKAKGQPREPQVYTLPPSREEMTKNQVSLTCLVKGFYPSDIAVEWESNGQPENNYKTTPPVLDSDGSFFLYSKLTVDKSRWQQGNVFSCSVMHEALHNHYTQKSLSLSPGK

SEQ ID NO: 11856 - protein, 122 aa, synthetic construct; identical to SEQ ID NO: 6480
  source 1..122: note = Description of Artificial Sequence: Synthetic polypeptide; note = VH of XENP018111

SEQ ID NO: 11857 - protein, 5 aa, synthetic construct
  source 1..5: note = Description of Artificial Sequence: Synthetic peptide; note = XENP018111 vhCDR1
NYWMN

SEQ ID NO: 11858 - protein, 19 aa, synthetic construct
  source 1..19: note = Description of Artificial Sequence: Synthetic peptide; note = XENP018111 vhCDR2
EIRLKSNNYATHYAEPVKG

SEQ ID NO: 11859 - protein, 11 aa, synthetic construct
  source 1..11: note = Description of Artificial Sequence: Synthetic peptide; note = XENP018111 vhCDR3
YYGNYGGYFDV

SEQ ID NO: 11860 - protein, 214 aa, synthetic construct; identical to SEQ ID NO: 11550
  source 1..214: note = Description of Artificial Sequence: Synthetic polypeptide; note = XENP018111 1G6_H1.14_L1_IgG1_PVA_/S267K Light Chain

SEQ ID NO: 11861 - protein, 107 aa, synthetic construct; identical to SEQ ID NO: 6247
  source 1..107: note = Description of Artificial Sequence: Synthetic polypeptide; note = VL of XENP018111

SEQ ID NO: 11862 - protein, 11 aa, synthetic construct
  source 1..11: note = Description of Artificial Sequence: Synthetic peptide; note = XENP018111 vlCDR1
RASQSVSNDVA

SEQ ID NO: 11863 - protein, 7 aa, synthetic construct
  source 1..7: note = Description of Artificial Sequence: Synthetic peptide; note = XENP018111 vlCDR2
YASHRYT

SEQ ID NO: 11864 - protein, 9 aa, synthetic construct
  source 1..9: note = Description of Artificial Sequence: Synthetic peptide; note = XENP018111 vlCDR3
QQDYSSPRT

SEQ ID NO: 11865 - protein, 451 aa, synthetic construct
  source 1..451: note = Description of Artificial Sequence: Synthetic polypeptide; note = XENP018112 1G6_H1.15_L1_IgG1_PVA_/S267K Heavy Chain
EVQLVESGGGLVKPGGSLRLSCAASGFTFHNYWMNWVRQAPGKGLEWVGEIRLKSNNYATHYAEPVKGRFTISRDDSKSTVYLQMNSLKTEDTAVYYCTRYYGNYGGYFDVWGAGTLVTVSSASTKGPSVFPLAPSSKSTSGGTAALGCLVKDYFPEPVTVSWNSGALTSGVHTFPAVLQSSGLYSLSSVVTVPSSSLGTQTYICNVNHKPSNTKVDKKVEPKSCDKTHTCPPCPAPPVAGPSVFLFPPKPKDTLMISRTPEVTCVVVDVKHEDPEVKFNWYVDGVEVHNAKTKPREEQYNSTYRVVSVLTVLHQDWLNGKEYKCKVSNKALPAPIEKTISKAKGQPREPQVYTLPPSREEMTKNQVSLTCLVKGFYPSDIAVEWESNGQPENNYKTTPPVLDSDGSFFLYSKLTVDKSRWQQGNVFSCSVMHEALHNHYTQKSLSLSPGK

SEQ ID NO: 11866 - protein, 122 aa, synthetic construct; identical to SEQ ID NO: 6489
  source 1..122: note = Description of Artificial Sequence: Synthetic polypeptide; note = VH of XENP018112

SEQ ID NO: 11867 - protein, 5 aa, synthetic construct
  source 1..5: note = Description of Artificial Sequence: Synthetic peptide; note = XENP018112 vhCDR1
NYWMN

SEQ ID NO: 11868 - protein, 19 aa, synthetic construct
  source 1..19: note = Description of Artificial Sequence: Synthetic peptide; note = XENP018112 vhCDR2
EIRLKSNNYATHYAEPVKG

SEQ ID NO: 11869 - protein, 11 aa, synthetic construct
  source 1..11: note = Description of Artificial Sequence: Synthetic peptide; note = XENP018112 vhCDR3
YYGNYGGYFDV

SEQ ID NO: 11870 - protein, 214 aa, synthetic construct; identical to SEQ ID NO: 11550
  source 1..214: note = Description of Artificial Sequence: Synthetic polypeptide; note = XENP018112 1G6_H1.15_L1_IgG1_PVA_/S267K Light Chain

SEQ ID NO: 11871 - protein, 107 aa, synthetic construct; identical to SEQ ID NO: 6247
  source 1..107: note = Description of Artificial Sequence: Synthetic polypeptide; note = VL of XENP018112

SEQ ID NO: 11872 - protein, 11 aa, synthetic construct
  source 1..11: note = Description of Artificial Sequence: Synthetic peptide; note = XENP018112 vlCDR1
RASQSVSNDVA

SEQ ID NO: 11873 - protein, 7 aa, synthetic construct
  source 1..7: note = Description of Artificial Sequence: Synthetic peptide; note = XENP018112 vlCDR2
YASHRYT

SEQ ID NO: 11874 - protein, 9 aa, synthetic construct
  source 1..9: note = Description of Artificial Sequence: Synthetic peptide; note = XENP018112 vlCDR3
QQDYSSPRT

SEQ ID NO: 11875 - protein, 451 aa, synthetic construct
  source 1..451: note = Description of Artificial Sequence: Synthetic polypeptide; note = XENP018113 1G6_H1.16_L1_IgG1_PVA_/S267K Heavy Chain
EVQLVESGGGLVKPGGSLRLSCAASGFTFDNYWMNWVRQAPGKGLEWVGEIRLKSNNYATHYAEPVKGRFTISRDDSKSTVYLQMNSLKTEDTAVYYCTRYYGNYGGYFDVWGAGTLVTVSSASTKGPSVFPLAPSSKSTSGGTAALGCLVKDYFPEPVTVSWNSGALTSGVHTFPAVLQSSGLYSLSSVVTVPSSSLGTQTYICNVNHKPSNTKVDKKVEPKSCDKTHTCPPCPAPPVAGPSVFLFPPKPKDTLMISRTPEVTCVVVDVKHEDPEVKFNWYVDGVEVHNAKTKPREEQYNSTYRVVSVLTVLHQDWLNGKEYKCKVSNKALPAPIEKTISKAKGQPREPQVYTLPPSREEMTKNQVSLTCLVKGFYPSDIAVEWESNGQPENNYKTTPPVLDSDGSFFLYSKLTVDKSRWQQGNVFSCSVMHEALHNHYTQKSLSLSPGK

SEQ ID NO: 11876 - protein, 122 aa, synthetic construct; identical to SEQ ID NO: 6498
  source 1..122: note = Description of Artificial Sequence: Synthetic polypeptide; note = VH of XENP018113

SEQ ID NO: 11877 - protein, 5 aa, synthetic construct
  source 1..5: note = Description of Artificial Sequence: Synthetic peptide; note = XENP018113 vhCDR1
NYWMN

SEQ ID NO: 11878 - protein, 19 aa, synthetic construct
  source 1..19: note = Description of Artificial Sequence: Synthetic peptide; note = XENP018113 vhCDR2
EIRLKSNNYATHYAEPVKG

SEQ ID NO: 11879 - protein, 11 aa, synthetic construct
  source 1..11: note = Description of Artificial Sequence: Synthetic peptide; note = XENP018113 vhCDR3
YYGNYGGYFDV

SEQ ID NO: 11880 - protein, 214 aa, synthetic construct; identical to SEQ ID NO: 11550
  source 1..214: note = Description of Artificial Sequence: Synthetic polypeptide; note = XENP018113 1G6_H1.16_L1_IgG1_PVA_/S267K Light Chain

SEQ ID NO: 11881 - protein, 107 aa, synthetic construct; identical to SEQ ID NO: 6247
  source 1..107: note = Description of Artificial Sequence: Synthetic polypeptide; note = VL of XENP018113

SEQ ID NO: 11882 - protein, 11 aa, synthetic construct
  source 1..11: note = Description of Artificial Sequence: Synthetic peptide; note = XENP018113 vlCDR1
RASQSVSNDVA

SEQ ID NO: 11883 - protein, 7 aa, synthetic construct
  source 1..7: note = Description of Artificial Sequence: Synthetic peptide; note = XENP018113 vlCDR2
YASHRYT

SEQ ID NO: 11884 - protein, 9 aa, synthetic construct
  source 1..9: note = Description of Artificial Sequence: Synthetic peptide; note = XENP018113 vlCDR3
QQDYSSPRT

SEQ ID NO: 11885 - protein, 451 aa, synthetic construct
  source 1..451: note = Description of Artificial Sequence: Synthetic polypeptide; note = XENP018114 1G6_H1.17_L1_IgG1_PVA_/S267K Heavy Chain
EVQLVESGGGLVKPGGSLRLSCAASGFTFKNYWMNWVRQAPGKGLEWVGEIRLKSNNYATHYAEPVKGRFTISRDDSKSTVYLQMNSLKTEDTAVYYCTRYYGNYGGYFDVWGAGTLVTVSSASTKGPSVFPLAPSSKSTSGGTAALGCLVKDYFPEPVTVSWNSGALTSGVHTFPAVLQSSGLYSLSSVVTVPSSSLGTQTYICNVNHKPSNTKVDKKVEPKSCDKTHTCPPCPAPPVAGPSVFLFPPKPKDTLMISRTPEVTCVVVDVKHEDPEVKFNWYVDGVEVHNAKTKPREEQYNSTYRVVSVLTVLHQDWLNGKEYKCKVSNKALPAPIEKTISKAKGQPREPQVYTLPPSREEMTKNQVSLTCLVKGFYPSDIAVEWESNGQPENNYKTTPPVLDSDGSFFLYSKLTVDKSRWQQGNVFSCSVMHEALHNHYTQKSLSLSPGK

SEQ ID NO: 11886 - protein, 122 aa, synthetic construct; identical to SEQ ID NO: 6507
  source 1..122: note = Description of Artificial Sequence: Synthetic polypeptide; note = VH of XENP018114

SEQ ID NO: 11887 - protein, 5 aa, synthetic construct
  source 1..5: note = Description of Artificial Sequence: Synthetic peptide; note = XENP018114 vhCDR1
NYWMN

SEQ ID NO: 11888 - protein, 19 aa, synthetic construct
  source 1..19: note = Description of Artificial Sequence: Synthetic peptide; note = XENP018114 vhCDR2
EIRLKSNNYATHYAEPVKG

SEQ ID NO: 11889 - protein, 11 aa, synthetic construct
  source 1..11: note = Description of Artificial Sequence: Synthetic peptide; note = XENP018114 vhCDR3
YYGNYGGYFDV

SEQ ID NO: 11890 - protein, 214 aa, synthetic construct; identical to SEQ ID NO: 11550
  source 1..214: note = Description of Artificial Sequence: Synthetic polypeptide; note = XENP018114 1G6_H1.17_L1_IgG1_PVA_/S267K Light Chain

SEQ ID NO: 11891 - protein, 107 aa, synthetic construct; identical to SEQ ID NO: 6247
  source 1..107: note = Description of Artificial Sequence: Synthetic polypeptide; note = VL of XENP018114

SEQ ID NO: 11892 - protein, 11 aa, synthetic construct
  source 1..11: note = Description of Artificial Sequence: Synthetic peptide; note = XENP018114 vlCDR1
RASQSVSNDVA

SEQ ID NO: 11893 - protein, 7 aa, synthetic construct
  source 1..7: note = Description of Artificial Sequence: Synthetic peptide; note = XENP018114 vlCDR2
YASHRYT

SEQ ID NO: 11894 - protein, 9 aa, synthetic construct
  source 1..9: note = Description of Artificial Sequence: Synthetic peptide; note = XENP018114 vlCDR3
QQDYSSPRT

SEQ ID NO: 11895 - protein, 451 aa, synthetic construct
  source 1..451: note = Description of Artificial Sequence: Synthetic polypeptide; note = XENP018115 1G6_H1.18_L1_IgG1_PVA_/S267K Heavy Chain
EVQLVESGGGLVKPGGSLRLSCAASGFTFYNYWMNWVRQAPGKGLEWVGEIRLKSNNYATHYAEPVKGRFTISRDDSKSTVYLQMNSLKTEDTAVYYCTRYYGNYGGYFDVWGAGTLVTVSSASTKGPSVFPLAPSSKSTSGGTAALGCLVKDYFPEPVTVSWNSGALTSGVHTFPAVLQSSGLYSLSSVVTVPSSSLGTQTYICNVNHKPSNTKVDKKVEPKSCDKTHTCPPCPAPPVAGPSVFLFPPKPKDTLMISRTPEVTCVVVDVKHEDPEVKFNWYVDGVEVHNAKTKPREEQYNSTYRVVSVLTVLHQDWLNGKEYKCKVSNKALPAPIEKTISKAKGQPREPQVYTLPPSREEMTKNQVSLTCLVKGFYPSDIAVEWESNGQPENNYKTTPPVLDSDGSFFLYSKLTVDKSRWQQGNVFSCSVMHEALHNHYTQKSLSLSPGK

SEQ ID NO: 11896 - protein, 122 aa, synthetic construct; identical to SEQ ID NO: 6516
  source 1..122: note = Description of Artificial Sequence: Synthetic polypeptide; note = VH of XENP018115

SEQ ID NO: 11897 - protein, 5 aa, synthetic construct
  source 1..5: note = Description of Artificial Sequence: Synthetic peptide; note = XENP018115 vhCDR1
NYWMN

SEQ ID NO: 11898 - protein, 19 aa, synthetic construct
  source 1..19: note = Description of Artificial Sequence: Synthetic peptide; note = XENP018115 vhCDR2
EIRLKSNNYATHYAEPVKG

SEQ ID NO: 11899 - protein, 11 aa, synthetic construct
  source 1..11: note = Description of Artificial Sequence: Synthetic peptide; note = XENP018115 vhCDR3
YYGNYGGYFDV

SEQ ID NO: 11900 - protein, 214 aa, synthetic construct; identical to SEQ ID NO: 11550
  source 1..214: note = Description of Artificial Sequence: Synthetic polypeptide; note = XENP018115 1G6_H1.18_L1_IgG1_PVA_/S267K Light Chain

SEQ ID NO: 11901 - protein, 107 aa, synthetic construct; identical to SEQ ID NO: 6247
  source 1..107: note = Description of Artificial Sequence: Synthetic polypeptide; note = VL of XENP018115

SEQ ID NO: 11902 - protein, 11 aa, synthetic construct
  source 1..11: note = Description of Artificial Sequence: Synthetic peptide; note = XENP018115 vlCDR1
RASQSVSNDVA

SEQ ID NO: 11903 - protein, 7 aa, synthetic construct
  source 1..7: note = Description of Artificial Sequence: Synthetic peptide; note = XENP018115 vlCDR2
YASHRYT

SEQ ID NO: 11904 - protein, 9 aa, synthetic construct
  source 1..9: note = Description of Artificial Sequence: Synthetic peptide; note = XENP018115 vlCDR3
QQDYSSPRT

SEQ ID NO: 11905 - protein, 451 aa, synthetic construct
  source 1..451: note = Description of Artificial Sequence: Synthetic polypeptide; note = XENP018116 1G6_H1.19_L1_IgG1_PVA_/S267K Heavy Chain
EVQLVESGGGLVKPGGSLRLSCAASGFTFSDYWMNWVRQAPGKGLEWVGEIRLKSNNYATHYAEPVKGRFTISRDDSKSTVYLQMNSLKTEDTAVYYCTRYYGNYGGYFDVWGAGTLVTVSSASTKGPSVFPLAPSSKSTSGGTAALGCLVKDYFPEPVTVSWNSGALTSGVHTFPAVLQSSGLYSLSSVVTVPSSSLGTQTYICNVNHKPSNTKVDKKVEPKSCDKTHTCPPCPAPPVAGPSVFLFPPKPKDTLMISRTPEVTCVVVDVKHEDPEVKFNWYVDGVEVHNAKTKPREEQYNSTYRVVSVLTVLHQDWLNGKEYKCKVSNKALPAPIEKTISKAKGQPREPQVYTLPPSREEMTKNQVSLTCLVKGFYPSDIAVEWESNGQPENNYKTTPPVLDSDGSFFLYSKLTVDKSRWQQGNVFSCSVMHEALHNHYTQKSLSLSPGK

SEQ ID NO: 11906 - protein, 122 aa, synthetic construct; identical to SEQ ID NO: 6525
  source 1..122: note = Description of Artificial Sequence: Synthetic polypeptide; note = VH of XENP018116

SEQ ID NO: 11907 - protein, 5 aa, synthetic construct
  source 1..5: note = Description of Artificial Sequence: Synthetic peptide; note = XENP018116 vhCDR1
DYWMN

SEQ ID NO: 11908 - protein, 19 aa, synthetic construct
  source 1..19: note = Description of Artificial Sequence: Synthetic peptide; note = XENP018116 vhCDR2
EIRLKSNNYATHYAEPVKG

SEQ ID NO: 11909 - protein, 11 aa, synthetic construct
  source 1..11: note = Description of Artificial Sequence: Synthetic peptide; note = XENP018116 vhCDR3
YYGNYGGYFDV

SEQ ID NO: 11910 - protein, 214 aa, synthetic construct; identical to SEQ ID NO: 11550
  source 1..214: note = Description of Artificial Sequence: Synthetic polypeptide; note = XENP018116 1G6_H1.19_L1_IgG1_PVA_/S267K Light Chain

SEQ ID NO: 11911 - protein, 107 aa, synthetic construct; identical to SEQ ID NO: 6247
  source 1..107: note = Description of Artificial Sequence: Synthetic polypeptide; note = VL of XENP018116

SEQ ID NO: 11912 - protein, 11 aa, synthetic construct
  source 1..11: note = Description of Artificial Sequence: Synthetic peptide; note = XENP018116 vlCDR1
RASQSVSNDVA

SEQ ID NO: 11913 - protein, 7 aa, synthetic construct
  source 1..7: note = Description of Artificial Sequence: Synthetic peptide; note = XENP018116 vlCDR2
YASHRYT

SEQ ID NO: 11914 - protein, 9 aa, synthetic construct
  source 1..9: note = Description of Artificial Sequence: Synthetic peptide; note = XENP018116 vlCDR3
QQDYSSPRT

SEQ ID NO: 11915 - protein, 451 aa, synthetic construct
  source 1..451: note = Description of Artificial Sequence: Synthetic polypeptide; note = XENP018117 1G6_H1.20_L1_IgG1_PVA_/S267K Heavy Chain
EVQLVESGGGLVKPGGSLRLSCAASGFTFSHYWMNWVRQAPGKGLEWVGEIRLKSNNYATHYAEPVKGRFTISRDDSKSTVYLQMNSLKTEDTAVYYCTRYYGNYGGYFDVWGAGTLVTVSSASTKGPSVFPLAPSSKSTSGGTAALGCLVKDYFPEPVTVSWNSGALTSGVHTFPAVLQSSGLYSLSSVVTVPSSSLGTQTYICNVNHKPSNTKVDKKVEPKSCDKTHTCPPCPAPPVAGPSVFLFPPKPKDTLMISRTPEVTCVVVDVKHEDPEVKFNWYVDGVEVHNAKTKPREEQYNSTYRVVSVLTVLHQDWLNGKEYKCKVSNKALPAPIEKTISKAKGQPREPQVYTLPPSREEMTKNQVSLTCLVKGFYPSDIAVEWESNGQPENNYKTTPPVLDSDGSFFLYSKLTVDKSRWQQGNVFSCSVMHEALHNHYTQKSLSLSPGK

SEQ ID NO: 11916 - protein, 122 aa, synthetic construct; identical to SEQ ID NO: 6534
  source 1..122: note = Description of Artificial Sequence: Synthetic polypeptide; note = VH of XENP018117

SEQ ID NO: 11917 - protein, 5 aa, synthetic construct
  source 1..5: note = Description of Artificial Sequence: Synthetic peptide; note = XENP018117 vhCDR1
HYWMN

SEQ ID NO: 11918 - protein, 19 aa, synthetic construct
  source 1..19: note = Description of Artificial Sequence: Synthetic peptide; note = XENP018117 vhCDR2
EIRLKSNNYATHYAEPVKG

SEQ ID NO: 11919 - protein, 11 aa, synthetic construct
  source 1..11: note = Description of Artificial Sequence: Synthetic peptide; note = XENP018117 vhCDR3
YYGNYGGYFDV

SEQ ID NO: 11920 - protein, 214 aa, synthetic construct; identical to SEQ ID NO: 11550
  source 1..214: note = Description of Artificial Sequence: Synthetic polypeptide; note = XENP018117 1G6_H1.20_L1_IgG1_PVA_/S267K Light Chain

SEQ ID NO: 11921 - protein, 107 aa, synthetic construct; identical to SEQ ID NO: 6247
  source 1..107: note = Description of Artificial Sequence: Synthetic polypeptide; note = VL of XENP018117

SEQ ID NO: 11922 - protein, 11 aa, synthetic construct
  source 1..11: note = Description of Artificial Sequence: Synthetic peptide; note = XENP018117 vlCDR1
RASQSVSNDVA

SEQ ID NO: 11923 - protein, 7 aa, synthetic construct
  source 1..7: note = Description of Artificial Sequence: Synthetic peptide; note = XENP018117 vlCDR2
YASHRYT

SEQ ID NO: 11924 - protein, 9 aa, synthetic construct
  source 1..9: note = Description of Artificial Sequence: Synthetic peptide; note = XENP018117 vlCDR3
QQDYSSPRT

SEQ ID NO: 11925 - protein, 451 aa, synthetic construct
  source 1..451: note = Description of Artificial Sequence: Synthetic polypeptide; note = XENP018118 1G6_H1.21_L1_IgG1_PVA_/S267K Heavy Chain
EVQLVESGGGLVKPGGSLRLSCAASGFTFSEYWMNWVRQAPGKGLEWVGEIRLKSNNYATHYAEPVKGRFTISRDDSKSTVYLQMNSLKTEDTAVYYCTRYYGNYGGYFDVWGAGTLVTVSSASTKGPSVFPLAPSSKSTSGGTAALGCLVKDYFPEPVTVSWNSGALTSGVHTFPAVLQSSGLYSLSSVVTVPSSSLGTQTYICNVNHKPSNTKVDKKVEPKSCDKTHTCPPCPAPPVAGPSVFLFPPKPKDTLMISRTPEVTCVVVDVKHEDPEVKFNWYVDGVEVHNAKTKPREEQYNSTYRVVSVLTVLHQDWLNGKEYKCKVSNKALPAPIEKTISKAKGQPREPQVYTLPPSREEMTKNQVSLTCLVKGFYPSDIAVEWESNGQPENNYKTTPPVLDSDGSFFLYSKLTVDKSRWQQGNVFSCSVMHEALHNHYTQKSLSLSPGK

SEQ ID NO: 11926 - protein, 122 aa, synthetic construct; identical to SEQ ID NO: 6543
  source 1..122: note = Description of Artificial Sequence: Synthetic polypeptide; note = VH of XENP018118

SEQ ID NO: 11927 - protein, 5 aa, synthetic construct
  source 1..5: note = Description of Artificial Sequence: Synthetic peptide; note = XENP018118 vhCDR1
EYWMN

SEQ ID NO: 11928 - protein, 19 aa, synthetic construct
  source 1..19: note = Description of Artificial Sequence: Synthetic peptide; note = XENP018118 vhCDR2
EIRLKSNNYATHYAEPVKG

SEQ ID NO: 11929 - protein, 11 aa, synthetic construct
  source 1..11: note = Description of Artificial Sequence: Synthetic peptide; note = XENP018118 vhCDR3
YYGNYGGYFDV

SEQ ID NO: 11930 - protein, 214 aa, synthetic construct; identical to SEQ ID NO: 11550
  source 1..214: note = Description of Artificial Sequence: Synthetic polypeptide; note = XENP018118 1G6_H1.21_L1_IgG1_PVA_/S267K Light Chain

SEQ ID NO: 11931 - protein, 107 aa, synthetic construct; identical to SEQ ID NO: 6247
  source 1..107: note = Description of Artificial Sequence: Synthetic polypeptide; note = VL of XENP018118

SEQ ID NO: 11932 - protein, 11 aa, synthetic construct
  source 1..11: note = Description of Artificial Sequence: Synthetic peptide; note = XENP018118 vlCDR1
RASQSVSNDVA

SEQ ID NO: 11933 - protein, 7 aa, synthetic construct
  source 1..7: note = Description of Artificial Sequence: Synthetic peptide; note = XENP018118 vlCDR2
YASHRYT

SEQ ID NO: 11934 - protein, 9 aa, synthetic construct
  source 1..9: note = Description of Artificial Sequence: Synthetic peptide; note = XENP018118 vlCDR3
QQDYSSPRT

SEQ ID NO: 11935 - protein, 451 aa, synthetic construct
  source 1..451: note = Description of Artificial Sequence: Synthetic polypeptide; note = XENP018119 1G6_H1.22_L1_IgG1_PVA_/S267K Heavy Chain
EVQLVESGGGLVKPGGSLRLSCAASGFTFSSYWMNWVRQAPGKGLEWVGEIRLKSNNYATHYAEPVKGRFTISRDDSKSTVYLQMNSLKTEDTAVYYCTRYYGNYGGYFDVWGAGTLVTVSSASTKGPSVFPLAPSSKSTSGGTAALGCLVKDYFPEPVTVSWNSGALTSGVHTFPAVLQSSGLYSLSSVVTVPSSSLGTQTYICNVNHKPSNTKVDKKVEPKSCDKTHTCPPCPAPPVAGPSVFLFPPKPKDTLMISRTPEVTCVVVDVKHEDPEVKFNWYVDGVEVHNAKTKPREEQYNSTYRVVSVLTVLHQDWLNGKEYKCKVSNKALPAPIEKTISKAKGQPREPQVYTLPPSREEMTKNQVSLTCLVKGFYPSDIAVEWESNGQPENNYKTTPPVLDSDGSFFLYSKLTVDKSRWQQGNVFSCSVMHEALHNHYTQKSLSLSPGK

SEQ ID NO: 11936 - protein, 122 aa, synthetic construct; identical to SEQ ID NO: 6552
  source 1..122: note = Description of Artificial Sequence: Synthetic polypeptide; note = VH of XENP018119

SEQ ID NO: 11937 - protein, 5 aa, synthetic construct
  source 1..5: note = Description of Artificial Sequence: Synthetic peptide; note = XENP018119 vhCDR1
SYWMN

SEQ ID NO: 11938 - protein, 19 aa, synthetic construct
  source 1..19: note = Description of Artificial Sequence: Synthetic peptide; note = XENP018119 vhCDR2
EIRLKSNNYATHYAEPVKG

SEQ ID NO: 11939 - protein, 11 aa, synthetic construct
  source 1..11: note = Description of Artificial Sequence: Synthetic peptide; note = XENP018119 vhCDR3
YYGNYGGYFDV

SEQ ID NO: 11940 - protein, 214 aa, synthetic construct; identical to SEQ ID NO: 11550
  source 1..214: note = Description of Artificial Sequence: Synthetic polypeptide; note = XENP018119 1G6_H1.22_L1_IgG1_PVA_/S267K Light Chain

SEQ ID NO: 11941 - protein, 107 aa, synthetic construct; identical to SEQ ID NO: 6247
  source 1..107: note = Description of Artificial Sequence: Synthetic polypeptide; note = VL of XENP018119

SEQ ID NO: 11942 - protein, 11 aa, synthetic construct
  source 1..11: note = Description of Artificial Sequence: Synthetic peptide; note = XENP018119 vlCDR1
RASQSVSNDVA

SEQ ID NO: 11943 - protein, 7 aa, synthetic construct
  source 1..7: note = Description of Artificial Sequence: Synthetic peptide; note = XENP018119 vlCDR2
YASHRYT

SEQ ID NO: 11944 - protein, 9 aa, synthetic construct
  source 1..9: note = Description of Artificial Sequence: Synthetic peptide; note = XENP018119 vlCDR3
QQDYSSPRT

SEQ ID NO: 11945 - protein, 451 aa, synthetic construct
  source 1..451: note = Description of Artificial Sequence: Synthetic polypeptide; note = XENP018120 1G6_H1.23_L1_IgG1_PVA_/S267K Heavy Chain
EVQLVESGGGLVKPGGSLRLSCAASGFTFSRYWMNWVRQAPGKGLEWVGEIRLKSNNYATHYAEPVKGRFTISRDDSKSTVYLQMNSLKTEDTAVYYCTRYYGNYGGYFDVWGAGTLVTVSSASTKGPSVFPLAPSSKSTSGGTAALGCLVKDYFPEPVTVSWNSGALTSGVHTFPAVLQSSGLYSLSSVVTVPSSSLGTQTYICNVNHKPSNTKVDKKVEPKSCDKTHTCPPCPAPPVAGPSVFLFPPKPKDTLMISRTPEVTCVVVDVKHEDPEVKFNWYVDGVEVHNAKTKPREEQYNSTYRVVSVLTVLHQDWLNGKEYKCKVSNKALPAPIEKTISKAKGQPREPQVYTLPPSREEMTKNQVSLTCLVKGFYPSDIAVEWESNGQPENNYKTTPPVLDSDGSFFLYSKLTVDKSRWQQGNVFSCSVMHEALHNHYTQKSLSLSPGK

SEQ ID NO: 11946 - protein, 122 aa, synthetic construct; identical to SEQ ID NO: 6561
  source 1..122: note = Description of Artificial Sequence: Synthetic polypeptide; note = VH of XENP018120

SEQ ID NO: 11947 - protein, 5 aa, synthetic construct
  source 1..5: note = Description of Artificial Sequence: Synthetic peptide; note = XENP018120 vhCDR1
RYWMN

SEQ ID NO: 11948 - protein, 19 aa, synthetic construct
  source 1..19: note = Description of Artificial Sequence: Synthetic peptide; note = XENP018120 vhCDR2
EIRLKSNNYATHYAEPVKG

SEQ ID NO: 11949 - protein, 11 aa, synthetic construct
  source 1..11: note = Description of Artificial Sequence: Synthetic peptide; note = XENP018120 vhCDR3
YYGNYGGYFDV

SEQ ID NO: 11950 - protein, 214 aa, synthetic construct; identical to SEQ ID NO: 11550
  source 1..214: note = Description of Artificial Sequence: Synthetic polypeptide; note = XENP018120 1G6_H1.23_L1_IgG1_PVA_/S267K Light Chain

SEQ ID NO: 11951 - protein, 107 aa, synthetic construct; identical to SEQ ID NO: 6247
  source 1..107: note = Description of Artificial Sequence: Synthetic polypeptide; note = VL of XENP018120

SEQ ID NO: 11952 - protein, 11 aa, synthetic construct
  source 1..11: note = Description of Artificial Sequence: Synthetic peptide; note = XENP018120 vlCDR1
RASQSVSNDVA

SEQ ID NO: 11953 - protein, 7 aa, synthetic construct
  source 1..7: note = Description of Artificial Sequence: Synthetic peptide; note = XENP018120 vlCDR2
YASHRYT

SEQ ID NO: 11954 - protein, 9 aa, synthetic construct
  source 1..9: note = Description of Artificial Sequence: Synthetic peptide; note = XENP018120 vlCDR3
QQDYSSPRT

SEQ ID NO: 11955 - protein, 451 aa, synthetic construct
  source 1..451: note = Description of Artificial Sequence: Synthetic polypeptide; note = XENP018121 1G6_H1.24_L1_IgG1_PVA_/S267K Heavy Chain
EVQLVESGGGLVKPGGSLRLSCAASGFTFSLYWMNWVRQAPGKGLEWVGEIRLKSNNYATHYAEPVKGRFTISRDDSKSTVYLQMNSLKTEDTAVYYCTRYYGNYGGYFDVWGAGTLVTVSSASTKGPSVFPLAPSSKSTSGGTAALGCLVKDYFPEPVTVSWNSGALTSGVHTFPAVLQSSGLYSLSSVVTVPSSSLGTQTYICNVNHKPSNTKVDKKVEPKSCDKTHTCPPCPAPPVAGPSVFLFPPKPKDTLMISRTPEVTCVVVDVKHEDPEVKFNWYVDGVEVHNAKTKPREEQYNSTYRVVSVLTVLHQDWLNGKEYKCKVSNKALPAPIEKTISKAKGQPREPQVYTLPPSREEMTKNQVSLTCLVKGFYPSDIAVEWESNGQPENNYKTTPPVLDSDGSFFLYSKLTVDKSRWQQGNVFSCSVMHEALHNHYTQKSLSLSPGK

SEQ ID NO: 11956 - protein, 122 aa, synthetic construct; identical to SEQ ID NO: 6570
  source 1..122: note = Description of Artificial Sequence: Synthetic polypeptide; note = VH of XENP018121

SEQ ID NO: 11957 - protein, 5 aa, synthetic construct
  source 1..5: note = Description of Artificial Sequence: Synthetic peptide; note = XENP018121 vhCDR1
LYWMN

SEQ ID NO: 11958 - protein, 19 aa, synthetic construct
  source 1..19: note = Description of Artificial Sequence: Synthetic peptide; note = XENP018121 vhCDR2
EIRLKSNNYATHYAEPVKG

SEQ ID NO: 11959 - protein, 11 aa, synthetic construct
  source 1..11: note = Description of Artificial Sequence: Synthetic peptide; note = XENP018121 vhCDR3
YYGNYGGYFDV

SEQ ID NO: 11960 - protein, 214 aa, synthetic construct; identical to SEQ ID NO: 11550
  source 1..214: note = Description of Artificial Sequence: Synthetic polypeptide; note = XENP018121 1G6_H1.24_L1_IgG1_PVA_/S267K Light Chain

SEQ ID NO: 11961 - protein, 107 aa, synthetic construct; identical to SEQ ID NO: 6247
  source 1..107: note = Description of Artificial Sequence: Synthetic polypeptide; note = VL of XENP018121

SEQ ID NO: 11962 - protein, 11 aa, synthetic construct
  source 1..11: note = Description of Artificial Sequence: Synthetic peptide; note = XENP018121 vlCDR1
RASQSVSNDVA

SEQ ID NO: 11963 - protein, 7 aa, synthetic construct
  source 1..7: note = Description of Artificial Sequence: Synthetic peptide; note = XENP018121 vlCDR2
YASHRYT

SEQ ID NO: 11964 - protein, 9 aa, synthetic construct
  source 1..9: note = Description of Artificial Sequence: Synthetic peptide; note = XENP018121 vlCDR3
QQDYSSPRT

SEQ ID NO: 11965 - protein, 451 aa, synthetic construct
  source 1..451: note = Description of Artificial Sequence: Synthetic polypeptide; note = XENP018122 1G6_H1.25_L1_IgG1_PVA_/S267K Heavy Chain
EVQLVESGGGLVKPGGSLRLSCAASGFTFSTYWMNWVRQAPGKGLEWVGEIRLKSNNYATHYAEPVKGRFTISRDDSKSTVYLQMNSLKTEDTAVYYCTRYYGNYGGYFDVWGAGTLVTVSSASTKGPSVFPLAPSSKSTSGGTAALGCLVKDYFPEPVTVSWNSGALTSGVHTFPAVLQSSGLYSLSSVVTVPSSSLGTQTYICNVNHKPSNTKVDKKVEPKSCDKTHTCPPCPAPPVAGPSVFLFPPKPKDTLMISRTPEVTCVVVDVKHEDPEVKFNWYVDGVEVHNAKTKPREEQYNSTYRVVSVLTVLHQDWLNGKEYKCKVSNKALPAPIEKTISKAKGQPREPQVYTLPPSREEMTKNQVSLTCLVKGFYPSDIAVEWESNGQPENNYKTTPPVLDSDGSFFLYSKLTVDKSRWQQGNVFSCSVMHEALHNHYTQKSLSLSPGK

SEQ ID NO: 11966 - protein, 122 aa, synthetic construct; identical to SEQ ID NO: 6579
  source 1..122: note = Description of Artificial Sequence: Synthetic polypeptide; note = VH of XENP018122

SEQ ID NO: 11967 - protein, 5 aa, synthetic construct
  source 1..5: note = Description of Artificial Sequence: Synthetic peptide; note = XENP018122 vhCDR1
TYWMN

SEQ ID NO: 11968 - protein, 19 aa, synthetic construct
  source 1..19: note = Description of Artificial Sequence: Synthetic peptide; note = XENP018122 vhCDR2
EIRLKSNNYATHYAEPVKG

SEQ ID NO: 11969 - protein, 11 aa, synthetic construct
  source 1..11: note = Description of Artificial Sequence: Synthetic peptide; note = XENP018122 vhCDR3
YYGNYGGYFDV

SEQ ID NO: 11970 - protein, 214 aa, synthetic construct; identical to SEQ ID NO: 11550
  source 1..214: note = Description of Artificial Sequence: Synthetic polypeptide; note = XENP018122 1G6_H1.25_L1_IgG1_PVA_/S267K Light Chain

SEQ ID NO: 11971 - protein, 107 aa, synthetic construct; identical to SEQ ID NO: 6247
  source 1..107: note = Description of Artificial Sequence: Synthetic polypeptide; note = VL of XENP018122

SEQ ID NO: 11972 - protein, 11 aa, synthetic construct
  source 1..11: note = Description of Artificial Sequence: Synthetic peptide; note = XENP018122 vlCDR1
RASQSVSNDVA

SEQ ID NO: 11973 - protein, 7 aa, synthetic construct
  source 1..7: note = Description of Artificial Sequence: Synthetic peptide; note = XENP018122 vlCDR2
YASHRYT

SEQ ID NO: 11974 - protein, 9 aa, synthetic construct
  source 1..9: note = Description of Artificial Sequence: Synthetic peptide; note = XENP018122 vlCDR3
QQDYSSPRT

SEQ ID NO: 11975 - protein, 451 aa, synthetic construct
  source 1..451: note = Description of Artificial Sequence: Synthetic polypeptide; note = XENP018123 1G6_H1.26_L1_IgG1_PVA_/S267K Heavy Chain
EVQLVESGGGLVKPGGSLRLSCAASGFTFSGYWMNWVRQAPGKGLEWVGEIRLKSNNYATHYAEPVKGRFTISRDDSKSTVYLQMNSLKTEDTAVYYCTRYYGNYGGYFDVWGAGTLVTVSSASTKGPSVFPLAPSSKSTSGGTAALGCLVKDYFPEPVTVSWNSGALTSGVHTFPAVLQSSGLYSLSSVVTVPSSSLGTQTYICNVNHKPSNTKVDKKVEPKSCDKTHTCPPCPAPPVAGPSVFLFPPKPKDTLMISRTPEVTCVVVDVKHEDPEVKFNWYVDGVEVHNAKTKPREEQYNSTYRVVSVLTVLHQDWLNGKEYKCKVSNKALPAPIEKTISKAKGQPREPQVYTLPPSREEMTKNQVSLTCLVKGFYPSDIAVEWESNGQPENNYKTTPPVLDSDGSFFLYSKLTVDKSRWQQGNVFSCSVMHEALHNHYTQKSLSLSPGK

SEQ ID NO: 11976 - protein, 122 aa, synthetic construct; identical to SEQ ID NO: 6588
  source 1..122: note = Description of Artificial Sequence: Synthetic polypeptide; note = VH of XENP018123

SEQ ID NO: 11977 - protein, 5 aa, synthetic construct
  source 1..5: note = Description of Artificial Sequence: Synthetic peptide; note = XENP018123 vhCDR1
GYWMN

SEQ ID NO: 11978 - protein, 19 aa, synthetic construct
  source 1..19: note = Description of Artificial Sequence: Synthetic peptide; note = XENP018123 vhCDR2
EIRLKSNNYATHYAEPVKG

SEQ ID NO: 11979 - protein, 11 aa, synthetic construct
  source 1..11: note = Description of Artificial Sequence: Synthetic peptide; note = XENP018123 vhCDR3
YYGNYGGYFDV

SEQ ID NO: 11980 - protein, 214 aa, synthetic construct; identical to SEQ ID NO: 11550
  source 1..214: note = Description of Artificial Sequence: Synthetic polypeptide; note = XENP018123 1G6_H1.26_L1_IgG1_PVA_/S267K Light Chain

SEQ ID NO: 11981 - protein, 107 aa, synthetic construct; identical to SEQ ID NO: 6247
  source 1..107: note = Description of Artificial Sequence: Synthetic polypeptide; note = VL of XENP018123

SEQ ID NO: 11982 - protein, 11 aa, synthetic construct
  source 1..11: note = Description of Artificial Sequence: Synthetic peptide; note = XENP018123 vlCDR1
RASQSVSNDVA

SEQ ID NO: 11983 - protein, 7 aa, synthetic construct
  source 1..7: note = Description of Artificial Sequence: Synthetic peptide; note = XENP018123 vlCDR2
YASHRYT

SEQ ID NO: 11984 - protein, 9 aa, synthetic construct
  source 1..9: note = Description of Artificial Sequence: Synthetic peptide; note = XENP018123 vlCDR3
QQDYSSPRT

SEQ ID NO: 11985 - protein, 451 aa, synthetic construct
  source 1..451: note = Description of Artificial Sequence: Synthetic polypeptide; note = XENP018124 1G6_H1.27_L1_IgG1_PVA_/S267K Heavy Chain
EVQLVESGGGLVKPGGSLRLSCAASGFTFSYYWMNWVRQAPGKGLEWVGEIRLKSNNYATHYAEPVKGRFTISRDDSKSTVYLQMNSLKTEDTAVYYCTRYYGNYGGYFDVWGAGTLVTVSSASTKGPSVFPLAPSSKSTSGGTAALGCLVKDYFPEPVTVSWNSGALTSGVHTFPAVLQSSGLYSLSSVVTVPSSSLGTQTYICNVNHKPSNTKVDKKVEPKSCDKTHTCPPCPAPPVAGPSVFLFPPKPKDTLMISRTPEVTCVVVDVKHEDPEVKFNWYVDGVEVHNAKTKPREEQYNSTYRVVSVLTVLHQDWLNGKEYKCKVSNKALPAPIEKTISKAKGQPREPQVYTLPPSREEMTKNQVSLTCLVKGFYPSDIAVEWESNGQPENNYKTTPPVLDSDGSFFLYSKLTVDKSRWQQGNVFSCSVMHEALHNHYTQKSLSLSPGK

SEQ ID NO: 11986 - protein, 122 aa, synthetic construct; identical to SEQ ID NO: 6597
  source 1..122: note = Description of Artificial Sequence: Synthetic polypeptide; note = VH of XENP018124

SEQ ID NO: 11987 - protein, 5 aa, synthetic construct
  source 1..5: note = Description of Artificial Sequence: Synthetic peptide; note = XENP018124 vhCDR1
YYWMN

SEQ ID NO: 11988 - protein, 19 aa, synthetic construct
  source 1..19: note = Description of Artificial Sequence: Synthetic peptide; note = XENP018124 vhCDR2
EIRLKSNNYATHYAEPVKG

SEQ ID NO: 11989 - protein, 11 aa, synthetic construct
  source 1..11: note = Description of Artificial Sequence: Synthetic peptide; note = XENP018124 vhCDR3
YYGNYGGYFDV

SEQ ID NO: 11990 - protein, 214 aa, synthetic construct; identical to SEQ ID NO: 11550
  source 1..214: note = Description of Artificial Sequence: Synthetic polypeptide; note = XENP018124 1G6_H1.27_L1_IgG1_PVA_/S267K Light Chain

SEQ ID NO: 11991 - protein, 107 aa, synthetic construct; identical to SEQ ID NO: 6247
  source 1..107: note = Description of Artificial Sequence: Synthetic polypeptide; note = VL of XENP018124

SEQ ID NO: 11992 - protein, 11 aa, synthetic construct
  source 1..11: note = Description of Artificial Sequence: Synthetic peptide; note = XENP018124 vlCDR1
RASQSVSNDVA

SEQ ID NO: 11993 - protein, 7 aa, synthetic construct
  source 1..7: note = Description of Artificial Sequence: Synthetic peptide; note = XENP018124 vlCDR2
YASHRYT

SEQ ID NO: 11994 - protein, 9 aa, synthetic construct
  source 1..9: note = Description of Artificial Sequence: Synthetic peptide; note = XENP018124 vlCDR3
QQDYSSPRT

SEQ ID NO: 11995 - protein, 451 aa, synthetic construct
  source 1..451: note = Description of Artificial Sequence: Synthetic polypeptide; note = XENP018125 1G6_H1.28_L1_IgG1_PVA_/S267K Heavy Chain
EVQLVESGGGLVKPGGSLRLSCAASGFTFSNFWMNWVRQAPGKGLEWVGEIRLKSNNYATHYAEPVKGRFTISRDDSKSTVYLQMNSLKTEDTAVYYCTRYYGNYGGYFDVWGAGTLVTVSSASTKGPSVFPLAPSSKSTSGGTAALGCLVKDYFPEPVTVSWNSGALTSGVHTFPAVLQSSGLYSLSSVVTVPSSSLGTQTYICNVNHKPSNTKVDKKVEPKSCDKTHTCPPCPAPPVAGPSVFLFPPKPKDTLMISRTPEVTCVVVDVKHEDPEVKFNWYVDGVEVHNAKTKPREEQYNSTYRVVSVLTVLHQDWLNGKEYKCKVSNKALPAPIEKTISKAKGQPREPQVYTLPPSREEMTKNQVSLTCLVKGFYPSDIAVEWESNGQPENNYKTTPPVLDSDGSFFLYSKLTVDKSRWQQGNVFSCSVMHEALHNHYTQKSLSLSPGK

SEQ ID NO: 11996 - protein, 122 aa, synthetic construct; identical to SEQ ID NO: 6606
  source 1..122: note = Description of Artificial Sequence: Synthetic polypeptide; note = VH of XENP018125

SEQ ID NO: 11997 - protein, 5 aa, synthetic construct
  source 1..5: note = Description of Artificial Sequence: Synthetic peptide; note = XENP018125 vhCDR1
NFWMN

SEQ ID NO: 11998 - protein, 19 aa, synthetic construct
  source 1..19: note = Description of Artificial Sequence: Synthetic peptide; note = XENP018125 vhCDR2
EIRLKSNNYATHYAEPVKG

SEQ ID NO: 11999 - protein, 11 aa, synthetic construct
  source 1..11: note = Description of Artificial Sequence: Synthetic peptide; note = XENP018125 vhCDR3
YYGNYGGYFDV

SEQ ID NO: 12000 - protein, 214 aa, synthetic construct; identical to SEQ ID NO: 11550
  source 1..214: note = Description of Artificial Sequence: Synthetic polypeptide; note = XENP018125 1G6_H1.28_L1_IgG1_PVA_/S267K Light Chain

SEQ ID NO: 12001 - protein, 107 aa, synthetic construct; identical to SEQ ID NO: 6247
  source 1..107: note = Description of Artificial Sequence: Synthetic polypeptide; note = VL of XENP018125

SEQ ID NO: 12002 - protein, 11 aa, synthetic construct
  source 1..11: note = Description of Artificial Sequence: Synthetic peptide; note = XENP018125 vlCDR1
RASQSVSNDVA

SEQ ID NO: 12003 - protein, 7 aa, synthetic construct
  source 1..7: note = Description of Artificial Sequence: Synthetic peptide; note = XENP018125 vlCDR2
YASHRYT

SEQ ID NO: 12004 - protein, 9 aa, synthetic construct
  source 1..9: note = Description of Artificial Sequence: Synthetic peptide; note = XENP018125 vlCDR3
QQDYSSPRT

SEQ ID NO: 12005 - protein, 451 aa, synthetic construct
  source 1..451: note = Description of Artificial Sequence: Synthetic polypeptide; note = XENP018126 1G6_H1.29_L1_IgG1_PVA_/S267K Heavy Chain
EVQLVESGGGLVKPGGSLRLSCAASGFTFSNHWMNWVRQAPGKGLEWVGEIRLKSNNYATHYAEPVKGRFTISRDDSKSTVYLQMNSLKTEDTAVYYCTRYYGNYGGYFDVWGAGTLVTVSSASTKGPSVFPLAPSSKSTSGGTAALGCLVKDYFPEPVTVSWNSGALTSGVHTFPAVLQSSGLYSLSSVVTVPSSSLGTQTYICNVNHKPSNTKVDKKVEPKSCDKTHTCPPCPAPPVAGPSVFLFPPKPKDTLMISRTPEVTCVVVDVKHEDPEVKFNWYVDGVEVHNAKTKPREEQYNSTYRVVSVLTVLHQDWLNGKEYKCKVSNKALPAPIEKTISKAKGQPREPQVYTLPPSREEMTKNQVSLTCLVKGFYPSDIAVEWESNGQPENNYKTTPPVLDSDGSFFLYSKLTVDKSRWQQGNVFSCSVMHEALHNHYTQKSLSLSPGK

SEQ ID NO: 12006 - protein, 122 aa, synthetic construct; identical to SEQ ID NO: 6615
  source 1..122: note = Description of Artificial Sequence: Synthetic polypeptide; note = VH of XENP018126

SEQ ID NO: 12007 - protein, 5 aa, synthetic construct
  source 1..5: note = Description of Artificial Sequence: Synthetic peptide; note = XENP018126 vhCDR1
NHWMN

SEQ ID NO: 12008 - protein, 19 aa, synthetic construct
  source 1..19: note = Description of Artificial Sequence: Synthetic peptide; note = XENP018126 vhCDR2
EIRLKSNNYATHYAEPVKG

SEQ ID NO: 12009 - protein, 11 aa, synthetic construct
  source 1..11: note = Description of Artificial Sequence: Synthetic peptide; note = XENP018126 vhCDR3
YYGNYGGYFDV

SEQ ID NO: 12010 - protein, 214 aa, synthetic construct; identical to SEQ ID NO: 11550
  source 1..214: note = Description of Artificial Sequence: Synthetic polypeptide; note = XENP018126 1G6_H1.29_L1_IgG1_PVA_/S267K Light Chain

SEQ ID NO: 12011 - protein, 107 aa, synthetic construct; identical to SEQ ID NO: 6247
  source 1..107: note = Description of Artificial Sequence: Synthetic polypeptide; note = VL of XENP018126

SEQ ID NO: 12012 - protein, 11 aa, synthetic construct
  source 1..11: note = Description of Artificial Sequence: Synthetic peptide; note = XENP018126 vlCDR1
RASQSVSNDVA

SEQ ID NO: 12013 - protein, 7 aa, synthetic construct
  source 1..7: note = Description of Artificial Sequence: Synthetic peptide; note = XENP018126 vlCDR2
YASHRYT

SEQ ID NO: 12014 - protein, 9 aa, synthetic construct
  source 1..9: note = Description of Artificial Sequence: Synthetic peptide; note = XENP018126 vlCDR3
QQDYSSPRT

SEQ ID NO: 12015 - protein, 451 aa, synthetic construct
  source 1..451: note = Description of Artificial Sequence: Synthetic polypeptide; note = XENP018127 1G6_H1.30_L1_IgG1_PVA_/S267K Heavy Chain
EVQLVESGGGLVKPGGSLRLSCAASGFTFSNLWMNWVRQAPGKGLEWVGEIRLKSNNYATHYAEPVKGRFTISRDDSKSTVYLQMNSLKTEDTAVYYCTRYYGNYGGYFDVWGAGTLVTVSSASTKGPSVFPLAPSSKSTSGGTAALGCLVKDYFPEPVTVSWNSGALTSGVHTFPAVLQSSGLYSLSSVVTVPSSSLGTQTYICNVNHKPSNTKVDKKVEPKSCDKTHTCPPCPAPPVAGPSVFLFPPKPKDTLMISRTPEVTCVVVDVKHEDPEVKFNWYVDGVEVHNAKTKPREEQYNSTYRVVSVLTVLHQDWLNGKEYKCKVSNKALPAPIEKTISKAKGQPREPQVYTLPPSREEMTKNQVSLTCLVKGFYPSDIAVEWESNGQPENNYKTTPPVLDSDGSFFLYSKLTVDKSRWQQGNVFSCSVMHEALHNHYTQKSLSLSPGK

SEQ ID NO: 12016 - protein, 122 aa, synthetic construct; identical to SEQ ID NO: 6624
  source 1..122: note = Description of Artificial Sequence: Synthetic polypeptide; note = VH of XENP018127

SEQ ID NO: 12017 - protein, 5 aa, synthetic construct
  source 1..5: note = Description of Artificial Sequence: Synthetic peptide; note = XENP018127 vhCDR1
NLWMN

SEQ ID NO: 12018 - protein, 19 aa, synthetic construct
  source 1..19: note = Description of Artificial Sequence: Synthetic peptide; note = XENP018127 vhCDR2
EIRLKSNNYATHYAEPVKG

SEQ ID NO: 12019 - protein, 11 aa, synthetic construct
  source 1..11: note = Description of Artificial Sequence: Synthetic peptide; note = XENP018127 vhCDR3
YYGNYGGYFDV

SEQ ID NO: 12020 - protein, 214 aa, synthetic construct; identical to SEQ ID NO: 11550
  source 1..214: note = Description of Artificial Sequence: Synthetic polypeptide; note = XENP018127 1G6_H1.30_L1_IgG1_PVA_/S267K Light Chain

SEQ ID NO: 12021 - protein, 107 aa, synthetic construct; identical to SEQ ID NO: 6247
  source 1..107: note = Description of Artificial Sequence: Synthetic polypeptide; note = VL of XENP018127

SEQ ID NO: 12022 - protein, 11 aa, synthetic construct
  source 1..11: note = Description of Artificial Sequence: Synthetic peptide; note = XENP018127 vlCDR1
RASQSVSNDVA

SEQ ID NO: 12023 - protein, 7 aa, synthetic construct
  source 1..7: note = Description of Artificial Sequence: Synthetic peptide; note = XENP018127 vlCDR2
YASHRYT

SEQ ID NO: 12024 - protein, 9 aa, synthetic construct
  source 1..9: note = Description of Artificial Sequence: Synthetic peptide; note = XENP018127 vlCDR3
QQDYSSPRT

SEQ ID NO: 12025 - protein, 451 aa, synthetic construct
  source 1..451: note = Description of Artificial Sequence: Synthetic polypeptide; note = XENP018128 1G6_H1.31_L1_IgG1_PVA_/S267K Heavy Chain
EVQLVESGGGLVKPGGSLRLSCAASGFTFSNWWMNWVRQAPGKGLEWVGEIRLKSNNYATHYAEPVKGRFTISRDDSKSTVYLQMNSLKTEDTAVYYCTRYYGNYGGYFDVWGAGTLVTVSSASTKGPSVFPLAPSSKSTSGGTAALGCLVKDYFPEPVTVSWNSGALTSGVHTFPAVLQSSGLYSLSSVVTVPSSSLGTQTYICNVNHKPSNTKVDKKVEPKSCDKTHTCPPCPAPPVAGPSVFLFPPKPKDTLMISRTPEVTCVVVDVKHEDPEVKFNWYVDGVEVHNAKTKPREEQYNSTYRVVSVLTVLHQDWLNGKEYKCKVSNKALPAPIEKTISKAKGQPREPQVYTLPPSREEMTKNQVSLTCLVKGFYPSDIAVEWESNGQPENNYKTTPPVLDSDGSFFLYSKLTVDKSRWQQGNVFSCSVMHEALHNHYTQKSLSLSPGK

SEQ ID NO: 12026 - protein, 122 aa, synthetic construct; identical to SEQ ID NO: 6633
  source 1..122: note = Description of Artificial Sequence: Synthetic polypeptide; note = VH of XENP018128

SEQ ID NO: 12027 - protein, 5 aa, synthetic construct
  source 1..5: note = Description of Artificial Sequence: Synthetic peptide; note = XENP018128 vhCDR1
NWWMN

SEQ ID NO: 12028 - protein, 19 aa, synthetic construct
  source 1..19: note = Description of Artificial Sequence: Synthetic peptide; note = XENP018128 vhCDR2
EIRLKSNNYATHYAEPVKG

SEQ ID NO: 12029 - protein, 11 aa, synthetic construct
  source 1..11: note = Description of Artificial Sequence: Synthetic peptide; note = XENP018128 vhCDR3
YYGNYGGYFDV

SEQ ID NO: 12030 - protein, 214 aa, synthetic construct; identical to SEQ ID NO: 11550
  source 1..214: note = Description of Artificial Sequence: Synthetic polypeptide; note = XENP018128 1G6_H1.31_L1_IgG1_PVA_/S267K Light Chain

SEQ ID NO: 12031 - protein, 107 aa, synthetic construct; identical to SEQ ID NO: 6247
  source 1..107: note = Description of Artificial Sequence: Synthetic polypeptide; note = VL of XENP018128

SEQ ID NO: 12032 - protein, 11 aa, synthetic construct
  source 1..11: note = Description of Artificial Sequence: Synthetic peptide; note = XENP018128 vlCDR1
RASQSVSNDVA

SEQ ID NO: 12033 - protein, 7 aa, synthetic construct
  source 1..7: note = Description of Artificial Sequence: Synthetic peptide; note = XENP018128 vlCDR2
YASHRYT

SEQ ID NO: 12034 - protein, 9 aa, synthetic construct
  source 1..9: note = Description of Artificial Sequence: Synthetic peptide; note = XENP018128 vlCDR3
QQDYSSPRT

SEQ ID NO: 12035 - protein, 451 aa, synthetic construct
  source 1..451: note = Description of Artificial Sequence: Synthetic polypeptide; note = XENP018129 1G6_H1.32_L1_IgG1_PVA_/S267K Heavy Chain
EVQLVESGGGLVKPGGSLRLSCAASGFTFSNVWMNWVRQAPGKGLEWVGEIRLKSNNYATHYAEPVKGRFTISRDDSKSTVYLQMNSLKTEDTAVYYCTRYYGNYGGYFDVWGAGTLVTVSSASTKGPSVFPLAPSSKSTSGGTAALGCLVKDYFPEPVTVSWNSGALTSGVHTFPAVLQSSGLYSLSSVVTVPSSSLGTQTYICNVNHKPSNTKVDKKVEPKSCDKTHTCPPCPAPPVAGPSVFLFPPKPKDTLMISRTPEVTCVVVDVKHEDPEVKFNWYVDGVEVHNAKTKPREEQYNSTYRVVSVLTVLHQDWLNGKEYKCKVSNKALPAPIEKTISKAKGQPREPQVYTLPPSREEMTKNQVSLTCLVKGFYPSDIAVEWESNGQPENNYKTTPPVLDSDGSFFLYSKLTVDKSRWQQGNVFSCSVMHEALHNHYTQKSLSLSPGK

SEQ ID NO: 12036 - protein, 122 aa, synthetic construct; identical to SEQ ID NO: 6642
  source 1..122: note = Description of Artificial Sequence: Synthetic polypeptide; note = VH of XENP018129

SEQ ID NO: 12037 - protein, 5 aa, synthetic construct
  source 1..5: note = Description of Artificial Sequence: Synthetic peptide; note = XENP018129 vhCDR1
NVWMN

SEQ ID NO: 12038 - protein, 19 aa, synthetic construct
  source 1..19: note = Description of Artificial Sequence: Synthetic peptide; note = XENP018129 vhCDR2
EIRLKSNNYATHYAEPVKG

SEQ ID NO: 12039 - protein, 11 aa, synthetic construct
  source 1..11: note = Description of Artificial Sequence: Synthetic peptide; note = XENP018129 vhCDR3
YYGNYGGYFDV

SEQ ID NO: 12040 - protein, 214 aa, synthetic construct; identical to SEQ ID NO: 11550
  source 1..214: note = Description of Artificial Sequence: Synthetic polypeptide; note = XENP018129 1G6_H1.32_L1_IgG1_PVA_/S267K Light Chain

SEQ ID NO: 12041 - protein, 107 aa, synthetic construct; identical to SEQ ID NO: 6247
  source 1..107: note = Description of Artificial Sequence: Synthetic polypeptide; note = VL of XENP018129

SEQ ID NO: 12042 - protein, 11 aa, synthetic construct
  source 1..11: note = Description of Artificial Sequence: Synthetic peptide; note = XENP018129 vlCDR1
RASQSVSNDVA

SEQ ID NO: 12043 - protein, 7 aa, synthetic construct
  source 1..7: note = Description of Artificial Sequence: Synthetic peptide; note = XENP018129 vlCDR2
YASHRYT

SEQ ID NO: 12044 - protein, 9 aa, synthetic construct
  source 1..9: note = Description of Artificial Sequence: Synthetic peptide; note = XENP018129 vlCDR3
QQDYSSPRT

SEQ ID NO: 12045 - protein, 451 aa, synthetic construct
  source 1..451: note = Description of Artificial Sequence: Synthetic polypeptide; note = XENP018130 1G6_H1.33_L1_IgG1_PVA_/S267K Heavy Chain
EVQLVESGGGLVKPGGSLRLSCAASGFTFSNAWMNWVRQAPGKGLEWVGEIRLKSNNYATHYAEPVKGRFTISRDDSKSTVYLQMNSLKTEDTAVYYCTRYYGNYGGYFDVWGAGTLVTVSSASTKGPSVFPLAPSSKSTSGGTAALGCLVKDYFPEPVTVSWNSGALTSGVHTFPAVLQSSGLYSLSSVVTVPSSSLGTQTYICNVNHKPSNTKVDKKVEPKSCDKTHTCPPCPAPPVAGPSVFLFPPKPKDTLMISRTPEVTCVVVDVKHEDPEVKFNWYVDGVEVHNAKTKPREEQYNSTYRVVSVLTVLHQDWLNGKEYKCKVSNKALPAPIEKTISKAKGQPREPQVYTLPPSREEMTKNQVSLTCLVKGFYPSDIAVEWESNGQPENNYKTTPPVLDSDGSFFLYSKLTVDKSRWQQGNVFSCSVMHEALHNHYTQKSLSLSPGK

SEQ ID NO: 12046 - protein, 122 aa, synthetic construct; identical to SEQ ID NO: 6651
  source 1..122: note = Description of Artificial Sequence: Synthetic polypeptide; note = VH of XENP018130

SEQ ID NO: 12047 - protein, 5 aa, synthetic construct
  source 1..5: note = Description of Artificial Sequence: Synthetic peptide; note = XENP018130 vhCDR1
NAWMN

SEQ ID NO: 12048 - protein, 19 aa, synthetic construct
  source 1..19: note = Description of Artificial Sequence: Synthetic peptide; note = XENP018130 vhCDR2
EIRLKSNNYATHYAEPVKG

SEQ ID NO: 12049 - protein, 11 aa, synthetic construct
  source 1..11: note = Description of Artificial Sequence: Synthetic peptide; note = XENP018130 vhCDR3
YYGNYGGYFDV

SEQ ID NO: 12050 - protein, 214 aa, synthetic construct; identical to SEQ ID NO: 11550
  source 1..214: note = Description of Artificial Sequence: Synthetic polypeptide; note = XENP018130 1G6_H1.33_L1_IgG1_PVA_/S267K Light Chain

SEQ ID NO: 12051 - protein, 107 aa, synthetic construct; identical to SEQ ID NO: 6247
  source 1..107: note = Description of Artificial Sequence: Synthetic polypeptide; note = VL of XENP018130

SEQ ID NO: 12052 - protein, 11 aa, synthetic construct
  source 1..11: note = Description of Artificial Sequence: Synthetic peptide; note = XENP018130 vlCDR1
RASQSVSNDVA

SEQ ID NO: 12053 - protein, 7 aa, synthetic construct
  source 1..7: note = Description of Artificial Sequence: Synthetic peptide; note = XENP018130 vlCDR2
YASHRYT

SEQ ID NO: 12054 - protein, 9 aa, synthetic construct
  source 1..9: note = Description of Artificial Sequence: Synthetic peptide; note = XENP018130 vlCDR3
QQDYSSPRT

SEQ ID NO: 12055 - protein, 451 aa, synthetic construct
  source 1..451: note = Description of Artificial Sequence: Synthetic polypeptide; note = XENP018131 1G6_H1.34_L1_IgG1_PVA_/S267K Heavy Chain
EVQLVESGGGLVKPGGSLRLSCAASGFTFSNQWMNWVRQAPGKGLEWVGEIRLKSNNYATHYAEPVKGRFTISRDDSKSTVYLQMNSLKTEDTAVYYCTRYYGNYGGYFDVWGAGTLVTVSSASTKGPSVFPLAPSSKSTSGGTAALGCLVKDYFPEPVTVSWNSGALTSGVHTFPAVLQSSGLYSLSSVVTVPSSSLGTQTYICNVNHKPSNTKVDKKVEPKSCDKTHTCPPCPAPPVAGPSVFLFPPKPKDTLMISRTPEVTCVVVDVKHEDPEVKFNWYVDGVEVHNAKTKPREEQYNSTYRVVSVLTVLHQDWLNGKEYKCKVSNKALPAPIEKTISKAKGQPREPQVYTLPPSREEMTKNQVSLTCLVKGFYPSDIAVEWESNGQPENNYKTTPPVLDSDGSFFLYSKLTVDKSRWQQGNVFSCSVMHEALHNHYTQKSLSLSPGK

SEQ ID NO: 12056 - protein, 122 aa, synthetic construct; identical to SEQ ID NO: 6660
  source 1..122: note = Description of Artificial Sequence: Synthetic polypeptide; note = VH of XENP018131

SEQ ID NO: 12057 - protein, 5 aa, synthetic construct
  source 1..5: note = Description of Artificial Sequence: Synthetic peptide; note = XENP018131 vhCDR1
NQWMN

SEQ ID NO: 12058 - protein, 19 aa, synthetic construct
  source 1..19: note = Description of Artificial Sequence: Synthetic peptide; note = XENP018131 vhCDR2
EIRLKSNNYATHYAEPVKG

SEQ ID NO: 12059 - protein, 11 aa, synthetic construct
  source 1..11: note = Description of Artificial Sequence: Synthetic peptide; note = XENP018131 vhCDR3
YYGNYGGYFDV

SEQ ID NO: 12060 - protein, 214 aa, synthetic construct; identical to SEQ ID NO: 11550
  source 1..214: note = Description of Artificial Sequence: Synthetic polypeptide; note = XENP018131 1G6_H1.34_L1_IgG1_PVA_/S267K Light Chain

SEQ ID NO: 12061 - protein, 107 aa, synthetic construct; identical to SEQ ID NO: 6247
  source 1..107: note = Description of Artificial Sequence: Synthetic polypeptide; note = VL of XENP018131

SEQ ID NO: 12062 - protein, 11 aa, synthetic construct
  source 1..11: note = Description of Artificial Sequence: Synthetic peptide; note = XENP018131 vlCDR1
RASQSVSNDVA

SEQ ID NO: 12063 - protein, 7 aa, synthetic construct
  source 1..7: note = Description of Artificial Sequence: Synthetic peptide; note = XENP018131 vlCDR2
YASHRYT

SEQ ID NO: 12064 - protein, 9 aa, synthetic construct
  source 1..9: note = Description of Artificial Sequence: Synthetic peptide; note = XENP018131 vlCDR3
QQDYSSPRT

SEQ ID NO: 12065 - protein, 451 aa, synthetic construct
  source 1..451: note = Description of Artificial Sequence: Synthetic polypeptide; note = XENP018132 1G6_H1.35_L1_IgG1_PVA_/S267K Heavy Chain
EVQLVESGGGLVKPGGSLRLSCAASGFTFSNDWMNWVRQAPGKGLEWVGEIRLKSNNYATHYAEPVKGRFTISRDDSKSTVYLQMNSLKTEDTAVYYCTRYYGNYGGYFDVWGAGTLVTVSSASTKGPSVFPLAPSSKSTSGGTAALGCLVKDYFPEPVTVSWNSGALTSGVHTFPAVLQSSGLYSLSSVVTVPSSSLGTQTYICNVNHKPSNTKVDKKVEPKSCDKTHTCPPCPAPPVAGPSVFLFPPKPKDTLMISRTPEVTCVVVDVKHEDPEVKFNWYVDGVEVHNAKTKPREEQYNSTYRVVSVLTVLHQDWLNGKEYKCKVSNKALPAPIEKTISKAKGQPREPQVYTLPPSREEMTKNQVSLTCLVKGFYPSDIAVEWESNGQPENNYKTTPPVLDSDGSFFLYSKLTVDKSRWQQGNVFSCSVMHEALHNHYTQKSLSLSPGK

SEQ ID NO: 12066 - protein, 122 aa, synthetic construct; identical to SEQ ID NO: 6669
  source 1..122: note = Description of Artificial Sequence: Synthetic polypeptide; note = VH of XENP018132

SEQ ID NO: 12067 - protein, 5 aa, synthetic construct
  source 1..5: note = Description of Artificial Sequence: Synthetic peptide; note = XENP018132 vhCDR1
NDWMN

SEQ ID NO: 12068 - protein, 19 aa, synthetic construct
  source 1..19: note = Description of Artificial Sequence: Synthetic peptide; note = XENP018132 vhCDR2
EIRLKSNNYATHYAEPVKG

SEQ ID NO: 12069 - protein, 11 aa, synthetic construct
  source 1..11: note = Description of Artificial Sequence: Synthetic peptide; note = XENP018132 vhCDR3
YYGNYGGYFDV

SEQ ID NO: 12070 - protein, 214 aa, synthetic construct; identical to SEQ ID NO: 11550
  source 1..214: note = Description of Artificial Sequence: Synthetic polypeptide; note = XENP018132 1G6_H1.35_L1_IgG1_PVA_/S267K Light Chain

SEQ ID NO: 12071 - protein, 107 aa, synthetic construct; identical to SEQ ID NO: 6247
  source 1..107: note = Description of Artificial Sequence: Synthetic polypeptide; note = VL of XENP018132

SEQ ID NO: 12072 - protein, 11 aa, synthetic construct
  source 1..11: note = Description of Artificial Sequence: Synthetic peptide; note = XENP018132 vlCDR1
RASQSVSNDVA

SEQ ID NO: 12073 - protein, 7 aa, synthetic construct
  source 1..7: note = Description of Artificial Sequence: Synthetic peptide; note = XENP018132 vlCDR2
YASHRYT

SEQ ID NO: 12074 - protein, 9 aa, synthetic construct
  source 1..9: note = Description of Artificial Sequence: Synthetic peptide; note = XENP018132 vlCDR3
QQDYSSPRT

SEQ ID NO: 12075 - protein, 451 aa, synthetic construct
  source 1..451: note = Description of Artificial Sequence: Synthetic polypeptide; note = XENP018133 1G6_H1.36_L1_IgG1_PVA_/S267K Heavy Chain
EVQLVESGGGLVKPGGSLRLSCAASGFTFSNKWMNWVRQAPGKGLEWVGEIRLKSNNYATHYAEPVKGRFTISRDDSKSTVYLQMNSLKTEDTAVYYCTRYYGNYGGYFDVWGAGTLVTVSSASTKGPSVFPLAPSSKSTSGGTAALGCLVKDYFPEPVTVSWNSGALTSGVHTFPAVLQSSGLYSLSSVVTVPSSSLGTQTYICNVNHKPSNTKVDKKVEPKSCDKTHTCPPCPAPPVAGPSVFLFPPKPKDTLMISRTPEVTCVVVDVKHEDPEVKFNWYVDGVEVHNAKTKPREEQYNSTYRVVSVLTVLHQDWLNGKEYKCKVSNKALPAPIEKTISKAKGQPREPQVYTLPPSREEMTKNQVSLTCLVKGFYPSDIAVEWESNGQPENNYKTTPPVLDSDGSFFLYSKLTVDKSRWQQGNVFSCSVMHEALHNHYTQKSLSLSPGK

SEQ ID NO: 12076 - protein, 122 aa, synthetic construct; identical to SEQ ID NO: 6678
  source 1..122: note = Description of Artificial Sequence: Synthetic polypeptide; note = VH of XENP018133

SEQ ID NO: 12077 - protein, 5 aa, synthetic construct
  source 1..5: note = Description of Artificial Sequence: Synthetic peptide; note = XENP018133 vhCDR1
NKWMN

SEQ ID NO: 12078 - protein, 19 aa, synthetic construct
  source 1..19: note = Description of Artificial Sequence: Synthetic peptide; note = XENP018133 vhCDR2
EIRLKSNNYATHYAEPVKG

SEQ ID NO: 12079 - protein, 11 aa, synthetic construct
  source 1..11: note = Description of Artificial Sequence: Synthetic peptide; note = XENP018133 vhCDR3
YYGNYGGYFDV

SEQ ID NO: 12080 - protein, 214 aa, synthetic construct; identical to SEQ ID NO: 11550
  source 1..214: note = Description of Artificial Sequence: Synthetic polypeptide; note = XENP018133 1G6_H1.36_L1_IgG1_PVA_/S267K Light Chain

SEQ ID NO: 12081 - protein, 107 aa, synthetic construct; identical to SEQ ID NO: 6247
  source 1..107: note = Description of Artificial Sequence: Synthetic polypeptide; note = VL of XENP018133

SEQ ID NO: 12082 - protein, 11 aa, synthetic construct
  source 1..11: note = Description of Artificial Sequence: Synthetic peptide; note = XENP018133 vlCDR1
RASQSVSNDVA

SEQ ID NO: 12083 - protein, 7 aa, synthetic construct
  source 1..7: note = Description of Artificial Sequence: Synthetic peptide; note = XENP018133 vlCDR2
YASHRYT

SEQ ID NO: 12084 - protein, 9 aa, synthetic construct
  source 1..9: note = Description of Artificial Sequence: Synthetic peptide; note = XENP018133 vlCDR3
QQDYSSPRT

SEQ ID NO: 12085 - protein, 451 aa, synthetic construct
  source 1..451: note = Description of Artificial Sequence: Synthetic polypeptide; note = XENP018134 1G6_H1.37_L1_IgG1_PVA_/S267K Heavy Chain
EVQLVESGGGLVKPGGSLRLSCAASGFTFSNYGMNWVRQAPGKGLEWVGEIRLKSNNYATHYAEPVKGRFTISRDDSKSTVYLQMNSLKTEDTAVYYCTRYYGNYGGYFDVWGAGTLVTVSSASTKGPSVFPLAPSSKSTSGGTAALGCLVKDYFPEPVTVSWNSGALTSGVHTFPAVLQSSGLYSLSSVVTVPSSSLGTQTYICNVNHKPSNTKVDKKVEPKSCDKTHTCPPCPAPPVAGPSVFLFPPKPKDTLMISRTPEVTCVVVDVKHEDPEVKFNWYVDGVEVHNAKTKPREEQYNSTYRVVSVLTVLHQDWLNGKEYKCKVSNKALPAPIEKTISKAKGQPREPQVYTLPPSREEMTKNQVSLTCLVKGFYPSDIAVEWESNGQPENNYKTTPPVLDSDGSFFLYSKLTVDKSRWQQGNVFSCSVMHEALHNHYTQKSLSLSPGK

SEQ ID NO: 12086 - protein, 122 aa, synthetic construct; identical to SEQ ID NO: 6687
  source 1..122: note = Description of Artificial Sequence: Synthetic polypeptide; note = VH of XENP018134

SEQ ID NO: 12087 - protein, 5 aa, synthetic construct
  source 1..5: note = Description of Artificial Sequence: Synthetic peptide; note = XENP018134 vhCDR1
NYGMN

SEQ ID NO: 12088 - protein, 19 aa, synthetic construct
  source 1..19: note = Description of Artificial Sequence: Synthetic peptide; note = XENP018134 vhCDR2
EIRLKSNNYATHYAEPVKG

SEQ ID NO: 12089 - protein, 11 aa, synthetic construct
  source 1..11: note = Description of Artificial Sequence: Synthetic peptide; note = XENP018134 vhCDR3
YYGNYGGYFDV

SEQ ID NO: 12090 - protein, 214 aa, synthetic construct; identical to SEQ ID NO: 11550
  source 1..214: note = Description of Artificial Sequence: Synthetic polypeptide; note = XENP018134 1G6_H1.37_L1_IgG1_PVA_/S267K Light Chain

SEQ ID NO: 12091 - protein, 107 aa, synthetic construct; identical to SEQ ID NO: 6247
  source 1..107: note = Description of Artificial Sequence: Synthetic polypeptide; note = VL of XENP018134

SEQ ID NO: 12092 - protein, 11 aa, synthetic construct
  source 1..11: note = Description of Artificial Sequence: Synthetic peptide; note = XENP018134 vlCDR1
RASQSVSNDVA

SEQ ID NO: 12093 - protein, 7 aa, synthetic construct
  source 1..7: note = Description of Artificial Sequence: Synthetic peptide; note = XENP018134 vlCDR2
YASHRYT

SEQ ID NO: 12094 - protein, 9 aa, synthetic construct
  source 1..9: note = Description of Artificial Sequence: Synthetic peptide; note = XENP018134 vlCDR3
QQDYSSPRT

SEQ ID NO: 12095 - protein, 451 aa, synthetic construct
  source 1..451: note = Description of Artificial Sequence: Synthetic polypeptide; note = XENP018135 1G6_H1.38_L1_IgG1_PVA_/S267K Heavy Chain
EVQLVESGGGLVKPGGSLRLSCAASGFTFSNYAMNWVRQAPGKGLEWVGEIRLKSNNYATHYAEPVKGRFTISRDDSKSTVYLQMNSLKTEDTAVYYCTRYYGNYGGYFDVWGAGTLVTVSSASTKGPSVFPLAPSSKSTSGGTAALGCLVKDYFPEPVTVSWNSGALTSGVHTFPAVLQSSGLYSLSSVVTVPSSSLGTQTYICNVNHKPSNTKVDKKVEPKSCDKTHTCPPCPAPPVAGPSVFLFPPKPKDTLMISRTPEVTCVVVDVKHEDPEVKFNWYVDGVEVHNAKTKPREEQYNSTYRVVSVLTVLHQDWLNGKEYKCKVSNKALPAPIEKTISKAKGQPREPQVYTLPPSREEMTKNQVSLTCLVKGFYPSDIAVEWESNGQPENNYKTTPPVLDSDGSFFLYSKLTVDKSRWQQGNVFSCSVMHEALHNHYTQKSLSLSPGK

SEQ ID NO: 12096 - protein, 122 aa, synthetic construct; identical to SEQ ID NO: 6696
  source 1..122: note = Description of Artificial Sequence: Synthetic polypeptide; note = VH of XENP018135

SEQ ID NO: 12097 - protein, 5 aa, synthetic construct
  source 1..5: note = Description of Artificial Sequence: Synthetic peptide; note = XENP018135 vhCDR1
NYAMN

SEQ ID NO: 12098 - protein, 19 aa, synthetic construct
  source 1..19: note = Description of Artificial Sequence: Synthetic peptide; note = XENP018135 vhCDR2
EIRLKSNNYATHYAEPVKG

SEQ ID NO: 12099 - protein, 11 aa, synthetic construct
  source 1..11: note = Description of Artificial Sequence: Synthetic peptide; note = XENP018135 vhCDR3
YYGNYGGYFDV

SEQ ID NO: 12100 - protein, 214 aa, synthetic construct; identical to SEQ ID NO: 11550
  source 1..214: note = Description of Artificial Sequence: Synthetic polypeptide; note = XENP018135 1G6_H1.38_L1_IgG1_PVA_/S267K Light Chain

SEQ ID NO: 12101 - protein, 107 aa, synthetic construct; identical to SEQ ID NO: 6247
  source 1..107: note = Description of Artificial Sequence: Synthetic polypeptide; note = VL of XENP018135

SEQ ID NO: 12102 - protein, 11 aa, synthetic construct
  source 1..11: note = Description of Artificial Sequence: Synthetic peptide; note = XENP018135 vlCDR1
RASQSVSNDVA

SEQ ID NO: 12103 - protein, 7 aa, synthetic construct
  source 1..7: note = Description of Artificial Sequence: Synthetic peptide; note = XENP018135 vlCDR2
YASHRYT

SEQ ID NO: 12104 - protein, 9 aa, synthetic construct
  source 1..9: note = Description of Artificial Sequence: Synthetic peptide; note = XENP018135 vlCDR3
QQDYSSPRT

SEQ ID NO: 12105 - protein, 451 aa, synthetic construct
  source 1..451: note = Description of Artificial Sequence: Synthetic polypeptide; note = XENP018136 1G6_H1.39_L1_IgG1_PVA_/S267K Heavy Chain
EVQLVESGGGLVKPGGSLRLSCAASGFTFSNYYMNWVRQAPGKGLEWVGEIRLKSNNYATHYAEPVKGRFTISRDDSKSTVYLQMNSLKTEDTAVYYCTRYYGNYGGYFDVWGAGTLVTVSSASTKGPSVFPLAPSSKSTSGGTAALGCLVKDYFPEPVTVSWNSGALTSGVHTFPAVLQSSGLYSLSSVVTVPSSSLGTQTYICNVNHKPSNTKVDKKVEPKSCDKTHTCPPCPAPPVAGPSVFLFPPKPKDTLMISRTPEVTCVVVDVKHEDPEVKFNWYVDGVEVHNAKTKPREEQYNSTYRVVSVLTVLHQDWLNGKEYKCKVSNKALPAPIEKTISKAKGQPREPQVYTLPPSREEMTKNQVSLTCLVKGFYPSDIAVEWESNGQPENNYKTTPPVLDSDGSFFLYSKLTVDKSRWQQGNVFSCSVMHEALHNHYTQKSLSLSPGK

SEQ ID NO: 12106 - protein, 122 aa, synthetic construct; identical to SEQ ID NO: 6705
  source 1..122: note = Description of Artificial Sequence: Synthetic polypeptide; note = VH of XENP018136

SEQ ID NO: 12107 - protein, 5 aa, synthetic construct
  source 1..5: note = Description of Artificial Sequence: Synthetic peptide; note = XENP018136 vhCDR1
NYYMN

SEQ ID NO: 12108 - protein, 19 aa, synthetic construct
  source 1..19: note = Description of Artificial Sequence: Synthetic peptide; note = XENP018136 vhCDR2
EIRLKSNNYATHYAEPVKG

SEQ ID NO: 12109 - protein, 11 aa, synthetic construct
  source 1..11: note = Description of Artificial Sequence: Synthetic peptide; note = XENP018136 vhCDR3
YYGNYGGYFDV

SEQ ID NO: 12110 - protein, 214 aa, synthetic construct; identical to SEQ ID NO: 11550
  source 1..214: note = Description of Artificial Sequence: Synthetic polypeptide; note = XENP018136 1G6_H1.39_L1_IgG1_PVA_/S267K Light Chain

SEQ ID NO: 12111 - protein, 107 aa, synthetic construct; identical to SEQ ID NO: 6247
  source 1..107: note = Description of Artificial Sequence: Synthetic polypeptide; note = VL of XENP018136

SEQ ID NO: 12112 - protein, 11 aa, synthetic construct
  source 1..11: note = Description of Artificial Sequence: Synthetic peptide; note = XENP018136 vlCDR1
RASQSVSNDVA

SEQ ID NO: 12113 - protein, 7 aa, synthetic construct
  source 1..7: note = Description of Artificial Sequence: Synthetic peptide; note = XENP018136 vlCDR2
YASHRYT

SEQ ID NO: 12114 - protein, 9 aa, synthetic construct
  source 1..9: note = Description of Artificial Sequence: Synthetic peptide; note = XENP018136 vlCDR3
QQDYSSPRT

SEQ ID NO: 12115 - protein, 451 aa, synthetic construct
  source 1..451: note = Description of Artificial Sequence: Synthetic polypeptide; note = XENP018137 1G6_H1.40_L1_IgG1_PVA_/S267K Heavy Chain
EVQLVESGGGLVKPGGSLRLSCAASGFTFSNYDMNWVRQAPGKGLEWVGEIRLKSNNYATHYAEPVKGRFTISRDDSKSTVYLQMNSLKTEDTAVYYCTRYYGNYGGYFDVWGAGTLVTVSSASTKGPSVFPLAPSSKSTSGGTAALGCLVKDYFPEPVTVSWNSGALTSGVHTFPAVLQSSGLYSLSSVVTVPSSSLGTQTYICNVNHKPSNTKVDKKVEPKSCDKTHTCPPCPAPPVAGPSVFLFPPKPKDTLMISRTPEVTCVVVDVKHEDPEVKFNWYVDGVEVHNAKTKPREEQYNSTYRVVSVLTVLHQDWLNGKEYKCKVSNKALPAPIEKTISKAKGQPREPQVYTLPPSREEMTKNQVSLTCLVKGFYPSDIAVEWESNGQPENNYKTTPPVLDSDGSFFLYSKLTVDKSRWQQGNVFSCSVMHEALHNHYTQKSLSLSPGK

SEQ ID NO: 12116 - protein, 122 aa, synthetic construct; identical to SEQ ID NO: 6714
  source 1..122: note = Description of Artificial Sequence: Synthetic polypeptide; note = VH of XENP018137

SEQ ID NO: 12117 - protein, 5 aa, synthetic construct
  source 1..5: note = Description of Artificial Sequence: Synthetic peptide; note = XENP018137 vhCDR1
NYDMN

SEQ ID NO: 12118 - protein, 19 aa, synthetic construct
  source 1..19: note = Description of Artificial Sequence: Synthetic peptide; note = XENP018137 vhCDR2
EIRLKSNNYATHYAEPVKG

SEQ ID NO: 12119 - protein, 11 aa, synthetic construct
  source 1..11: note = Description of Artificial Sequence: Synthetic peptide; note = XENP018137 vhCDR3
YYGNYGGYFDV

SEQ ID NO: 12120 - protein, 214 aa, synthetic construct; identical to SEQ ID NO: 11550
  source 1..214: note = Description of Artificial Sequence: Synthetic polypeptide; note = XENP018137 1G6_H1.40_L1_IgG1_PVA_/S267K Light Chain

SEQ ID NO: 12121 - protein, 107 aa, synthetic construct; identical to SEQ ID NO: 6247
  source 1..107: note = Description of Artificial Sequence: Synthetic polypeptide; note = VL of XENP018137

SEQ ID NO: 12122 - protein, 11 aa, synthetic construct
  source 1..11: note = Description of Artificial Sequence: Synthetic peptide; note = XENP018137 vlCDR1
RASQSVSNDVA

SEQ ID NO: 12123 - protein, 7 aa, synthetic construct
  source 1..7: note = Description of Artificial Sequence: Synthetic peptide; note = XENP018137 vlCDR2
YASHRYT

SEQ ID NO: 12124 - protein, 9 aa, synthetic construct
  source 1..9: note = Description of Artificial Sequence: Synthetic peptide; note = XENP018137 vlCDR3
QQDYSSPRT

SEQ ID NO: 12125 - protein, 451 aa, synthetic construct
  source 1..451: note = Description of Artificial Sequence: Synthetic polypeptide; note = XENP018138 1G6_H1.41_L1_IgG1_PVA_/S267K Heavy Chain
EVQLVESGGGLVKPGGSLRLSCAASGFTFSNYWMSWVRQAPGKGLEWVGEIRLKSNNYATHYAEPVKGRFTISRDDSKSTVYLQMNSLKTEDTAVYYCTRYYGNYGGYFDVWGAGTLVTVSSASTKGPSVFPLAPSSKSTSGGTAALGCLVKDYFPEPVTVSWNSGALTSGVHTFPAVLQSSGLYSLSSVVTVPSSSLGTQTYICNVNHKPSNTKVDKKVEPKSCDKTHTCPPCPAPPVAGPSVFLFPPKPKDTLMISRTPEVTCVVVDVKHEDPEVKFNWYVDGVEVHNAKTKPREEQYNSTYRVVSVLTVLHQDWLNGKEYKCKVSNKALPAPIEKTISKAKGQPREPQVYTLPPSREEMTKNQVSLTCLVKGFYPSDIAVEWESNGQPENNYKTTPPVLDSDGSFFLYSKLTVDKSRWQQGNVFSCSVMHEALHNHYTQKSLSLSPGK

SEQ ID NO: 12126 - protein, 122 aa, synthetic construct; identical to SEQ ID NO: 6723
  source 1..122: note = Description of Artificial Sequence: Synthetic polypeptide; note = VH of XENP018138

SEQ ID NO: 12127 - protein, 5 aa, synthetic construct
  source 1..5: note = Description of Artificial Sequence: Synthetic peptide; note = XENP018138 vhCDR1
NYWMS

SEQ ID NO: 12128 - protein, 19 aa, synthetic construct
  source 1..19: note = Description of Artificial Sequence: Synthetic peptide; note = XENP018138 vhCDR2
EIRLKSNNYATHYAEPVKG

SEQ ID NO: 12129 - protein, 11 aa, synthetic construct
  source 1..11: note = Description of Artificial Sequence: Synthetic peptide; note = XENP018138 vhCDR3
YYGNYGGYFDV

SEQ ID NO: 12130 - protein, 214 aa, synthetic construct; identical to SEQ ID NO: 11550
  source 1..214: note = Description of Artificial Sequence: Synthetic polypeptide; note = XENP018138 1G6_H1.41_L1_IgG1_PVA_/S267K Light Chain

SEQ ID NO: 12131 - protein, 107 aa, synthetic construct; identical to SEQ ID NO: 6247
  source 1..107: note = Description of Artificial Sequence: Synthetic polypeptide; note = VL of XENP018138

SEQ ID NO: 12132 - protein, 11 aa, synthetic construct
  source 1..11: note = Description of Artificial Sequence: Synthetic peptide; note = XENP018138 vlCDR1
RASQSVSNDVA

SEQ ID NO: 12133 - protein, 7 aa, synthetic construct
  source 1..7: note = Description of Artificial Sequence: Synthetic peptide; note = XENP018138 vlCDR2
YASHRYT

SEQ ID NO: 12134 - protein, 9 aa, synthetic construct
  source 1..9: note = Description of Artificial Sequence: Synthetic peptide; note = XENP018138 vlCDR3
QQDYSSPRT

SEQ ID NO: 12135 - protein, 451 aa, synthetic construct
  source 1..451: note = Description of Artificial Sequence: Synthetic polypeptide; note = XENP018139 1G6_H1.42_L1_IgG1_PVA_/S267K Heavy Chain
EVQLVESGGGLVKPGGSLRLSCAASGFTFSNYWMHWVRQAPGKGLEWVGEIRLKSNNYATHYAEPVKGRFTISRDDSKSTVYLQMNSLKTEDTAVYYCTRYYGNYGGYFDVWGAGTLVTVSSASTKGPSVFPLAPSSKSTSGGTAALGCLVKDYFPEPVTVSWNSGALTSGVHTFPAVLQSSGLYSLSSVVTVPSSSLGTQTYICNVNHKPSNTKVDKKVEPKSCDKTHTCPPCPAPPVAGPSVFLFPPKPKDTLMISRTPEVTCVVVDVKHEDPEVKFNWYVDGVEVHNAKTKPREEQYNSTYRVVSVLTVLHQDWLNGKEYKCKVSNKALPAPIEKTISKAKGQPREPQVYTLPPSREEMTKNQVSLTCLVKGFYPSDIAVEWESNGQPENNYKTTPPVLDSDGSFFLYSKLTVDKSRWQQGNVFSCSVMHEALHNHYTQKSLSLSPGK

SEQ ID NO: 12136 - protein, 122 aa, synthetic construct; identical to SEQ ID NO: 6732
  source 1..122: note = Description of Artificial Sequence: Synthetic polypeptide; note = VH of XENP018139

SEQ ID NO: 12137 - protein, 5 aa, synthetic construct
  source 1..5: note = Description of Artificial Sequence: Synthetic peptide; note = XENP018139 vhCDR1
NYWMH

SEQ ID NO: 12138 - protein, 19 aa, synthetic construct
  source 1..19: note = Description of Artificial Sequence: Synthetic peptide; note = XENP018139 vhCDR2
EIRLKSNNYATHYAEPVKG

SEQ ID NO: 12139 - protein, 11 aa, synthetic construct
  source 1..11: note = Description of Artificial Sequence: Synthetic peptide; note = XENP018139 vhCDR3
YYGNYGGYFDV

SEQ ID NO: 12140 - protein, 214 aa, synthetic construct; identical to SEQ ID NO: 11550
  source 1..214: note = Description of Artificial Sequence: Synthetic polypeptide; note = XENP018139 1G6_H1.42_L1_IgG1_PVA_/S267K Light Chain

SEQ ID NO: 12141 - protein, 107 aa, synthetic construct; identical to SEQ ID NO: 6247
  source 1..107: note = Description of Artificial Sequence: Synthetic polypeptide; note = VL of XENP018139

SEQ ID NO: 12142 - protein, 11 aa, synthetic construct
  source 1..11: note = Description of Artificial Sequence: Synthetic peptide; note = XENP018139 vlCDR1
RASQSVSNDVA

SEQ ID NO: 12143 - protein, 7 aa, synthetic construct
  source 1..7: note = Description of Artificial Sequence: Synthetic peptide; note = XENP018139 vlCDR2
YASHRYT

SEQ ID NO: 12144 - protein, 9 aa, synthetic construct
  source 1..9: note = Description of Artificial Sequence: Synthetic peptide; note = XENP018139 vlCDR3
QQDYSSPRT

SEQ ID NO: 12145 - protein, 451 aa, synthetic construct
  source 1..451: note = Description of Artificial Sequence: Synthetic polypeptide; note = XENP018140 1G6_H1.43_L1_IgG1_PVA_/S267K Heavy Chain
EVQLVESGGGLVKPGGSLRLSCAASGFTFSNYWMDWVRQAPGKGLEWVGEIRLKSNNYATHYAEPVKGRFTISRDDSKSTVYLQMNSLKTEDTAVYYCTRYYGNYGGYFDVWGAGTLVTVSSASTKGPSVFPLAPSSKSTSGGTAALGCLVKDYFPEPVTVSWNSGALTSGVHTFPAVLQSSGLYSLSSVVTVPSSSLGTQTYICNVNHKPSNTKVDKKVEPKSCDKTHTCPPCPAPPVAGPSVFLFPPKPKDTLMISRTPEVTCVVVDVKHEDPEVKFNWYVDGVEVHNAKTKPREEQYNSTYRVVSVLTVLHQDWLNGKEYKCKVSNKALPAPIEKTISKAKGQPREPQVYTLPPSREEMTKNQVSLTCLVKGFYPSDIAVEWESNGQPENNYKTTPPVLDSDGSFFLYSKLTVDKSRWQQGNVFSCSVMHEALHNHYTQKSLSLSPGK

SEQ ID NO: 12146 - protein, 122 aa, synthetic construct; identical to SEQ ID NO: 6741
  source 1..122: note = Description of Artificial Sequence: Synthetic polypeptide; note = VH of XENP018140

SEQ ID NO: 12147 - protein, 5 aa, synthetic construct
  source 1..5: note = Description of Artificial Sequence: Synthetic peptide; note = XENP018140 vhCDR1
NYWMD

SEQ ID NO: 12148 - protein, 19 aa, synthetic construct
  source 1..19: note = Description of Artificial Sequence: Synthetic peptide; note = XENP018140 vhCDR2
EIRLKSNNYATHYAEPVKG

SEQ ID NO: 12149 - protein, 11 aa, synthetic construct
  source 1..11: note = Description of Artificial Sequence: Synthetic peptide; note = XENP018140 vhCDR3
YYGNYGGYFDV

SEQ ID NO: 12150 - protein, 214 aa, synthetic construct; identical to SEQ ID NO: 11550
  source 1..214: note = Description of Artificial Sequence: Synthetic polypeptide; note = XENP018140 1G6_H1.43_L1_IgG1_PVA_/S267K Light Chain

SEQ ID NO: 12151 - protein, 107 aa, synthetic construct; identical to SEQ ID NO: 6247
  source 1..107: note = Description of Artificial Sequence: Synthetic polypeptide; note = VL of XENP018140

SEQ ID NO: 12152 - protein, 11 aa, synthetic construct
  source 1..11: note = Description of Artificial Sequence: Synthetic peptide; note = XENP018140 vlCDR1
RASQSVSNDVA

SEQ ID NO: 12153 - protein, 7 aa, synthetic construct
  source 1..7: note = Description of Artificial Sequence: Synthetic peptide; note = XENP018140 vlCDR2
YASHRYT

SEQ ID NO: 12154 - protein, 9 aa, synthetic construct
  source 1..9: note = Description of Artificial Sequence: Synthetic peptide; note = XENP018140 vlCDR3
QQDYSSPRT

SEQ ID NO: 12155 - protein, 451 aa, synthetic construct
  source 1..451: note = Description of Artificial Sequence: Synthetic polypeptide; note = XENP018141 1G6_H1.44_L1_IgG1_PVA_/S267K Heavy Chain
EVQLVESGGGLVKPGGSLRLSCAASGFTFSNYWMGWVRQAPGKGLEWVGEIRLKSNNYATHYAEPVKGRFTISRDDSKSTVYLQMNSLKTEDTAVYYCTRYYGNYGGYFDVWGAGTLVTVSSASTKGPSVFPLAPSSKSTSGGTAALGCLVKDYFPEPVTVSWNSGALTSGVHTFPAVLQSSGLYSLSSVVTVPSSSLGTQTYICNVNHKPSNTKVDKKVEPKSCDKTHTCPPCPAPPVAGPSVFLFPPKPKDTLMISRTPEVTCVVVDVKHEDPEVKFNWYVDGVEVHNAKTKPREEQYNSTYRVVSVLTVLHQDWLNGKEYKCKVSNKALPAPIEKTISKAKGQPREPQVYTLPPSREEMTKNQVSLTCLVKGFYPSDIAVEWESNGQPENNYKTTPPVLDSDGSFFLYSKLTVDKSRWQQGNVFSCSVMHEALHNHYTQKSLSLSPGK

SEQ ID NO: 12156 - protein, 122 aa, synthetic construct; identical to SEQ ID NO: 6750
  source 1..122: note = Description of Artificial Sequence: Synthetic polypeptide; note = VH of XENP018141

SEQ ID NO: 12157 - protein, 5 aa, synthetic construct
  source 1..5: note = Description of Artificial Sequence: Synthetic peptide; note = XENP018141 vhCDR1
NYWMG

SEQ ID NO: 12158 - protein, 18 aa, synthetic construct
  source 1..18: note = Description of Artificial Sequence: Synthetic peptide; note = XENP018141 vhCDR2
EIRLKSNNYATHYAEPVK

SEQ ID NO: 12159 - protein, 11 aa, synthetic construct
  source 1..11: note = Description of Artificial Sequence: Synthetic peptide; note = XENP018141 vhCDR3
YYGNYGGYFDV

SEQ ID NO: 12160 - protein, 214 aa, synthetic construct; identical to SEQ ID NO: 11550
  source 1..214: note = Description of Artificial Sequence: Synthetic polypeptide; note = XENP018141 1G6_H1.44_L1_IgG1_PVA_/S267K Light Chain

SEQ ID NO: 12161 - protein, 107 aa, synthetic construct; identical to SEQ ID NO: 6247
  source 1..107: note = Description of Artificial Sequence: Synthetic polypeptide; note = VL of XENP018141

SEQ ID NO: 12162 - protein, 11 aa, synthetic construct
  source 1..11: note = Description of Artificial Sequence: Synthetic peptide; note = XENP018141 vlCDR1
RASQSVSNDVA

SEQ ID NO: 12163 - protein, 7 aa, synthetic construct
  source 1..7: note = Description of Artificial Sequence: Synthetic peptide; note = XENP018141 vlCDR2
YASHRYT

SEQ ID NO: 12164 - protein, 9 aa, synthetic construct
  source 1..9: note = Description of Artificial Sequence: Synthetic peptide; note = XENP018141 vlCDR3
QQDYSSPRT

SEQ ID NO: 12165 - protein, 451 aa, synthetic construct
  source 1..451: note = Description of Artificial Sequence: Synthetic polypeptide; note = XENP018142 1G6_H1.45_L1_IgG1_PVA_/S267K Heavy Chain
EVQLVESGGGLVKPGGSLRLSCAASGFTFSNYWMNWARQAPGKGLEWVGEIRLKSNNYATHYAEPVKGRFTISRDDSKSTVYLQMNSLKTEDTAVYYCTRYYGNYGGYFDVWGAGTLVTVSSASTKGPSVFPLAPSSKSTSGGTAALGCLVKDYFPEPVTVSWNSGALTSGVHTFPAVLQSSGLYSLSSVVTVPSSSLGTQTYICNVNHKPSNTKVDKKVEPKSCDKTHTCPPCPAPPVAGPSVFLFPPKPKDTLMISRTPEVTCVVVDVKHEDPEVKFNWYVDGVEVHNAKTKPREEQYNSTYRVVSVLTVLHQDWLNGKEYKCKVSNKALPAPIEKTISKAKGQPREPQVYTLPPSREEMTKNQVSLTCLVKGFYPSDIAVEWESNGQPENNYKTTPPVLDSDGSFFLYSKLTVDKSRWQQGNVFSCSVMHEALHNHYTQKSLSLSPGK

SEQ ID NO: 12166 - protein, 122 aa, synthetic construct; identical to SEQ ID NO: 6759
  source 1..122: note = Description of Artificial Sequence: Synthetic polypeptide; note = VH of XENP018142

SEQ ID NO: 12167 - protein, 5 aa, synthetic construct
  source 1..5: note = Description of Artificial Sequence: Synthetic peptide; note = XENP018142 vhCDR1
NYWMN

SEQ ID NO: 12168 - protein, 19 aa, synthetic construct
  source 1..19: note = Description of Artificial Sequence: Synthetic peptide; note = XENP018142 vhCDR2
EIRLKSNNYATHYAEPVKG

SEQ ID NO: 12169 - protein, 11 aa, synthetic construct
  source 1..11: note = Description of Artificial Sequence: Synthetic peptide; note = XENP018142 vhCDR3
YYGNYGGYFDV

SEQ ID NO: 12170 - protein, 214 aa, synthetic construct; identical to SEQ ID NO: 11550
  source 1..214: note = Description of Artificial Sequence: Synthetic polypeptide; note = XENP018142 1G6_H1.45_L1_IgG1_PVA_/S267K Light Chain

SEQ ID NO: 12171 - protein, 107 aa, synthetic construct; identical to SEQ ID NO: 6247
  source 1..107: note = Description of Artificial Sequence: Synthetic polypeptide; note = VL of XENP018142

SEQ ID NO: 12172 - protein, 11 aa, synthetic construct
  source 1..11: note = Description of Artificial Sequence: Synthetic peptide; note = XENP018142 vlCDR1
RASQSVSNDVA

SEQ ID NO: 12173 - protein, 7 aa, synthetic construct
  source 1..7: note = Description of Artificial Sequence: Synthetic peptide; note = XENP018142 vlCDR2
YASHRYT

SEQ ID NO: 12174 - protein, 9 aa, synthetic construct
  source 1..9: note = Description of Artificial Sequence: Synthetic peptide; note = XENP018142 vlCDR3
QQDYSSPRT

SEQ ID NO: 12175 - protein, 451 aa, synthetic construct
  source 1..451: note = Description of Artificial Sequence: Synthetic polypeptide; note = XENP018143 1G6_H1.46_L1_IgG1_PVA_/S267K Heavy Chain
EVQLVESGGGLVKPGGSLRLSCAASGFTFSNYWMNWIRQAPGKGLEWVGEIRLKSNNYATHYAEPVKGRFTISRDDSKSTVYLQMNSLKTEDTAVYYCTRYYGNYGGYFDVWGAGTLVTVSSASTKGPSVFPLAPSSKSTSGGTAALGCLVKDYFPEPVTVSWNSGALTSGVHTFPAVLQSSGLYSLSSVVTVPSSSLGTQTYICNVNHKPSNTKVDKKVEPKSCDKTHTCPPCPAPPVAGPSVFLFPPKPKDTLMISRTPEVTCVVVDVKHEDPEVKFNWYVDGVEVHNAKTKPREEQYNSTYRVVSVLTVLHQDWLNGKEYKCKVSNKALPAPIEKTISKAKGQPREPQVYTLPPSREEMTKNQVSLTCLVKGFYPSDIAVEWESNGQPENNYKTTPPVLDSDGSFFLYSKLTVDKSRWQQGNVFSCSVMHEALHNHYTQKSLSLSPGK

SEQ ID NO: 12176 - protein, 122 aa, synthetic construct; identical to SEQ ID NO: 6768
  source 1..122: note = Description of Artificial Sequence: Synthetic polypeptide; note = VH of XENP018143

SEQ ID NO: 12177 - protein, 5 aa, synthetic construct
  source 1..5: note = Description of Artificial Sequence: Synthetic peptide; note = XENP018143 vhCDR1
NYWMN

SEQ ID NO: 12178 - protein, 19 aa, synthetic construct
  source 1..19: note = Description of Artificial Sequence: Synthetic peptide; note = XENP018143 vhCDR2
EIRLKSNNYATHYAEPVKG

SEQ ID NO: 12179 - protein, 11 aa, synthetic construct
  source 1..11: note = Description of Artificial Sequence: Synthetic peptide; note = XENP018143 vhCDR3
YYGNYGGYFDV

SEQ ID NO: 12180 - protein, 214 aa, synthetic construct; identical to SEQ ID NO: 11550
  source 1..214: note = Description of Artificial Sequence: Synthetic polypeptide; note = XENP018143 1G6_H1.46_L1_IgG1_PVA_/S267K Light Chain

SEQ ID NO: 12181 - protein, 107 aa, synthetic construct; identical to SEQ ID NO: 6247
  source 1..107: note = Description of Artificial Sequence: Synthetic polypeptide; note = VL of XENP018143

SEQ ID NO: 12182 - protein, 11 aa, synthetic construct
  source 1..11: note = Description of Artificial Sequence: Synthetic peptide; note = XENP018143 vlCDR1
RASQSVSNDVA

SEQ ID NO: 12183 - protein, 7 aa, synthetic construct
  source 1..7: note = Description of Artificial Sequence: Synthetic peptide; note = XENP018143 vlCDR2
YASHRYT

SEQ ID NO: 12184 - protein, 9 aa, synthetic construct
  source 1..9: note = Description of Artificial Sequence: Synthetic peptide; note = XENP018143 vlCDR3
QQDYSSPRT

SEQ ID NO: 12185 - protein, 451 aa, synthetic construct
  source 1..451: note = Description of Artificial Sequence: Synthetic polypeptide; note = XENP018144 1G6_H1.47_L1_IgG1_PVA_/S267K Heavy Chain
EVQLVESGGGLVKPGGSLRLSCAASGFTFSNYWMNWFRQAPGKGLEWVGEIRLKSNNYATHYAEPVKGRFTISRDDSKSTVYLQMNSLKTEDTAVYYCTRYYGNYGGYFDVWGAGTLVTVSSASTKGPSVFPLAPSSKSTSGGTAALGCLVKDYFPEPVTVSWNSGALTSGVHTFPAVLQSSGLYSLSSVVTVPSSSLGTQTYICNVNHKPSNTKVDKKVEPKSCDKTHTCPPCPAPPVAGPSVFLFPPKPKDTLMISRTPEVTCVVVDVKHEDPEVKFNWYVDGVEVHNAKTKPREEQYNSTYRVVSVLTVLHQDWLNGKEYKCKVSNKALPAPIEKTISKAKGQPREPQVYTLPPSREEMTKNQVSLTCLVKGFYPSDIAVEWESNGQPENNYKTTPPVLDSDGSFFLYSKLTVDKSRWQQGNVFSCSVMHEALHNHYTQKSLSLSPGK

SEQ ID NO: 12186 - protein, 122 aa, synthetic construct; identical to SEQ ID NO: 6777
  source 1..122: note = Description of Artificial Sequence: Synthetic polypeptide; note = VH of XENP018144

SEQ ID NO: 12187 - protein, 5 aa, synthetic construct
  source 1..5: note = Description of Artificial Sequence: Synthetic peptide; note = XENP018144 vhCDR1
NYWMN

SEQ ID NO: 12188 - protein, 19 aa, synthetic construct
  source 1..19: note = Description of Artificial Sequence: Synthetic peptide; note = XENP018144 vhCDR2
EIRLKSNNYATHYAEPVKG

SEQ ID NO: 12189 - protein, 11 aa, synthetic construct
  source 1..11: note = Description of Artificial Sequence: Synthetic peptide; note = XENP018144 vhCDR3
YYGNYGGYFDV

SEQ ID NO: 12190 - protein, 214 aa, synthetic construct; identical to SEQ ID NO: 11550
  source 1..214: note = Description of Artificial Sequence: Synthetic polypeptide; note = XENP018144 1G6_H1.47_L1_IgG1_PVA_/S267K Light Chain

SEQ ID NO: 12191 - protein, 107 aa, synthetic construct; identical to SEQ ID NO: 6247
  source 1..107: note = Description of Artificial Sequence: Synthetic polypeptide; note = VL of XENP018144

SEQ ID NO: 12192 - protein, 11 aa, synthetic construct
  source 1..11: note = Description of Artificial Sequence: Synthetic peptide; note = XENP018144 vlCDR1
RASQSVSNDVA

SEQ ID NO: 12193 - protein, 7 aa, synthetic construct
  source 1..7: note = Description of Artificial Sequence: Synthetic peptide; note = XENP018144 vlCDR2
YASHRYT

SEQ ID NO: 12194 - protein, 9 aa, synthetic construct
  source 1..9: note = Description of Artificial Sequence: Synthetic peptide; note = XENP018144 vlCDR3
QQDYSSPRT

SEQ ID NO: 12195 - protein, 451 aa, synthetic construct
  source 1..451: note = Description of Artificial Sequence: Synthetic polypeptide; note = XENP018145 1G6_H1.48_L1_IgG1_PVA_/S267K Heavy Chain
EVQLVESGGGLVKPGGSLRLSCAASGFTFSNYWMNWVRKAPGKGLEWVGEIRLKSNNYATHYAEPVKGRFTISRDDSKSTVYLQMNSLKTEDTAVYYCTRYYGNYGGYFDVWGAGTLVTVSSASTKGPSVFPLAPSSKSTSGGTAALGCLVKDYFPEPVTVSWNSGALTSGVHTFPAVLQSSGLYSLSSVVTVPSSSLGTQTYICNVNHKPSNTKVDKKVEPKSCDKTHTCPPCPAPPVAGPSVFLFPPKPKDTLMISRTPEVTCVVVDVKHEDPEVKFNWYVDGVEVHNAKTKPREEQYNSTYRVVSVLTVLHQDWLNGKEYKCKVSNKALPAPIEKTISKAKGQPREPQVYTLPPSREEMTKNQVSLTCLVKGFYPSDIAVEWESNGQPENNYKTTPPVLDSDGSFFLYSKLTVDKSRWQQGNVFSCSVMHEALHNHYTQKSLSLSPGK

SEQ ID NO: 12196 - protein, 122 aa, synthetic construct; identical to SEQ ID NO: 6786
  source 1..122: note = Description of Artificial Sequence: Synthetic polypeptide; note = VH of XENP018145

SEQ ID NO: 12197 - protein, 5 aa, synthetic construct
  source 1..5: note = Description of Artificial Sequence: Synthetic peptide; note = XENP018145 vhCDR1
NYWMN

SEQ ID NO: 12198 - protein, 19 aa, synthetic construct
  source 1..19: note = Description of Artificial Sequence: Synthetic peptide; note = XENP018145 vhCDR2
EIRLKSNNYATHYAEPVKG

SEQ ID NO: 12199 - protein, 11 aa, synthetic construct
  source 1..11: note = Description of Artificial Sequence: Synthetic peptide; note = XENP018145 vhCDR3
YYGNYGGYFDV

SEQ ID NO: 12200 - protein, 214 aa, synthetic construct; identical to SEQ ID NO: 11550
  source 1..214: note = Description of Artificial Sequence: Synthetic polypeptide; note = XENP018145 1G6_H1.48_L1_IgG1_PVA_/S267K Light Chain

SEQ ID NO: 12201 - protein, 107 aa, synthetic construct; identical to SEQ ID NO: 6247
  source 1..107: note = Description of Artificial Sequence: Synthetic polypeptide; note = VL of XENP018145

SEQ ID NO: 12202 - protein, 11 aa, synthetic construct
  source 1..11: note = Description of Artificial Sequence: Synthetic peptide; note = XENP018145 vlCDR1
RASQSVSNDVA

SEQ ID NO: 12203 - protein, 7 aa, synthetic construct
  source 1..7: note = Description of Artificial Sequence: Synthetic peptide; note = XENP018145 vlCDR2
YASHRYT

SEQ ID NO: 12204 - protein, 9 aa, synthetic construct
  source 1..9: note = Description of Artificial Sequence: Synthetic peptide; note = XENP018145 vlCDR3
QQDYSSPRT

SEQ ID NO: 12205 - protein, 451 aa, synthetic construct
  source 1..451: note = Description of Artificial Sequence: Synthetic polypeptide; note = XENP018146 1G6_H1.49_L1_IgG1_PVA_/S267K Heavy Chain
EVQLVESGGGLVKPGGSLRLSCAASGFTFSNYWMNWVRQSPGKGLEWVGEIRLKSNNYATHYAEPVKGRFTISRDDSKSTVYLQMNSLKTEDTAVYYCTRYYGNYGGYFDVWGAGTLVTVSSASTKGPSVFPLAPSSKSTSGGTAALGCLVKDYFPEPVTVSWNSGALTSGVHTFPAVLQSSGLYSLSSVVTVPSSSLGTQTYICNVNHKPSNTKVDKKVEPKSCDKTHTCPPCPAPPVAGPSVFLFPPKPKDTLMISRTPEVTCVVVDVKHEDPEVKFNWYVDGVEVHNAKTKPREEQYNSTYRVVSVLTVLHQDWLNGKEYKCKVSNKALPAPIEKTISKAKGQPREPQVYTLPPSREEMTKNQVSLTCLVKGFYPSDIAVEWESNGQPENNYKTTPPVLDSDGSFFLYSKLTVDKSRWQQGNVFSCSVMHEALHNHYTQKSLSLSPGK

SEQ ID NO: 12206 - protein, 122 aa, synthetic construct; identical to SEQ ID NO: 6792
  source 1..122: note = Description of Artificial Sequence: Synthetic polypeptide; note = VH of XENP018146

SEQ ID NO: 12207 - protein, 5 aa, synthetic construct
  source 1..5: note = Description of Artificial Sequence: Synthetic peptide; note = XENP018146 vhCDR1
NYWMN

SEQ ID NO: 12208 - protein, 19 aa, synthetic construct
  source 1..19: note = Description of Artificial Sequence: Synthetic peptide; note = XENP018146 vhCDR2
EIRLKSNNYATHYAEPVKG

SEQ ID NO: 12209 - protein, 11 aa, synthetic construct
  source 1..11: note = Description of Artificial Sequence: Synthetic peptide; note = XENP018146 vhCDR3
YYGNYGGYFDV

SEQ ID NO: 12210 - protein, 214 aa, synthetic construct; identical to SEQ ID NO: 11550
  source 1..214: note = Description of Artificial Sequence: Synthetic polypeptide; note = XENP018146 1G6_H1.49_L1_IgG1_PVA_/S267K Light Chain

SEQ ID NO: 12211 - protein, 107 aa, synthetic construct; identical to SEQ ID NO: 6247
  source 1..107: note = Description of Artificial Sequence: Synthetic polypeptide; note = VL of XENP018146

SEQ ID NO: 12212 - protein, 11 aa, synthetic construct
  source 1..11: note = Description of Artificial Sequence: Synthetic peptide; note = XENP018146 vlCDR1
RASQSVSNDVA

SEQ ID NO: 12213 - protein, 7 aa, synthetic construct
  source 1..7: note = Description of Artificial Sequence: Synthetic peptide; note = XENP018146 vlCDR2
YASHRYT

SEQ ID NO: 12214 - protein, 9 aa, synthetic construct
  source 1..9: note = Description of Artificial Sequence: Synthetic peptide; note = XENP018146 vlCDR3
QQDYSSPRT

SEQ ID NO: 12215 - protein, 451 aa, synthetic construct
  source 1..451: note = Description of Artificial Sequence: Synthetic polypeptide; note = XENP018147 1G6_H1.50_L1_IgG1_PVA_/S267K Heavy Chain
EVQLVESGGGLVKPGGSLRLSCAASGFTFSNYWMNWVRQAPEKGLEWVGEIRLKSNNYATHYAEPVKGRFTISRDDSKSTVYLQMNSLKTEDTAVYYCTRYYGNYGGYFDVWGAGTLVTVSSASTKGPSVFPLAPSSKSTSGGTAALGCLVKDYFPEPVTVSWNSGALTSGVHTFPAVLQSSGLYSLSSVVTVPSSSLGTQTYICNVNHKPSNTKVDKKVEPKSCDKTHTCPPCPAPPVAGPSVFLFPPKPKDTLMISRTPEVTCVVVDVKHEDPEVKFNWYVDGVEVHNAKTKPREEQYNSTYRVVSVLTVLHQDWLNGKEYKCKVSNKALPAPIEKTISKAKGQPREPQVYTLPPSREEMTKNQVSLTCLVKGFYPSDIAVEWESNGQPENNYKTTPPVLDSDGSFFLYSKLTVDKSRWQQGNVFSCSVMHEALHNHYTQKSLSLSPGK

SEQ ID NO: 12216 - protein, 122 aa, synthetic construct; identical to SEQ ID NO: 6801
  source 1..122: note = Description of Artificial Sequence: Synthetic polypeptide; note = VH of XENP018147

SEQ ID NO: 12217 - protein, 5 aa, synthetic construct
  source 1..5: note = Description of Artificial Sequence: Synthetic peptide; note = XENP018147 vhCDR1
NYWMN

SEQ ID NO: 12218 - protein, 19 aa, synthetic construct
  source 1..19: note = Description of Artificial Sequence: Synthetic peptide; note = XENP018147 vhCDR2
EIRLKSNNYATHYAEPVKG

SEQ ID NO: 12219 - protein, 11 aa, synthetic construct
  source 1..11: note = Description of Artificial Sequence: Synthetic peptide; note = XENP018147 vhCDR3
YYGNYGGYFDV

SEQ ID NO: 12220 - protein, 214 aa, synthetic construct; identical to SEQ ID NO: 11550
  source 1..214: note = Description of Artificial Sequence: Synthetic polypeptide; note = XENP018147 1G6_H1.50_L1_IgG1_PVA_/S267K Light Chain

SEQ ID NO: 12221 - protein, 107 aa, synthetic construct; identical to SEQ ID NO: 6247
  source 1..107: note = Description of Artificial Sequence: Synthetic polypeptide; note = VL of XENP018147

SEQ ID NO: 12222 - protein, 11 aa, synthetic construct
  source 1..11: note = Description of Artificial Sequence: Synthetic peptide; note = XENP018147 vlCDR1
RASQSVSNDVA

SEQ ID NO: 12223 - protein, 7 aa, synthetic construct
  source 1..7: note = Description of Artificial Sequence: Synthetic peptide; note = XENP018147 vlCDR2
YASHRYT

SEQ ID NO: 12224 - protein, 9 aa, synthetic construct
  source 1..9: note = Description of Artificial Sequence: Synthetic peptide; note = XENP018147 vlCDR3
QQDYSSPRT

SEQ ID NO: 12225 - protein, 451 aa, synthetic construct
  source 1..451: note = Description of Artificial Sequence: Synthetic polypeptide; note = XENP018148 1G6_H1.51_L1_IgG1_PVA_/S267K Heavy Chain
EVQLVESGGGLVKPGGSLRLSCAASGFTFSNYWMNWVRQAPGKGLEYVGEIRLKSNNYATHYAEPVKGRFTISRDDSKSTVYLQMNSLKTEDTAVYYCTRYYGNYGGYFDVWGAGTLVTVSSASTKGPSVFPLAPSSKSTSGGTAALGCLVKDYFPEPVTVSWNSGALTSGVHTFPAVLQSSGLYSLSSVVTVPSSSLGTQTYICNVNHKPSNTKVDKKVEPKSCDKTHTCPPCPAPPVAGPSVFLFPPKPKDTLMISRTPEVTCVVVDVKHEDPEVKFNWYVDGVEVHNAKTKPREEQYNSTYRVVSVLTVLHQDWLNGKEYKCKVSNKALPAPIEKTISKAKGQPREPQVYTLPPSREEMTKNQVSLTCLVKGFYPSDIAVEWESNGQPENNYKTTPPVLDSDGSFFLYSKLTVDKSRWQQGNVFSCSVMHEALHNHYTQKSLSLSPGK

SEQ ID NO: 12226 - protein, 122 aa, synthetic construct; identical to SEQ ID NO: 6810
  source 1..122: note = Description of Artificial Sequence: Synthetic polypeptide; note = VH of XENP018148

SEQ ID NO: 12227 - protein, 5 aa, synthetic construct
  source 1..5: note = Description of Artificial Sequence: Synthetic peptide; note = XENP018148 vhCDR1
NYWMN

SEQ ID NO: 12228 - protein, 19 aa, synthetic construct
  source 1..19: note = Description of Artificial Sequence: Synthetic peptide; note = XENP018148 vhCDR2
EIRLKSNNYATHYAEPVKG

SEQ ID NO: 12229 - protein, 11 aa, synthetic construct
  source 1..11: note = Description of Artificial Sequence: Synthetic peptide; note = XENP018148 vhCDR3
YYGNYGGYFDV

SEQ ID NO: 12230 - protein, 214 aa, synthetic construct; identical to SEQ ID NO: 11550
  source 1..214: note = Description of Artificial Sequence: Synthetic polypeptide; note = XENP018148 1G6_H1.51_L1_IgG1_PVA_/S267K Light Chain

SEQ ID NO: 12231 - protein, 107 aa, synthetic construct; identical to SEQ ID NO: 6247
  source 1..107: note = Description of Artificial Sequence: Synthetic polypeptide; note = VL of XENP018148

SEQ ID NO: 12232 - protein, 11 aa, synthetic construct
  source 1..11: note = Description of Artificial Sequence: Synthetic peptide; note = XENP018148 vlCDR1
RASQSVSNDVA

SEQ ID NO: 12233 - protein, 7 aa, synthetic construct
  source 1..7: note = Description of Artificial Sequence: Synthetic peptide; note = XENP018148 vlCDR2
YASHRYT

SEQ ID NO: 12234 - protein, 9 aa, synthetic construct
  source 1..9: note = Description of Artificial Sequence: Synthetic peptide; note = XENP018148 vlCDR3
QQDYSSPRT

SEQ ID NO: 12235 - protein, 451 aa, synthetic construct
  source 1..451: note = Description of Artificial Sequence: Synthetic polypeptide; note = XENP018149 1G6_H1.52_L1_IgG1_PVA_/S267K Heavy Chain
EVQLVESGGGLVKPGGSLRLSCAASGFTFSNYWMNWVRQAPGKGLEWVAEIRLKSNNYATHYAEPVKGRFTISRDDSKSTVYLQMNSLKTEDTAVYYCTRYYGNYGGYFDVWGAGTLVTVSSASTKGPSVFPLAPSSKSTSGGTAALGCLVKDYFPEPVTVSWNSGALTSGVHTFPAVLQSSGLYSLSSVVTVPSSSLGTQTYICNVNHKPSNTKVDKKVEPKSCDKTHTCPPCPAPPVAGPSVFLFPPKPKDTLMISRTPEVTCVVVDVKHEDPEVKFNWYVDGVEVHNAKTKPREEQYNSTYRVVSVLTVLHQDWLNGKEYKCKVSNKALPAPIEKTISKAKGQPREPQVYTLPPSREEMTKNQVSLTCLVKGFYPSDIAVEWESNGQPENNYKTTPPVLDSDGSFFLYSKLTVDKSRWQQGNVFSCSVMHEALHNHYTQKSLSLSPGK

SEQ ID NO: 12236 - protein, 122 aa, synthetic construct; identical to SEQ ID NO: 6819
  source 1..122: note = Description of Artificial Sequence: Synthetic polypeptide; note = VH of XENP018149

SEQ ID NO: 12237 - protein, 5 aa, synthetic construct
  source 1..5: note = Description of Artificial Sequence: Synthetic peptide; note = XENP018149 vhCDR1
NYWMN

SEQ ID NO: 12238 - protein, 19 aa, synthetic construct
  source 1..19: note = Description of Artificial Sequence: Synthetic peptide; note = XENP018149 vhCDR2
EIRLKSNNYATHYAEPVKG

SEQ ID NO: 12239 - protein, 11 aa, synthetic construct
  source 1..11: note = Description of Artificial Sequence: Synthetic peptide; note = XENP018149 vhCDR3
YYGNYGGYFDV

SEQ ID NO: 12240 - protein, 214 aa, synthetic construct; identical to SEQ ID NO: 11550
  source 1..214: note = Description of Artificial Sequence: Synthetic polypeptide; note = XENP018149 1G6_H1.52_L1_IgG1_PVA_/S267K Light Chain

SEQ ID NO: 12241 - protein, 107 aa, synthetic construct; identical to SEQ ID NO: 6247
  source 1..107: note = Description of Artificial Sequence: Synthetic polypeptide; note = VL of XENP018149

SEQ ID NO: 12242 - protein, 11 aa, synthetic construct
  source 1..11: note = Description of Artificial Sequence: Synthetic peptide; note = XENP018149 vlCDR1
RASQSVSNDVA

SEQ ID NO: 12243 - protein, 7 aa, synthetic construct
  source 1..7: note = Description of Artificial Sequence: Synthetic peptide; note = XENP018149 vlCDR2
YASHRYT

SEQ ID NO: 12244 - protein, 9 aa, synthetic construct
  source 1..9: note = Description of Artificial Sequence: Synthetic peptide; note = XENP018149 vlCDR3
QQDYSSPRT

SEQ ID NO: 12245 - protein, 451 aa, synthetic construct
  source 1..451: note = Description of Artificial Sequence: Synthetic polypeptide; note = XENP018150 1G6_H1.53_L1_IgG1_PVA_/S267K Heavy Chain
EVQLVESGGGLVKPGGSLRLSCAASGFTFSNYWMNWVRQAPGKGLEWVSEIRLKSNNYATHYAEPVKGRFTISRDDSKSTVYLQMNSLKTEDTAVYYCTRYYGNYGGYFDVWGAGTLVTVSSASTKGPSVFPLAPSSKSTSGGTAALGCLVKDYFPEPVTVSWNSGALTSGVHTFPAVLQSSGLYSLSSVVTVPSSSLGTQTYICNVNHKPSNTKVDKKVEPKSCDKTHTCPPCPAPPVAGPSVFLFPPKPKDTLMISRTPEVTCVVVDVKHEDPEVKFNWYVDGVEVHNAKTKPREEQYNSTYRVVSVLTVLHQDWLNGKEYKCKVSNKALPAPIEKTISKAKGQPREPQVYTLPPSREEMTKNQVSLTCLVKGFYPSDIAVEWESNGQPENNYKTTPPVLDSDGSFFLYSKLTVDKSRWQQGNVFSCSVMHEALHNHYTQKSLSLSPGK

SEQ ID NO: 12246 - protein, 122 aa, synthetic construct; identical to SEQ ID NO: 6828
  source 1..122: note = Description of Artificial Sequence: Synthetic polypeptide; note = VH of XENP018150

SEQ ID NO: 12247 - protein, 5 aa, synthetic construct
  source 1..5: note = Description of Artificial Sequence: Synthetic peptide; note = XENP018150 vhCDR1
NYWMN

SEQ ID NO: 12248 - protein, 19 aa, synthetic construct
  source 1..19: note = Description of Artificial Sequence: Synthetic peptide; note = XENP018150 vhCDR2
EIRLKSNNYATHYAEPVKG

SEQ ID NO: 12249 - protein, 11 aa, synthetic construct
  source 1..11: note = Description of Artificial Sequence: Synthetic peptide; note = XENP018150 vhCDR3
YYGNYGGYFDV

SEQ ID NO: 12250 - protein, 214 aa, synthetic construct; identical to SEQ ID NO: 11550
  source 1..214: note = Description of Artificial Sequence: Synthetic polypeptide; note = XENP018150 1G6_H1.53_L1_IgG1_PVA_/S267K Light Chain

SEQ ID NO: 12251 - protein, 107 aa, synthetic construct; identical to SEQ ID NO: 6247
  source 1..107: note = Description of Artificial Sequence: Synthetic polypeptide; note = VL of XENP018150

SEQ ID NO: 12252 - protein, 11 aa, synthetic construct
  source 1..11: note = Description of Artificial Sequence: Synthetic peptide; note = XENP018150 vlCDR1
RASQSVSNDVA

SEQ ID NO: 12253 - protein, 7 aa, synthetic construct
  source 1..7: note = Description of Artificial Sequence: Synthetic peptide; note = XENP018150 vlCDR2
YASHRYT

SEQ ID NO: 12254 - protein, 9 aa, synthetic construct
  source 1..9: note = Description of Artificial Sequence: Synthetic peptide; note = XENP018150 vlCDR3
QQDYSSPRT

SEQ ID NO: 12255 - protein, 451 aa, synthetic construct
  source 1..451: note = Description of Artificial Sequence: Synthetic polypeptide; note = XENP018151 1G6_H1.54_L1_IgG1_PVA_/S267K Heavy Chain
EVQLVESGGGLVKPGGSLRLSCAASGFTFSNYWMNWVRQAPGKGLEWVGQIRLKSNNYATHYAEPVKGRFTISRDDSKSTVYLQMNSLKTEDTAVYYCTRYYGNYGGYFDVWGAGTLVTVSSASTKGPSVFPLAPSSKSTSGGTAALGCLVKDYFPEPVTVSWNSGALTSGVHTFPAVLQSSGLYSLSSVVTVPSSSLGTQTYICNVNHKPSNTKVDKKVEPKSCDKTHTCPPCPAPPVAGPSVFLFPPKPKDTLMISRTPEVTCVVVDVKHEDPEVKFNWYVDGVEVHNAKTKPREEQYNSTYRVVSVLTVLHQDWLNGKEYKCKVSNKALPAPIEKTISKAKGQPREPQVYTLPPSREEMTKNQVSLTCLVKGFYPSDIAVEWESNGQPENNYKTTPPVLDSDGSFFLYSKLTVDKSRWQQGNVFSCSVMHEALHNHYTQKSLSLSPGK

SEQ ID NO: 12256 - protein, 122 aa, synthetic construct; identical to SEQ ID NO: 6837
  source 1..122: note = Description of Artificial Sequence: Synthetic polypeptide; note = VH of XENP018151

SEQ ID NO: 12257 - protein, 5 aa, synthetic construct
  source 1..5: note = Description of Artificial Sequence: Synthetic peptide; note = XENP018151 vhCDR1
NYWMN

SEQ ID NO: 12258 - protein, 19 aa, synthetic construct
  source 1..19: note = Description of Artificial Sequence: Synthetic peptide; note = XENP018151 vhCDR2
QIRLKSNNYATHYAEPVKG

SEQ ID NO: 12259 - protein, 11 aa, synthetic construct
  source 1..11: note = Description of Artificial Sequence: Synthetic peptide; note = XENP018151 vhCDR3
YYGNYGGYFDV

SEQ ID NO: 12260 - protein, 214 aa, synthetic construct; identical to SEQ ID NO: 11550
  source 1..214: note = Description of Artificial Sequence: Synthetic polypeptide; note = XENP018151 1G6_H1.54_L1_IgG1_PVA_/S267K Light Chain

SEQ ID NO: 12261 - protein, 107 aa, synthetic construct; identical to SEQ ID NO: 6247
  source 1..107: note = Description of Artificial Sequence: Synthetic polypeptide; note = VL of XENP018151

SEQ ID NO: 12262 - protein, 11 aa, synthetic construct
  source 1..11: note = Description of Artificial Sequence: Synthetic peptide; note = XENP018151 vlCDR1
RASQSVSNDVA

SEQ ID NO: 12263 - protein, 7 aa, synthetic construct
  source 1..7: note = Description of Artificial Sequence: Synthetic peptide; note = XENP018151 vlCDR2
YASHRYT

SEQ ID NO: 12264 - protein, 9 aa, synthetic construct
  source 1..9: note = Description of Artificial Sequence: Synthetic peptide; note = XENP018151 vlCDR3
QQDYSSPRT

SEQ ID NO: 12265 - protein, 451 aa, synthetic construct
  source 1..451: note = Description of Artificial Sequence: Synthetic polypeptide; note = XENP018152 1G6_H1.55_L1_IgG1_PVA_/S267K Heavy Chain
EVQLVESGGGLVKPGGSLRLSCAASGFTFSNYWMNWVRQAPGKGLEWVGDIRLKSNNYATHYAEPVKGRFTISRDDSKSTVYLQMNSLKTEDTAVYYCTRYYGNYGGYFDVWGAGTLVTVSSASTKGPSVFPLAPSSKSTSGGTAALGCLVKDYFPEPVTVSWNSGALTSGVHTFPAVLQSSGLYSLSSVVTVPSSSLGTQTYICNVNHKPSNTKVDKKVEPKSCDKTHTCPPCPAPPVAGPSVFLFPPKPKDTLMISRTPEVTCVVVDVKHEDPEVKFNWYVDGVEVHNAKTKPREEQYNSTYRVVSVLTVLHQDWLNGKEYKCKVSNKALPAPIEKTISKAKGQPREPQVYTLPPSREEMTKNQVSLTCLVKGFYPSDIAVEWESNGQPENNYKTTPPVLDSDGSFFLYSKLTVDKSRWQQGNVFSCSVMHEALHNHYTQKSLSLSPGK

SEQ ID NO: 12266 - protein, 122 aa, synthetic construct; identical to SEQ ID NO: 6846
  source 1..122: note = Description of Artificial Sequence: Synthetic polypeptide; note = VH of XENP018152

SEQ ID NO: 12267 - protein, 5 aa, synthetic construct
  source 1..5: note = Description of Artificial Sequence: Synthetic peptide; note = XENP018152 vhCDR1
NYWMN

SEQ ID NO: 12268 - protein, 19 aa, synthetic construct
  source 1..19: note = Description of Artificial Sequence: Synthetic peptide; note = XENP018152 vhCDR2
DIRLKSNNYATHYAEPVKG

SEQ ID NO: 12269 - protein, 11 aa, synthetic construct
  source 1..11: note = Description of Artificial Sequence: Synthetic peptide; note = XENP018152 vhCDR3
YYGNYGGYFDV

SEQ ID NO: 12270 - protein, 214 aa, synthetic construct; identical to SEQ ID NO: 11550
  source 1..214: note = Description of Artificial Sequence: Synthetic polypeptide; note = XENP018152 1G6_H1.55_L1_IgG1_PVA_/S267K Light Chain

SEQ ID NO: 12271 - protein, 107 aa, synthetic construct; identical to SEQ ID NO: 6247
  source 1..107: note = Description of Artificial Sequence: Synthetic polypeptide; note = VL of XENP018152

SEQ ID NO: 12272 - protein, 11 aa, synthetic construct
  source 1..11: note = Description of Artificial Sequence: Synthetic peptide; note = XENP018152 vlCDR1
RASQSVSNDVA

SEQ ID NO: 12273 - protein, 7 aa, synthetic construct
  source 1..7: note = Description of Artificial Sequence: Synthetic peptide; note = XENP018152 vlCDR2
YASHRYT

SEQ ID NO: 12274 - protein, 9 aa, synthetic construct
  source 1..9: note = Description of Artificial Sequence: Synthetic peptide; note = XENP018152 vlCDR3
QQDYSSPRT

SEQ ID NO: 12275 - protein, 451 aa, synthetic construct
  source 1..451: note = Description of Artificial Sequence: Synthetic polypeptide; note = XENP018153 1G6_H1.56_L1_IgG1_PVA_/S267K Heavy Chain
EVQLVESGGGLVKPGGSLRLSCAASGFTFSNYWMNWVRQAPGKGLEWVGKIRLKSNNYATHYAEPVKGRFTISRDDSKSTVYLQMNSLKTEDTAVYYCTRYYGNYGGYFDVWGAGTLVTVSSASTKGPSVFPLAPSSKSTSGGTAALGCLVKDYFPEPVTVSWNSGALTSGVHTFPAVLQSSGLYSLSSVVTVPSSSLGTQTYICNVNHKPSNTKVDKKVEPKSCDKTHTCPPCPAPPVAGPSVFLFPPKPKDTLMISRTPEVTCVVVDVKHEDPEVKFNWYVDGVEVHNAKTKPREEQYNSTYRVVSVLTVLHQDWLNGKEYKCKVSNKALPAPIEKTISKAKGQPREPQVYTLPPSREEMTKNQVSLTCLVKGFYPSDIAVEWESNGQPENNYKTTPPVLDSDGSFFLYSKLTVDKSRWQQGNVFSCSVMHEALHNHYTQKSLSLSPGK

SEQ ID NO: 12276 - protein, 122 aa, synthetic construct; identical to SEQ ID NO: 6855
  source 1..122: note = Description of Artificial Sequence: Synthetic polypeptide; note = VH of XENP018153

SEQ ID NO: 12277 - protein, 5 aa, synthetic construct
  source 1..5: note = Description of Artificial Sequence: Synthetic peptide; note = XENP018153 vhCDR1
NYWMN

SEQ ID NO: 12278 - protein, 19 aa, synthetic construct
  source 1..19: note = Description of Artificial Sequence: Synthetic peptide; note = XENP018153 vhCDR2
KIRLKSNNYATHYAEPVKG

SEQ ID NO: 12279 - protein, 11 aa, synthetic construct
  source 1..11: note = Description of Artificial Sequence: Synthetic peptide; note = XENP018153 vhCDR3
YYGNYGGYFDV

SEQ ID NO: 12280 - protein, 214 aa, synthetic construct; identical to SEQ ID NO: 11550
  source 1..214: note = Description of Artificial Sequence: Synthetic polypeptide; note = XENP018153 1G6_H1.56_L1_IgG1_PVA_/S267K Light Chain

SEQ ID NO: 12281 - protein, 107 aa, synthetic construct; identical to SEQ ID NO: 6247
  source 1..107: note = Description of Artificial Sequence: Synthetic polypeptide; note = VL of XENP018153

SEQ ID NO: 12282 - protein, 11 aa, synthetic construct
  source 1..11: note = Description of Artificial Sequence: Synthetic peptide; note = XENP018153 vlCDR1
RASQSVSNDVA

SEQ ID NO: 12283 - protein, 7 aa, synthetic construct
  source 1..7: note = Description of Artificial Sequence: Synthetic peptide; note = XENP018153 vlCDR2
YASHRYT

SEQ ID NO: 12284 - protein, 9 aa, synthetic construct
  source 1..9: note = Description of Artificial Sequence: Synthetic peptide; note = XENP018153 vlCDR3
QQDYSSPRT

SEQ ID NO: 12285 - protein, 451 aa, synthetic construct
  source 1..451: note = Description of Artificial Sequence: Synthetic polypeptide; note = XENP018154 1G6_H1.57_L1_IgG1_PVA_/S267K Heavy Chain
EVQLVESGGGLVKPGGSLRLSCAASGFTFSNYWMNWVRQAPGKGLEWVGSIRLKSNNYATHYAEPVKGRFTISRDDSKSTVYLQMNSLKTEDTAVYYCTRYYGNYGGYFDVWGAGTLVTVSSASTKGPSVFPLAPSSKSTSGGTAALGCLVKDYFPEPVTVSWNSGALTSGVHTFPAVLQSSGLYSLSSVVTVPSSSLGTQTYICNVNHKPSNTKVDKKVEPKSCDKTHTCPPCPAPPVAGPSVFLFPPKPKDTLMISRTPEVTCVVVDVKHEDPEVKFNWYVDGVEVHNAKTKPREEQYNSTYRVVSVLTVLHQDWLNGKEYKCKVSNKALPAPIEKTISKAKGQPREPQVYTLPPSREEMTKNQVSLTCLVKGFYPSDIAVEWESNGQPENNYKTTPPVLDSDGSFFLYSKLTVDKSRWQQGNVFSCSVMHEALHNHYTQKSLSLSPGK

SEQ ID NO: 12286 - protein, 122 aa, synthetic construct; identical to SEQ ID NO: 6864
  source 1..122: note = Description of Artificial Sequence: Synthetic polypeptide; note = VH of XENP018154

SEQ ID NO: 12287 - protein, 5 aa, synthetic construct
  source 1..5: note = Description of Artificial Sequence: Synthetic peptide; note = XENP018154 vhCDR1
NYWMN

SEQ ID NO: 12288 - protein, 19 aa, synthetic construct
  source 1..19: note = Description of Artificial Sequence: Synthetic peptide; note = XENP018154 vhCDR2
SIRLKSNNYATHYAEPVKG

SEQ ID NO: 12289 - protein, 11 aa, synthetic construct
  source 1..11: note = Description of Artificial Sequence: Synthetic peptide; note = XENP018154 vhCDR3
YYGNYGGYFDV

SEQ ID NO: 12290 - protein, 214 aa, synthetic construct; identical to SEQ ID NO: 11550
  source 1..214: note = Description of Artificial Sequence: Synthetic polypeptide; note = XENP018154 1G6_H1.57_L1_IgG1_PVA_/S267K Light Chain

SEQ ID NO: 12291 - protein, 107 aa, synthetic construct; identical to SEQ ID NO: 6247
  source 1..107: note = Description of Artificial Sequence: Synthetic polypeptide; note = VL of XENP018154

SEQ ID NO: 12292 - protein, 11 aa, synthetic construct
  source 1..11: note = Description of Artificial Sequence: Synthetic peptide; note = XENP018154 vlCDR1
RASQSVSNDVA

SEQ ID NO: 12293 - protein, 7 aa, synthetic construct
  source 1..7: note = Description of Artificial Sequence: Synthetic peptide; note = XENP018154 vlCDR2
YASHRYT

SEQ ID NO: 12294 - protein, 9 aa, synthetic construct
  source 1..9: note = Description of Artificial Sequence: Synthetic peptide; note = XENP018154 vlCDR3
QQDYSSPRT

SEQ ID NO: 12295 - protein, 451 aa, synthetic construct
  source 1..451: note = Description of Artificial Sequence: Synthetic polypeptide; note = XENP018155 1G6_H1.58_L1_IgG1_PVA_/S267K Heavy Chain
EVQLVESGGGLVKPGGSLRLSCAASGFTFSNYWMNWVRQAPGKGLEWVGHIRLKSNNYATHYAEPVKGRFTISRDDSKSTVYLQMNSLKTEDTAVYYCTRYYGNYGGYFDVWGAGTLVTVSSASTKGPSVFPLAPSSKSTSGGTAALGCLVKDYFPEPVTVSWNSGALTSGVHTFPAVLQSSGLYSLSSVVTVPSSSLGTQTYICNVNHKPSNTKVDKKVEPKSCDKTHTCPPCPAPPVAGPSVFLFPPKPKDTLMISRTPEVTCVVVDVKHEDPEVKFNWYVDGVEVHNAKTKPREEQYNSTYRVVSVLTVLHQDWLNGKEYKCKVSNKALPAPIEKTISKAKGQPREPQVYTLPPSREEMTKNQVSLTCLVKGFYPSDIAVEWESNGQPENNYKTTPPVLDSDGSFFLYSKLTVDKSRWQQGNVFSCSVMHEALHNHYTQKSLSLSPGK

SEQ ID NO: 12296 - protein, 122 aa, synthetic construct; identical to SEQ ID NO: 6873
  source 1..122: note = Description of Artificial Sequence: Synthetic polypeptide; note = VH of XENP018155

SEQ ID NO: 12297 - protein, 5 aa, synthetic construct
  source 1..5: note = Description of Artificial Sequence: Synthetic peptide; note = XENP018155 vhCDR1
NYWMN

SEQ ID NO: 12298 - protein, 19 aa, synthetic construct
  source 1..19: note = Description of Artificial Sequence: Synthetic peptide; note = XENP018155 vhCDR2
HIRLKSNNYATHYAEPVKG

SEQ ID NO: 12299 - protein, 11 aa, synthetic construct
  source 1..11: note = Description of Artificial Sequence: Synthetic peptide; note = XENP018155 vhCDR3
YYGNYGGYFDV

SEQ ID NO: 12300 - protein, 214 aa, synthetic construct; identical to SEQ ID NO: 11550
  source 1..214: note = Description of Artificial Sequence: Synthetic polypeptide; note = XENP018155 1G6_H1.58_L1_IgG1_PVA_/S267K Light Chain

SEQ ID NO: 12301 - protein, 107 aa, synthetic construct; identical to SEQ ID NO: 6247
  source 1..107: note = Description of Artificial Sequence: Synthetic polypeptide; note = VL of XENP018155

SEQ ID NO: 12302 - protein, 11 aa, synthetic construct
  source 1..11: note = Description of Artificial Sequence: Synthetic peptide; note = XENP018155 vlCDR1
RASQSVSNDVA

SEQ ID NO: 12303 - protein, 7 aa, synthetic construct
  source 1..7: note = Description of Artificial Sequence: Synthetic peptide; note = XENP018155 vlCDR2
YASHRYT

SEQ ID NO: 12304 - protein, 9 aa, synthetic construct
  source 1..9: note = Description of Artificial Sequence: Synthetic peptide; note = XENP018155 vlCDR3
QQDYSSPRT

SEQ ID NO: 12305 - protein, 451 aa, synthetic construct
  source 1..451: note = Description of Artificial Sequence: Synthetic polypeptide; note = XENP018156 1G6_H1.59_L1_IgG1_PVA_/S267K Heavy Chain
EVQLVESGGGLVKPGGSLRLSCAASGFTFSNYWMNWVRQAPGKGLEWVGAIRLKSNNYATHYAEPVKGRFTISRDDSKSTVYLQMNSLKTEDTAVYYCTRYYGNYGGYFDVWGAGTLVTVSSASTKGPSVFPLAPSSKSTSGGTAALGCLVKDYFPEPVTVSWNSGALTSGVHTFPAVLQSSGLYSLSSVVTVPSSSLGTQTYICNVNHKPSNTKVDKKVEPKSCDKTHTCPPCPAPPVAGPSVFLFPPKPKDTLMISRTPEVTCVVVDVKHEDPEVKFNWYVDGVEVHNAKTKPREEQYNSTYRVVSVLTVLHQDWLNGKEYKCKVSNKALPAPIEKTISKAKGQPREPQVYTLPPSREEMTKNQVSLTCLVKGFYPSDIAVEWESNGQPENNYKTTPPVLDSDGSFFLYSKLTVDKSRWQQGNVFSCSVMHEALHNHYTQKSLSLSPGK

SEQ ID NO: 12306 - protein, 122 aa, synthetic construct; identical to SEQ ID NO: 6882
  source 1..122: note = Description of Artificial Sequence: Synthetic polypeptide; note = VH of XENP018156

SEQ ID NO: 12307 - protein, 5 aa, synthetic construct
  source 1..5: note = Description of Artificial Sequence: Synthetic peptide; note = XENP018156 vhCDR1
NYWMN

SEQ ID NO: 12308 - protein, 19 aa, synthetic construct
  source 1..19: note = Description of Artificial Sequence: Synthetic peptide; note = XENP018156 vhCDR2
AIRLKSNNYATHYAEPVKG

SEQ ID NO: 12309 - protein, 11 aa, synthetic construct
  source 1..11: note = Description of Artificial Sequence: Synthetic peptide; note = XENP018156 vhCDR3
YYGNYGGYFDV

SEQ ID NO: 12310 - protein, 214 aa, synthetic construct; identical to SEQ ID NO: 11550
  source 1..214: note = Description of Artificial Sequence: Synthetic polypeptide; note = XENP018156 1G6_H1.59_L1_IgG1_PVA_/S267K Light Chain

SEQ ID NO: 12311 - protein, 107 aa, synthetic construct; identical to SEQ ID NO: 6247
  source 1..107: note = Description of Artificial Sequence: Synthetic polypeptide; note = VL of XENP018156

SEQ ID NO: 12312 - protein, 11 aa, synthetic construct
  source 1..11: note = Description of Artificial Sequence: Synthetic peptide; note = XENP018156 vlCDR1
RASQSVSNDVA

SEQ ID NO: 12313 - protein, 7 aa, synthetic construct
  source 1..7: note = Description of Artificial Sequence: Synthetic peptide; note = XENP018156 vlCDR2
YASHRYT

SEQ ID NO: 12314 - protein, 9 aa, synthetic construct
  source 1..9: note = Description of Artificial Sequence: Synthetic peptide; note = XENP018156 vlCDR3
QQDYSSPRT

SEQ ID NO: 12315 - protein, 451 aa, synthetic construct
  source 1..451: note = Description of Artificial Sequence: Synthetic polypeptide; note = XENP018157 1G6_H1.60_L1_IgG1_PVA_/S267K Heavy Chain
EVQLVESGGGLVKPGGSLRLSCAASGFTFSNYWMNWVRQAPGKGLEWVGGIRLKSNNYATHYAEPVKGRFTISRDDSKSTVYLQMNSLKTEDTAVYYCTRYYGNYGGYFDVWGAGTLVTVSSASTKGPSVFPLAPSSKSTSGGTAALGCLVKDYFPEPVTVSWNSGALTSGVHTFPAVLQSSGLYSLSSVVTVPSSSLGTQTYICNVNHKPSNTKVDKKVEPKSCDKTHTCPPCPAPPVAGPSVFLFPPKPKDTLMISRTPEVTCVVVDVKHEDPEVKFNWYVDGVEVHNAKTKPREEQYNSTYRVVSVLTVLHQDWLNGKEYKCKVSNKALPAPIEKTISKAKGQPREPQVYTLPPSREEMTKNQVSLTCLVKGFYPSDIAVEWESNGQPENNYKTTPPVLDSDGSFFLYSKLTVDKSRWQQGNVFSCSVMHEALHNHYTQKSLSLSPGK

SEQ ID NO: 12316 - protein, 122 aa, synthetic construct; identical to SEQ ID NO: 6891
  source 1..122: note = Description of Artificial Sequence: Synthetic polypeptide; note = VH of XENP018157

SEQ ID NO: 12317 - protein, 5 aa, synthetic construct
  source 1..5: note = Description of Artificial Sequence: Synthetic peptide; note = XENP018157 vhCDR1
NYWMN

SEQ ID NO: 12318 - protein, 19 aa, synthetic construct
  source 1..19: note = Description of Artificial Sequence: Synthetic peptide; note = XENP018157 vhCDR2
GIRLKSNNYATHYAEPVKG

SEQ ID NO: 12319 - protein, 11 aa, synthetic construct
  source 1..11: note = Description of Artificial Sequence: Synthetic peptide; note = XENP018157 vhCDR3
YYGNYGGYFDV

SEQ ID NO: 12320 - protein, 214 aa, synthetic construct; identical to SEQ ID NO: 11550
  source 1..214: note = Description of Artificial Sequence: Synthetic polypeptide; note = XENP018157 1G6_H1.60_L1_IgG1_PVA_/S267K Light Chain

SEQ ID NO: 12321 - protein, 107 aa, synthetic construct; identical to SEQ ID NO: 6247
  source 1..107: note = Description of Artificial Sequence: Synthetic polypeptide; note = VL of XENP018157

SEQ ID NO: 12322 - protein, 11 aa, synthetic construct
  source 1..11: note = Description of Artificial Sequence: Synthetic peptide; note = XENP018157 vlCDR1
RASQSVSNDVA

SEQ ID NO: 12323 - protein, 7 aa, synthetic construct
  source 1..7: note = Description of Artificial Sequence: Synthetic peptide; note = XENP018157 vlCDR2
YASHRYT

SEQ ID NO: 12324 - protein, 9 aa, synthetic construct
  source 1..9: note = Description of Artificial Sequence: Synthetic peptide; note = XENP018157 vlCDR3
QQDYSSPRT

SEQ ID NO: 12325 - protein, 451 aa, synthetic construct
  source 1..451: note = Description of Artificial Sequence: Synthetic polypeptide; note = XENP018158 1G6_H1.61_L1_IgG1_PVA_/S267K Heavy Chain
EVQLVESGGGLVKPGGSLRLSCAASGFTFSNYWMNWVRQAPGKGLEWVGYIRLKSNNYATHYAEPVKGRFTISRDDSKSTVYLQMNSLKTEDTAVYYCTRYYGNYGGYFDVWGAGTLVTVSSASTKGPSVFPLAPSSKSTSGGTAALGCLVKDYFPEPVTVSWNSGALTSGVHTFPAVLQSSGLYSLSSVVTVPSSSLGTQTYICNVNHKPSNTKVDKKVEPKSCDKTHTCPPCPAPPVAGPSVFLFPPKPKDTLMISRTPEVTCVVVDVKHEDPEVKFNWYVDGVEVHNAKTKPREEQYNSTYRVVSVLTVLHQDWLNGKEYKCKVSNKALPAPIEKTISKAKGQPREPQVYTLPPSREEMTKNQVSLTCLVKGFYPSDIAVEWESNGQPENNYKTTPPVLDSDGSFFLYSKLTVDKSRWQQGNVFSCSVMHEALHNHYTQKSLSLSPGK

SEQ ID NO: 12326 - protein, 122 aa, synthetic construct; identical to SEQ ID NO: 6900
  source 1..122: note = Description of Artificial Sequence: Synthetic polypeptide; note = VH of XENP018158

SEQ ID NO: 12327 - protein, 5 aa, synthetic construct
  source 1..5: note = Description of Artificial Sequence: Synthetic peptide; note = XENP018158 vhCDR1
NYWMN

SEQ ID NO: 12328 - protein, 19 aa, synthetic construct
  source 1..19: note = Description of Artificial Sequence: Synthetic peptide; note = XENP018158 vhCDR2
YIRLKSNNYATHYAEPVKG

SEQ ID NO: 12329 - protein, 11 aa, synthetic construct
  source 1..11: note = Description of Artificial Sequence: Synthetic peptide; note = XENP018158 vhCDR3
YYGNYGGYFDV

SEQ ID NO: 12330 - protein, 214 aa, synthetic construct; identical to SEQ ID NO: 11550
  source 1..214: note = Description of Artificial Sequence: Synthetic polypeptide; note = XENP018158 1G6_H1.61_L1_IgG1_PVA_/S267K Light Chain

SEQ ID NO: 12331 - protein, 107 aa, synthetic construct; identical to SEQ ID NO: 6247
  source 1..107: note = Description of Artificial Sequence: Synthetic polypeptide; note = VL of XENP018158

SEQ ID NO: 12332 - protein, 11 aa, synthetic construct
  source 1..11: note = Description of Artificial Sequence: Synthetic peptide; note = XENP018158 vlCDR1
RASQSVSNDVA

SEQ ID NO: 12333 - protein, 7 aa, synthetic construct
  source 1..7: note = Description of Artificial Sequence: Synthetic peptide; note = XENP018158 vlCDR2
YASHRYT

SEQ ID NO: 12334 - protein, 9 aa, synthetic construct
  source 1..9: note = Description of Artificial Sequence: Synthetic peptide; note = XENP018158 vlCDR3
QQDYSSPRT

SEQ ID NO: 12335 - protein, 451 aa, synthetic construct
  source 1..451: note = Description of Artificial Sequence: Synthetic polypeptide; note = XENP018159 1G6_H1.62_L1_IgG1_PVA_/S267K Heavy Chain
EVQLVESGGGLVKPGGSLRLSCAASGFTFSNYWMNWVRQAPGKGLEWVGIIRLKSNNYATHYAEPVKGRFTISRDDSKSTVYLQMNSLKTEDTAVYYCTRYYGNYGGYFDVWGAGTLVTVSSASTKGPSVFPLAPSSKSTSGGTAALGCLVKDYFPEPVTVSWNSGALTSGVHTFPAVLQSSGLYSLSSVVTVPSSSLGTQTYICNVNHKPSNTKVDKKVEPKSCDKTHTCPPCPAPPVAGPSVFLFPPKPKDTLMISRTPEVTCVVVDVKHEDPEVKFNWYVDGVEVHNAKTKPREEQYNSTYRVVSVLTVLHQDWLNGKEYKCKVSNKALPAPIEKTISKAKGQPREPQVYTLPPSREEMTKNQVSLTCLVKGFYPSDIAVEWESNGQPENNYKTTPPVLDSDGSFFLYSKLTVDKSRWQQGNVFSCSVMHEALHNHYTQKSLSLSPGK

SEQ ID NO: 12336 - protein, 122 aa, synthetic construct; identical to SEQ ID NO: 6909
  source 1..122: note = Description of Artificial Sequence: Synthetic polypeptide; note = VH of XENP018159

SEQ ID NO: 12337 - protein, 5 aa, synthetic construct
  source 1..5: note = Description of Artificial Sequence: Synthetic peptide; note = XENP018159 vhCDR1
NYWMN

SEQ ID NO: 12338 - protein, 19 aa, synthetic construct
  source 1..19: note = Description of Artificial Sequence: Synthetic peptide; note = XENP018159 vhCDR2
IIRLKSNNYATHYAEPVKG

SEQ ID NO: 12339 - protein, 11 aa, synthetic construct
  source 1..11: note = Description of Artificial Sequence: Synthetic peptide; note = XENP018159 vhCDR3
YYGNYGGYFDV

SEQ ID NO: 12340 - protein, 214 aa, synthetic construct; identical to SEQ ID NO: 11550
  source 1..214: note = Description of Artificial Sequence: Synthetic polypeptide; note = XENP018159 1G6_H1.62_L1_IgG1_PVA_/S267K Light Chain

SEQ ID NO: 12341 - protein, 107 aa, synthetic construct; identical to SEQ ID NO: 6247
  source 1..107: note = Description of Artificial Sequence: Synthetic polypeptide; note = VL of XENP018159

SEQ ID NO: 12342 - protein, 11 aa, synthetic construct
  source 1..11: note = Description of Artificial Sequence: Synthetic peptide; note = XENP018159 vlCDR1
RASQSVSNDVA

SEQ ID NO: 12343 - protein, 7 aa, synthetic construct
  source 1..7: note = Description of Artificial Sequence: Synthetic peptide; note = XENP018159 vlCDR2
YASHRYT

SEQ ID NO: 12344 - protein, 9 aa, synthetic construct
  source 1..9: note = Description of Artificial Sequence: Synthetic peptide; note = XENP018159 vlCDR3
QQDYSSPRT

SEQ ID NO: 12345 - protein, 451 aa, synthetic construct
  source 1..451: note = Description of Artificial Sequence: Synthetic polypeptide; note = XENP018160 1G6_H1.63_L1_IgG1_PVA_/S267K Heavy Chain
EVQLVESGGGLVKPGGSLRLSCAASGFTFSNYWMNWVRQAPGKGLEWVGEVRLKSNNYATHYAEPVKGRFTISRDDSKSTVYLQMNSLKTEDTAVYYCTRYYGNYGGYFDVWGAGTLVTVSSASTKGPSVFPLAPSSKSTSGGTAALGCLVKDYFPEPVTVSWNSGALTSGVHTFPAVLQSSGLYSLSSVVTVPSSSLGTQTYICNVNHKPSNTKVDKKVEPKSCDKTHTCPPCPAPPVAGPSVFLFPPKPKDTLMISRTPEVTCVVVDVKHEDPEVKFNWYVDGVEVHNAKTKPREEQYNSTYRVVSVLTVLHQDWLNGKEYKCKVSNKALPAPIEKTISKAKGQPREPQVYTLPPSREEMTKNQVSLTCLVKGFYPSDIAVEWESNGQPENNYKTTPPVLDSDGSFFLYSKLTVDKSRWQQGNVFSCSVMHEALHNHYTQKSLSLSPGK

SEQ ID NO: 12346 - protein, 122 aa, synthetic construct; identical to SEQ ID NO: 6918
  source 1..122: note = Description of Artificial Sequence: Synthetic polypeptide; note = VH of XENP018160

SEQ ID NO: 12347 - protein, 5 aa, synthetic construct
  source 1..5: note = Description of Artificial Sequence: Synthetic peptide; note = XENP018160 vhCDR1
NYWMN

SEQ ID NO: 12348 - protein, 19 aa, synthetic construct
  source 1..19: note = Description of Artificial Sequence: Synthetic peptide; note = XENP018160 vhCDR2
EVRLKSNNYATHYAEPVKG

SEQ ID NO: 12349 - protein, 11 aa, synthetic construct
  source 1..11: note = Description of Artificial Sequence: Synthetic peptide; note = XENP018160 vhCDR3
YYGNYGGYFDV

SEQ ID NO: 12350 - protein, 214 aa, synthetic construct; identical to SEQ ID NO: 11550
  source 1..214: note = Description of Artificial Sequence: Synthetic polypeptide; note = XENP018160 1G6_H1.63_L1_IgG1_PVA_/S267K Light Chain

SEQ ID NO: 12351 - protein, 107 aa, synthetic construct; identical to SEQ ID NO: 6247
  source 1..107: note = Description of Artificial Sequence: Synthetic polypeptide; note = VL of XENP018160

SEQ ID NO: 12352 - protein, 11 aa, synthetic construct
  source 1..11: note = Description of Artificial Sequence: Synthetic peptide; note = XENP018160 vlCDR1
RASQSVSNDVA

SEQ ID NO: 12353 - protein, 7 aa, synthetic construct
  source 1..7: note = Description of Artificial Sequence: Synthetic peptide; note = XENP018160 vlCDR2
YASHRYT

SEQ ID NO: 12354 - protein, 9 aa, synthetic construct
  source 1..9: note = Description of Artificial Sequence: Synthetic peptide; note = XENP018160 vlCDR3
QQDYSSPRT

SEQ ID NO: 12355 - protein, 451 aa, synthetic construct
  source 1..451: note = Description of Artificial Sequence: Synthetic polypeptide; note = XENP018161 1G6_H1.64_L1_IgG1_PVA_/S267K Heavy Chain
EVQLVESGGGLVKPGGSLRLSCAASGFTFSNYWMNWVRQAPGKGLEWVGEITLKSNNYATHYAEPVKGRFTISRDDSKSTVYLQMNSLKTEDTAVYYCTRYYGNYGGYFDVWGAGTLVTVSSASTKGPSVFPLAPSSKSTSGGTAALGCLVKDYFPEPVTVSWNSGALTSGVHTFPAVLQSSGLYSLSSVVTVPSSSLGTQTYICNVNHKPSNTKVDKKVEPKSCDKTHTCPPCPAPPVAGPSVFLFPPKPKDTLMISRTPEVTCVVVDVKHEDPEVKFNWYVDGVEVHNAKTKPREEQYNSTYRVVSVLTVLHQDWLNGKEYKCKVSNKALPAPIEKTISKAKGQPREPQVYTLPPSREEMTKNQVSLTCLVKGFYPSDIAVEWESNGQPENNYKTTPPVLDSDGSFFLYSKLTVDKSRWQQGNVFSCSVMHEALHNHYTQKSLSLSPGK

SEQ ID NO: 12356 - protein, 122 aa, synthetic construct; identical to SEQ ID NO: 6927
  source 1..122: note = Description of Artificial Sequence: Synthetic polypeptide; note = VH of XENP018161

SEQ ID NO: 12357 - protein, 5 aa, synthetic construct
  source 1..5: note = Description of Artificial Sequence: Synthetic peptide; note = XENP018161 vhCDR1
NYWMN

SEQ ID NO: 12358 - protein, 19 aa, synthetic construct
  source 1..19: note = Description of Artificial Sequence: Synthetic peptide; note = XENP018161 vhCDR2
EITLKSNNYATHYAEPVKG

SEQ ID NO: 12359 - protein, 11 aa, synthetic construct
  source 1..11: note = Description of Artificial Sequence: Synthetic peptide; note = XENP018161 vhCDR3
YYGNYGGYFDV

SEQ ID NO: 12360 - protein, 214 aa, synthetic construct; identical to SEQ ID NO: 11550
  source 1..214: note = Description of Artificial Sequence: Synthetic polypeptide; note = XENP018161 1G6_H1.64_L1_IgG1_PVA_/S267K Light Chain

SEQ ID NO: 12361 - protein, 107 aa, synthetic construct; identical to SEQ ID NO: 6247
  source 1..107: note = Description of Artificial Sequence: Synthetic polypeptide; note = VL of XENP018161

SEQ ID NO: 12362 - protein, 11 aa, synthetic construct
  source 1..11: note = Description of Artificial Sequence: Synthetic peptide; note = XENP018161 vlCDR1
RASQSVSNDVA

SEQ ID NO: 12363 - protein, 7 aa, synthetic construct
  source 1..7: note = Description of Artificial Sequence: Synthetic peptide; note = XENP018161 vlCDR2
YASHRYT

SEQ ID NO: 12364 - protein, 9 aa, synthetic construct
  source 1..9: note = Description of Artificial Sequence: Synthetic peptide; note = XENP018161 vlCDR3
QQDYSSPRT

SEQ ID NO: 12365 - protein, 451 aa, synthetic construct
  source 1..451: note = Description of Artificial Sequence: Synthetic polypeptide; note = XENP018162 1G6_H1.65_L1_IgG1_PVA_/S267K Heavy Chain
EVQLVESGGGLVKPGGSLRLSCAASGFTFSNYWMNWVRQAPGKGLEWVGEIKLKSNNYATHYAEPVKGRFTISRDDSKSTVYLQMNSLKTEDTAVYYCTRYYGNYGGYFDVWGAGTLVTVSSASTKGPSVFPLAPSSKSTSGGTAALGCLVKDYFPEPVTVSWNSGALTSGVHTFPAVLQSSGLYSLSSVVTVPSSSLGTQTYICNVNHKPSNTKVDKKVEPKSCDKTHTCPPCPAPPVAGPSVFLFPPKPKDTLMISRTPEVTCVVVDVKHEDPEVKFNWYVDGVEVHNAKTKPREEQYNSTYRVVSVLTVLHQDWLNGKEYKCKVSNKALPAPIEKTISKAKGQPREPQVYTLPPSREEMTKNQVSLTCLVKGFYPSDIAVEWESNGQPENNYKTTPPVLDSDGSFFLYSKLTVDKSRWQQGNVFSCSVMHEALHNHYTQKSLSLSPGK

SEQ ID NO: 12366 - protein, 122 aa, synthetic construct; identical to SEQ ID NO: 6936
  source 1..122: note = Description of Artificial Sequence: Synthetic polypeptide; note = VH of XENP018162

SEQ ID NO: 12367 - protein, 5 aa, synthetic construct
  source 1..5: note = Description of Artificial Sequence: Synthetic peptide; note = XENP018162 vhCDR1
NYWMN

SEQ ID NO: 12368 - protein, 19 aa, synthetic construct
  source 1..19: note = Description of Artificial Sequence: Synthetic peptide; note = XENP018162 vhCDR2
EIKLKSNNYATHYAEPVKG

SEQ ID NO: 12369 - protein, 11 aa, synthetic construct
  source 1..11: note = Description of Artificial Sequence: Synthetic peptide; note = XENP018162 vhCDR3
YYGNYGGYFDV

SEQ ID NO: 12370 - protein, 214 aa, synthetic construct; identical to SEQ ID NO: 11550
  source 1..214: note = Description of Artificial Sequence: Synthetic polypeptide; note = XENP018162 1G6_H1.65_L1_IgG1_PVA_/S267K Light Chain

SEQ ID NO: 12371 - protein, 107 aa, synthetic construct; identical to SEQ ID NO: 6247
  source 1..107: note = Description of Artificial Sequence: Synthetic polypeptide; note = VL of XENP018162

SEQ ID NO: 12372 - protein, 11 aa, synthetic construct
  source 1..11: note = Description of Artificial Sequence: Synthetic peptide; note = XENP018162 vlCDR1
RASQSVSNDVA

SEQ ID NO: 12373 - protein, 7 aa, synthetic construct
  source 1..7: note = Description of Artificial Sequence: Synthetic peptide; note = XENP018162 vlCDR2
YASHRYT

SEQ ID NO: 12374 - protein, 9 aa, synthetic construct
  source 1..9: note = Description of Artificial Sequence: Synthetic peptide; note = XENP018162 vlCDR3
QQDYSSPRT

SEQ ID NO: 12375 - protein, 451 aa, synthetic construct
  source 1..451: note = Description of Artificial Sequence: Synthetic polypeptide; note = XENP018163 1G6_H1.66_L1_IgG1_PVA_/S267K Heavy Chain
EVQLVESGGGLVKPGGSLRLSCAASGFTFSNYWMNWVRQAPGKGLEWVGEIELKSNNYATHYAEPVKGRFTISRDDSKSTVYLQMNSLKTEDTAVYYCTRYYGNYGGYFDVWGAGTLVTVSSASTKGPSVFPLAPSSKSTSGGTAALGCLVKDYFPEPVTVSWNSGALTSGVHTFPAVLQSSGLYSLSSVVTVPSSSLGTQTYICNVNHKPSNTKVDKKVEPKSCDKTHTCPPCPAPPVAGPSVFLFPPKPKDTLMISRTPEVTCVVVDVKHEDPEVKFNWYVDGVEVHNAKTKPREEQYNSTYRVVSVLTVLHQDWLNGKEYKCKVSNKALPAPIEKTISKAKGQPREPQVYTLPPSREEMTKNQVSLTCLVKGFYPSDIAVEWESNGQPENNYKTTPPVLDSDGSFFLYSKLTVDKSRWQQGNVFSCSVMHEALHNHYTQKSLSLSPGK

SEQ ID NO: 12376 - protein, 122 aa, synthetic construct; identical to SEQ ID NO: 6945
  source 1..122: note = Description of Artificial Sequence: Synthetic polypeptide; note = VH of XENP018163

SEQ ID NO: 12377 - protein, 5 aa, synthetic construct
  source 1..5: note = Description of Artificial Sequence: Synthetic peptide; note = XENP018163 vhCDR1
NYWMN

SEQ ID NO: 12378 - protein, 19 aa, synthetic construct
  source 1..19: note = Description of Artificial Sequence: Synthetic peptide; note = XENP018163 vhCDR2
EIELKSNNYATHYAEPVKG

SEQ ID NO: 12379 - protein, 11 aa, synthetic construct
  source 1..11: note = Description of Artificial Sequence: Synthetic peptide; note = XENP018163 vhCDR3
YYGNYGGYFDV

SEQ ID NO: 12380 - protein, 214 aa, synthetic construct; identical to SEQ ID NO: 11550
  source 1..214: note = Description of Artificial Sequence: Synthetic polypeptide; note = XENP018163 1G6_H1.66_L1_IgG1_PVA_/S267K Light Chain

SEQ ID NO: 12381 - protein, 107 aa, synthetic construct; identical to SEQ ID NO: 6247
  source 1..107: note = Description of Artificial Sequence: Synthetic polypeptide; note = VL of XENP018163

SEQ ID NO: 12382 - protein, 11 aa, synthetic construct
  source 1..11: note = Description of Artificial Sequence: Synthetic peptide; note = XENP018163 vlCDR1
RASQSVSNDVA

SEQ ID NO: 12383 - protein, 7 aa, synthetic construct
  source 1..7: note = Description of Artificial Sequence: Synthetic peptide; note = XENP018163 vlCDR2
YASHRYT

SEQ ID NO: 12384 - protein, 9 aa, synthetic construct
  source 1..9: note = Description of Artificial Sequence: Synthetic peptide; note = XENP018163 vlCDR3
QQDYSSPRT

SEQ ID NO: 12385 - protein, 451 aa, synthetic construct
  source 1..451: note = Description of Artificial Sequence: Synthetic polypeptide; note = XENP018164 1G6_H1.67_L1_IgG1_PVA_/S267K Heavy Chain
EVQLVESGGGLVKPGGSLRLSCAASGFTFSNYWMNWVRQAPGKGLEWVGEIDLKSNNYATHYAEPVKGRFTISRDDSKSTVYLQMNSLKTEDTAVYYCTRYYGNYGGYFDVWGAGTLVTVSSASTKGPSVFPLAPSSKSTSGGTAALGCLVKDYFPEPVTVSWNSGALTSGVHTFPAVLQSSGLYSLSSVVTVPSSSLGTQTYICNVNHKPSNTKVDKKVEPKSCDKTHTCPPCPAPPVAGPSVFLFPPKPKDTLMISRTPEVTCVVVDVKHEDPEVKFNWYVDGVEVHNAKTKPREEQYNSTYRVVSVLTVLHQDWLNGKEYKCKVSNKALPAPIEKTISKAKGQPREPQVYTLPPSREEMTKNQVSLTCLVKGFYPSDIAVEWESNGQPENNYKTTPPVLDSDGSFFLYSKLTVDKSRWQQGNVFSCSVMHEALHNHYTQKSLSLSPGK

SEQ ID NO: 12386 - protein, 122 aa, synthetic construct; identical to SEQ ID NO: 6954
  source 1..122: note = Description of Artificial Sequence: Synthetic polypeptide; note = VH of XENP018164

SEQ ID NO: 12387 - protein, 5 aa, synthetic construct
  source 1..5: note = Description of Artificial Sequence: Synthetic peptide; note = XENP018164 vhCDR1
NYWMN

SEQ ID NO: 12388 - protein, 19 aa, synthetic construct
  source 1..19: note = Description of Artificial Sequence: Synthetic peptide; note = XENP018164 vhCDR2
EIDLKSNNYATHYAEPVKG

SEQ ID NO: 12389 - protein, 11 aa, synthetic construct
  source 1..11: note = Description of Artificial Sequence: Synthetic peptide; note = XENP018164 vhCDR3
YYGNYGGYFDV

SEQ ID NO: 12390 - protein, 214 aa, synthetic construct; identical to SEQ ID NO: 11550
  source 1..214: note = Description of Artificial Sequence: Synthetic polypeptide; note = XENP018164 1G6_H1.67_L1_IgG1_PVA_/S267K Light Chain

SEQ ID NO: 12391 - protein, 107 aa, synthetic construct; identical to SEQ ID NO: 6247
  source 1..107: note = Description of Artificial Sequence: Synthetic polypeptide; note = VL of XENP018164

SEQ ID NO: 12392 - protein, 11 aa, synthetic construct
  source 1..11: note = Description of Artificial Sequence: Synthetic peptide; note = XENP018164 vlCDR1
RASQSVSNDVA

SEQ ID NO: 12393 - protein, 7 aa, synthetic construct
  source 1..7: note = Description of Artificial Sequence: Synthetic peptide; note = XENP018164 vlCDR2
YASHRYT

SEQ ID NO: 12394 - protein, 9 aa, synthetic construct
  source 1..9: note = Description of Artificial Sequence: Synthetic peptide; note = XENP018164 vlCDR3
QQDYSSPRT

SEQ ID NO: 12395 - protein, 451 aa, synthetic construct
  source 1..451: note = Description of Artificial Sequence: Synthetic polypeptide; note = XENP018165 1G6_H1.68_L1_IgG1_PVA_/S267K Heavy Chain
EVQLVESGGGLVKPGGSLRLSCAASGFTFSNYWMNWVRQAPGKGLEWVGEIHLKSNNYATHYAEPVKGRFTISRDDSKSTVYLQMNSLKTEDTAVYYCTRYYGNYGGYFDVWGAGTLVTVSSASTKGPSVFPLAPSSKSTSGGTAALGCLVKDYFPEPVTVSWNSGALTSGVHTFPAVLQSSGLYSLSSVVTVPSSSLGTQTYICNVNHKPSNTKVDKKVEPKSCDKTHTCPPCPAPPVAGPSVFLFPPKPKDTLMISRTPEVTCVVVDVKHEDPEVKFNWYVDGVEVHNAKTKPREEQYNSTYRVVSVLTVLHQDWLNGKEYKCKVSNKALPAPIEKTISKAKGQPREPQVYTLPPSREEMTKNQVSLTCLVKGFYPSDIAVEWESNGQPENNYKTTPPVLDSDGSFFLYSKLTVDKSRWQQGNVFSCSVMHEALHNHYTQKSLSLSPGK

SEQ ID NO: 12396 - protein, 122 aa, synthetic construct; identical to SEQ ID NO: 6963
  source 1..122: note = Description of Artificial Sequence: Synthetic polypeptide; note = VH of XENP018165

SEQ ID NO: 12397 - protein, 5 aa, synthetic construct
  source 1..5: note = Description of Artificial Sequence: Synthetic peptide; note = XENP018165 vhCDR1
NYWMN

SEQ ID NO: 12398 - protein, 19 aa, synthetic construct
  source 1..19: note = Description of Artificial Sequence: Synthetic peptide; note = XENP018165 vhCDR2
EIHLKSNNYATHYAEPVKG

SEQ ID NO: 12399 - protein, 11 aa, synthetic construct
  source 1..11: note = Description of Artificial Sequence: Synthetic peptide; note = XENP018165 vhCDR3
YYGNYGGYFDV

SEQ ID NO: 12400 - protein, 214 aa, synthetic construct; identical to SEQ ID NO: 11550
  source 1..214: note = Description of Artificial Sequence: Synthetic polypeptide; note = XENP018165 1G6_H1.68_L1_IgG1_PVA_/S267K Light Chain

SEQ ID NO: 12401 - protein, 107 aa, synthetic construct; identical to SEQ ID NO: 6247
  source 1..107: note = Description of Artificial Sequence: Synthetic polypeptide; note = VL of XENP018165

SEQ ID NO: 12402 - protein, 11 aa, synthetic construct
  source 1..11: note = Description of Artificial Sequence: Synthetic peptide; note = XENP018165 vlCDR1
RASQSVSNDVA

SEQ ID NO: 12403 - protein, 7 aa, synthetic construct
  source 1..7: note = Description of Artificial Sequence: Synthetic peptide; note = XENP018165 vlCDR2
YASHRYT

SEQ ID NO: 12404 - protein, 9 aa, synthetic construct
  source 1..9: note = Description of Artificial Sequence: Synthetic peptide; note = XENP018165 vlCDR3
QQDYSSPRT

SEQ ID NO: 12405 - protein, 451 aa, synthetic construct
  source 1..451: note = Description of Artificial Sequence: Synthetic polypeptide; note = XENP018166 1G6_H1.69_L1_IgG1_PVA_/S267K Heavy Chain
EVQLVESGGGLVKPGGSLRLSCAASGFTFSNYWMNWVRQAPGKGLEWVGEISLKSNNYATHYAEPVKGRFTISRDDSKSTVYLQMNSLKTEDTAVYYCTRYYGNYGGYFDVWGAGTLVTVSSASTKGPSVFPLAPSSKSTSGGTAALGCLVKDYFPEPVTVSWNSGALTSGVHTFPAVLQSSGLYSLSSVVTVPSSSLGTQTYICNVNHKPSNTKVDKKVEPKSCDKTHTCPPCPAPPVAGPSVFLFPPKPKDTLMISRTPEVTCVVVDVKHEDPEVKFNWYVDGVEVHNAKTKPREEQYNSTYRVVSVLTVLHQDWLNGKEYKCKVSNKALPAPIEKTISKAKGQPREPQVYTLPPSREEMTKNQVSLTCLVKGFYPSDIAVEWESNGQPENNYKTTPPVLDSDGSFFLYSKLTVDKSRWQQGNVFSCSVMHEALHNHYTQKSLSLSPGK

SEQ ID NO: 12406 - protein, 122 aa, synthetic construct; identical to SEQ ID NO: 6972
  source 1..122: note = Description of Artificial Sequence: Synthetic polypeptide; note = VH of XENP018166

SEQ ID NO: 12407 - protein, 5 aa, synthetic construct
  source 1..5: note = Description of Artificial Sequence: Synthetic peptide; note = XENP018166 vhCDR1
NYWMN

SEQ ID NO: 12408 - protein, 19 aa, synthetic construct
  source 1..19: note = Description of Artificial Sequence: Synthetic peptide; note = XENP018166 vhCDR2
EISLKSNNYATHYAEPVKG

SEQ ID NO: 12409 - protein, 11 aa, synthetic construct
  source 1..11: note = Description of Artificial Sequence: Synthetic peptide; note = XENP018166 vhCDR3
YYGNYGGYFDV

SEQ ID NO: 12410 - protein, 214 aa, synthetic construct; identical to SEQ ID NO: 11550
  source 1..214: note = Description of Artificial Sequence: Synthetic polypeptide; note = XENP018166 1G6_H1.69_L1_IgG1_PVA_/S267K Light Chain

SEQ ID NO: 12411 - protein, 107 aa, synthetic construct; identical to SEQ ID NO: 6247
  source 1..107: note = Description of Artificial Sequence: Synthetic polypeptide; note = VL of XENP018166

SEQ ID NO: 12412 - protein, 11 aa, synthetic construct
  source 1..11: note = Description of Artificial Sequence: Synthetic peptide; note = XENP018166 vlCDR1
RASQSVSNDVA

SEQ ID NO: 12413 - protein, 7 aa, synthetic construct
  source 1..7: note = Description of Artificial Sequence: Synthetic peptide; note = XENP018166 vlCDR2
YASHRYT

SEQ ID NO: 12414 - protein, 9 aa, synthetic construct
  source 1..9: note = Description of Artificial Sequence: Synthetic peptide; note = XENP018166 vlCDR3
QQDYSSPRT

SEQ ID NO: 12415 - protein, 451 aa, synthetic construct
  source 1..451: note = Description of Artificial Sequence: Synthetic polypeptide; note = XENP018167 1G6_H1.70_L1_IgG1_PVA_/S267K Heavy Chain
EVQLVESGGGLVKPGGSLRLSCAASGFTFSNYWMNWVRQAPGKGLEWVGEIGLKSNNYATHYAEPVKGRFTISRDDSKSTVYLQMNSLKTEDTAVYYCTRYYGNYGGYFDVWGAGTLVTVSSASTKGPSVFPLAPSSKSTSGGTAALGCLVKDYFPEPVTVSWNSGALTSGVHTFPAVLQSSGLYSLSSVVTVPSSSLGTQTYICNVNHKPSNTKVDKKVEPKSCDKTHTCPPCPAPPVAGPSVFLFPPKPKDTLMISRTPEVTCVVVDVKHEDPEVKFNWYVDGVEVHNAKTKPREEQYNSTYRVVSVLTVLHQDWLNGKEYKCKVSNKALPAPIEKTISKAKGQPREPQVYTLPPSREEMTKNQVSLTCLVKGFYPSDIAVEWESNGQPENNYKTTPPVLDSDGSFFLYSKLTVDKSRWQQGNVFSCSVMHEALHNHYTQKSLSLSPGK

SEQ ID NO: 12416 - protein, 122 aa, synthetic construct; identical to SEQ ID NO: 6981
  source 1..122: note = Description of Artificial Sequence: Synthetic polypeptide; note = VH of XENP018167

SEQ ID NO: 12417 - protein, 5 aa, synthetic construct
  source 1..5: note = Description of Artificial Sequence: Synthetic peptide; note = XENP018167 vhCDR1
NYWMN

SEQ ID NO: 12418 - protein, 19 aa, synthetic construct
  source 1..19: note = Description of Artificial Sequence: Synthetic peptide; note = XENP018167 vhCDR2
EIGLKSNNYATHYAEPVKG

SEQ ID NO: 12419 - protein, 11 aa, synthetic construct
  source 1..11: note = Description of Artificial Sequence: Synthetic peptide; note = XENP018167 vhCDR3
YYGNYGGYFDV

SEQ ID NO: 12420 - protein, 214 aa, synthetic construct; identical to SEQ ID NO: 11550
  source 1..214: note = Description of Artificial Sequence: Synthetic polypeptide; note = XENP018167 1G6_H1.70_L1_IgG1_PVA_/S267K Light Chain

SEQ ID NO: 12421 - protein, 107 aa, synthetic construct; identical to SEQ ID NO: 6247
  source 1..107: note = Description of Artificial Sequence: Synthetic polypeptide; note = VL of XENP018167

SEQ ID NO: 12422 - protein, 11 aa, synthetic construct
  source 1..11: note = Description of Artificial Sequence: Synthetic peptide; note = XENP018167 vlCDR1
RASQSVSNDVA

SEQ ID NO: 12423 - protein, 7 aa, synthetic construct
  source 1..7: note = Description of Artificial Sequence: Synthetic peptide; note = XENP018167 vlCDR2
YASHRYT

SEQ ID NO: 12424 - protein, 9 aa, synthetic construct
  source 1..9: note = Description of Artificial Sequence: Synthetic peptide; note = XENP018167 vlCDR3
QQDYSSPRT

SEQ ID NO: 12425 - protein, 451 aa, synthetic construct
  source 1..451: note = Description of Artificial Sequence: Synthetic polypeptide; note = XENP018168 1G6_H1.71_L1_IgG1_PVA_/S267K Heavy Chain
EVQLVESGGGLVKPGGSLRLSCAASGFTFSNYWMNWVRQAPGKGLEWVGEIYLKSNNYATHYAEPVKGRFTISRDDSKSTVYLQMNSLKTEDTAVYYCTRYYGNYGGYFDVWGAGTLVTVSSASTKGPSVFPLAPSSKSTSGGTAALGCLVKDYFPEPVTVSWNSGALTSGVHTFPAVLQSSGLYSLSSVVTVPSSSLGTQTYICNVNHKPSNTKVDKKVEPKSCDKTHTCPPCPAPPVAGPSVFLFPPKPKDTLMISRTPEVTCVVVDVKHEDPEVKFNWYVDGVEVHNAKTKPREEQYNSTYRVVSVLTVLHQDWLNGKEYKCKVSNKALPAPIEKTISKAKGQPREPQVYTLPPSREEMTKNQVSLTCLVKGFYPSDIAVEWESNGQPENNYKTTPPVLDSDGSFFLYSKLTVDKSRWQQGNVFSCSVMHEALHNHYTQKSLSLSPGK

SEQ ID NO: 12426 - protein, 122 aa, synthetic construct; identical to SEQ ID NO: 6990
  source 1..122: note = Description of Artificial Sequence: Synthetic polypeptide; note = VH of XENP018168

SEQ ID NO: 12427 - protein, 5 aa, synthetic construct
  source 1..5: note = Description of Artificial Sequence: Synthetic peptide; note = XENP018168 vhCDR1
NYWMN

SEQ ID NO: 12428 - protein, 19 aa, synthetic construct
  source 1..19: note = Description of Artificial Sequence: Synthetic peptide; note = XENP018168 vhCDR2
EIYLKSNNYATHYAEPVKG

SEQ ID NO: 12429 - protein, 11 aa, synthetic construct
  source 1..11: note = Description of Artificial Sequence: Synthetic peptide; note = XENP018168 vhCDR3
YYGNYGGYFDV

SEQ ID NO: 12430 - protein, 214 aa, synthetic construct; identical to SEQ ID NO: 11550
  source 1..214: note = Description of Artificial Sequence: Synthetic polypeptide; note = XENP018168 1G6_H1.71_L1_IgG1_PVA_/S267K Light Chain

SEQ ID NO: 12431 - protein, 107 aa, synthetic construct; identical to SEQ ID NO: 6247
  source 1..107: note = Description of Artificial Sequence: Synthetic polypeptide; note = VL of XENP018168

SEQ ID NO: 12432 - protein, 11 aa, synthetic construct
  source 1..11: note = Description of Artificial Sequence: Synthetic peptide; note = XENP018168 vlCDR1
RASQSVSNDVA

SEQ ID NO: 12433 - protein, 7 aa, synthetic construct
  source 1..7: note = Description of Artificial Sequence: Synthetic peptide; note = XENP018168 vlCDR2
YASHRYT

SEQ ID NO: 12434 - protein, 9 aa, synthetic construct
  source 1..9: note = Description of Artificial Sequence: Synthetic peptide; note = XENP018168 vlCDR3
QQDYSSPRT

SEQ ID NO: 12435 - protein, 451 aa, synthetic construct
  source 1..451: note = Description of Artificial Sequence: Synthetic polypeptide; note = XENP018169 1G6_H1.72_L1_IgG1_PVA_/S267K Heavy Chain
EVQLVESGGGLVKPGGSLRLSCAASGFTFSNYWMNWVRQAPGKGLEWVGEIILKSNNYATHYAEPVKGRFTISRDDSKSTVYLQMNSLKTEDTAVYYCTRYYGNYGGYFDVWGAGTLVTVSSASTKGPSVFPLAPSSKSTSGGTAALGCLVKDYFPEPVTVSWNSGALTSGVHTFPAVLQSSGLYSLSSVVTVPSSSLGTQTYICNVNHKPSNTKVDKKVEPKSCDKTHTCPPCPAPPVAGPSVFLFPPKPKDTLMISRTPEVTCVVVDVKHEDPEVKFNWYVDGVEVHNAKTKPREEQYNSTYRVVSVLTVLHQDWLNGKEYKCKVSNKALPAPIEKTISKAKGQPREPQVYTLPPSREEMTKNQVSLTCLVKGFYPSDIAVEWESNGQPENNYKTTPPVLDSDGSFFLYSKLTVDKSRWQQGNVFSCSVMHEALHNHYTQKSLSLSPGK

SEQ ID NO: 12436 - protein, 122 aa, synthetic construct; identical to SEQ ID NO: 6999
  source 1..122: note = Description of Artificial Sequence: Synthetic polypeptide; note = VH of XENP018169

SEQ ID NO: 12437 - protein, 5 aa, synthetic construct
  source 1..5: note = Description of Artificial Sequence: Synthetic peptide; note = XENP018169 vhCDR1
NYWMN

SEQ ID NO: 12438 - protein, 19 aa, synthetic construct
  source 1..19: note = Description of Artificial Sequence: Synthetic peptide; note = XENP018169 vhCDR2
EIILKSNNYATHYAEPVKG

SEQ ID NO: 12439 - protein, 11 aa, synthetic construct
  source 1..11: note = Description of Artificial Sequence: Synthetic peptide; note = XENP018169 vhCDR3
YYGNYGGYFDV

SEQ ID NO: 12440 - protein, 214 aa, synthetic construct; identical to SEQ ID NO: 11550
  source 1..214: note = Description of Artificial Sequence: Synthetic polypeptide; note = XENP018169 1G6_H1.72_L1_IgG1_PVA_/S267K Light Chain

SEQ ID NO: 12441 - protein, 107 aa, synthetic construct; identical to SEQ ID NO: 6247
  source 1..107: note = Description of Artificial Sequence: Synthetic polypeptide; note = VL of XENP018169

SEQ ID NO: 12442 - protein, 11 aa, synthetic construct
  source 1..11: note = Description of Artificial Sequence: Synthetic peptide; note = XENP018169 vlCDR1
RASQSVSNDVA

SEQ ID NO: 12443 - protein, 7 aa, synthetic construct
  source 1..7: note = Description of Artificial Sequence: Synthetic peptide; note = XENP018169 vlCDR2
YASHRYT

SEQ ID NO: 12444 - protein, 9 aa, synthetic construct
  source 1..9: note = Description of Artificial Sequence: Synthetic peptide; note = XENP018169 vlCDR3
QQDYSSPRT

SEQ ID NO: 12445 - protein, 451 aa, synthetic construct
  source 1..451: note = Description of Artificial Sequence: Synthetic polypeptide; note = XENP018170 1G6_H1.73_L1_IgG1_PVA_/S267K Heavy Chain
EVQLVESGGGLVKPGGSLRLSCAASGFTFSNYWMNWVRQAPGKGLEWVGEIWLKSNNYATHYAEPVKGRFTISRDDSKSTVYLQMNSLKTEDTAVYYCTRYYGNYGGYFDVWGAGTLVTVSSASTKGPSVFPLAPSSKSTSGGTAALGCLVKDYFPEPVTVSWNSGALTSGVHTFPAVLQSSGLYSLSSVVTVPSSSLGTQTYICNVNHKPSNTKVDKKVEPKSCDKTHTCPPCPAPPVAGPSVFLFPPKPKDTLMISRTPEVTCVVVDVKHEDPEVKFNWYVDGVEVHNAKTKPREEQYNSTYRVVSVLTVLHQDWLNGKEYKCKVSNKALPAPIEKTISKAKGQPREPQVYTLPPSREEMTKNQVSLTCLVKGFYPSDIAVEWESNGQPENNYKTTPPVLDSDGSFFLYSKLTVDKSRWQQGNVFSCSVMHEALHNHYTQKSLSLSPGK

SEQ ID NO: 12446 - protein, 122 aa, synthetic construct; identical to SEQ ID NO: 7008
  source 1..122: note = Description of Artificial Sequence: Synthetic polypeptide; note = VH of XENP018170

SEQ ID NO: 12447 - protein, 5 aa, synthetic construct
  source 1..5: note = Description of Artificial Sequence: Synthetic peptide; note = XENP018170 vhCDR1
NYWMN

SEQ ID NO: 12448 - protein, 19 aa, synthetic construct
  source 1..19: note = Description of Artificial Sequence: Synthetic peptide; note = XENP018170 vhCDR2
EIWLKSNNYATHYAEPVKG

SEQ ID NO: 12449 - protein, 11 aa, synthetic construct
  source 1..11: note = Description of Artificial Sequence: Synthetic peptide; note = XENP018170 vhCDR3
YYGNYGGYFDV

SEQ ID NO: 12450 - protein, 214 aa, synthetic construct; identical to SEQ ID NO: 11550
  source 1..214: note = Description of Artificial Sequence: Synthetic polypeptide; note = XENP018170 1G6_H1.73_L1_IgG1_PVA_/S267K Light Chain

SEQ ID NO: 12451 - protein, 107 aa, synthetic construct; identical to SEQ ID NO: 6247
  source 1..107: note = Description of Artificial Sequence: Synthetic polypeptide; note = VL of XENP018170

SEQ ID NO: 12452 - protein, 11 aa, synthetic construct
  source 1..11: note = Description of Artificial Sequence: Synthetic peptide; note = XENP018170 vlCDR1
RASQSVSNDVA

SEQ ID NO: 12453 - protein, 7 aa, synthetic construct
  source 1..7: note = Description of Artificial Sequence: Synthetic peptide; note = XENP018170 vlCDR2
YASHRYT

SEQ ID NO: 12454 - protein, 9 aa, synthetic construct
  source 1..9: note = Description of Artificial Sequence: Synthetic peptide; note = XENP018170 vlCDR3
QQDYSSPRT

SEQ ID NO: 12455 - protein, 451 aa, synthetic construct
  source 1..451: note = Description of Artificial Sequence: Synthetic polypeptide; note = XENP018171 1G6_H1.74_L1_IgG1_PVA_/S267K Heavy Chain
EVQLVESGGGLVKPGGSLRLSCAASGFTFSNYWMNWVRQAPGKGLEWVGEIRIKSNNYATHYAEPVKGRFTISRDDSKSTVYLQMNSLKTEDTAVYYCTRYYGNYGGYFDVWGAGTLVTVSSASTKGPSVFPLAPSSKSTSGGTAALGCLVKDYFPEPVTVSWNSGALTSGVHTFPAVLQSSGLYSLSSVVTVPSSSLGTQTYICNVNHKPSNTKVDKKVEPKSCDKTHTCPPCPAPPVAGPSVFLFPPKPKDTLMISRTPEVTCVVVDVKHEDPEVKFNWYVDGVEVHNAKTKPREEQYNSTYRVVSVLTVLHQDWLNGKEYKCKVSNKALPAPIEKTISKAKGQPREPQVYTLPPSREEMTKNQVSLTCLVKGFYPSDIAVEWESNGQPENNYKTTPPVLDSDGSFFLYSKLTVDKSRWQQGNVFSCSVMHEALHNHYTQKSLSLSPGK

SEQ ID NO: 12456 - protein, 122 aa, synthetic construct; identical to SEQ ID NO: 7017
  source 1..122: note = Description of Artificial Sequence: Synthetic polypeptide; note = VH of XENP018171

SEQ ID NO: 12457 - protein, 5 aa, synthetic construct
  source 1..5: note = Description of Artificial Sequence: Synthetic peptide; note = XENP018171 vhCDR1
NYWMN

SEQ ID NO: 12458 - protein, 19 aa, synthetic construct
  source 1..19: note = Description of Artificial Sequence: Synthetic peptide; note = XENP018171 vhCDR2
EIRIKSNNYATHYAEPVKG

SEQ ID NO: 12459 - protein, 11 aa, synthetic construct
  source 1..11: note = Description of Artificial Sequence: Synthetic peptide; note = XENP018171 vhCDR3
YYGNYGGYFDV

SEQ ID NO: 12460 - protein, 214 aa, synthetic construct; identical to SEQ ID NO: 11550
  source 1..214: note = Description of Artificial Sequence: Synthetic polypeptide; note = XENP018171 1G6_H1.74_L1_IgG1_PVA_/S267K Light Chain

SEQ ID NO: 12461 - protein, 107 aa, synthetic construct; identical to SEQ ID NO: 6247
  source 1..107: note = Description of Artificial Sequence: Synthetic polypeptide; note = VL of XENP018171

SEQ ID NO: 12462 - protein, 11 aa, synthetic construct
  source 1..11: note = Description of Artificial Sequence: Synthetic peptide; note = XENP018171 vlCDR1
RASQSVSNDVA

SEQ ID NO: 12463 - protein, 7 aa, synthetic construct
  source 1..7: note = Description of Artificial Sequence: Synthetic peptide; note = XENP018171 vlCDR2
YASHRYT

SEQ ID NO: 12464 - protein, 9 aa, synthetic construct
  source 1..9: note = Description of Artificial Sequence: Synthetic peptide; note = XENP018171 vlCDR3
QQDYSSPRT

SEQ ID NO: 12465 - protein, 451 aa, synthetic construct
  source 1..451: note = Description of Artificial Sequence: Synthetic polypeptide; note = XENP018172 1G6_H1.75_L1_IgG1_PVA_/S267K Heavy Chain
EVQLVESGGGLVKPGGSLRLSCAASGFTFSNYWMNWVRQAPGKGLEWVGEIRFKSNNYATHYAEPVKGRFTISRDDSKSTVYLQMNSLKTEDTAVYYCTRYYGNYGGYFDVWGAGTLVTVSSASTKGPSVFPLAPSSKSTSGGTAALGCLVKDYFPEPVTVSWNSGALTSGVHTFPAVLQSSGLYSLSSVVTVPSSSLGTQTYICNVNHKPSNTKVDKKVEPKSCDKTHTCPPCPAPPVAGPSVFLFPPKPKDTLMISRTPEVTCVVVDVKHEDPEVKFNWYVDGVEVHNAKTKPREEQYNSTYRVVSVLTVLHQDWLNGKEYKCKVSNKALPAPIEKTISKAKGQPREPQVYTLPPSREEMTKNQVSLTCLVKGFYPSDIAVEWESNGQPENNYKTTPPVLDSDGSFFLYSKLTVDKSRWQQGNVFSCSVMHEALHNHYTQKSLSLSPGK

SEQ ID NO: 12466 - protein, 122 aa, synthetic construct; identical to SEQ ID NO: 7026
  source 1..122: note = Description of Artificial Sequence: Synthetic polypeptide; note = VH of XENP018172

SEQ ID NO: 12467 - protein, 5 aa, synthetic construct
  source 1..5: note = Description of Artificial Sequence: Synthetic peptide; note = XENP018172 vhCDR1
NYWMN

SEQ ID NO: 12468 - protein, 19 aa, synthetic construct
  source 1..19: note = Description of Artificial Sequence: Synthetic peptide; note = XENP018172 vhCDR2
EIRFKSNNYATHYAEPVKG

SEQ ID NO: 12469 - protein, 11 aa, synthetic construct
  source 1..11: note = Description of Artificial Sequence: Synthetic peptide; note = XENP018172 vhCDR3
YYGNYGGYFDV

SEQ ID NO: 12470 - protein, 214 aa, synthetic construct; identical to SEQ ID NO: 11550
  source 1..214: note = Description of Artificial Sequence: Synthetic polypeptide; note = XENP018172 1G6_H1.75_L1_IgG1_PVA_/S267K Light Chain

SEQ ID NO: 12471 - protein, 107 aa, synthetic construct; identical to SEQ ID NO: 6247
  source 1..107: note = Description of Artificial Sequence: Synthetic polypeptide; note = VL of XENP018172

SEQ ID NO: 12472 - protein, 11 aa, synthetic construct
  source 1..11: note = Description of Artificial Sequence: Synthetic peptide; note = XENP018172 vlCDR1
RASQSVSNDVA

SEQ ID NO: 12473 - protein, 7 aa, synthetic construct
  source 1..7: note = Description of Artificial Sequence: Synthetic peptide; note = XENP018172 vlCDR2
YASHRYT

SEQ ID NO: 12474 - protein, 9 aa, synthetic construct
  source 1..9: note = Description of Artificial Sequence: Synthetic peptide; note = XENP018172 vlCDR3
QQDYSSPRT

SEQ ID NO: 12475 - protein, 451 aa, synthetic construct
  source 1..451: note = Description of Artificial Sequence: Synthetic polypeptide; note = XENP018173 1G6_H1.76_L1_IgG1_PVA_/S267K Heavy Chain
EVQLVESGGGLVKPGGSLRLSCAASGFTFSNYWMNWVRQAPGKGLEWVGEIRVKSNNYATHYAEPVKGRFTISRDDSKSTVYLQMNSLKTEDTAVYYCTRYYGNYGGYFDVWGAGTLVTVSSASTKGPSVFPLAPSSKSTSGGTAALGCLVKDYFPEPVTVSWNSGALTSGVHTFPAVLQSSGLYSLSSVVTVPSSSLGTQTYICNVNHKPSNTKVDKKVEPKSCDKTHTCPPCPAPPVAGPSVFLFPPKPKDTLMISRTPEVTCVVVDVKHEDPEVKFNWYVDGVEVHNAKTKPREEQYNSTYRVVSVLTVLHQDWLNGKEYKCKVSNKALPAPIEKTISKAKGQPREPQVYTLPPSREEMTKNQVSLTCLVKGFYPSDIAVEWESNGQPENNYKTTPPVLDSDGSFFLYSKLTVDKSRWQQGNVFSCSVMHEALHNHYTQKSLSLSPGK

SEQ ID NO: 12476 - protein, 122 aa, synthetic construct; identical to SEQ ID NO: 7035
  source 1..122: note = Description of Artificial Sequence: Synthetic polypeptide; note = VH of XENP018173

SEQ ID NO: 12477 - protein, 5 aa, synthetic construct
  source 1..5: note = Description of Artificial Sequence: Synthetic peptide; note = XENP018173 vhCDR1
NYWMN

SEQ ID NO: 12478 - protein, 19 aa, synthetic construct
  source 1..19: note = Description of Artificial Sequence: Synthetic peptide; note = XENP018173 vhCDR2
EIRVKSNNYATHYAEPVKG

SEQ ID NO: 12479 - protein, 11 aa, synthetic construct
  source 1..11: note = Description of Artificial Sequence: Synthetic peptide; note = XENP018173 vhCDR3
YYGNYGGYFDV

SEQ ID NO: 12480 - protein, 214 aa, synthetic construct; identical to SEQ ID NO: 11550
  source 1..214: note = Description of Artificial Sequence: Synthetic polypeptide; note = XENP018173 1G6_H1.76_L1_IgG1_PVA_/S267K Light Chain

SEQ ID NO: 12481 - protein, 107 aa, synthetic construct; identical to SEQ ID NO: 6247
  source 1..107: note = Description of Artificial Sequence: Synthetic polypeptide; note = VL of XENP018173

SEQ ID NO: 12482 - protein, 11 aa, synthetic construct
  source 1..11: note = Description of Artificial Sequence: Synthetic peptide; note = XENP018173 vlCDR1
RASQSVSNDVA

SEQ ID NO: 12483 - protein, 7 aa, synthetic construct
  source 1..7: note = Description of Artificial Sequence: Synthetic peptide; note = XENP018173 vlCDR2
YASHRYT

SEQ ID NO: 12484 - protein, 9 aa, synthetic construct
  source 1..9: note = Description of Artificial Sequence: Synthetic peptide; note = XENP018173 vlCDR3
QQDYSSPRT

SEQ ID NO: 12485 - protein, 451 aa, synthetic construct
  source 1..451: note = Description of Artificial Sequence: Synthetic polypeptide; note = XENP018174 1G6_H1.77_L1_IgG1_PVA_/S267K Heavy Chain
EVQLVESGGGLVKPGGSLRLSCAASGFTFSNYWMNWVRQAPGKGLEWVGEIRYKSNNYATHYAEPVKGRFTISRDDSKSTVYLQMNSLKTEDTAVYYCTRYYGNYGGYFDVWGAGTLVTVSSASTKGPSVFPLAPSSKSTSGGTAALGCLVKDYFPEPVTVSWNSGALTSGVHTFPAVLQSSGLYSLSSVVTVPSSSLGTQTYICNVNHKPSNTKVDKKVEPKSCDKTHTCPPCPAPPVAGPSVFLFPPKPKDTLMISRTPEVTCVVVDVKHEDPEVKFNWYVDGVEVHNAKTKPREEQYNSTYRVVSVLTVLHQDWLNGKEYKCKVSNKALPAPIEKTISKAKGQPREPQVYTLPPSREEMTKNQVSLTCLVKGFYPSDIAVEWESNGQPENNYKTTPPVLDSDGSFFLYSKLTVDKSRWQQGNVFSCSVMHEALHNHYTQKSLSLSPGK

SEQ ID NO: 12486 - protein, 122 aa, synthetic construct; identical to SEQ ID NO: 7044
  source 1..122: note = Description of Artificial Sequence: Synthetic polypeptide; note = VH of XENP018174

SEQ ID NO: 12487 - protein, 5 aa, synthetic construct
  source 1..5: note = Description of Artificial Sequence: Synthetic peptide; note = XENP018174 vhCDR1
NYWMN

SEQ ID NO: 12488 - protein, 19 aa, synthetic construct
  source 1..19: note = Description of Artificial Sequence: Synthetic peptide; note = XENP018174 vhCDR2
EIRYKSNNYATHYAEPVKG

SEQ ID NO: 12489 - protein, 11 aa, synthetic construct
  source 1..11: note = Description of Artificial Sequence: Synthetic peptide; note = XENP018174 vhCDR3
YYGNYGGYFDV

SEQ ID NO: 12490 - protein, 214 aa, synthetic construct; identical to SEQ ID NO: 11550
  source 1..214: note = Description of Artificial Sequence: Synthetic polypeptide; note = XENP018174 1G6_H1.77_L1_IgG1_PVA_/S267K Light Chain

SEQ ID NO: 12491 - protein, 107 aa, synthetic construct; identical to SEQ ID NO: 6247
  source 1..107: note = Description of Artificial Sequence: Synthetic polypeptide; note = VL of XENP018174

SEQ ID NO: 12492 - protein, 11 aa, synthetic construct
  source 1..11: note = Description of Artificial Sequence: Synthetic peptide; note = XENP018174 vlCDR1
RASQSVSNDVA

SEQ ID NO: 12493 - protein, 7 aa, synthetic construct
  source 1..7: note = Description of Artificial Sequence: Synthetic peptide; note = XENP018174 vlCDR2
YASHRYT

SEQ ID NO: 12494 - protein, 9 aa, synthetic construct
  source 1..9: note = Description of Artificial Sequence: Synthetic peptide; note = XENP018174 vlCDR3
QQDYSSPRT

SEQ ID NO: 12495 - protein, 451 aa, synthetic construct
  source 1..451: note = Description of Artificial Sequence: Synthetic polypeptide; note = XENP018175 1G6_H1.78_L1_IgG1_PVA_/S267K Heavy Chain
EVQLVESGGGLVKPGGSLRLSCAASGFTFSNYWMNWVRQAPGKGLEWVGEIRWKSNNYATHYAEPVKGRFTISRDDSKSTVYLQMNSLKTEDTAVYYCTRYYGNYGGYFDVWGAGTLVTVSSASTKGPSVFPLAPSSKSTSGGTAALGCLVKDYFPEPVTVSWNSGALTSGVHTFPAVLQSSGLYSLSSVVTVPSSSLGTQTYICNVNHKPSNTKVDKKVEPKSCDKTHTCPPCPAPPVAGPSVFLFPPKPKDTLMISRTPEVTCVVVDVKHEDPEVKFNWYVDGVEVHNAKTKPREEQYNSTYRVVSVLTVLHQDWLNGKEYKCKVSNKALPAPIEKTISKAKGQPREPQVYTLPPSREEMTKNQVSLTCLVKGFYPSDIAVEWESNGQPENNYKTTPPVLDSDGSFFLYSKLTVDKSRWQQGNVFSCSVMHEALHNHYTQKSLSLSPGK

SEQ ID NO: 12496 - protein, 122 aa, synthetic construct; identical to SEQ ID NO: 7053
  source 1..122: note = Description of Artificial Sequence: Synthetic polypeptide; note = VH of XENP018175

SEQ ID NO: 12497 - protein, 5 aa, synthetic construct
  source 1..5: note = Description of Artificial Sequence: Synthetic peptide; note = XENP018175 vhCDR1
NYWMN

SEQ ID NO: 12498 - protein, 19 aa, synthetic construct
  source 1..19: note = Description of Artificial Sequence: Synthetic peptide; note = XENP018175 vhCDR2
EIRWKSNNYATHYAEPVKG

SEQ ID NO: 12499 - protein, 11 aa, synthetic construct
  source 1..11: note = Description of Artificial Sequence: Synthetic peptide; note = XENP018175 vhCDR3
YYGNYGGYFDV

SEQ ID NO: 12500 - protein, 214 aa, synthetic construct; identical to SEQ ID NO: 11550
  source 1..214: note = Description of Artificial Sequence: Synthetic polypeptide; note = XENP018175 1G6_H1.78_L1_IgG1_PVA_/S267K Light Chain

SEQ ID NO: 12501 - protein, 107 aa, synthetic construct; identical to SEQ ID NO: 6247
  source 1..107: note = Description of Artificial Sequence: Synthetic polypeptide; note = VL of XENP018175

SEQ ID NO: 12502 - protein, 11 aa, synthetic construct
  source 1..11: note = Description of Artificial Sequence: Synthetic peptide; note = XENP018175 vlCDR1
RASQSVSNDVA

SEQ ID NO: 12503 - protein, 7 aa, synthetic construct
  source 1..7: note = Description of Artificial Sequence: Synthetic peptide; note = XENP018175 vlCDR2
YASHRYT

SEQ ID NO: 12504 - protein, 9 aa, synthetic construct
  source 1..9: note = Description of Artificial Sequence: Synthetic peptide; note = XENP018175 vlCDR3
QQDYSSPRT

SEQ ID NO: 12505 - protein, 451 aa, synthetic construct
  source 1..451: note = Description of Artificial Sequence: Synthetic polypeptide; note = XENP018176 1G6_H1.79_L1_IgG1_PVA_/S267K Heavy Chain
EVQLVESGGGLVKPGGSLRLSCAASGFTFSNYWMNWVRQAPGKGLEWVGEIRDKSNNYATHYAEPVKGRFTISRDDSKSTVYLQMNSLKTEDTAVYYCTRYYGNYGGYFDVWGAGTLVTVSSASTKGPSVFPLAPSSKSTSGGTAALGCLVKDYFPEPVTVSWNSGALTSGVHTFPAVLQSSGLYSLSSVVTVPSSSLGTQTYICNVNHKPSNTKVDKKVEPKSCDKTHTCPPCPAPPVAGPSVFLFPPKPKDTLMISRTPEVTCVVVDVKHEDPEVKFNWYVDGVEVHNAKTKPREEQYNSTYRVVSVLTVLHQDWLNGKEYKCKVSNKALPAPIEKTISKAKGQPREPQVYTLPPSREEMTKNQVSLTCLVKGFYPSDIAVEWESNGQPENNYKTTPPVLDSDGSFFLYSKLTVDKSRWQQGNVFSCSVMHEALHNHYTQKSLSLSPGK

SEQ ID NO: 12506 - protein, 122 aa, synthetic construct; identical to SEQ ID NO: 7062
  source 1..122: note = Description of Artificial Sequence: Synthetic polypeptide; note = VH of XENP018176

SEQ ID NO: 12507 - protein, 5 aa, synthetic construct
  source 1..5: note = Description of Artificial Sequence: Synthetic peptide; note = XENP018176 vhCDR1
NYWMN

SEQ ID NO: 12508 - protein, 19 aa, synthetic construct
  source 1..19: note = Description of Artificial Sequence: Synthetic peptide; note = XENP018176 vhCDR2
EIRDKSNNYATHYAEPVKG

SEQ ID NO: 12509 - protein, 11 aa, synthetic construct
  source 1..11: note = Description of Artificial Sequence: Synthetic peptide; note = XENP018176 vhCDR3
YYGNYGGYFDV

SEQ ID NO: 12510 - protein, 214 aa, synthetic construct; identical to SEQ ID NO: 11550
  source 1..214: note = Description of Artificial Sequence: Synthetic polypeptide; note = XENP018176 1G6_H1.79_L1_IgG1_PVA_/S267K Light Chain

SEQ ID NO: 12511 - protein, 107 aa, synthetic construct; identical to SEQ ID NO: 6247
  source 1..107: note = Description of Artificial Sequence: Synthetic polypeptide; note = VL of XENP018176

SEQ ID NO: 12512 - protein, 11 aa, synthetic construct
  source 1..11: note = Description of Artificial Sequence: Synthetic peptide; note = XENP018176 vlCDR1
RASQSVSNDVA

SEQ ID NO: 12513 - protein, 7 aa, synthetic construct
  source 1..7: note = Description of Artificial Sequence: Synthetic peptide; note = XENP018176 vlCDR2
YASHRYT

SEQ ID NO: 12514 - protein, 9 aa, synthetic construct
  source 1..9: note = Description of Artificial Sequence: Synthetic peptide; note = XENP018176 vlCDR3
QQDYSSPRT

SEQ ID NO: 12515 - protein, 451 aa, synthetic construct
  source 1..451: note = Description of Artificial Sequence: Synthetic polypeptide; note = XENP018177 1G6_H1.80_L1_IgG1_PVA_/S267K Heavy Chain
EVQLVESGGGLVKPGGSLRLSCAASGFTFSNYWMNWVRQAPGKGLEWVGEIRAKSNNYATHYAEPVKGRFTISRDDSKSTVYLQMNSLKTEDTAVYYCTRYYGNYGGYFDVWGAGTLVTVSSASTKGPSVFPLAPSSKSTSGGTAALGCLVKDYFPEPVTVSWNSGALTSGVHTFPAVLQSSGLYSLSSVVTVPSSSLGTQTYICNVNHKPSNTKVDKKVEPKSCDKTHTCPPCPAPPVAGPSVFLFPPKPKDTLMISRTPEVTCVVVDVKHEDPEVKFNWYVDGVEVHNAKTKPREEQYNSTYRVVSVLTVLHQDWLNGKEYKCKVSNKALPAPIEKTISKAKGQPREPQVYTLPPSREEMTKNQVSLTCLVKGFYPSDIAVEWESNGQPENNYKTTPPVLDSDGSFFLYSKLTVDKSRWQQGNVFSCSVMHEALHNHYTQKSLSLSPGK

SEQ ID NO: 12516 - protein, 122 aa, synthetic construct; identical to SEQ ID NO: 7071
  source 1..122: note = Description of Artificial Sequence: Synthetic polypeptide; note = VH of XENP018177

SEQ ID NO: 12517 - protein, 5 aa, synthetic construct
  source 1..5: note = Description of Artificial Sequence: Synthetic peptide; note = XENP018177 vhCDR1
NYWMN

SEQ ID NO: 12518 - protein, 19 aa, synthetic construct
  source 1..19: note = Description of Artificial Sequence: Synthetic peptide; note = XENP018177 vhCDR2
EIRAKSNNYATHYAEPVKG

SEQ ID NO: 12519 - protein, 11 aa, synthetic construct
  source 1..11: note = Description of Artificial Sequence: Synthetic peptide; note = XENP018177 vhCDR3
YYGNYGGYFDV

SEQ ID NO: 12520 - protein, 214 aa, synthetic construct; identical to SEQ ID NO: 11550
  source 1..214: note = Description of Artificial Sequence: Synthetic polypeptide; note = XENP018177 1G6_H1.80_L1_IgG1_PVA_/S267K Light Chain

SEQ ID NO: 12521 - protein, 107 aa, synthetic construct; identical to SEQ ID NO: 6247
  source 1..107: note = Description of Artificial Sequence: Synthetic polypeptide; note = VL of XENP018177

SEQ ID NO: 12522 - protein, 11 aa, synthetic construct
  source 1..11: note = Description of Artificial Sequence: Synthetic peptide; note = XENP018177 vlCDR1
RASQSVSNDVA

SEQ ID NO: 12523 - protein, 7 aa, synthetic construct
  source 1..7: note = Description of Artificial Sequence: Synthetic peptide; note = XENP018177 vlCDR2
YASHRYT

SEQ ID NO: 12524 - protein, 9 aa, synthetic construct
  source 1..9: note = Description of Artificial Sequence: Synthetic peptide; note = XENP018177 vlCDR3
QQDYSSPRT

SEQ ID NO: 12525 - protein, 451 aa, synthetic construct
  source 1..451: note = Description of Artificial Sequence: Synthetic polypeptide; note = XENP018178 1G6_H1.81_L1_IgG1_PVA_/S267K Heavy Chain
EVQLVESGGGLVKPGGSLRLSCAASGFTFSNYWMNWVRQAPGKGLEWVGEIRQKSNNYATHYAEPVKGRFTISRDDSKSTVYLQMNSLKTEDTAVYYCTRYYGNYGGYFDVWGAGTLVTVSSASTKGPSVFPLAPSSKSTSGGTAALGCLVKDYFPEPVTVSWNSGALTSGVHTFPAVLQSSGLYSLSSVVTVPSSSLGTQTYICNVNHKPSNTKVDKKVEPKSCDKTHTCPPCPAPPVAGPSVFLFPPKPKDTLMISRTPEVTCVVVDVKHEDPEVKFNWYVDGVEVHNAKTKPREEQYNSTYRVVSVLTVLHQDWLNGKEYKCKVSNKALPAPIEKTISKAKGQPREPQVYTLPPSREEMTKNQVSLTCLVKGFYPSDIAVEWESNGQPENNYKTTPPVLDSDGSFFLYSKLTVDKSRWQQGNVFSCSVMHEALHNHYTQKSLSLSPGK

SEQ ID NO: 12526 - protein, 122 aa, synthetic construct; identical to SEQ ID NO: 7080
  source 1..122: note = Description of Artificial Sequence: Synthetic polypeptide; note = VH of XENP018178

SEQ ID NO: 12527 - protein, 5 aa, synthetic construct
  source 1..5: note = Description of Artificial Sequence: Synthetic peptide; note = XENP018178 vhCDR1
NYWMN

SEQ ID NO: 12528 - protein, 19 aa, synthetic construct
  source 1..19: note = Description of Artificial Sequence: Synthetic peptide; note = XENP018178 vhCDR2
EIRQKSNNYATHYAEPVKG

SEQ ID NO: 12529 - protein, 11 aa, synthetic construct
  source 1..11: note = Description of Artificial Sequence: Synthetic peptide; note = XENP018178 vhCDR3
YYGNYGGYFDV

SEQ ID NO: 12530 - protein, 214 aa, synthetic construct; identical to SEQ ID NO: 11550
  source 1..214: note = Description of Artificial Sequence: Synthetic polypeptide; note = XENP018178 1G6_H1.81_L1_IgG1_PVA_/S267K Light Chain

SEQ ID NO: 12531 - protein, 107 aa, synthetic construct; identical to SEQ ID NO: 6247
  source 1..107: note = Description of Artificial Sequence: Synthetic polypeptide; note = VL of XENP018178

SEQ ID NO: 12532 - protein, 11 aa, synthetic construct
  source 1..11: note = Description of Artificial Sequence: Synthetic peptide; note = XENP018178 vlCDR1
RASQSVSNDVA

SEQ ID NO: 12533 - protein, 7 aa, synthetic construct
  source 1..7: note = Description of Artificial Sequence: Synthetic peptide; note = XENP018178 vlCDR2
YASHRYT

SEQ ID NO: 12534 - protein, 9 aa, synthetic construct
  source 1..9: note = Description of Artificial Sequence: Synthetic peptide; note = XENP018178 vlCDR3
QQDYSSPRT

SEQ ID NO: 12535 - protein, 451 aa, synthetic construct
  source 1..451: note = Description of Artificial Sequence: Synthetic polypeptide; note = XENP018179 1G6_H1.82_L1_IgG1_PVA_/S267K Heavy Chain
EVQLVESGGGLVKPGGSLRLSCAASGFTFSNYWMNWVRQAPGKGLEWVGEIRKKSNNYATHYAEPVKGRFTISRDDSKSTVYLQMNSLKTEDTAVYYCTRYYGNYGGYFDVWGAGTLVTVSSASTKGPSVFPLAPSSKSTSGGTAALGCLVKDYFPEPVTVSWNSGALTSGVHTFPAVLQSSGLYSLSSVVTVPSSSLGTQTYICNVNHKPSNTKVDKKVEPKSCDKTHTCPPCPAPPVAGPSVFLFPPKPKDTLMISRTPEVTCVVVDVKHEDPEVKFNWYVDGVEVHNAKTKPREEQYNSTYRVVSVLTVLHQDWLNGKEYKCKVSNKALPAPIEKTISKAKGQPREPQVYTLPPSREEMTKNQVSLTCLVKGFYPSDIAVEWESNGQPENNYKTTPPVLDSDGSFFLYSKLTVDKSRWQQGNVFSCSVMHEALHNHYTQKSLSLSPGK

SEQ ID NO: 12536 - protein, 122 aa, synthetic construct; identical to SEQ ID NO: 7089
  source 1..122: note = Description of Artificial Sequence: Synthetic polypeptide; note = VH of XENP018179

SEQ ID NO: 12537 - protein, 5 aa, synthetic construct
  source 1..5: note = Description of Artificial Sequence: Synthetic peptide; note = XENP018179 vhCDR1
NYWMN

SEQ ID NO: 12538 - protein, 19 aa, synthetic construct
  source 1..19: note = Description of Artificial Sequence: Synthetic peptide; note = XENP018179 vhCDR2
EIRKKSNNYATHYAEPVKG

SEQ ID NO: 12539 - protein, 11 aa, synthetic construct
  source 1..11: note = Description of Artificial Sequence: Synthetic peptide; note = XENP018179 vhCDR3
YYGNYGGYFDV

SEQ ID NO: 12540 - protein, 214 aa, synthetic construct; identical to SEQ ID NO: 11550
  source 1..214: note = Description of Artificial Sequence: Synthetic polypeptide; note = XENP018179 1G6_H1.82_L1_IgG1_PVA_/S267K Light Chain

SEQ ID NO: 12541 - protein, 107 aa, synthetic construct; identical to SEQ ID NO: 6247
  source 1..107: note = Description of Artificial Sequence: Synthetic polypeptide; note = VL of XENP018179

SEQ ID NO: 12542 - protein, 11 aa, synthetic construct
  source 1..11: note = Description of Artificial Sequence: Synthetic peptide; note = XENP018179 vlCDR1
RASQSVSNDVA

SEQ ID NO: 12543 - protein, 7 aa, synthetic construct
  source 1..7: note = Description of Artificial Sequence: Synthetic peptide; note = XENP018179 vlCDR2
YASHRYT

SEQ ID NO: 12544 - protein, 9 aa, synthetic construct
  source 1..9: note = Description of Artificial Sequence: Synthetic peptide; note = XENP018179 vlCDR3
QQDYSSPRT

SEQ ID NO: 12545 - protein, 451 aa, synthetic construct
  source 1..451: note = Description of Artificial Sequence: Synthetic polypeptide; note = XENP018180 1G6_H1.83_L1_IgG1_PVA_/S267K Heavy Chain
EVQLVESGGGLVKPGGSLRLSCAASGFTFSNYWMNWVRQAPGKGLEWVGEIRLRSNNYATHYAEPVKGRFTISRDDSKSTVYLQMNSLKTEDTAVYYCTRYYGNYGGYFDVWGAGTLVTVSSASTKGPSVFPLAPSSKSTSGGTAALGCLVKDYFPEPVTVSWNSGALTSGVHTFPAVLQSSGLYSLSSVVTVPSSSLGTQTYICNVNHKPSNTKVDKKVEPKSCDKTHTCPPCPAPPVAGPSVFLFPPKPKDTLMISRTPEVTCVVVDVKHEDPEVKFNWYVDGVEVHNAKTKPREEQYNSTYRVVSVLTVLHQDWLNGKEYKCKVSNKALPAPIEKTISKAKGQPREPQVYTLPPSREEMTKNQVSLTCLVKGFYPSDIAVEWESNGQPENNYKTTPPVLDSDGSFFLYSKLTVDKSRWQQGNVFSCSVMHEALHNHYTQKSLSLSPGK

SEQ ID NO: 12546 - protein, 122 aa, synthetic construct; identical to SEQ ID NO: 7098
  source 1..122: note = Description of Artificial Sequence: Synthetic polypeptide; note = VH of XENP018180

SEQ ID NO: 12547 - protein, 5 aa, synthetic construct
  source 1..5: note = Description of Artificial Sequence: Synthetic peptide; note = XENP018180 vhCDR1
NYWMN

SEQ ID NO: 12548 - protein, 19 aa, synthetic construct
  source 1..19: note = Description of Artificial Sequence: Synthetic peptide; note = XENP018180 vhCDR2
EIRLRSNNYATHYAEPVKG

SEQ ID NO: 12549 - protein, 11 aa, synthetic construct
  source 1..11: note = Description of Artificial Sequence: Synthetic peptide; note = XENP018180 vhCDR3
YYGNYGGYFDV

SEQ ID NO: 12550 - protein, 214 aa, synthetic construct; identical to SEQ ID NO: 11550
  source 1..214: note = Description of Artificial Sequence: Synthetic polypeptide; note = XENP018180 1G6_H1.83_L1_IgG1_PVA_/S267K Light Chain

SEQ ID NO: 12551 - protein, 107 aa, synthetic construct; identical to SEQ ID NO: 6247
  source 1..107: note = Description of Artificial Sequence: Synthetic polypeptide; note = VL of XENP018180

SEQ ID NO: 12552 - protein, 11 aa, synthetic construct
  source 1..11: note = Description of Artificial Sequence: Synthetic peptide; note = XENP018180 vlCDR1
RASQSVSNDVA

SEQ ID NO: 12553 - protein, 7 aa, synthetic construct
  source 1..7: note = Description of Artificial Sequence: Synthetic peptide; note = XENP018180 vlCDR2
YASHRYT

SEQ ID NO: 12554 - protein, 9 aa, synthetic construct
  source 1..9: note = Description of Artificial Sequence: Synthetic peptide; note = XENP018180 vlCDR3
QQDYSSPRT

SEQ ID NO: 12555 - protein, 451 aa, synthetic construct
  source 1..451: note = Description of Artificial Sequence: Synthetic polypeptide; note = XENP018181 1G6_H1.84_L1_IgG1_PVA_/S267K Heavy Chain
EVQLVESGGGLVKPGGSLRLSCAASGFTFSNYWMNWVRQAPGKGLEWVGEIRLESNNYATHYAEPVKGRFTISRDDSKSTVYLQMNSLKTEDTAVYYCTRYYGNYGGYFDVWGAGTLVTVSSASTKGPSVFPLAPSSKSTSGGTAALGCLVKDYFPEPVTVSWNSGALTSGVHTFPAVLQSSGLYSLSSVVTVPSSSLGTQTYICNVNHKPSNTKVDKKVEPKSCDKTHTCPPCPAPPVAGPSVFLFPPKPKDTLMISRTPEVTCVVVDVKHEDPEVKFNWYVDGVEVHNAKTKPREEQYNSTYRVVSVLTVLHQDWLNGKEYKCKVSNKALPAPIEKTISKAKGQPREPQVYTLPPSREEMTKNQVSLTCLVKGFYPSDIAVEWESNGQPENNYKTTPPVLDSDGSFFLYSKLTVDKSRWQQGNVFSCSVMHEALHNHYTQKSLSLSPGK

SEQ ID NO: 12556 - protein, 122 aa, synthetic construct; identical to SEQ ID NO: 7107
  source 1..122: note = Description of Artificial Sequence: Synthetic polypeptide; note = VH of XENP018181

SEQ ID NO: 12557 - protein, 5 aa, synthetic construct
  source 1..5: note = Description of Artificial Sequence: Synthetic peptide; note = XENP018181 vhCDR1
NYWMN

SEQ ID NO: 12558 - protein, 19 aa, synthetic construct
  source 1..19: note = Description of Artificial Sequence: Synthetic peptide; note = XENP018181 vhCDR2
EIRLESNNYATHYAEPVKG

SEQ ID NO: 12559 - protein, 11 aa, synthetic construct
  source 1..11: note = Description of Artificial Sequence: Synthetic peptide; note = XENP018181 vhCDR3
YYGNYGGYFDV

SEQ ID NO: 12560 - protein, 214 aa, synthetic construct; identical to SEQ ID NO: 11550
  source 1..214: note = Description of Artificial Sequence: Synthetic polypeptide; note = XENP018181 1G6_H1.84_L1_IgG1_PVA_/S267K Light Chain

SEQ ID NO: 12561 - protein, 107 aa, synthetic construct; identical to SEQ ID NO: 6247
  source 1..107: note = Description of Artificial Sequence: Synthetic polypeptide; note = VL of XENP018181

SEQ ID NO: 12562 - protein, 11 aa, synthetic construct
  source 1..11: note = Description of Artificial Sequence: Synthetic peptide; note = XENP018181 vlCDR1
RASQSVSNDVA

SEQ ID NO: 12563 - protein, 7 aa, synthetic construct
  source 1..7: note = Description of Artificial Sequence: Synthetic peptide; note = XENP018181 vlCDR2
YASHRYT

SEQ ID NO: 12564 - protein, 9 aa, synthetic construct
  source 1..9: note = Description of Artificial Sequence: Synthetic peptide; note = XENP018181 vlCDR3
QQDYSSPRT

SEQ ID NO: 12565 - protein, 451 aa, synthetic construct
  source 1..451: note = Description of Artificial Sequence: Synthetic polypeptide; note = XENP018182 1G6_H1.85_L1_IgG1_PVA_/S267K Heavy Chain
EVQLVESGGGLVKPGGSLRLSCAASGFTFSNYWMNWVRQAPGKGLEWVGEIRLHSNNYATHYAEPVKGRFTISRDDSKSTVYLQMNSLKTEDTAVYYCTRYYGNYGGYFDVWGAGTLVTVSSASTKGPSVFPLAPSSKSTSGGTAALGCLVKDYFPEPVTVSWNSGALTSGVHTFPAVLQSSGLYSLSSVVTVPSSSLGTQTYICNVNHKPSNTKVDKKVEPKSCDKTHTCPPCPAPPVAGPSVFLFPPKPKDTLMISRTPEVTCVVVDVKHEDPEVKFNWYVDGVEVHNAKTKPREEQYNSTYRVVSVLTVLHQDWLNGKEYKCKVSNKALPAPIEKTISKAKGQPREPQVYTLPPSREEMTKNQVSLTCLVKGFYPSDIAVEWESNGQPENNYKTTPPVLDSDGSFFLYSKLTVDKSRWQQGNVFSCSVMHEALHNHYTQKSLSLSPGK

SEQ ID NO: 12566 - protein, 122 aa, synthetic construct; identical to SEQ ID NO: 7116
  source 1..122: note = Description of Artificial Sequence: Synthetic polypeptide; note = VH of XENP018182

SEQ ID NO: 12567 - protein, 5 aa, synthetic construct
  source 1..5: note = Description of Artificial Sequence: Synthetic peptide; note = XENP018182 vhCDR1
NYWMN

SEQ ID NO: 12568 - protein, 19 aa, synthetic construct
  source 1..19: note = Description of Artificial Sequence: Synthetic peptide; note = XENP018182 vhCDR2
EIRLHSNNYATHYAEPVKG

SEQ ID NO: 12569 - protein, 11 aa, synthetic construct
  source 1..11: note = Description of Artificial Sequence: Synthetic peptide; note = XENP018182 vhCDR3
YYGNYGGYFDV

SEQ ID NO: 12570 - protein, 214 aa, synthetic construct; identical to SEQ ID NO: 11550
  source 1..214: note = Description of Artificial Sequence: Synthetic polypeptide; note = XENP018182 1G6_H1.85_L1_IgG1_PVA_/S267K Light Chain

SEQ ID NO: 12571 - protein, 107 aa, synthetic construct; identical to SEQ ID NO: 6247
  source 1..107: note = Description of Artificial Sequence: Synthetic polypeptide; note = VL of XENP018182

SEQ ID NO: 12572 - protein, 11 aa, synthetic construct
  source 1..11: note = Description of Artificial Sequence: Synthetic peptide; note = XENP018182 vlCDR1
RASQSVSNDVA

SEQ ID NO: 12573 - protein, 7 aa, synthetic construct
  source 1..7: note = Description of Artificial Sequence: Synthetic peptide; note = XENP018182 vlCDR2
YASHRYT

SEQ ID NO: 12574 - protein, 9 aa, synthetic construct
  source 1..9: note = Description of Artificial Sequence: Synthetic peptide; note = XENP018182 vlCDR3
QQDYSSPRT

SEQ ID NO: 12575 - protein, 451 aa, synthetic construct
  source 1..451: note = Description of Artificial Sequence: Synthetic polypeptide; note = XENP018183 1G6_H1.86_L1_IgG1_PVA_/S267K Heavy Chain
EVQLVESGGGLVKPGGSLRLSCAASGFTFSNYWMNWVRQAPGKGLEWVGEIRLSSNNYATHYAEPVKGRFTISRDDSKSTVYLQMNSLKTEDTAVYYCTRYYGNYGGYFDVWGAGTLVTVSSASTKGPSVFPLAPSSKSTSGGTAALGCLVKDYFPEPVTVSWNSGALTSGVHTFPAVLQSSGLYSLSSVVTVPSSSLGTQTYICNVNHKPSNTKVDKKVEPKSCDKTHTCPPCPAPPVAGPSVFLFPPKPKDTLMISRTPEVTCVVVDVKHEDPEVKFNWYVDGVEVHNAKTKPREEQYNSTYRVVSVLTVLHQDWLNGKEYKCKVSNKALPAPIEKTISKAKGQPREPQVYTLPPSREEMTKNQVSLTCLVKGFYPSDIAVEWESNGQPENNYKTTPPVLDSDGSFFLYSKLTVDKSRWQQGNVFSCSVMHEALHNHYTQKSLSLSPGK

SEQ ID NO: 12576 - protein, 122 aa, synthetic construct; identical to SEQ ID NO: 7125
  source 1..122: note = Description of Artificial Sequence: Synthetic polypeptide; note = VH of XENP018183

SEQ ID NO: 12577 - protein, 5 aa, synthetic construct
  source 1..5: note = Description of Artificial Sequence: Synthetic peptide; note = XENP018183 vhCDR1
NYWMN

SEQ ID NO: 12578 - protein, 19 aa, synthetic construct
  source 1..19: note = Description of Artificial Sequence: Synthetic peptide; note = XENP018183 vhCDR2
EIRLSSNNYATHYAEPVKG

SEQ ID NO: 12579 - protein, 11 aa, synthetic construct
  source 1..11: note = Description of Artificial Sequence: Synthetic peptide; note = XENP018183 vhCDR3
YYGNYGGYFDV

SEQ ID NO: 12580 - protein, 214 aa, synthetic construct; identical to SEQ ID NO: 11550
  source 1..214: note = Description of Artificial Sequence: Synthetic polypeptide; note = XENP018183 1G6_H1.86_L1_IgG1_PVA_/S267K Light Chain

SEQ ID NO: 12581 - protein, 107 aa, synthetic construct; identical to SEQ ID NO: 6247
  source 1..107: note = Description of Artificial Sequence: Synthetic polypeptide; note = VL of XENP018183

SEQ ID NO: 12582 - protein, 11 aa, synthetic construct
  source 1..11: note = Description of Artificial Sequence: Synthetic peptide; note = XENP018183 vlCDR1
RASQSVSNDVA

SEQ ID NO: 12583 - protein, 7 aa, synthetic construct
  source 1..7: note = Description of Artificial Sequence: Synthetic peptide; note = XENP018183 vlCDR2
YASHRYT

SEQ ID NO: 12584 - protein, 9 aa, synthetic construct
  source 1..9: note = Description of Artificial Sequence: Synthetic peptide; note = XENP018183 vlCDR3
QQDYSSPRT

SEQ ID NO: 12585 - protein, 451 aa, synthetic construct
  source 1..451: note = Description of Artificial Sequence: Synthetic polypeptide; note = XENP018184 1G6_H1.87_L1_IgG1_PVA_/S267K Heavy Chain
EVQLVESGGGLVKPGGSLRLSCAASGFTFSNYWMNWVRQAPGKGLEWVGEIRLDSNNYATHYAEPVKGRFTISRDDSKSTVYLQMNSLKTEDTAVYYCTRYYGNYGGYFDVWGAGTLVTVSSASTKGPSVFPLAPSSKSTSGGTAALGCLVKDYFPEPVTVSWNSGALTSGVHTFPAVLQSSGLYSLSSVVTVPSSSLGTQTYICNVNHKPSNTKVDKKVEPKSCDKTHTCPPCPAPPVAGPSVFLFPPKPKDTLMISRTPEVTCVVVDVKHEDPEVKFNWYVDGVEVHNAKTKPREEQYNSTYRVVSVLTVLHQDWLNGKEYKCKVSNKALPAPIEKTISKAKGQPREPQVYTLPPSREEMTKNQVSLTCLVKGFYPSDIAVEWESNGQPENNYKTTPPVLDSDGSFFLYSKLTVDKSRWQQGNVFSCSVMHEALHNHYTQKSLSLSPGK

SEQ ID NO: 12586 - protein, 122 aa, synthetic construct; identical to SEQ ID NO: 7134
  source 1..122: note = Description of Artificial Sequence: Synthetic polypeptide; note = VH of XENP018184

SEQ ID NO: 12587 - protein, 5 aa, synthetic construct
  source 1..5: note = Description of Artificial Sequence: Synthetic peptide; note = XENP018184 vhCDR1
NYWMN

SEQ ID NO: 12588 - protein, 19 aa, synthetic construct
  source 1..19: note = Description of Artificial Sequence: Synthetic peptide; note = XENP018184 vhCDR2
EIRLDSNNYATHYAEPVKG

SEQ ID NO: 12589 - protein, 11 aa, synthetic construct
  source 1..11: note = Description of Artificial Sequence: Synthetic peptide; note = XENP018184 vhCDR3
YYGNYGGYFDV

SEQ ID NO: 12590 - protein, 214 aa, synthetic construct; identical to SEQ ID NO: 11550
  source 1..214: note = Description of Artificial Sequence: Synthetic polypeptide; note = XENP018184 1G6_H1.87_L1_IgG1_PVA_/S267K Light Chain

SEQ ID NO: 12591 - protein, 107 aa, synthetic construct; identical to SEQ ID NO: 6247
  source 1..107: note = Description of Artificial Sequence: Synthetic polypeptide; note = VL of XENP018184

SEQ ID NO: 12592 - protein, 11 aa, synthetic construct
  source 1..11: note = Description of Artificial Sequence: Synthetic peptide; note = XENP018184 vlCDR1
RASQSVSNDVA

SEQ ID NO: 12593 - protein, 7 aa, synthetic construct
  source 1..7: note = Description of Artificial Sequence: Synthetic peptide; note = XENP018184 vlCDR2
YASHRYT

SEQ ID NO: 12594 - protein, 9 aa, synthetic construct
  source 1..9: note = Description of Artificial Sequence: Synthetic peptide; note = XENP018184 vlCDR3
QQDYSSPRT

SEQ ID NO: 12595 - protein, 451 aa, synthetic construct
  source 1..451: note = Description of Artificial Sequence: Synthetic polypeptide; note = XENP018185 1G6_H1.88_L1_IgG1_PVA_/S267K Heavy Chain
EVQLVESGGGLVKPGGSLRLSCAASGFTFSNYWMNWVRQAPGKGLEWVGEIRLASNNYATHYAEPVKGRFTISRDDSKSTVYLQMNSLKTEDTAVYYCTRYYGNYGGYFDVWGAGTLVTVSSASTKGPSVFPLAPSSKSTSGGTAALGCLVKDYFPEPVTVSWNSGALTSGVHTFPAVLQSSGLYSLSSVVTVPSSSLGTQTYICNVNHKPSNTKVDKKVEPKSCDKTHTCPPCPAPPVAGPSVFLFPPKPKDTLMISRTPEVTCVVVDVKHEDPEVKFNWYVDGVEVHNAKTKPREEQYNSTYRVVSVLTVLHQDWLNGKEYKCKVSNKALPAPIEKTISKAKGQPREPQVYTLPPSREEMTKNQVSLTCLVKGFYPSDIAVEWESNGQPENNYKTTPPVLDSDGSFFLYSKLTVDKSRWQQGNVFSCSVMHEALHNHYTQKSLSLSPGK

SEQ ID NO: 12596 - protein, 122 aa, synthetic construct; identical to SEQ ID NO: 7143
  source 1..122: note = Description of Artificial Sequence: Synthetic polypeptide; note = VH of XENP018185

SEQ ID NO: 12597 - protein, 5 aa, synthetic construct
  source 1..5: note = Description of Artificial Sequence: Synthetic peptide; note = XENP018185 vhCDR1
NYWMN

SEQ ID NO: 12598 - protein, 19 aa, synthetic construct
  source 1..19: note = Description of Artificial Sequence: Synthetic peptide; note = XENP018185 vhCDR2
EIRLASNNYATHYAEPVKG

SEQ ID NO: 12599 - protein, 11 aa, synthetic construct
  source 1..11: note = Description of Artificial Sequence: Synthetic peptide; note = XENP018185 vhCDR3
YYGNYGGYFDV

SEQ ID NO: 12600 - protein, 214 aa, synthetic construct; identical to SEQ ID NO: 11550
  source 1..214: note = Description of Artificial Sequence: Synthetic polypeptide; note = XENP018185 1G6_H1.88_L1_IgG1_PVA_/S267K Light Chain

SEQ ID NO: 12601 - protein, 107 aa, synthetic construct; identical to SEQ ID NO: 6247
  source 1..107: note = Description of Artificial Sequence: Synthetic polypeptide; note = VL of XENP018185

SEQ ID NO: 12602 - protein, 11 aa, synthetic construct
  source 1..11: note = Description of Artificial Sequence: Synthetic peptide; note = XENP018185 vlCDR1
RASQSVSNDVA

SEQ ID NO: 12603 - protein, 7 aa, synthetic construct
  source 1..7: note = Description of Artificial Sequence: Synthetic peptide; note = XENP018185 vlCDR2
YASHRYT

SEQ ID NO: 12604 - protein, 9 aa, synthetic construct
  source 1..9: note = Description of Artificial Sequence: Synthetic peptide; note = XENP018185 vlCDR3
QQDYSSPRT

SEQ ID NO: 12605 - protein, 451 aa, synthetic construct
  source 1..451: note = Description of Artificial Sequence: Synthetic polypeptide; note = XENP018186 1G6_H1.89_L1_IgG1_PVA_/S267K Heavy Chain
EVQLVESGGGLVKPGGSLRLSCAASGFTFSNYWMNWVRQAPGKGLEWVGEIRLGSNNYATHYAEPVKGRFTISRDDSKSTVYLQMNSLKTEDTAVYYCTRYYGNYGGYFDVWGAGTLVTVSSASTKGPSVFPLAPSSKSTSGGTAALGCLVKDYFPEPVTVSWNSGALTSGVHTFPAVLQSSGLYSLSSVVTVPSSSLGTQTYICNVNHKPSNTKVDKKVEPKSCDKTHTCPPCPAPPVAGPSVFLFPPKPKDTLMISRTPEVTCVVVDVKHEDPEVKFNWYVDGVEVHNAKTKPREEQYNSTYRVVSVLTVLHQDWLNGKEYKCKVSNKALPAPIEKTISKAKGQPREPQVYTLPPSREEMTKNQVSLTCLVKGFYPSDIAVEWESNGQPENNYKTTPPVLDSDGSFFLYSKLTVDKSRWQQGNVFSCSVMHEALHNHYTQKSLSLSPGK

SEQ ID NO: 12606 - protein, 122 aa, synthetic construct; identical to SEQ ID NO: 7152
  source 1..122: note = Description of Artificial Sequence: Synthetic polypeptide; note = VH of XENP018186

SEQ ID NO: 12607 - protein, 5 aa, synthetic construct
  source 1..5: note = Description of Artificial Sequence: Synthetic peptide; note = XENP018186 vhCDR1
NYWMN

SEQ ID NO: 12608 - protein, 19 aa, synthetic construct
  source 1..19: note = Description of Artificial Sequence: Synthetic peptide; note = XENP018186 vhCDR2
EIRLGSNNYATHYAEPVKG

SEQ ID NO: 12609 - protein, 11 aa, synthetic construct
  source 1..11: note = Description of Artificial Sequence: Synthetic peptide; note = XENP018186 vhCDR3
YYGNYGGYFDV

SEQ ID NO: 12610 - protein, 214 aa, synthetic construct; identical to SEQ ID NO: 11550
  source 1..214: note = Description of Artificial Sequence: Synthetic polypeptide; note = XENP018186 1G6_H1.89_L1_IgG1_PVA_/S267K Light Chain

SEQ ID NO: 12611 - protein, 107 aa, synthetic construct; identical to SEQ ID NO: 6247
  source 1..107: note = Description of Artificial Sequence: Synthetic polypeptide; note = VL of XENP018186

SEQ ID NO: 12612 - protein, 11 aa, synthetic construct
  source 1..11: note = Description of Artificial Sequence: Synthetic peptide; note = XENP018186 vlCDR1
RASQSVSNDVA

SEQ ID NO: 12613 - protein, 7 aa, synthetic construct
  source 1..7: note = Description of Artificial Sequence: Synthetic peptide; note = XENP018186 vlCDR2
YASHRYT

SEQ ID NO: 12614 - protein, 9 aa, synthetic construct
  source 1..9: note = Description of Artificial Sequence: Synthetic peptide; note = XENP018186 vlCDR3
QQDYSSPRT

SEQ ID NO: 12615 - protein, 451 aa, synthetic construct
  source 1..451: note = Description of Artificial Sequence: Synthetic polypeptide; note = XENP018187 1G6_H1.90_L1_IgG1_PVA_/S267K Heavy Chain
EVQLVESGGGLVKPGGSLRLSCAASGFTFSNYWMNWVRQAPGKGLEWVGEIRLYSNNYATHYAEPVKGRFTISRDDSKSTVYLQMNSLKTEDTAVYYCTRYYGNYGGYFDVWGAGTLVTVSSASTKGPSVFPLAPSSKSTSGGTAALGCLVKDYFPEPVTVSWNSGALTSGVHTFPAVLQSSGLYSLSSVVTVPSSSLGTQTYICNVNHKPSNTKVDKKVEPKSCDKTHTCPPCPAPPVAGPSVFLFPPKPKDTLMISRTPEVTCVVVDVKHEDPEVKFNWYVDGVEVHNAKTKPREEQYNSTYRVVSVLTVLHQDWLNGKEYKCKVSNKALPAPIEKTISKAKGQPREPQVYTLPPSREEMTKNQVSLTCLVKGFYPSDIAVEWESNGQPENNYKTTPPVLDSDGSFFLYSKLTVDKSRWQQGNVFSCSVMHEALHNHYTQKSLSLSPGK

SEQ ID NO: 12616 - protein, 122 aa, synthetic construct; identical to SEQ ID NO: 7161
  source 1..122: note = Description of Artificial Sequence: Synthetic polypeptide; note = VH of XENP018187

SEQ ID NO: 12617 - protein, 5 aa, synthetic construct
  source 1..5: note = Description of Artificial Sequence: Synthetic peptide; note = XENP018187 vhCDR1
NYWMN

SEQ ID NO: 12618 - protein, 19 aa, synthetic construct
  source 1..19: note = Description of Artificial Sequence: Synthetic peptide; note = XENP018187 vhCDR2
EIRLYSNNYATHYAEPVKG

SEQ ID NO: 12619 - protein, 11 aa, synthetic construct
  source 1..11: note = Description of Artificial Sequence: Synthetic peptide; note = XENP018187 vhCDR3
YYGNYGGYFDV

SEQ ID NO: 12620 - protein, 214 aa, synthetic construct; identical to SEQ ID NO: 11550
  source 1..214: note = Description of Artificial Sequence: Synthetic polypeptide; note = XENP018187 1G6_H1.90_L1_IgG1_PVA_/S267K Light Chain

SEQ ID NO: 12621 - protein, 107 aa, synthetic construct; identical to SEQ ID NO: 6247
  source 1..107: note = Description of Artificial Sequence: Synthetic polypeptide; note = VL of XENP018187

SEQ ID NO: 12622 - protein, 11 aa, synthetic construct
  source 1..11: note = Description of Artificial Sequence: Synthetic peptide; note = XENP018187 vlCDR1
RASQSVSNDVA

SEQ ID NO: 12623 - protein, 7 aa, synthetic construct
  source 1..7: note = Description of Artificial Sequence: Synthetic peptide; note = XENP018187 vlCDR2
YASHRYT

SEQ ID NO: 12624 - protein, 9 aa, synthetic construct
  source 1..9: note = Description of Artificial Sequence: Synthetic peptide; note = XENP018187 vlCDR3
QQDYSSPRT

SEQ ID NO: 12625 - protein, 451 aa, synthetic construct
  source 1..451: note = Description of Artificial Sequence: Synthetic polypeptide; note = XENP018188 1G6_H1.91_L1_IgG1_PVA_/S267K Heavy Chain
EVQLVESGGGLVKPGGSLRLSCAASGFTFSNYWMNWVRQAPGKGLEWVGEIRLISNNYATHYAEPVKGRFTISRDDSKSTVYLQMNSLKTEDTAVYYCTRYYGNYGGYFDVWGAGTLVTVSSASTKGPSVFPLAPSSKSTSGGTAALGCLVKDYFPEPVTVSWNSGALTSGVHTFPAVLQSSGLYSLSSVVTVPSSSLGTQTYICNVNHKPSNTKVDKKVEPKSCDKTHTCPPCPAPPVAGPSVFLFPPKPKDTLMISRTPEVTCVVVDVKHEDPEVKFNWYVDGVEVHNAKTKPREEQYNSTYRVVSVLTVLHQDWLNGKEYKCKVSNKALPAPIEKTISKAKGQPREPQVYTLPPSREEMTKNQVSLTCLVKGFYPSDIAVEWESNGQPENNYKTTPPVLDSDGSFFLYSKLTVDKSRWQQGNVFSCSVMHEALHNHYTQKSLSLSPGK

SEQ ID NO: 12626 - protein, 122 aa, synthetic construct; identical to SEQ ID NO: 7170
  source 1..122: note = Description of Artificial Sequence: Synthetic polypeptide; note = VH of XENP018188

SEQ ID NO: 12627 - protein, 5 aa, synthetic construct
  source 1..5: note = Description of Artificial Sequence: Synthetic peptide; note = XENP018188 vhCDR1
NYWMN

SEQ ID NO: 12628 - protein, 19 aa, synthetic construct
  source 1..19: note = Description of Artificial Sequence: Synthetic peptide; note = XENP018188 vhCDR2
EIRLISNNYATHYAEPVKG

SEQ ID NO: 12629 - protein, 11 aa, synthetic construct
  source 1..11: note = Description of Artificial Sequence: Synthetic peptide; note = XENP018188 vhCDR3
YYGNYGGYFDV

SEQ ID NO: 12630 - protein, 214 aa, synthetic construct; identical to SEQ ID NO: 11550
  source 1..214: note = Description of Artificial Sequence: Synthetic polypeptide; note = XENP018188 1G6_H1.91_L1_IgG1_PVA_/S267K Light Chain

SEQ ID NO: 12631 - protein, 107 aa, synthetic construct; identical to SEQ ID NO: 6247
  source 1..107: note = Description of Artificial Sequence: Synthetic polypeptide; note = VL of XENP018188

SEQ ID NO: 12632 - protein, 11 aa, synthetic construct
  source 1..11: note = Description of Artificial Sequence: Synthetic peptide; note = XENP018188 vlCDR1
RASQSVSNDVA

SEQ ID NO: 12633 - protein, 7 aa, synthetic construct
  source 1..7: note = Description of Artificial Sequence: Synthetic peptide; note = XENP018188 vlCDR2
YASHRYT

SEQ ID NO: 12634 - protein, 9 aa, synthetic construct
  source 1..9: note = Description of Artificial Sequence: Synthetic peptide; note = XENP018188 vlCDR3
QQDYSSPRT

SEQ ID NO: 12635 - protein, 451 aa, synthetic construct
  source 1..451: note = Description of Artificial Sequence: Synthetic polypeptide; note = XENP018189 1G6_H1.92_L1_IgG1_PVA_/S267K Heavy Chain
EVQLVESGGGLVKPGGSLRLSCAASGFTFSNYWMNWVRQAPGKGLEWVGEIRLKTNNYATHYAEPVKGRFTISRDDSKSTVYLQMNSLKTEDTAVYYCTRYYGNYGGYFDVWGAGTLVTVSSASTKGPSVFPLAPSSKSTSGGTAALGCLVKDYFPEPVTVSWNSGALTSGVHTFPAVLQSSGLYSLSSVVTVPSSSLGTQTYICNVNHKPSNTKVDKKVEPKSCDKTHTCPPCPAPPVAGPSVFLFPPKPKDTLMISRTPEVTCVVVDVKHEDPEVKFNWYVDGVEVHNAKTKPREEQYNSTYRVVSVLTVLHQDWLNGKEYKCKVSNKALPAPIEKTISKAKGQPREPQVYTLPPSREEMTKNQVSLTCLVKGFYPSDIAVEWESNGQPENNYKTTPPVLDSDGSFFLYSKLTVDKSRWQQGNVFSCSVMHEALHNHYTQKSLSLSPGK

SEQ ID NO: 12636 - protein, 122 aa, synthetic construct; identical to SEQ ID NO: 7179
  source 1..122: note = Description of Artificial Sequence: Synthetic polypeptide; note = VH of XENP018189

SEQ ID NO: 12637 - protein, 5 aa, synthetic construct
  source 1..5: note = Description of Artificial Sequence: Synthetic peptide; note = XENP018189 vhCDR1
NYWMN

SEQ ID NO: 12638 - protein, 19 aa, synthetic construct
  source 1..19: note = Description of Artificial Sequence: Synthetic peptide; note = XENP018189 vhCDR2
EIRLKTNNYATHYAEPVKG

SEQ ID NO: 12639 - protein, 11 aa, synthetic construct
  source 1..11: note = Description of Artificial Sequence: Synthetic peptide; note = XENP018189 vhCDR3
YYGNYGGYFDV

SEQ ID NO: 12640 - protein, 214 aa, synthetic construct; identical to SEQ ID NO: 11550
  source 1..214: note = Description of Artificial Sequence: Synthetic polypeptide; note = XENP018189 1G6_H1.92_L1_IgG1_PVA_/S267K Light Chain

SEQ ID NO: 12641 - protein, 107 aa, synthetic construct; identical to SEQ ID NO: 6247
  source 1..107: note = Description of Artificial Sequence: Synthetic polypeptide; note = VL of XENP018189

SEQ ID NO: 12642 - protein, 11 aa, synthetic construct
  source 1..11: note = Description of Artificial Sequence: Synthetic peptide; note = XENP018189 vlCDR1
RASQSVSNDVA

SEQ ID NO: 12643 - protein, 7 aa, synthetic construct
  source 1..7: note = Description of Artificial Sequence: Synthetic peptide; note = XENP018189 vlCDR2
YASHRYT

SEQ ID NO: 12644 - protein, 9 aa, synthetic construct
  source 1..9: note = Description of Artificial Sequence: Synthetic peptide; note = XENP018189 vlCDR3
QQDYSSPRT

SEQ ID NO: 12645 - protein, 451 aa, synthetic construct
  source 1..451: note = Description of Artificial Sequence: Synthetic polypeptide; note = XENP018190 1G6_H1.93_L1_IgG1_PVA_/S267K Heavy Chain
EVQLVESGGGLVKPGGSLRLSCAASGFTFSNYWMNWVRQAPGKGLEWVGEIRLKANNYATHYAEPVKGRFTISRDDSKSTVYLQMNSLKTEDTAVYYCTRYYGNYGGYFDVWGAGTLVTVSSASTKGPSVFPLAPSSKSTSGGTAALGCLVKDYFPEPVTVSWNSGALTSGVHTFPAVLQSSGLYSLSSVVTVPSSSLGTQTYICNVNHKPSNTKVDKKVEPKSCDKTHTCPPCPAPPVAGPSVFLFPPKPKDTLMISRTPEVTCVVVDVKHEDPEVKFNWYVDGVEVHNAKTKPREEQYNSTYRVVSVLTVLHQDWLNGKEYKCKVSNKALPAPIEKTISKAKGQPREPQVYTLPPSREEMTKNQVSLTCLVKGFYPSDIAVEWESNGQPENNYKTTPPVLDSDGSFFLYSKLTVDKSRWQQGNVFSCSVMHEALHNHYTQKSLSLSPGK

SEQ ID NO: 12646 - protein, 122 aa, synthetic construct; identical to SEQ ID NO: 7188
  source 1..122: note = Description of Artificial Sequence: Synthetic polypeptide; note = VH of XENP018190

SEQ ID NO: 12647 - protein, 5 aa, synthetic construct
  source 1..5: note = Description of Artificial Sequence: Synthetic peptide; note = XENP018190 vhCDR1
NYWMN

SEQ ID NO: 12648 - protein, 19 aa, synthetic construct
  source 1..19: note = Description of Artificial Sequence: Synthetic peptide; note = XENP018190 vhCDR2
EIRLKANNYATHYAEPVKG

SEQ ID NO: 12649 - protein, 11 aa, synthetic construct
  source 1..11: note = Description of Artificial Sequence: Synthetic peptide; note = XENP018190 vhCDR3
YYGNYGGYFDV

SEQ ID NO: 12650 - protein, 214 aa, synthetic construct; identical to SEQ ID NO: 11550
  source 1..214: note = Description of Artificial Sequence: Synthetic polypeptide; note = XENP018190 1G6_H1.93_L1_IgG1_PVA_/S267K Light Chain

SEQ ID NO: 12651 - protein, 107 aa, synthetic construct; identical to SEQ ID NO: 6247
  source 1..107: note = Description of Artificial Sequence: Synthetic polypeptide; note = VL of XENP018190

SEQ ID NO: 12652 - protein, 11 aa, synthetic construct
  source 1..11: note = Description of Artificial Sequence: Synthetic peptide; note = XENP018190 vlCDR1
RASQSVSNDVA

SEQ ID NO: 12653 - protein, 7 aa, synthetic construct
  source 1..7: note = Description of Artificial Sequence: Synthetic peptide; note = XENP018190 vlCDR2
YASHRYT

SEQ ID NO: 12654 - protein, 9 aa, synthetic construct
  source 1..9: note = Description of Artificial Sequence: Synthetic peptide; note = XENP018190 vlCDR3
QQDYSSPRT

SEQ ID NO: 12655 - protein, 451 aa, synthetic construct
  source 1..451: note = Description of Artificial Sequence: Synthetic polypeptide; note = XENP018191 1G6_H1.94_L1_IgG1_PVA_/S267K Heavy Chain
EVQLVESGGGLVKPGGSLRLSCAASGFTFSNYWMNWVRQAPGKGLEWVGEIRLKQNNYATHYAEPVKGRFTISRDDSKSTVYLQMNSLKTEDTAVYYCTRYYGNYGGYFDVWGAGTLVTVSSASTKGPSVFPLAPSSKSTSGGTAALGCLVKDYFPEPVTVSWNSGALTSGVHTFPAVLQSSGLYSLSSVVTVPSSSLGTQTYICNVNHKPSNTKVDKKVEPKSCDKTHTCPPCPAPPVAGPSVFLFPPKPKDTLMISRTPEVTCVVVDVKHEDPEVKFNWYVDGVEVHNAKTKPREEQYNSTYRVVSVLTVLHQDWLNGKEYKCKVSNKALPAPIEKTISKAKGQPREPQVYTLPPSREEMTKNQVSLTCLVKGFYPSDIAVEWESNGQPENNYKTTPPVLDSDGSFFLYSKLTVDKSRWQQGNVFSCSVMHEALHNHYTQKSLSLSPGK

SEQ ID NO: 12656 - protein, 122 aa, synthetic construct; identical to SEQ ID NO: 7197
  source 1..122: note = Description of Artificial Sequence: Synthetic polypeptide; note = VH of XENP018191

SEQ ID NO: 12657 - protein, 5 aa, synthetic construct
  source 1..5: note = Description of Artificial Sequence: Synthetic peptide; note = XENP018191 vhCDR1
NYWMN

SEQ ID NO: 12658 - protein, 19 aa, synthetic construct
  source 1..19: note = Description of Artificial Sequence: Synthetic peptide; note = XENP018191 vhCDR2
EIRLKQNNYATHYAEPVKG

SEQ ID NO: 12659 - protein, 11 aa, synthetic construct
  source 1..11: note = Description of Artificial Sequence: Synthetic peptide; note = XENP018191 vhCDR3
YYGNYGGYFDV

SEQ ID NO: 12660 - protein, 214 aa, synthetic construct; identical to SEQ ID NO: 11550
  source 1..214: note = Description of Artificial Sequence: Synthetic polypeptide; note = XENP018191 1G6_H1.94_L1_IgG1_PVA_/S267K Light Chain

SEQ ID NO: 12661 - protein, 107 aa, synthetic construct; identical to SEQ ID NO: 6247
  source 1..107: note = Description of Artificial Sequence: Synthetic polypeptide; note = VL of XENP018191

SEQ ID NO: 12662 - protein, 11 aa, synthetic construct
  source 1..11: note = Description of Artificial Sequence: Synthetic peptide; note = XENP018191 vlCDR1
RASQSVSNDVA

SEQ ID NO: 12663 - protein, 7 aa, synthetic construct
  source 1..7: note = Description of Artificial Sequence: Synthetic peptide; note = XENP018191 vlCDR2
YASHRYT

SEQ ID NO: 12664 - protein, 9 aa, synthetic construct
  source 1..9: note = Description of Artificial Sequence: Synthetic peptide; note = XENP018191 vlCDR3
QQDYSSPRT

SEQ ID NO: 12665 - protein, 451 aa, synthetic construct
  source 1..451: note = Description of Artificial Sequence: Synthetic polypeptide; note = XENP018192 1G6_H1.95_L1_IgG1_PVA_/S267K Heavy Chain
EVQLVESGGGLVKPGGSLRLSCAASGFTFSNYWMNWVRQAPGKGLEWVGEIRLKGNNYATHYAEPVKGRFTISRDDSKSTVYLQMNSLKTEDTAVYYCTRYYGNYGGYFDVWGAGTLVTVSSASTKGPSVFPLAPSSKSTSGGTAALGCLVKDYFPEPVTVSWNSGALTSGVHTFPAVLQSSGLYSLSSVVTVPSSSLGTQTYICNVNHKPSNTKVDKKVEPKSCDKTHTCPPCPAPPVAGPSVFLFPPKPKDTLMISRTPEVTCVVVDVKHEDPEVKFNWYVDGVEVHNAKTKPREEQYNSTYRVVSVLTVLHQDWLNGKEYKCKVSNKALPAPIEKTISKAKGQPREPQVYTLPPSREEMTKNQVSLTCLVKGFYPSDIAVEWESNGQPENNYKTTPPVLDSDGSFFLYSKLTVDKSRWQQGNVFSCSVMHEALHNHYTQKSLSLSPGK

SEQ ID NO: 12666 - protein, 122 aa, synthetic construct; identical to SEQ ID NO: 7206
  source 1..122: note = Description of Artificial Sequence: Synthetic polypeptide; note = VH of XENP018192

SEQ ID NO: 12667 - protein, 5 aa, synthetic construct
  source 1..5: note = Description of Artificial Sequence: Synthetic peptide; note = XENP018192 vhCDR1
NYWMN

SEQ ID NO: 12668 - protein, 19 aa, synthetic construct
  source 1..19: note = Description of Artificial Sequence: Synthetic peptide; note = XENP018192 vhCDR2
EIRLKGNNYATHYAEPVKG

SEQ ID NO: 12669 - protein, 11 aa, synthetic construct
  source 1..11: note = Description of Artificial Sequence: Synthetic peptide; note = XENP018192 vhCDR3
YYGNYGGYFDV

SEQ ID NO: 12670 - protein, 214 aa, synthetic construct; identical to SEQ ID NO: 11550
  source 1..214: note = Description of Artificial Sequence: Synthetic polypeptide; note = XENP018192 1G6_H1.95_L1_IgG1_PVA_/S267K Light Chain

SEQ ID NO: 12671 - protein, 107 aa, synthetic construct; identical to SEQ ID NO: 6247
  source 1..107: note = Description of Artificial Sequence: Synthetic polypeptide; note = VL of XENP018192

SEQ ID NO: 12672 - protein, 11 aa, synthetic construct
  source 1..11: note = Description of Artificial Sequence: Synthetic peptide; note = XENP018192 vlCDR1
RASQSVSNDVA

SEQ ID NO: 12673 - protein, 7 aa, synthetic construct
  source 1..7: note = Description of Artificial Sequence: Synthetic peptide; note = XENP018192 vlCDR2
YASHRYT

SEQ ID NO: 12674 - protein, 9 aa, synthetic construct
  source 1..9: note = Description of Artificial Sequence: Synthetic peptide; note = XENP018192 vlCDR3
QQDYSSPRT

SEQ ID NO: 12675 - protein, 451 aa, synthetic construct
  source 1..451: note = Description of Artificial Sequence: Synthetic polypeptide; note = XENP018193 1G6_H1.96_L1_IgG1_PVA_/S267K Heavy Chain
EVQLVESGGGLVKPGGSLRLSCAASGFTFSNYWMNWVRQAPGKGLEWVGEIRLKVNNYATHYAEPVKGRFTISRDDSKSTVYLQMNSLKTEDTAVYYCTRYYGNYGGYFDVWGAGTLVTVSSASTKGPSVFPLAPSSKSTSGGTAALGCLVKDYFPEPVTVSWNSGALTSGVHTFPAVLQSSGLYSLSSVVTVPSSSLGTQTYICNVNHKPSNTKVDKKVEPKSCDKTHTCPPCPAPPVAGPSVFLFPPKPKDTLMISRTPEVTCVVVDVKHEDPEVKFNWYVDGVEVHNAKTKPREEQYNSTYRVVSVLTVLHQDWLNGKEYKCKVSNKALPAPIEKTISKAKGQPREPQVYTLPPSREEMTKNQVSLTCLVKGFYPSDIAVEWESNGQPENNYKTTPPVLDSDGSFFLYSKLTVDKSRWQQGNVFSCSVMHEALHNHYTQKSLSLSPGK

SEQ ID NO: 12676 - protein, 122 aa, synthetic construct; identical to SEQ ID NO: 7215
  source 1..122: note = Description of Artificial Sequence: Synthetic polypeptide; note = VH of XENP018193

SEQ ID NO: 12677 - protein, 5 aa, synthetic construct
  source 1..5: note = Description of Artificial Sequence: Synthetic peptide; note = XENP018193 vhCDR1
NYWMN

SEQ ID NO: 12678 - protein, 19 aa, synthetic construct
  source 1..19: note = Description of Artificial Sequence: Synthetic peptide; note = XENP018193 vhCDR2
EIRLKVNNYATHYAEPVKG

SEQ ID NO: 12679 - protein, 11 aa, synthetic construct
  source 1..11: note = Description of Artificial Sequence: Synthetic peptide; note = XENP018193 vhCDR3
YYGNYGGYFDV

SEQ ID NO: 12680 - protein, 214 aa, synthetic construct; identical to SEQ ID NO: 11550
  source 1..214: note = Description of Artificial Sequence: Synthetic polypeptide; note = XENP018193 1G6_H1.96_L1_IgG1_PVA_/S267K Light Chain

SEQ ID NO: 12681 - protein, 107 aa, synthetic construct; identical to SEQ ID NO: 6247
  source 1..107: note = Description of Artificial Sequence: Synthetic polypeptide; note = VL of XENP018193

SEQ ID NO: 12682 - protein, 11 aa, synthetic construct
  source 1..11: note = Description of Artificial Sequence: Synthetic peptide; note = XENP018193 vlCDR1
RASQSVSNDVA

SEQ ID NO: 12683 - protein, 7 aa, synthetic construct
  source 1..7: note = Description of Artificial Sequence: Synthetic peptide; note = XENP018193 vlCDR2
YASHRYT

SEQ ID NO: 12684 - protein, 9 aa, synthetic construct
  source 1..9: note = Description of Artificial Sequence: Synthetic peptide; note = XENP018193 vlCDR3
QQDYSSPRT

SEQ ID NO: 12685 - protein, 451 aa, synthetic construct
  source 1..451: note = Description of Artificial Sequence: Synthetic polypeptide; note = XENP018194 1G6_H1.97_L1_IgG1_PVA_/S267K Heavy Chain
EVQLVESGGGLVKPGGSLRLSCAASGFTFSNYWMNWVRQAPGKGLEWVGEIRLKHNNYATHYAEPVKGRFTISRDDSKSTVYLQMNSLKTEDTAVYYCTRYYGNYGGYFDVWGAGTLVTVSSASTKGPSVFPLAPSSKSTSGGTAALGCLVKDYFPEPVTVSWNSGALTSGVHTFPAVLQSSGLYSLSSVVTVPSSSLGTQTYICNVNHKPSNTKVDKKVEPKSCDKTHTCPPCPAPPVAGPSVFLFPPKPKDTLMISRTPEVTCVVVDVKHEDPEVKFNWYVDGVEVHNAKTKPREEQYNSTYRVVSVLTVLHQDWLNGKEYKCKVSNKALPAPIEKTISKAKGQPREPQVYTLPPSREEMTKNQVSLTCLVKGFYPSDIAVEWESNGQPENNYKTTPPVLDSDGSFFLYSKLTVDKSRWQQGNVFSCSVMHEALHNHYTQKSLSLSPGK

SEQ ID NO: 12686 - protein, 122 aa, synthetic construct; identical to SEQ ID NO: 7224
  source 1..122: note = Description of Artificial Sequence: Synthetic polypeptide; note = VH of XENP018194

SEQ ID NO: 12687 - protein, 5 aa, synthetic construct
  source 1..5: note = Description of Artificial Sequence: Synthetic peptide; note = XENP018194 vhCDR1
NYWMN

SEQ ID NO: 12688 - protein, 19 aa, synthetic construct
  source 1..19: note = Description of Artificial Sequence: Synthetic peptide; note = XENP018194 vhCDR2
EIRLKHNNYATHYAEPVKG

SEQ ID NO: 12689 - protein, 11 aa, synthetic construct
  source 1..11: note = Description of Artificial Sequence: Synthetic peptide; note = XENP018194 vhCDR3
YYGNYGGYFDV

SEQ ID NO: 12690 - protein, 214 aa, synthetic construct; identical to SEQ ID NO: 11550
  source 1..214: note = Description of Artificial Sequence: Synthetic polypeptide; note = XENP018194 1G6_H1.97_L1_IgG1_PVA_/S267K Light Chain

SEQ ID NO: 12691 - protein, 107 aa, synthetic construct; identical to SEQ ID NO: 6247
  source 1..107: note = Description of Artificial Sequence: Synthetic polypeptide; note = VL of XENP018194

SEQ ID NO: 12692 - protein, 11 aa, synthetic construct
  source 1..11: note = Description of Artificial Sequence: Synthetic peptide; note = XENP018194 vlCDR1
RASQSVSNDVA

SEQ ID NO: 12693 - protein, 7 aa, synthetic construct
  source 1..7: note = Description of Artificial Sequence: Synthetic peptide; note = XENP018194 vlCDR2
YASHRYT

SEQ ID NO: 12694 - protein, 9 aa, synthetic construct
  source 1..9: note = Description of Artificial Sequence: Synthetic peptide; note = XENP018194 vlCDR3
QQDYSSPRT

SEQ ID NO: 12695 - protein, 451 aa, synthetic construct
  source 1..451: note = Description of Artificial Sequence: Synthetic polypeptide; note = XENP018195 1G6_H1.98_L1_IgG1_PVA_/S267K Heavy Chain
EVQLVESGGGLVKPGGSLRLSCAASGFTFSNYWMNWVRQAPGKGLEWVGEIRLKDNNYATHYAEPVKGRFTISRDDSKSTVYLQMNSLKTEDTAVYYCTRYYGNYGGYFDVWGAGTLVTVSSASTKGPSVFPLAPSSKSTSGGTAALGCLVKDYFPEPVTVSWNSGALTSGVHTFPAVLQSSGLYSLSSVVTVPSSSLGTQTYICNVNHKPSNTKVDKKVEPKSCDKTHTCPPCPAPPVAGPSVFLFPPKPKDTLMISRTPEVTCVVVDVKHEDPEVKFNWYVDGVEVHNAKTKPREEQYNSTYRVVSVLTVLHQDWLNGKEYKCKVSNKALPAPIEKTISKAKGQPREPQVYTLPPSREEMTKNQVSLTCLVKGFYPSDIAVEWESNGQPENNYKTTPPVLDSDGSFFLYSKLTVDKSRWQQGNVFSCSVMHEALHNHYTQKSLSLSPGK

SEQ ID NO: 12696 - protein, 122 aa, synthetic construct; identical to SEQ ID NO: 7233
  source 1..122: note = Description of Artificial Sequence: Synthetic polypeptide; note = VH of XENP018195

SEQ ID NO: 12697 - protein, 5 aa, synthetic construct
  source 1..5: note = Description of Artificial Sequence: Synthetic peptide; note = XENP018195 vhCDR1
NYWMN

SEQ ID NO: 12698 - protein, 19 aa, synthetic construct
  source 1..19: note = Description of Artificial Sequence: Synthetic peptide; note = XENP018195 vhCDR2
EIRLKDNNYATHYAEPVKG

SEQ ID NO: 12699 - protein, 11 aa, synthetic construct
  source 1..11: note = Description of Artificial Sequence: Synthetic peptide; note = XENP018195 vhCDR3
YYGNYGGYFDV

SEQ ID NO: 12700 - protein, 214 aa, synthetic construct; identical to SEQ ID NO: 11550
  source 1..214: note = Description of Artificial Sequence: Synthetic polypeptide; note = XENP018195 1G6_H1.98_L1_IgG1_PVA_/S267K Light Chain

SEQ ID NO: 12701 - protein, 107 aa, synthetic construct; identical to SEQ ID NO: 6247
  source 1..107: note = Description of Artificial Sequence: Synthetic polypeptide; note = VL of XENP018195

SEQ ID NO: 12702 - protein, 11 aa, synthetic construct
  source 1..11: note = Description of Artificial Sequence: Synthetic peptide; note = XENP018195 vlCDR1
RASQSVSNDVA

SEQ ID NO: 12703 - protein, 7 aa, synthetic construct
  source 1..7: note = Description of Artificial Sequence: Synthetic peptide; note = XENP018195 vlCDR2
YASHRYT

SEQ ID NO: 12704 - protein, 9 aa, synthetic construct
  source 1..9: note = Description of Artificial Sequence: Synthetic peptide; note = XENP018195 vlCDR3
QQDYSSPRT

SEQ ID NO: 12705 - protein, 451 aa, synthetic construct
  source 1..451: note = Description of Artificial Sequence: Synthetic polypeptide; note = XENP018196 1G6_H1.99_L1_IgG1_PVA_/S267K Heavy Chain
EVQLVESGGGLVKPGGSLRLSCAASGFTFSNYWMNWVRQAPGKGLEWVGEIRLKKNNYATHYAEPVKGRFTISRDDSKSTVYLQMNSLKTEDTAVYYCTRYYGNYGGYFDVWGAGTLVTVSSASTKGPSVFPLAPSSKSTSGGTAALGCLVKDYFPEPVTVSWNSGALTSGVHTFPAVLQSSGLYSLSSVVTVPSSSLGTQTYICNVNHKPSNTKVDKKVEPKSCDKTHTCPPCPAPPVAGPSVFLFPPKPKDTLMISRTPEVTCVVVDVKHEDPEVKFNWYVDGVEVHNAKTKPREEQYNSTYRVVSVLTVLHQDWLNGKEYKCKVSNKALPAPIEKTISKAKGQPREPQVYTLPPSREEMTKNQVSLTCLVKGFYPSDIAVEWESNGQPENNYKTTPPVLDSDGSFFLYSKLTVDKSRWQQGNVFSCSVMHEALHNHYTQKSLSLSPGK

SEQ ID NO: 12706 - protein, 122 aa, synthetic construct; identical to SEQ ID NO: 7242
  source 1..122: note = Description of Artificial Sequence: Synthetic polypeptide; note = VH of XENP018196

SEQ ID NO: 12707 - protein, 5 aa, synthetic construct
  source 1..5: note = Description of Artificial Sequence: Synthetic peptide; note = XENP018196 vhCDR1
NYWMN

SEQ ID NO: 12708 - protein, 19 aa, synthetic construct
  source 1..19: note = Description of Artificial Sequence: Synthetic peptide; note = XENP018196 vhCDR2
EIRLKKNNYATHYAEPVKG

SEQ ID NO: 12709 - protein, 11 aa, synthetic construct
  source 1..11: note = Description of Artificial Sequence: Synthetic peptide; note = XENP018196 vhCDR3
YYGNYGGYFDV

SEQ ID NO: 12710 - protein, 214 aa, synthetic construct; identical to SEQ ID NO: 11550
  source 1..214: note = Description of Artificial Sequence: Synthetic polypeptide; note = XENP018196 1G6_H1.99_L1_IgG1_PVA_/S267K Light Chain

SEQ ID NO: 12711 - protein, 107 aa, synthetic construct; identical to SEQ ID NO: 6247
  source 1..107: note = Description of Artificial Sequence: Synthetic polypeptide; note = VL of XENP018196

SEQ ID NO: 12712 - protein, 11 aa, synthetic construct
  source 1..11: note = Description of Artificial Sequence: Synthetic peptide; note = XENP018196 vlCDR1
RASQSVSNDVA

SEQ ID NO: 12713 - protein, 7 aa, synthetic construct
  source 1..7: note = Description of Artificial Sequence: Synthetic peptide; note = XENP018196 vlCDR2
YASHRYT

SEQ ID NO: 12714 - protein, 9 aa, synthetic construct
  source 1..9: note = Description of Artificial Sequence: Synthetic peptide; note = XENP018196 vlCDR3
QQDYSSPRT

SEQ ID NO: 12715 - protein, 451 aa, synthetic construct
  source 1..451: note = Description of Artificial Sequence: Synthetic polypeptide; note = XENP018201 1G6_H1.100_L1_IgG1_PVA_/S267K Heavy Chain
EVQLVESGGGLVKPGGSLRLSCAASGFTFSNYWMNWVRQAPGKGLEWVGEIRLKYNNYATHYAEPVKGRFTISRDDSKSTVYLQMNSLKTEDTAVYYCTRYYGNYGGYFDVWGAGTLVTVSSASTKGPSVFPLAPSSKSTSGGTAALGCLVKDYFPEPVTVSWNSGALTSGVHTFPAVLQSSGLYSLSSVVTVPSSSLGTQTYICNVNHKPSNTKVDKKVEPKSCDKTHTCPPCPAPPVAGPSVFLFPPKPKDTLMISRTPEVTCVVVDVKHEDPEVKFNWYVDGVEVHNAKTKPREEQYNSTYRVVSVLTVLHQDWLNGKEYKCKVSNKALPAPIEKTISKAKGQPREPQVYTLPPSREEMTKNQVSLTCLVKGFYPSDIAVEWESNGQPENNYKTTPPVLDSDGSFFLYSKLTVDKSRWQQGNVFSCSVMHEALHNHYTQKSLSLSPGK

SEQ ID NO: 12716 - protein, 122 aa, synthetic construct; identical to SEQ ID NO: 7251
  source 1..122: note = Description of Artificial Sequence: Synthetic polypeptide; note = VH of XENP018201

SEQ ID NO: 12717 - protein, 5 aa, synthetic construct
  source 1..5: note = Description of Artificial Sequence: Synthetic peptide; note = XENP018201 vhCDR1
NYWMN

SEQ ID NO: 12718 - protein, 19 aa, synthetic construct
  source 1..19: note = Description of Artificial Sequence: Synthetic peptide; note = XENP018201 vhCDR2
EIRLKYNNYATHYAEPVKG

SEQ ID NO: 12719 - protein, 11 aa, synthetic construct
  source 1..11: note = Description of Artificial Sequence: Synthetic peptide; note = XENP018201 vhCDR3
YYGNYGGYFDV

SEQ ID NO: 12720 - protein, 214 aa, synthetic construct; identical to SEQ ID NO: 11550
  source 1..214: note = Description of Artificial Sequence: Synthetic polypeptide; note = XENP018201 1G6_H1.100_L1_IgG1_PVA_/S267K Light Chain

SEQ ID NO: 12721 - protein, 107 aa, synthetic construct; identical to SEQ ID NO: 6247
  source 1..107: note = Description of Artificial Sequence: Synthetic polypeptide; note = VL of XENP018201

SEQ ID NO: 12722 - protein, 11 aa, synthetic construct
  source 1..11: note = Description of Artificial Sequence: Synthetic peptide; note = XENP018201 vlCDR1
RASQSVSNDVA

SEQ ID NO: 12723 - protein, 7 aa, synthetic construct
  source 1..7: note = Description of Artificial Sequence: Synthetic peptide; note = XENP018201 vlCDR2
YASHRYT

SEQ ID NO: 12724 - protein, 9 aa, synthetic construct
  source 1..9: note = Description of Artificial Sequence: Synthetic peptide; note = XENP018201 vlCDR3
QQDYSSPRT

SEQ ID NO: 12725 - protein, 451 aa, synthetic construct
  source 1..451: note = Description of Artificial Sequence: Synthetic polypeptide; note = XENP018202 1G6_H1.101_L1_IgG1_PVA_/S267K Heavy Chain
EVQLVESGGGLVKPGGSLRLSCAASGFTFSNYWMNWVRQAPGKGLEWVGEIRLKSDNYATHYAEPVKGRFTISRDDSKSTVYLQMNSLKTEDTAVYYCTRYYGNYGGYFDVWGAGTLVTVSSASTKGPSVFPLAPSSKSTSGGTAALGCLVKDYFPEPVTVSWNSGALTSGVHTFPAVLQSSGLYSLSSVVTVPSSSLGTQTYICNVNHKPSNTKVDKKVEPKSCDKTHTCPPCPAPPVAGPSVFLFPPKPKDTLMISRTPEVTCVVVDVKHEDPEVKFNWYVDGVEVHNAKTKPREEQYNSTYRVVSVLTVLHQDWLNGKEYKCKVSNKALPAPIEKTISKAKGQPREPQVYTLPPSREEMTKNQVSLTCLVKGFYPSDIAVEWESNGQPENNYKTTPPVLDSDGSFFLYSKLTVDKSRWQQGNVFSCSVMHEALHNHYTQKSLSLSPGK

SEQ ID NO: 12726 - protein, 122 aa, synthetic construct; identical to SEQ ID NO: 7260
  source 1..122: note = Description of Artificial Sequence: Synthetic polypeptide; note = VH of XENP018202

SEQ ID NO: 12727 - protein, 5 aa, synthetic construct
  source 1..5: note = Description of Artificial Sequence: Synthetic peptide; note = XENP018202 vhCDR1
NYWMN

SEQ ID NO: 12728 - protein, 19 aa, synthetic construct
  source 1..19: note = Description of Artificial Sequence: Synthetic peptide; note = XENP018202 vhCDR2
EIRLKSDNYATHYAEPVKG

SEQ ID NO: 12729 - protein, 11 aa, synthetic construct
  source 1..11: note = Description of Artificial Sequence: Synthetic peptide; note = XENP018202 vhCDR3
YYGNYGGYFDV

SEQ ID NO: 12730 - protein, 214 aa, synthetic construct; identical to SEQ ID NO: 11550
  source 1..214: note = Description of Artificial Sequence: Synthetic polypeptide; note = XENP018202 1G6_H1.101_L1_IgG1_PVA_/S267K Light Chain

SEQ ID NO: 12731 - protein, 107 aa, synthetic construct; identical to SEQ ID NO: 6247
  source 1..107: note = Description of Artificial Sequence: Synthetic polypeptide; note = VL of XENP018202

SEQ ID NO: 12732 - protein, 11 aa, synthetic construct
  source 1..11: note = Description of Artificial Sequence: Synthetic peptide; note = XENP018202 vlCDR1
RASQSVSNDVA

SEQ ID NO: 12733 - protein, 7 aa, synthetic construct
  source 1..7: note = Description of Artificial Sequence: Synthetic peptide; note = XENP018202 vlCDR2
YASHRYT

SEQ ID NO: 12734 - protein, 9 aa, synthetic construct
  source 1..9: note = Description of Artificial Sequence: Synthetic peptide; note = XENP018202 vlCDR3
QQDYSSPRT

SEQ ID NO: 12735 - protein, 451 aa, synthetic construct
  source 1..451: note = Description of Artificial Sequence: Synthetic polypeptide; note = XENP018203 1G6_H1.102_L1_IgG1_PVA_/S267K Heavy Chain
EVQLVESGGGLVKPGGSLRLSCAASGFTFSNYWMNWVRQAPGKGLEWVGEIRLKSHNYATHYAEPVKGRFTISRDDSKSTVYLQMNSLKTEDTAVYYCTRYYGNYGGYFDVWGAGTLVTVSSASTKGPSVFPLAPSSKSTSGGTAALGCLVKDYFPEPVTVSWNSGALTSGVHTFPAVLQSSGLYSLSSVVTVPSSSLGTQTYICNVNHKPSNTKVDKKVEPKSCDKTHTCPPCPAPPVAGPSVFLFPPKPKDTLMISRTPEVTCVVVDVKHEDPEVKFNWYVDGVEVHNAKTKPREEQYNSTYRVVSVLTVLHQDWLNGKEYKCKVSNKALPAPIEKTISKAKGQPREPQVYTLPPSREEMTKNQVSLTCLVKGFYPSDIAVEWESNGQPENNYKTTPPVLDSDGSFFLYSKLTVDKSRWQQGNVFSCSVMHEALHNHYTQKSLSLSPGK

SEQ ID NO: 12736 - protein, 122 aa, synthetic construct; identical to SEQ ID NO: 7269
  source 1..122: note = Description of Artificial Sequence: Synthetic polypeptide; note = VH of XENP018203

SEQ ID NO: 12737 - protein, 5 aa, synthetic construct
  source 1..5: note = Description of Artificial Sequence: Synthetic peptide; note = XENP018203 vhCDR1
NYWMN

SEQ ID NO: 12738 - protein, 19 aa, synthetic construct
  source 1..19: note = Description of Artificial Sequence: Synthetic peptide; note = XENP018203 vhCDR2
EIRLKSHNYATHYAEPVKG

SEQ ID NO: 12739 - protein, 11 aa, synthetic construct
  source 1..11: note = Description of Artificial Sequence: Synthetic peptide; note = XENP018203 vhCDR3
YYGNYGGYFDV

SEQ ID NO: 12740 - protein, 214 aa, synthetic construct; identical to SEQ ID NO: 11550
  source 1..214: note = Description of Artificial Sequence: Synthetic polypeptide; note = XENP018203 1G6_H1.102_L1_IgG1_PVA_/S267K Light Chain

SEQ ID NO: 12741 - protein, 107 aa, synthetic construct; identical to SEQ ID NO: 6247
  source 1..107: note = Description of Artificial Sequence: Synthetic polypeptide; note = VL of XENP018203

SEQ ID NO: 12742 - protein, 11 aa, synthetic construct
  source 1..11: note = Description of Artificial Sequence: Synthetic peptide; note = XENP018203 vlCDR1
RASQSVSNDVA

SEQ ID NO: 12743 - protein, 7 aa, synthetic construct
  source 1..7: note = Description of Artificial Sequence: Synthetic peptide; note = XENP018203 vlCDR2
YASHRYT

SEQ ID NO: 12744 - protein, 9 aa, synthetic construct
  source 1..9: note = Description of Artificial Sequence: Synthetic peptide; note = XENP018203 vlCDR3
QQDYSSPRT

SEQ ID NO: 12745 - protein, 451 aa, synthetic construct
  source 1..451: note = Description of Artificial Sequence: Synthetic polypeptide; note = XENP018204 1G6_H1.103_L1_IgG1_PVA_/S267K Heavy Chain
EVQLVESGGGLVKPGGSLRLSCAASGFTFSNYWMNWVRQAPGKGLEWVGEIRLKSENYATHYAEPVKGRFTISRDDSKSTVYLQMNSLKTEDTAVYYCTRYYGNYGGYFDVWGAGTLVTVSSASTKGPSVFPLAPSSKSTSGGTAALGCLVKDYFPEPVTVSWNSGALTSGVHTFPAVLQSSGLYSLSSVVTVPSSSLGTQTYICNVNHKPSNTKVDKKVEPKSCDKTHTCPPCPAPPVAGPSVFLFPPKPKDTLMISRTPEVTCVVVDVKHEDPEVKFNWYVDGVEVHNAKTKPREEQYNSTYRVVSVLTVLHQDWLNGKEYKCKVSNKALPAPIEKTISKAKGQPREPQVYTLPPSREEMTKNQVSLTCLVKGFYPSDIAVEWESNGQPENNYKTTPPVLDSDGSFFLYSKLTVDKSRWQQGNVFSCSVMHEALHNHYTQKSLSLSPGK

SEQ ID NO: 12746 - protein, 122 aa, synthetic construct; identical to SEQ ID NO: 7278
  source 1..122: note = Description of Artificial Sequence: Synthetic polypeptide; note = VH of XENP018204

SEQ ID NO: 12747 - protein, 5 aa, synthetic construct
  source 1..5: note = Description of Artificial Sequence: Synthetic peptide; note = XENP018204 vhCDR1
NYWMN

SEQ ID NO: 12748 - protein, 19 aa, synthetic construct
  source 1..19: note = Description of Artificial Sequence: Synthetic peptide; note = XENP018204 vhCDR2
EIRLKSENYATHYAEPVKG

SEQ ID NO: 12749 - protein, 11 aa, synthetic construct
  source 1..11: note = Description of Artificial Sequence: Synthetic peptide; note = XENP018204 vhCDR3
YYGNYGGYFDV

SEQ ID NO: 12750 - protein, 214 aa, synthetic construct; identical to SEQ ID NO: 11550
  source 1..214: note = Description of Artificial Sequence: Synthetic polypeptide; note = XENP018204 1G6_H1.103_L1_IgG1_PVA_/S267K Light Chain

SEQ ID NO: 12751 - protein, 107 aa, synthetic construct; identical to SEQ ID NO: 6247
  source 1..107: note = Description of Artificial Sequence: Synthetic polypeptide; note = VL of XENP018204

SEQ ID NO: 12752 - protein, 11 aa, synthetic construct
  source 1..11: note = Description of Artificial Sequence: Synthetic peptide; note = XENP018204 vlCDR1
RASQSVSNDVA

SEQ ID NO: 12753 - protein, 7 aa, synthetic construct
  source 1..7: note = Description of Artificial Sequence: Synthetic peptide; note = XENP018204 vlCDR2
YASHRYT

SEQ ID NO: 12754 - protein, 9 aa, synthetic construct
  source 1..9: note = Description of Artificial Sequence: Synthetic peptide; note = XENP018204 vlCDR3
QQDYSSPRT

SEQ ID NO: 12755 - protein, 451 aa, synthetic construct
  source 1..451: note = Description of Artificial Sequence: Synthetic polypeptide; note = XENP018205 1G6_H1.104_L1_IgG1_PVA_/S267K Heavy Chain
EVQLVESGGGLVKPGGSLRLSCAASGFTFSNYWMNWVRQAPGKGLEWVGEIRLKSSNYATHYAEPVKGRFTISRDDSKSTVYLQMNSLKTEDTAVYYCTRYYGNYGGYFDVWGAGTLVTVSSASTKGPSVFPLAPSSKSTSGGTAALGCLVKDYFPEPVTVSWNSGALTSGVHTFPAVLQSSGLYSLSSVVTVPSSSLGTQTYICNVNHKPSNTKVDKKVEPKSCDKTHTCPPCPAPPVAGPSVFLFPPKPKDTLMISRTPEVTCVVVDVKHEDPEVKFNWYVDGVEVHNAKTKPREEQYNSTYRVVSVLTVLHQDWLNGKEYKCKVSNKALPAPIEKTISKAKGQPREPQVYTLPPSREEMTKNQVSLTCLVKGFYPSDIAVEWESNGQPENNYKTTPPVLDSDGSFFLYSKLTVDKSRWQQGNVFSCSVMHEALHNHYTQKSLSLSPGK

SEQ ID NO: 12756 - protein, 122 aa, synthetic construct; identical to SEQ ID NO: 7287
  source 1..122: note = Description of Artificial Sequence: Synthetic polypeptide; note = VH of XENP018205

SEQ ID NO: 12757 - protein, 5 aa, synthetic construct
  source 1..5: note = Description of Artificial Sequence: Synthetic peptide; note = XENP018205 vhCDR1
NYWMN

SEQ ID NO: 12758 - protein, 19 aa, synthetic construct
  source 1..19: note = Description of Artificial Sequence: Synthetic peptide; note = XENP018205 vhCDR2
EIRLKSSNYATHYAEPVKG

SEQ ID NO: 12759 - protein, 11 aa, synthetic construct
  source 1..11: note = Description of Artificial Sequence: Synthetic peptide; note = XENP018205 vhCDR3
YYGNYGGYFDV

SEQ ID NO: 12760 - protein, 214 aa, synthetic construct; identical to SEQ ID NO: 11550
  source 1..214: note = Description of Artificial Sequence: Synthetic polypeptide; note = XENP018205 1G6_H1.104_L1_IgG1_PVA_/S267K Light Chain

SEQ ID NO: 12761 - protein, 107 aa, synthetic construct; identical to SEQ ID NO: 6247
  source 1..107: note = Description of Artificial Sequence: Synthetic polypeptide; note = VL of XENP018205

SEQ ID NO: 12762 - protein, 11 aa, synthetic construct
  source 1..11: note = Description of Artificial Sequence: Synthetic peptide; note = XENP018205 vlCDR1
RASQSVSNDVA

SEQ ID NO: 12763 - protein, 7 aa, synthetic construct
  source 1..7: note = Description of Artificial Sequence: Synthetic peptide; note = XENP018205 vlCDR2
YASHRYT

SEQ ID NO: 12764 - protein, 9 aa, synthetic construct
  source 1..9: note = Description of Artificial Sequence: Synthetic peptide; note = XENP018205 vlCDR3
QQDYSSPRT

SEQ ID NO: 12765 - protein, 451 aa, synthetic construct
  source 1..451: note = Description of Artificial Sequence: Synthetic polypeptide; note = XENP018206 1G6_H1.105_L1_IgG1_PVA_/S267K Heavy Chain
EVQLVESGGGLVKPGGSLRLSCAASGFTFSNYWMNWVRQAPGKGLEWVGEIRLKSRNYATHYAEPVKGRFTISRDDSKSTVYLQMNSLKTEDTAVYYCTRYYGNYGGYFDVWGAGTLVTVSSASTKGPSVFPLAPSSKSTSGGTAALGCLVKDYFPEPVTVSWNSGALTSGVHTFPAVLQSSGLYSLSSVVTVPSSSLGTQTYICNVNHKPSNTKVDKKVEPKSCDKTHTCPPCPAPPVAGPSVFLFPPKPKDTLMISRTPEVTCVVVDVKHEDPEVKFNWYVDGVEVHNAKTKPREEQYNSTYRVVSVLTVLHQDWLNGKEYKCKVSNKALPAPIEKTISKAKGQPREPQVYTLPPSREEMTKNQVSLTCLVKGFYPSDIAVEWESNGQPENNYKTTPPVLDSDGSFFLYSKLTVDKSRWQQGNVFSCSVMHEALHNHYTQKSLSLSPGK

SEQ ID NO: 12766 - protein, 122 aa, synthetic construct; identical to SEQ ID NO: 7296
  source 1..122: note = Description of Artificial Sequence: Synthetic polypeptide; note = VH of XENP018206

SEQ ID NO: 12767 - protein, 5 aa, synthetic construct
  source 1..5: note = Description of Artificial Sequence: Synthetic peptide; note = XENP018206 vhCDR1
NYWMN

SEQ ID NO: 12768 - protein, 19 aa, synthetic construct
  source 1..19: note = Description of Artificial Sequence: Synthetic peptide; note = XENP018206 vhCDR2
EIRLKSRNYATHYAEPVKG

SEQ ID NO: 12769 - protein, 11 aa, synthetic construct
  source 1..11: note = Description of Artificial Sequence: Synthetic peptide; note = XENP018206 vhCDR3
YYGNYGGYFDV

SEQ ID NO: 12770 - protein, 214 aa, synthetic construct; identical to SEQ ID NO: 11550
  source 1..214: note = Description of Artificial Sequence: Synthetic polypeptide; note = XENP018206 1G6_H1.105_L1_IgG1_PVA_/S267K Light Chain

SEQ ID NO: 12771 - protein, 107 aa, synthetic construct; identical to SEQ ID NO: 6247
  source 1..107: note = Description of Artificial Sequence: Synthetic polypeptide; note = VL of XENP018206

SEQ ID NO: 12772 - protein, 11 aa, synthetic construct
  source 1..11: note = Description of Artificial Sequence: Synthetic peptide; note = XENP018206 vlCDR1
RASQSVSNDVA

SEQ ID NO: 12773 - protein, 7 aa, synthetic construct
  source 1..7: note = Description of Artificial Sequence: Synthetic peptide; note = XENP018206 vlCDR2
YASHRYT

SEQ ID NO: 12774 - protein, 9 aa, synthetic construct
  source 1..9: note = Description of Artificial Sequence: Synthetic peptide; note = XENP018206 vlCDR3
QQDYSSPRT

SEQ ID NO: 12775 - protein, 451 aa, synthetic construct
  source 1..451: note = Description of Artificial Sequence: Synthetic polypeptide; note = XENP018207 1G6_H1.106_L1_IgG1_PVA_/S267K Heavy Chain
EVQLVESGGGLVKPGGSLRLSCAASGFTFSNYWMNWVRQAPGKGLEWVGEIRLKSLNYATHYAEPVKGRFTISRDDSKSTVYLQMNSLKTEDTAVYYCTRYYGNYGGYFDVWGAGTLVTVSSASTKGPSVFPLAPSSKSTSGGTAALGCLVKDYFPEPVTVSWNSGALTSGVHTFPAVLQSSGLYSLSSVVTVPSSSLGTQTYICNVNHKPSNTKVDKKVEPKSCDKTHTCPPCPAPPVAGPSVFLFPPKPKDTLMISRTPEVTCVVVDVKHEDPEVKFNWYVDGVEVHNAKTKPREEQYNSTYRVVSVLTVLHQDWLNGKEYKCKVSNKALPAPIEKTISKAKGQPREPQVYTLPPSREEMTKNQVSLTCLVKGFYPSDIAVEWESNGQPENNYKTTPPVLDSDGSFFLYSKLTVDKSRWQQGNVFSCSVMHEALHNHYTQKSLSLSPGK

SEQ ID NO: 12776 - protein, 122 aa, synthetic construct; identical to SEQ ID NO: 7305
  source 1..122: note = Description of Artificial Sequence: Synthetic polypeptide; note = VH of XENP018207

SEQ ID NO: 12777 - protein, 5 aa, synthetic construct
  source 1..5: note = Description of Artificial Sequence: Synthetic peptide; note = XENP018207 vhCDR1
NYWMN

SEQ ID NO: 12778 - protein, 19 aa, synthetic construct
  source 1..19: note = Description of Artificial Sequence: Synthetic peptide; note = XENP018207 vhCDR2
EIRLKSLNYATHYAEPVKG

SEQ ID NO: 12779 - protein, 11 aa, synthetic construct
  source 1..11: note = Description of Artificial Sequence: Synthetic peptide; note = XENP018207 vhCDR3
YYGNYGGYFDV

SEQ ID NO: 12780 - protein, 214 aa, synthetic construct; identical to SEQ ID NO: 11550
  source 1..214: note = Description of Artificial Sequence: Synthetic polypeptide; note = XENP018207 1G6_H1.106_L1_IgG1_PVA_/S267K Light Chain

SEQ ID NO: 12781 - protein, 107 aa, synthetic construct; identical to SEQ ID NO: 6247
  source 1..107: note = Description of Artificial Sequence: Synthetic polypeptide; note = VL of XENP018207

SEQ ID NO: 12782 - protein, 11 aa, synthetic construct
  source 1..11: note = Description of Artificial Sequence: Synthetic peptide; note = XENP018207 vlCDR1
RASQSVSNDVA

SEQ ID NO: 12783 - protein, 7 aa, synthetic construct
  source 1..7: note = Description of Artificial Sequence: Synthetic peptide; note = XENP018207 vlCDR2
YASHRYT

SEQ ID NO: 12784 - protein, 9 aa, synthetic construct
  source 1..9: note = Description of Artificial Sequence: Synthetic peptide; note = XENP018207 vlCDR3
QQDYSSPRT

SEQ ID NO: 12785 - protein, 451 aa, synthetic construct
  source 1..451: note = Description of Artificial Sequence: Synthetic polypeptide; note = XENP018208 1G6_H1.107_L1_IgG1_PVA_/S267K Heavy Chain
EVQLVESGGGLVKPGGSLRLSCAASGFTFSNYWMNWVRQAPGKGLEWVGEIRLKSTNYATHYAEPVKGRFTISRDDSKSTVYLQMNSLKTEDTAVYYCTRYYGNYGGYFDVWGAGTLVTVSSASTKGPSVFPLAPSSKSTSGGTAALGCLVKDYFPEPVTVSWNSGALTSGVHTFPAVLQSSGLYSLSSVVTVPSSSLGTQTYICNVNHKPSNTKVDKKVEPKSCDKTHTCPPCPAPPVAGPSVFLFPPKPKDTLMISRTPEVTCVVVDVKHEDPEVKFNWYVDGVEVHNAKTKPREEQYNSTYRVVSVLTVLHQDWLNGKEYKCKVSNKALPAPIEKTISKAKGQPREPQVYTLPPSREEMTKNQVSLTCLVKGFYPSDIAVEWESNGQPENNYKTTPPVLDSDGSFFLYSKLTVDKSRWQQGNVFSCSVMHEALHNHYTQKSLSLSPGK

SEQ ID NO: 12786 - protein, 122 aa, synthetic construct; identical to SEQ ID NO: 7314
  source 1..122: note = Description of Artificial Sequence: Synthetic polypeptide; note = VH of XENP018208

SEQ ID NO: 12787 - protein, 5 aa, synthetic construct
  source 1..5: note = Description of Artificial Sequence: Synthetic peptide; note = XENP018208 vhCDR1
NYWMN

SEQ ID NO: 12788 - protein, 19 aa, synthetic construct
  source 1..19: note = Description of Artificial Sequence: Synthetic peptide; note = XENP018208 vhCDR2
EIRLKSTNYATHYAEPVKG

SEQ ID NO: 12789 - protein, 11 aa, synthetic construct
  source 1..11: note = Description of Artificial Sequence: Synthetic peptide; note = XENP018208 vhCDR3
YYGNYGGYFDV

SEQ ID NO: 12790 - protein, 214 aa, synthetic construct; identical to SEQ ID NO: 11550
  source 1..214: note = Description of Artificial Sequence: Synthetic polypeptide; note = XENP018208 1G6_H1.107_L1_IgG1_PVA_/S267K Light Chain

SEQ ID NO: 12791 - protein, 107 aa, synthetic construct; identical to SEQ ID NO: 6247
  source 1..107: note = Description of Artificial Sequence: Synthetic polypeptide; note = VL of XENP018208

SEQ ID NO: 12792 - protein, 11 aa, synthetic construct
  source 1..11: note = Description of Artificial Sequence: Synthetic peptide; note = XENP018208 vlCDR1
RASQSVSNDVA

SEQ ID NO: 12793 - protein, 7 aa, synthetic construct
  source 1..7: note = Description of Artificial Sequence: Synthetic peptide; note = XENP018208 vlCDR2
YASHRYT

SEQ ID NO: 12794 - protein, 9 aa, synthetic construct
  source 1..9: note = Description of Artificial Sequence: Synthetic peptide; note = XENP018208 vlCDR3
QQDYSSPRT

SEQ ID NO: 12795 - protein, 451 aa, synthetic construct
  source 1..451: note = Description of Artificial Sequence: Synthetic polypeptide; note = XENP018209 1G6_H1.108_L1_IgG1_PVA_/S267K Heavy Chain
EVQLVESGGGLVKPGGSLRLSCAASGFTFSNYWMNWVRQAPGKGLEWVGEIRLKSGNYATHYAEPVKGRFTISRDDSKSTVYLQMNSLKTEDTAVYYCTRYYGNYGGYFDVWGAGTLVTVSSASTKGPSVFPLAPSSKSTSGGTAALGCLVKDYFPEPVTVSWNSGALTSGVHTFPAVLQSSGLYSLSSVVTVPSSSLGTQTYICNVNHKPSNTKVDKKVEPKSCDKTHTCPPCPAPPVAGPSVFLFPPKPKDTLMISRTPEVTCVVVDVKHEDPEVKFNWYVDGVEVHNAKTKPREEQYNSTYRVVSVLTVLHQDWLNGKEYKCKVSNKALPAPIEKTISKAKGQPREPQVYTLPPSREEMTKNQVSLTCLVKGFYPSDIAVEWESNGQPENNYKTTPPVLDSDGSFFLYSKLTVDKSRWQQGNVFSCSVMHEALHNHYTQKSLSLSPGK

SEQ ID NO: 12796 - protein, 122 aa, synthetic construct; identical to SEQ ID NO: 7323
  source 1..122: note = Description of Artificial Sequence: Synthetic polypeptide; note = VH of XENP018209

SEQ ID NO: 12797 - protein, 5 aa, synthetic construct
  source 1..5: note = Description of Artificial Sequence: Synthetic peptide; note = XENP018209 vhCDR1
NYWMN

SEQ ID NO: 12798 - protein, 19 aa, synthetic construct
  source 1..19: note = Description of Artificial Sequence: Synthetic peptide; note = XENP018209 vhCDR2
EIRLKSGNYATHYAEPVKG

SEQ ID NO: 12799 - protein, 11 aa, synthetic construct
  source 1..11: note = Description of Artificial Sequence: Synthetic peptide; note = XENP018209 vhCDR3
YYGNYGGYFDV

SEQ ID NO: 12800 - protein, 214 aa, synthetic construct; identical to SEQ ID NO: 11550
  source 1..214: note = Description of Artificial Sequence: Synthetic polypeptide; note = XENP018209 1G6_H1.108_L1_IgG1_PVA_/S267K Light Chain

SEQ ID NO: 12801 - protein, 107 aa, synthetic construct; identical to SEQ ID NO: 6247
  source 1..107: note = Description of Artificial Sequence: Synthetic polypeptide; note = VL of XENP018209

SEQ ID NO: 12802 - protein, 11 aa, synthetic construct
  source 1..11: note = Description of Artificial Sequence: Synthetic peptide; note = XENP018209 vlCDR1
RASQSVSNDVA

SEQ ID NO: 12803 - protein, 7 aa, synthetic construct
  source 1..7: note = Description of Artificial Sequence: Synthetic peptide; note = XENP018209 vlCDR2
YASHRYT

SEQ ID NO: 12804 - protein, 9 aa, synthetic construct
  source 1..9: note = Description of Artificial Sequence: Synthetic peptide; note = XENP018209 vlCDR3
QQDYSSPRT

SEQ ID NO: 12805 - protein, 451 aa, synthetic construct
  source 1..451: note = Description of Artificial Sequence: Synthetic polypeptide; note = XENP018210 1G6_H1.109_L1_IgG1_PVA_/S267K Heavy Chain
EVQLVESGGGLVKPGGSLRLSCAASGFTFSNYWMNWVRQAPGKGLEWVGEIRLKSYNYATHYAEPVKGRFTISRDDSKSTVYLQMNSLKTEDTAVYYCTRYYGNYGGYFDVWGAGTLVTVSSASTKGPSVFPLAPSSKSTSGGTAALGCLVKDYFPEPVTVSWNSGALTSGVHTFPAVLQSSGLYSLSSVVTVPSSSLGTQTYICNVNHKPSNTKVDKKVEPKSCDKTHTCPPCPAPPVAGPSVFLFPPKPKDTLMISRTPEVTCVVVDVKHEDPEVKFNWYVDGVEVHNAKTKPREEQYNSTYRVVSVLTVLHQDWLNGKEYKCKVSNKALPAPIEKTISKAKGQPREPQVYTLPPSREEMTKNQVSLTCLVKGFYPSDIAVEWESNGQPENNYKTTPPVLDSDGSFFLYSKLTVDKSRWQQGNVFSCSVMHEALHNHYTQKSLSLSPGK

SEQ ID NO: 12806 - protein, 122 aa, synthetic construct; identical to SEQ ID NO: 7332
  source 1..122: note = Description of Artificial Sequence: Synthetic polypeptide; note = VH of XENP018210

SEQ ID NO: 12807 - protein, 5 aa, synthetic construct
  source 1..5: note = Description of Artificial Sequence: Synthetic peptide; note = XENP018210 vhCDR1
NYWMN

SEQ ID NO: 12808 - protein, 19 aa, synthetic construct
  source 1..19: note = Description of Artificial Sequence: Synthetic peptide; note = XENP018210 vhCDR2
EIRLKSYNYATHYAEPVKG

SEQ ID NO: 12809 - protein, 11 aa, synthetic construct
  source 1..11: note = Description of Artificial Sequence: Synthetic peptide; note = XENP018210 vhCDR3
YYGNYGGYFDV

SEQ ID NO: 12810 - protein, 214 aa, synthetic construct; identical to SEQ ID NO: 11550
  source 1..214: note = Description of Artificial Sequence: Synthetic polypeptide; note = XENP018210 1G6_H1.109_L1_IgG1_PVA_/S267K Light Chain

SEQ ID NO: 12811 - protein, 107 aa, synthetic construct; identical to SEQ ID NO: 6247
  source 1..107: note = Description of Artificial Sequence: Synthetic polypeptide; note = VL of XENP018210

SEQ ID NO: 12812 - protein, 11 aa, synthetic construct
  source 1..11: note = Description of Artificial Sequence: Synthetic peptide; note = XENP018210 vlCDR1
RASQSVSNDVA

SEQ ID NO: 12813 - protein, 7 aa, synthetic construct
  source 1..7: note = Description of Artificial Sequence: Synthetic peptide; note = XENP018210 vlCDR2
YASHRYT

SEQ ID NO: 12814 - protein, 9 aa, synthetic construct
  source 1..9: note = Description of Artificial Sequence: Synthetic peptide; note = XENP018210 vlCDR3
QQDYSSPRT

SEQ ID NO: 12815 - protein, 451 aa, synthetic construct
  source 1..451: note = Description of Artificial Sequence: Synthetic polypeptide; note = XENP018211 1G6_H1.110_L1_IgG1_PVA_/S267K Heavy Chain
EVQLVESGGGLVKPGGSLRLSCAASGFTFSNYWMNWVRQAPGKGLEWVGEIRLKSNDYATHYAEPVKGRFTISRDDSKSTVYLQMNSLKTEDTAVYYCTRYYGNYGGYFDVWGAGTLVTVSSASTKGPSVFPLAPSSKSTSGGTAALGCLVKDYFPEPVTVSWNSGALTSGVHTFPAVLQSSGLYSLSSVVTVPSSSLGTQTYICNVNHKPSNTKVDKKVEPKSCDKTHTCPPCPAPPVAGPSVFLFPPKPKDTLMISRTPEVTCVVVDVKHEDPEVKFNWYVDGVEVHNAKTKPREEQYNSTYRVVSVLTVLHQDWLNGKEYKCKVSNKALPAPIEKTISKAKGQPREPQVYTLPPSREEMTKNQVSLTCLVKGFYPSDIAVEWESNGQPENNYKTTPPVLDSDGSFFLYSKLTVDKSRWQQGNVFSCSVMHEALHNHYTQKSLSLSPGK

SEQ ID NO: 12816 - protein, 122 aa, synthetic construct; identical to SEQ ID NO: 7341
  source 1..122: note = Description of Artificial Sequence: Synthetic polypeptide; note = VH of XENP018211

SEQ ID NO: 12817 - protein, 5 aa, synthetic construct
  source 1..5: note = Description of Artificial Sequence: Synthetic peptide; note = XENP018211 vhCDR1
NYWMN

SEQ ID NO: 12818 - protein, 19 aa, synthetic construct
  source 1..19: note = Description of Artificial Sequence: Synthetic peptide; note = XENP018211 vhCDR2
EIRLKSNDYATHYAEPVKG

SEQ ID NO: 12819 - protein, 11 aa, synthetic construct
  source 1..11: note = Description of Artificial Sequence: Synthetic peptide; note = XENP018211 vhCDR3
YYGNYGGYFDV

SEQ ID NO: 12820 - protein, 214 aa, synthetic construct; identical to SEQ ID NO: 11550
  source 1..214: note = Description of Artificial Sequence: Synthetic polypeptide; note = XENP018211 1G6_H1.110_L1_IgG1_PVA_/S267K Light Chain

SEQ ID NO: 12821 - protein, 107 aa, synthetic construct; identical to SEQ ID NO: 6247
  source 1..107: note = Description of Artificial Sequence: Synthetic polypeptide; note = VL of XENP018211

SEQ ID NO: 12822 - protein, 11 aa, synthetic construct
  source 1..11: note = Description of Artificial Sequence: Synthetic peptide; note = XENP018211 vlCDR1
RASQSVSNDVA

SEQ ID NO: 12823 - protein, 7 aa, synthetic construct
  source 1..7: note = Description of Artificial Sequence: Synthetic peptide; note = XENP018211 vlCDR2
YASHRYT

SEQ ID NO: 12824 - protein, 9 aa, synthetic construct
  source 1..9: note = Description of Artificial Sequence: Synthetic peptide; note = XENP018211 vlCDR3
QQDYSSPRT

SEQ ID NO: 12825 - protein, 451 aa, synthetic construct
  source 1..451: note = Description of Artificial Sequence: Synthetic polypeptide; note = XENP018212 1G6_H1.111_L1_IgG1_PVA_/S267K Heavy Chain
EVQLVESGGGLVKPGGSLRLSCAASGFTFSNYWMNWVRQAPGKGLEWVGEIRLKSNHYATHYAEPVKGRFTISRDDSKSTVYLQMNSLKTEDTAVYYCTRYYGNYGGYFDVWGAGTLVTVSSASTKGPSVFPLAPSSKSTSGGTAALGCLVKDYFPEPVTVSWNSGALTSGVHTFPAVLQSSGLYSLSSVVTVPSSSLGTQTYICNVNHKPSNTKVDKKVEPKSCDKTHTCPPCPAPPVAGPSVFLFPPKPKDTLMISRTPEVTCVVVDVKHEDPEVKFNWYVDGVEVHNAKTKPREEQYNSTYRVVSVLTVLHQDWLNGKEYKCKVSNKALPAPIEKTISKAKGQPREPQVYTLPPSREEMTKNQVSLTCLVKGFYPSDIAVEWESNGQPENNYKTTPPVLDSDGSFFLYSKLTVDKSRWQQGNVFSCSVMHEALHNHYTQKSLSLSPGK

SEQ ID NO: 12826 - protein, 122 aa, synthetic construct; identical to SEQ ID NO: 7350
  source 1..122: note = Description of Artificial Sequence: Synthetic polypeptide; note = VH of XENP018212

SEQ ID NO: 12827 - protein, 5 aa, synthetic construct
  source 1..5: note = Description of Artificial Sequence: Synthetic peptide; note = XENP018212 vhCDR1
NYWMN

SEQ ID NO: 12828 - protein, 19 aa, synthetic construct
  source 1..19: note = Description of Artificial Sequence: Synthetic peptide; note = XENP018212 vhCDR2
EIRLKSNHYATHYAEPVKG

SEQ ID NO: 12829 - protein, 11 aa, synthetic construct
  source 1..11: note = Description of Artificial Sequence: Synthetic peptide; note = XENP018212 vhCDR3
YYGNYGGYFDV

SEQ ID NO: 12830 - protein, 214 aa, synthetic construct; identical to SEQ ID NO: 11550
  source 1..214: note = Description of Artificial Sequence: Synthetic polypeptide; note = XENP018212 1G6_H1.111_L1_IgG1_PVA_/S267K Light Chain

SEQ ID NO: 12831 - protein, 107 aa, synthetic construct; identical to SEQ ID NO: 6247
  source 1..107: note = Description of Artificial Sequence: Synthetic polypeptide; note = VL of XENP018212

SEQ ID NO: 12832 - protein, 11 aa, synthetic construct
  source 1..11: note = Description of Artificial Sequence: Synthetic peptide; note = XENP018212 vlCDR1
RASQSVSNDVA

SEQ ID NO: 12833 - protein, 7 aa, synthetic construct
  source 1..7: note = Description of Artificial Sequence: Synthetic peptide; note = XENP018212 vlCDR2
YASHRYT

SEQ ID NO: 12834 - protein, 9 aa, synthetic construct
  source 1..9: note = Description of Artificial Sequence: Synthetic peptide; note = XENP018212 vlCDR3
QQDYSSPRT

SEQ ID NO: 12835 - protein, 451 aa, synthetic construct
  source 1..451: note = Description of Artificial Sequence: Synthetic polypeptide; note = XENP018213 1G6_H1.112_L1_IgG1_PVA_/S267K Heavy Chain
EVQLVESGGGLVKPGGSLRLSCAASGFTFSNYWMNWVRQAPGKGLEWVGEIRLKSNEYATHYAEPVKGRFTISRDDSKSTVYLQMNSLKTEDTAVYYCTRYYGNYGGYFDVWGAGTLVTVSSASTKGPSVFPLAPSSKSTSGGTAALGCLVKDYFPEPVTVSWNSGALTSGVHTFPAVLQSSGLYSLSSVVTVPSSSLGTQTYICNVNHKPSNTKVDKKVEPKSCDKTHTCPPCPAPPVAGPSVFLFPPKPKDTLMISRTPEVTCVVVDVKHEDPEVKFNWYVDGVEVHNAKTKPREEQYNSTYRVVSVLTVLHQDWLNGKEYKCKVSNKALPAPIEKTISKAKGQPREPQVYTLPPSREEMTKNQVSLTCLVKGFYPSDIAVEWESNGQPENNYKTTPPVLDSDGSFFLYSKLTVDKSRWQQGNVFSCSVMHEALHNHYTQKSLSLSPGK

SEQ ID NO: 12836 - protein, 122 aa, synthetic construct; identical to SEQ ID NO: 7359
  source 1..122: note = Description of Artificial Sequence: Synthetic polypeptide; note = VH of XENP018213

SEQ ID NO: 12837 - protein, 5 aa, synthetic construct
  source 1..5: note = Description of Artificial Sequence: Synthetic peptide; note = XENP018213 vhCDR1
NYWMN

SEQ ID NO: 12838 - protein, 19 aa, synthetic construct
  source 1..19: note = Description of Artificial Sequence: Synthetic peptide; note = XENP018213 vhCDR2
EIRLKSNEYATHYAEPVKG

SEQ ID NO: 12839 - protein, 11 aa, synthetic construct
  source 1..11: note = Description of Artificial Sequence: Synthetic peptide; note = XENP018213 vhCDR3
YYGNYGGYFDV

SEQ ID NO: 12840 - protein, 214 aa, synthetic construct; identical to SEQ ID NO: 11550
  source 1..214: note = Description of Artificial Sequence: Synthetic polypeptide; note = XENP018213 1G6_H1.112_L1_IgG1_PVA_/S267K Light Chain

SEQ ID NO: 12841 - protein, 107 aa, synthetic construct; identical to SEQ ID NO: 6247
  source 1..107: note = Description of Artificial Sequence: Synthetic polypeptide; note = VL of XENP018213

SEQ ID NO: 12842 - protein, 11 aa, synthetic construct
  source 1..11: note = Description of Artificial Sequence: Synthetic peptide; note = XENP018213 vlCDR1
RASQSVSNDVA

SEQ ID NO: 12843 - protein, 7 aa, synthetic construct
  source 1..7: note = Description of Artificial Sequence: Synthetic peptide; note = XENP018213 vlCDR2
YASHRYT

SEQ ID NO: 12844 - protein, 9 aa, synthetic construct
  source 1..9: note = Description of Artificial Sequence: Synthetic peptide; note = XENP018213 vlCDR3
QQDYSSPRT

SEQ ID NO: 12845 - protein, 451 aa, synthetic construct
  source 1..451: note = Description of Artificial Sequence: Synthetic polypeptide; note = XENP018214 1G6_H1.113_L1_IgG1_PVA_/S267K Heavy Chain
EVQLVESGGGLVKPGGSLRLSCAASGFTFSNYWMNWVRQAPGKGLEWVGEIRLKSNSYATHYAEPVKGRFTISRDDSKSTVYLQMNSLKTEDTAVYYCTRYYGNYGGYFDVWGAGTLVTVSSASTKGPSVFPLAPSSKSTSGGTAALGCLVKDYFPEPVTVSWNSGALTSGVHTFPAVLQSSGLYSLSSVVTVPSSSLGTQTYICNVNHKPSNTKVDKKVEPKSCDKTHTCPPCPAPPVAGPSVFLFPPKPKDTLMISRTPEVTCVVVDVKHEDPEVKFNWYVDGVEVHNAKTKPREEQYNSTYRVVSVLTVLHQDWLNGKEYKCKVSNKALPAPIEKTISKAKGQPREPQVYTLPPSREEMTKNQVSLTCLVKGFYPSDIAVEWESNGQPENNYKTTPPVLDSDGSFFLYSKLTVDKSRWQQGNVFSCSVMHEALHNHYTQKSLSLSPGK

SEQ ID NO: 12846 - protein, 122 aa, synthetic construct; identical to SEQ ID NO: 7368
  source 1..122: note = Description of Artificial Sequence: Synthetic polypeptide; note = VH of XENP018214

SEQ ID NO: 12847 - protein, 5 aa, synthetic construct
  source 1..5: note = Description of Artificial Sequence: Synthetic peptide; note = XENP018214 vhCDR1
NYWMN

SEQ ID NO: 12848 - protein, 19 aa, synthetic construct
  source 1..19: note = Description of Artificial Sequence: Synthetic peptide; note = XENP018214 vhCDR2
EIRLKSNSYATHYAEPVKG

SEQ ID NO: 12849 - protein, 11 aa, synthetic construct
  source 1..11: note = Description of Artificial Sequence: Synthetic peptide; note = XENP018214 vhCDR3
YYGNYGGYFDV

SEQ ID NO: 12850 - protein, 214 aa, synthetic construct; identical to SEQ ID NO: 11550
  source 1..214: note = Description of Artificial Sequence: Synthetic polypeptide; note = XENP018214 1G6_H1.113_L1_IgG1_PVA_/S267K Light Chain

SEQ ID NO: 12851 - protein, 107 aa, synthetic construct; identical to SEQ ID NO: 6247
  source 1..107: note = Description of Artificial Sequence: Synthetic polypeptide; note = VL of XENP018214

SEQ ID NO: 12852 - protein, 11 aa, synthetic construct
  source 1..11: note = Description of Artificial Sequence: Synthetic peptide; note = XENP018214 vlCDR1
RASQSVSNDVA

SEQ ID NO: 12853 - protein, 7 aa, synthetic construct
  source 1..7: note = Description of Artificial Sequence: Synthetic peptide; note = XENP018214 vlCDR2
YASHRYT

SEQ ID NO: 12854 - protein, 9 aa, synthetic construct
  source 1..9: note = Description of Artificial Sequence: Synthetic peptide; note = XENP018214 vlCDR3
QQDYSSPRT

SEQ ID NO: 12855 - protein, 451 aa, synthetic construct
  source 1..451: note = Description of Artificial Sequence: Synthetic polypeptide; note = XENP018215 1G6_H1.114_L1_IgG1_PVA_/S267K Heavy Chain
EVQLVESGGGLVKPGGSLRLSCAASGFTFSNYWMNWVRQAPGKGLEWVGEIRLKSNRYATHYAEPVKGRFTISRDDSKSTVYLQMNSLKTEDTAVYYCTRYYGNYGGYFDVWGAGTLVTVSSASTKGPSVFPLAPSSKSTSGGTAALGCLVKDYFPEPVTVSWNSGALTSGVHTFPAVLQSSGLYSLSSVVTVPSSSLGTQTYICNVNHKPSNTKVDKKVEPKSCDKTHTCPPCPAPPVAGPSVFLFPPKPKDTLMISRTPEVTCVVVDVKHEDPEVKFNWYVDGVEVHNAKTKPREEQYNSTYRVVSVLTVLHQDWLNGKEYKCKVSNKALPAPIEKTISKAKGQPREPQVYTLPPSREEMTKNQVSLTCLVKGFYPSDIAVEWESNGQPENNYKTTPPVLDSDGSFFLYSKLTVDKSRWQQGNVFSCSVMHEALHNHYTQKSLSLSPGK

SEQ ID NO: 12856 - protein, 122 aa, synthetic construct; identical to SEQ ID NO: 7377
  source 1..122: note = Description of Artificial Sequence: Synthetic polypeptide; note = VH of XENP018215

SEQ ID NO: 12857 - protein, 5 aa, synthetic construct
  source 1..5: note = Description of Artificial Sequence: Synthetic peptide; note = XENP018215 vhCDR1
NYWMN

SEQ ID NO: 12858 - protein, 19 aa, synthetic construct
  source 1..19: note = Description of Artificial Sequence: Synthetic peptide; note = XENP018215 vhCDR2
EIRLKSNRYATHYAEPVKG

SEQ ID NO: 12859 - protein, 11 aa, synthetic construct
  source 1..11: note = Description of Artificial Sequence: Synthetic peptide; note = XENP018215 vhCDR3
YYGNYGGYFDV

SEQ ID NO: 12860 - protein, 214 aa, synthetic construct; identical to SEQ ID NO: 11550
  source 1..214: note = Description of Artificial Sequence: Synthetic polypeptide; note = XENP018215 1G6_H1.114_L1_IgG1_PVA_/S267K Light Chain

SEQ ID NO: 12861 - protein, 107 aa, synthetic construct; identical to SEQ ID NO: 6247
  source 1..107: note = Description of Artificial Sequence: Synthetic polypeptide; note = VL of XENP018215

SEQ ID NO: 12862 - protein, 11 aa, synthetic construct
  source 1..11: note = Description of Artificial Sequence: Synthetic peptide; note = XENP018215 vlCDR1
RASQSVSNDVA

SEQ ID NO: 12863 - protein, 7 aa, synthetic construct
  source 1..7: note = Description of Artificial Sequence: Synthetic peptide; note = XENP018215 vlCDR2
YASHRYT

SEQ ID NO: 12864 - protein, 9 aa, synthetic construct
  source 1..9: note = Description of Artificial Sequence: Synthetic peptide; note = XENP018215 vlCDR3
QQDYSSPRT

SEQ ID NO: 12865 - protein, 451 aa, synthetic construct
  source 1..451: note = Description of Artificial Sequence: Synthetic polypeptide; note = XENP018216 1G6_H1.115_L1_IgG1_PVA_/S267K Heavy Chain
EVQLVESGGGLVKPGGSLRLSCAASGFTFSNYWMNWVRQAPGKGLEWVGEIRLKSNLYATHYAEPVKGRFTISRDDSKSTVYLQMNSLKTEDTAVYYCTRYYGNYGGYFDVWGAGTLVTVSSASTKGPSVFPLAPSSKSTSGGTAALGCLVKDYFPEPVTVSWNSGALTSGVHTFPAVLQSSGLYSLSSVVTVPSSSLGTQTYICNVNHKPSNTKVDKKVEPKSCDKTHTCPPCPAPPVAGPSVFLFPPKPKDTLMISRTPEVTCVVVDVKHEDPEVKFNWYVDGVEVHNAKTKPREEQYNSTYRVVSVLTVLHQDWLNGKEYKCKVSNKALPAPIEKTISKAKGQPREPQVYTLPPSREEMTKNQVSLTCLVKGFYPSDIAVEWESNGQPENNYKTTPPVLDSDGSFFLYSKLTVDKSRWQQGNVFSCSVMHEALHNHYTQKSLSLSPGK

SEQ ID NO: 12866 - protein, 122 aa, synthetic construct; identical to SEQ ID NO: 7386
  source 1..122: note = Description of Artificial Sequence: Synthetic polypeptide; note = VH of XENP018216

SEQ ID NO: 12867 - protein, 5 aa, synthetic construct
  source 1..5: note = Description of Artificial Sequence: Synthetic peptide; note = XENP018216 vhCDR1
NYWMN

SEQ ID NO: 12868 - protein, 19 aa, synthetic construct
  source 1..19: note = Description of Artificial Sequence: Synthetic peptide; note = XENP018216 vhCDR2
EIRLKSNLYATHYAEPVKG

SEQ ID NO: 12869 - protein, 11 aa, synthetic construct
  source 1..11: note = Description of Artificial Sequence: Synthetic peptide; note = XENP018216 vhCDR3
YYGNYGGYFDV

SEQ ID NO: 12870 - protein, 214 aa, synthetic construct; identical to SEQ ID NO: 11550
  source 1..214: note = Description of Artificial Sequence: Synthetic polypeptide; note = XENP018216 1G6_H1.115_L1_IgG1_PVA_/S267K Light Chain

SEQ ID NO: 12871 - protein, 107 aa, synthetic construct; identical to SEQ ID NO: 6247
  source 1..107: note = Description of Artificial Sequence: Synthetic polypeptide; note = VL of XENP018216

SEQ ID NO: 12872 - protein, 11 aa, synthetic construct
  source 1..11: note = Description of Artificial Sequence: Synthetic peptide; note = XENP018216 vlCDR1
RASQSVSNDVA

SEQ ID NO: 12873 - protein, 7 aa, synthetic construct
  source 1..7: note = Description of Artificial Sequence: Synthetic peptide; note = XENP018216 vlCDR2
YASHRYT

SEQ ID NO: 12874 - protein, 9 aa, synthetic construct
  source 1..9: note = Description of Artificial Sequence: Synthetic peptide; note = XENP018216 vlCDR3
QQDYSSPRT

SEQ ID NO: 12875 - protein, 451 aa, synthetic construct
  source 1..451: note = Description of Artificial Sequence: Synthetic polypeptide; note = XENP018217 1G6_H1.116_L1_IgG1_PVA_/S267K Heavy Chain
EVQLVESGGGLVKPGGSLRLSCAASGFTFSNYWMNWVRQAPGKGLEWVGEIRLKSNTYATHYAEPVKGRFTISRDDSKSTVYLQMNSLKTEDTAVYYCTRYYGNYGGYFDVWGAGTLVTVSSASTKGPSVFPLAPSSKSTSGGTAALGCLVKDYFPEPVTVSWNSGALTSGVHTFPAVLQSSGLYSLSSVVTVPSSSLGTQTYICNVNHKPSNTKVDKKVEPKSCDKTHTCPPCPAPPVAGPSVFLFPPKPKDTLMISRTPEVTCVVVDVKHEDPEVKFNWYVDGVEVHNAKTKPREEQYNSTYRVVSVLTVLHQDWLNGKEYKCKVSNKALPAPIEKTISKAKGQPREPQVYTLPPSREEMTKNQVSLTCLVKGFYPSDIAVEWESNGQPENNYKTTPPVLDSDGSFFLYSKLTVDKSRWQQGNVFSCSVMHEALHNHYTQKSLSLSPGK

SEQ ID NO: 12876 - protein, 122 aa, synthetic construct; identical to SEQ ID NO: 7395
  source 1..122: note = Description of Artificial Sequence: Synthetic polypeptide; note = VH of XENP018217

SEQ ID NO: 12877 - protein, 5 aa, synthetic construct
  source 1..5: note = Description of Artificial Sequence: Synthetic peptide; note = XENP018217 vhCDR1
NYWMN

SEQ ID NO: 12878 - protein, 19 aa, synthetic construct
  source 1..19: note = Description of Artificial Sequence: Synthetic peptide; note = XENP018217 vhCDR2
EIRLKSNTYATHYAEPVKG

SEQ ID NO: 12879 - protein, 11 aa, synthetic construct
  source 1..11: note = Description of Artificial Sequence: Synthetic peptide; note = XENP018217 vhCDR3
YYGNYGGYFDV

SEQ ID NO: 12880 - protein, 214 aa, synthetic construct; identical to SEQ ID NO: 11550
  source 1..214: note = Description of Artificial Sequence: Synthetic polypeptide; note = XENP018217 1G6_H1.116_L1_IgG1_PVA_/S267K Light Chain

SEQ ID NO: 12881 - protein, 107 aa, synthetic construct; identical to SEQ ID NO: 6247
  source 1..107: note = Description of Artificial Sequence: Synthetic polypeptide; note = VL of XENP018217

SEQ ID NO: 12882 - protein, 11 aa, synthetic construct
  source 1..11: note = Description of Artificial Sequence: Synthetic peptide; note = XENP018217 vlCDR1
RASQSVSNDVA

SEQ ID NO: 12883 - protein, 7 aa, synthetic construct
  source 1..7: note = Description of Artificial Sequence: Synthetic peptide; note = XENP018217 vlCDR2
YASHRYT

SEQ ID NO: 12884 - protein, 9 aa, synthetic construct
  source 1..9: note = Description of Artificial Sequence: Synthetic peptide; note = XENP018217 vlCDR3
QQDYSSPRT

SEQ ID NO: 12885 - protein, 451 aa, synthetic construct
  source 1..451: note = Description of Artificial Sequence: Synthetic polypeptide; note = XENP018218 1G6_H1.117_L1_IgG1_PVA_/S267K Heavy Chain
EVQLVESGGGLVKPGGSLRLSCAASGFTFSNYWMNWVRQAPGKGLEWVGEIRLKSNGYATHYAEPVKGRFTISRDDSKSTVYLQMNSLKTEDTAVYYCTRYYGNYGGYFDVWGAGTLVTVSSASTKGPSVFPLAPSSKSTSGGTAALGCLVKDYFPEPVTVSWNSGALTSGVHTFPAVLQSSGLYSLSSVVTVPSSSLGTQTYICNVNHKPSNTKVDKKVEPKSCDKTHTCPPCPAPPVAGPSVFLFPPKPKDTLMISRTPEVTCVVVDVKHEDPEVKFNWYVDGVEVHNAKTKPREEQYNSTYRVVSVLTVLHQDWLNGKEYKCKVSNKALPAPIEKTISKAKGQPREPQVYTLPPSREEMTKNQVSLTCLVKGFYPSDIAVEWESNGQPENNYKTTPPVLDSDGSFFLYSKLTVDKSRWQQGNVFSCSVMHEALHNHYTQKSLSLSPGK

SEQ ID NO: 12886 - protein, 122 aa, synthetic construct; identical to SEQ ID NO: 7404
  source 1..122: note = Description of Artificial Sequence: Synthetic polypeptide; note = VH of XENP018218

SEQ ID NO: 12887 - protein, 5 aa, synthetic construct
  source 1..5: note = Description of Artificial Sequence: Synthetic peptide; note = XENP018218 vhCDR1
NYWMN

SEQ ID NO: 12888 - protein, 19 aa, synthetic construct
  source 1..19: note = Description of Artificial Sequence: Synthetic peptide; note = XENP018218 vhCDR2
EIRLKSNGYATHYAEPVKG

SEQ ID NO: 12889 - protein, 11 aa, synthetic construct
  source 1..11: note = Description of Artificial Sequence: Synthetic peptide; note = XENP018218 vhCDR3
YYGNYGGYFDV

SEQ ID NO: 12890 - protein, 214 aa, synthetic construct; identical to SEQ ID NO: 11550
  source 1..214: note = Description of Artificial Sequence: Synthetic polypeptide; note = XENP018218 1G6_H1.117_L1_IgG1_PVA_/S267K Light Chain

SEQ ID NO: 12891 - protein, 107 aa, synthetic construct; identical to SEQ ID NO: 6247
  source 1..107: note = Description of Artificial Sequence: Synthetic polypeptide; note = VL of XENP018218

SEQ ID NO: 12892 - protein, 11 aa, synthetic construct
  source 1..11: note = Description of Artificial Sequence: Synthetic peptide; note = XENP018218 vlCDR1
RASQSVSNDVA

SEQ ID NO: 12893 - protein, 7 aa, synthetic construct
  source 1..7: note = Description of Artificial Sequence: Synthetic peptide; note = XENP018218 vlCDR2
YASHRYT

SEQ ID NO: 12894 - protein, 9 aa, synthetic construct
  source 1..9: note = Description of Artificial Sequence: Synthetic peptide; note = XENP018218 vlCDR3
QQDYSSPRT

SEQ ID NO: 12895 - protein, 451 aa, synthetic construct
  source 1..451: note = Description of Artificial Sequence: Synthetic polypeptide; note = XENP018219 1G6_H1.118_L1_IgG1_PVA_/S267K Heavy Chain
EVQLVESGGGLVKPGGSLRLSCAASGFTFSNYWMNWVRQAPGKGLEWVGEIRLKSNYYATHYAEPVKGRFTISRDDSKSTVYLQMNSLKTEDTAVYYCTRYYGNYGGYFDVWGAGTLVTVSSASTKGPSVFPLAPSSKSTSGGTAALGCLVKDYFPEPVTVSWNSGALTSGVHTFPAVLQSSGLYSLSSVVTVPSSSLGTQTYICNVNHKPSNTKVDKKVEPKSCDKTHTCPPCPAPPVAGPSVFLFPPKPKDTLMISRTPEVTCVVVDVKHEDPEVKFNWYVDGVEVHNAKTKPREEQYNSTYRVVSVLTVLHQDWLNGKEYKCKVSNKALPAPIEKTISKAKGQPREPQVYTLPPSREEMTKNQVSLTCLVKGFYPSDIAVEWESNGQPENNYKTTPPVLDSDGSFFLYSKLTVDKSRWQQGNVFSCSVMHEALHNHYTQKSLSLSPGK

SEQ ID NO: 12896 - protein, 122 aa, synthetic construct; identical to SEQ ID NO: 7413
  source 1..122: note = Description of Artificial Sequence: Synthetic polypeptide; note = VH of XENP018219

SEQ ID NO: 12897 - protein, 5 aa, synthetic construct
  source 1..5: note = Description of Artificial Sequence: Synthetic peptide; note = XENP018219 vhCDR1
NYWMN

SEQ ID NO: 12898 - protein, 19 aa, synthetic construct
  source 1..19: note = Description of Artificial Sequence: Synthetic peptide; note = XENP018219 vhCDR2
EIRLKSNYYATHYAEPVKG

SEQ ID NO: 12899 - protein, 11 aa, synthetic construct
  source 1..11: note = Description of Artificial Sequence: Synthetic peptide; note = XENP018219 vhCDR3
YYGNYGGYFDV

SEQ ID NO: 12900 - protein, 214 aa, synthetic construct; identical to SEQ ID NO: 11550
  source 1..214: note = Description of Artificial Sequence: Synthetic polypeptide; note = XENP018219 1G6_H1.118_L1_IgG1_PVA_/S267K Light Chain

SEQ ID NO: 12901 - protein, 107 aa, synthetic construct; identical to SEQ ID NO: 6247
  source 1..107: note = Description of Artificial Sequence: Synthetic polypeptide; note = VL of XENP018219

SEQ ID NO: 12902 - protein, 11 aa, synthetic construct
  source 1..11: note = Description of Artificial Sequence: Synthetic peptide; note = XENP018219 vlCDR1
RASQSVSNDVA

SEQ ID NO: 12903 - protein, 7 aa, synthetic construct
  source 1..7: note = Description of Artificial Sequence: Synthetic peptide; note = XENP018219 vlCDR2
YASHRYT

SEQ ID NO: 12904 - protein, 9 aa, synthetic construct
  source 1..9: note = Description of Artificial Sequence: Synthetic peptide; note = XENP018219 vlCDR3
QQDYSSPRT

SEQ ID NO: 12905 - protein, 451 aa, synthetic construct
  source 1..451: note = Description of Artificial Sequence: Synthetic polypeptide; note = XENP018220 1G6_H1.119_L1_IgG1_PVA_/S267K Heavy Chain
EVQLVESGGGLVKPGGSLRLSCAASGFTFSNYWMNWVRQAPGKGLEWVGEIRLKSNNFATHYAEPVKGRFTISRDDSKSTVYLQMNSLKTEDTAVYYCTRYYGNYGGYFDVWGAGTLVTVSSASTKGPSVFPLAPSSKSTSGGTAALGCLVKDYFPEPVTVSWNSGALTSGVHTFPAVLQSSGLYSLSSVVTVPSSSLGTQTYICNVNHKPSNTKVDKKVEPKSCDKTHTCPPCPAPPVAGPSVFLFPPKPKDTLMISRTPEVTCVVVDVKHEDPEVKFNWYVDGVEVHNAKTKPREEQYNSTYRVVSVLTVLHQDWLNGKEYKCKVSNKALPAPIEKTISKAKGQPREPQVYTLPPSREEMTKNQVSLTCLVKGFYPSDIAVEWESNGQPENNYKTTPPVLDSDGSFFLYSKLTVDKSRWQQGNVFSCSVMHEALHNHYTQKSLSLSPGK

SEQ ID NO: 12906 - protein, 122 aa, synthetic construct; identical to SEQ ID NO: 7422
  source 1..122: note = Description of Artificial Sequence: Synthetic polypeptide; note = VH of XENP018220

SEQ ID NO: 12907 - protein, 5 aa, synthetic construct
  source 1..5: note = Description of Artificial Sequence: Synthetic peptide; note = XENP018220 vhCDR1
NYWMN

SEQ ID NO: 12908 - protein, 19 aa, synthetic construct
  source 1..19: note = Description of Artificial Sequence: Synthetic peptide; note = XENP018220 vhCDR2
EIRLKSNNFATHYAEPVKG

SEQ ID NO: 12909 - protein, 11 aa, synthetic construct
  source 1..11: note = Description of Artificial Sequence: Synthetic peptide; note = XENP018220 vhCDR3
YYGNYGGYFDV

SEQ ID NO: 12910 - protein, 214 aa, synthetic construct; identical to SEQ ID NO: 11550
  source 1..214: note = Description of Artificial Sequence: Synthetic polypeptide; note = XENP018220 1G6_H1.119_L1_IgG1_PVA_/S267K Light Chain

SEQ ID NO: 12911 - protein, 107 aa, synthetic construct; identical to SEQ ID NO: 6247
  source 1..107: note = Description of Artificial Sequence: Synthetic polypeptide; note = VL of XENP018220

SEQ ID NO: 12912 - protein, 11 aa, synthetic construct
  source 1..11: note = Description of Artificial Sequence: Synthetic peptide; note = XENP018220 vlCDR1
RASQSVSNDVA

SEQ ID NO: 12913 - protein, 7 aa, synthetic construct
  source 1..7: note = Description of Artificial Sequence: Synthetic peptide; note = XENP018220 vlCDR2
YASHRYT

SEQ ID NO: 12914 - protein, 9 aa, synthetic construct
  source 1..9: note = Description of Artificial Sequence: Synthetic peptide; note = XENP018220 vlCDR3
QQDYSSPRT

SEQ ID NO: 12915 - protein, 451 aa, synthetic construct
  source 1..451: note = Description of Artificial Sequence: Synthetic polypeptide; note = XENP018221 1G6_H1.120_L1_IgG1_PVA_/S267K Heavy Chain
EVQLVESGGGLVKPGGSLRLSCAASGFTFSNYWMNWVRQAPGKGLEWVGEIRLKSNNHATHYAEPVKGRFTISRDDSKSTVYLQMNSLKTEDTAVYYCTRYYGNYGGYFDVWGAGTLVTVSSASTKGPSVFPLAPSSKSTSGGTAALGCLVKDYFPEPVTVSWNSGALTSGVHTFPAVLQSSGLYSLSSVVTVPSSSLGTQTYICNVNHKPSNTKVDKKVEPKSCDKTHTCPPCPAPPVAGPSVFLFPPKPKDTLMISRTPEVTCVVVDVKHEDPEVKFNWYVDGVEVHNAKTKPREEQYNSTYRVVSVLTVLHQDWLNGKEYKCKVSNKALPAPIEKTISKAKGQPREPQVYTLPPSREEMTKNQVSLTCLVKGFYPSDIAVEWESNGQPENNYKTTPPVLDSDGSFFLYSKLTVDKSRWQQGNVFSCSVMHEALHNHYTQKSLSLSPGK

SEQ ID NO: 12916 - protein, 122 aa, synthetic construct; identical to SEQ ID NO: 7431
  source 1..122: note = Description of Artificial Sequence: Synthetic polypeptide; note = VH of XENP018221

SEQ ID NO: 12917 - protein, 5 aa, synthetic construct
  source 1..5: note = Description of Artificial Sequence: Synthetic peptide; note = XENP018221 vhCDR1
NYWMN

SEQ ID NO: 12918 - protein, 19 aa, synthetic construct
  source 1..19: note = Description of Artificial Sequence: Synthetic peptide; note = XENP018221 vhCDR2
EIRLKSNNHATHYAEPVKG

SEQ ID NO: 12919 - protein, 11 aa, synthetic construct
  source 1..11: note = Description of Artificial Sequence: Synthetic peptide; note = XENP018221 vhCDR3
YYGNYGGYFDV

SEQ ID NO: 12920 - protein, 214 aa, synthetic construct; identical to SEQ ID NO: 11550
  source 1..214: note = Description of Artificial Sequence: Synthetic polypeptide; note = XENP018221 1G6_H1.120_L1_IgG1_PVA_/S267K Light Chain

SEQ ID NO: 12921 - protein, 107 aa, synthetic construct; identical to SEQ ID NO: 6247
  source 1..107: note = Description of Artificial Sequence: Synthetic polypeptide; note = VL of XENP018221

SEQ ID NO: 12922 - protein, 11 aa, synthetic construct
  source 1..11: note = Description of Artificial Sequence: Synthetic peptide; note = XENP018221 vlCDR1
RASQSVSNDVA

SEQ ID NO: 12923 - protein, 7 aa, synthetic construct
  source 1..7: note = Description of Artificial Sequence: Synthetic peptide; note = XENP018221 vlCDR2
YASHRYT

SEQ ID NO: 12924 - protein, 9 aa, synthetic construct
  source 1..9: note = Description of Artificial Sequence: Synthetic peptide; note = XENP018221 vlCDR3
QQDYSSPRT

SEQ ID NO: 12925 - protein, 451 aa, synthetic construct
  source 1..451: note = Description of Artificial Sequence: Synthetic polypeptide; note = XENP018222 1G6_H1.121_L1_IgG1_PVA_/S267K Heavy Chain
EVQLVESGGGLVKPGGSLRLSCAASGFTFSNYWMNWVRQAPGKGLEWVGEIRLKSNNLATHYAEPVKGRFTISRDDSKSTVYLQMNSLKTEDTAVYYCTRYYGNYGGYFDVWGAGTLVTVSSASTKGPSVFPLAPSSKSTSGGTAALGCLVKDYFPEPVTVSWNSGALTSGVHTFPAVLQSSGLYSLSSVVTVPSSSLGTQTYICNVNHKPSNTKVDKKVEPKSCDKTHTCPPCPAPPVAGPSVFLFPPKPKDTLMISRTPEVTCVVVDVKHEDPEVKFNWYVDGVEVHNAKTKPREEQYNSTYRVVSVLTVLHQDWLNGKEYKCKVSNKALPAPIEKTISKAKGQPREPQVYTLPPSREEMTKNQVSLTCLVKGFYPSDIAVEWESNGQPENNYKTTPPVLDSDGSFFLYSKLTVDKSRWQQGNVFSCSVMHEALHNHYTQKSLSLSPGK

SEQ ID NO: 12926 - protein, 122 aa, synthetic construct; identical to SEQ ID NO: 7440
  source 1..122: note = Description of Artificial Sequence: Synthetic polypeptide; note = VH of XENP018222

SEQ ID NO: 12927 - protein, 5 aa, synthetic construct
  source 1..5: note = Description of Artificial Sequence: Synthetic peptide; note = XENP018222 vhCDR1
NYWMN

SEQ ID NO: 12928 - protein, 19 aa, synthetic construct
  source 1..19: note = Description of Artificial Sequence: Synthetic peptide; note = XENP018222 vhCDR2
EIRLKSNNLATHYAEPVKG

SEQ ID NO: 12929 - protein, 11 aa, synthetic construct
  source 1..11: note = Description of Artificial Sequence: Synthetic peptide; note = XENP018222 vhCDR3
YYGNYGGYFDV

SEQ ID NO: 12930 - protein, 214 aa, synthetic construct; identical to SEQ ID NO: 11550
  source 1..214: note = Description of Artificial Sequence: Synthetic polypeptide; note = XENP018222 1G6_H1.121_L1_IgG1_PVA_/S267K Light Chain

SEQ ID NO: 12931 - protein, 107 aa, synthetic construct; identical to SEQ ID NO: 6247
  source 1..107: note = Description of Artificial Sequence: Synthetic polypeptide; note = VL of XENP018222

SEQ ID NO: 12932 - protein, 11 aa, synthetic construct
  source 1..11: note = Description of Artificial Sequence: Synthetic peptide; note = XENP018222 vlCDR1
RASQSVSNDVA

SEQ ID NO: 12933 - protein, 7 aa, synthetic construct
  source 1..7: note = Description of Artificial Sequence: Synthetic peptide; note = XENP018222 vlCDR2
YASHRYT

SEQ ID NO: 12934 - protein, 9 aa, synthetic construct
  source 1..9: note = Description of Artificial Sequence: Synthetic peptide; note = XENP018222 vlCDR3
QQDYSSPRT

SEQ ID NO: 12935 - protein, 451 aa, synthetic construct
  source 1..451: note = Description of Artificial Sequence: Synthetic polypeptide; note = XENP018223 1G6_H1.122_L1_IgG1_PVA_/S267K Heavy Chain
EVQLVESGGGLVKPGGSLRLSCAASGFTFSNYWMNWVRQAPGKGLEWVGEIRLKSNNWATHYAEPVKGRFTISRDDSKSTVYLQMNSLKTEDTAVYYCTRYYGNYGGYFDVWGAGTLVTVSSASTKGPSVFPLAPSSKSTSGGTAALGCLVKDYFPEPVTVSWNSGALTSGVHTFPAVLQSSGLYSLSSVVTVPSSSLGTQTYICNVNHKPSNTKVDKKVEPKSCDKTHTCPPCPAPPVAGPSVFLFPPKPKDTLMISRTPEVTCVVVDVKHEDPEVKFNWYVDGVEVHNAKTKPREEQYNSTYRVVSVLTVLHQDWLNGKEYKCKVSNKALPAPIEKTISKAKGQPREPQVYTLPPSREEMTKNQVSLTCLVKGFYPSDIAVEWESNGQPENNYKTTPPVLDSDGSFFLYSKLTVDKSRWQQGNVFSCSVMHEALHNHYTQKSLSLSPGK

SEQ ID NO: 12936 - protein, 122 aa, synthetic construct; identical to SEQ ID NO: 7449
  source 1..122: note = Description of Artificial Sequence: Synthetic polypeptide; note = VH of XENP018223

SEQ ID NO: 12937 - protein, 5 aa, synthetic construct
  source 1..5: note = Description of Artificial Sequence: Synthetic peptide; note = XENP018223 vhCDR1
NYWMN

SEQ ID NO: 12938 - protein, 19 aa, synthetic construct
  source 1..19: note = Description of Artificial Sequence: Synthetic peptide; note = XENP018223 vhCDR2
EIRLKSNNWATHYAEPVKG

SEQ ID NO: 12939 - protein, 11 aa, synthetic construct
  source 1..11: note = Description of Artificial Sequence: Synthetic peptide; note = XENP018223 vhCDR3
YYGNYGGYFDV

SEQ ID NO: 12940 - protein, 214 aa, synthetic construct; identical to SEQ ID NO: 11550
  source 1..214: note = Description of Artificial Sequence: Synthetic polypeptide; note = XENP018223 1G6_H1.122_L1_IgG1_PVA_/S267K Light Chain

SEQ ID NO: 12941 - protein, 107 aa, synthetic construct; identical to SEQ ID NO: 6247
  source 1..107: note = Description of Artificial Sequence: Synthetic polypeptide; note = VL of XENP018223

SEQ ID NO: 12942 - protein, 11 aa, synthetic construct
  source 1..11: note = Description of Artificial Sequence: Synthetic peptide; note = XENP018223 vlCDR1
RASQSVSNDVA

SEQ ID NO: 12943 - protein, 7 aa, synthetic construct
  source 1..7: note = Description of Artificial Sequence: Synthetic peptide; note = XENP018223 vlCDR2
YASHRYT

SEQ ID NO: 12944 - protein, 9 aa, synthetic construct
  source 1..9: note = Description of Artificial Sequence: Synthetic peptide; note = XENP018223 vlCDR3
QQDYSSPRT

SEQ ID NO: 12945 - protein, 451 aa, synthetic construct
  source 1..451: note = Description of Artificial Sequence: Synthetic polypeptide; note = XENP018224 1G6_H1.123_L1_IgG1_PVA_/S267K Heavy Chain
EVQLVESGGGLVKPGGSLRLSCAASGFTFSNYWMNWVRQAPGKGLEWVGEIRLKSNNVATHYAEPVKGRFTISRDDSKSTVYLQMNSLKTEDTAVYYCTRYYGNYGGYFDVWGAGTLVTVSSASTKGPSVFPLAPSSKSTSGGTAALGCLVKDYFPEPVTVSWNSGALTSGVHTFPAVLQSSGLYSLSSVVTVPSSSLGTQTYICNVNHKPSNTKVDKKVEPKSCDKTHTCPPCPAPPVAGPSVFLFPPKPKDTLMISRTPEVTCVVVDVKHEDPEVKFNWYVDGVEVHNAKTKPREEQYNSTYRVVSVLTVLHQDWLNGKEYKCKVSNKALPAPIEKTISKAKGQPREPQVYTLPPSREEMTKNQVSLTCLVKGFYPSDIAVEWESNGQPENNYKTTPPVLDSDGSFFLYSKLTVDKSRWQQGNVFSCSVMHEALHNHYTQKSLSLSPGK

SEQ ID NO: 12946 - protein, 122 aa, synthetic construct; identical to SEQ ID NO: 7458
  source 1..122: note = Description of Artificial Sequence: Synthetic polypeptide; note = VH of XENP018224

SEQ ID NO: 12947 - protein, 5 aa, synthetic construct
  source 1..5: note = Description of Artificial Sequence: Synthetic peptide; note = XENP018224 vhCDR1
NYWMN

SEQ ID NO: 12948 - protein, 19 aa, synthetic construct
  source 1..19: note = Description of Artificial Sequence: Synthetic peptide; note = XENP018224 vhCDR2
EIRLKSNNVATHYAEPVKG

SEQ ID NO: 12949 - protein, 11 aa, synthetic construct
  source 1..11: note = Description of Artificial Sequence: Synthetic peptide; note = XENP018224 vhCDR3
YYGNYGGYFDV

SEQ ID NO: 12950 - protein, 214 aa, synthetic construct; identical to SEQ ID NO: 11550
  source 1..214: note = Description of Artificial Sequence: Synthetic polypeptide; note = XENP018224 1G6_H1.123_L1_IgG1_PVA_/S267K Light Chain

SEQ ID NO: 12951 - protein, 107 aa, synthetic construct; identical to SEQ ID NO: 6247
  source 1..107: note = Description of Artificial Sequence: Synthetic polypeptide; note = VL of XENP018224

SEQ ID NO: 12952 - protein, 11 aa, synthetic construct
  source 1..11: note = Description of Artificial Sequence: Synthetic peptide; note = XENP018224 vlCDR1
RASQSVSNDVA

SEQ ID NO: 12953 - protein, 7 aa, synthetic construct
  source 1..7: note = Description of Artificial Sequence: Synthetic peptide; note = XENP018224 vlCDR2
YASHRYT

SEQ ID NO: 12954 - protein, 9 aa, synthetic construct
  source 1..9: note = Description of Artificial Sequence: Synthetic peptide; note = XENP018224 vlCDR3
QQDYSSPRT

SEQ ID NO: 12955 - protein, 451 aa, synthetic construct
  source 1..451: note = Description of Artificial Sequence: Synthetic polypeptide; note = XENP018225 1G6_H1.124_L1_IgG1_PVA_/S267K Heavy Chain
EVQLVESGGGLVKPGGSLRLSCAASGFTFSNYWMNWVRQAPGKGLEWVGEIRLKSNNAATHYAEPVKGRFTISRDDSKSTVYLQMNSLKTEDTAVYYCTRYYGNYGGYFDVWGAGTLVTVSSASTKGPSVFPLAPSSKSTSGGTAALGCLVKDYFPEPVTVSWNSGALTSGVHTFPAVLQSSGLYSLSSVVTVPSSSLGTQTYICNVNHKPSNTKVDKKVEPKSCDKTHTCPPCPAPPVAGPSVFLFPPKPKDTLMISRTPEVTCVVVDVKHEDPEVKFNWYVDGVEVHNAKTKPREEQYNSTYRVVSVLTVLHQDWLNGKEYKCKVSNKALPAPIEKTISKAKGQPREPQVYTLPPSREEMTKNQVSLTCLVKGFYPSDIAVEWESNGQPENNYKTTPPVLDSDGSFFLYSKLTVDKSRWQQGNVFSCSVMHEALHNHYTQKSLSLSPGK

SEQ ID NO: 12956 - protein, 122 aa, synthetic construct; identical to SEQ ID NO: 7467
  source 1..122: note = Description of Artificial Sequence: Synthetic polypeptide; note = VH of XENP018225

SEQ ID NO: 12957 - protein, 5 aa, synthetic construct
  source 1..5: note = Description of Artificial Sequence: Synthetic peptide; note = XENP018225 vhCDR1
NYWMN

SEQ ID NO: 12958 - protein, 19 aa, synthetic construct
  source 1..19: note = Description of Artificial Sequence: Synthetic peptide; note = XENP018225 vhCDR2
EIRLKSNNAATHYAEPVKG

SEQ ID NO: 12959 - protein, 11 aa, synthetic construct
  source 1..11: note = Description of Artificial Sequence: Synthetic peptide; note = XENP018225 vhCDR3
YYGNYGGYFDV

SEQ ID NO: 12960 - protein, 214 aa, synthetic construct; identical to SEQ ID NO: 11550
  source 1..214: note = Description of Artificial Sequence: Synthetic polypeptide; note = XENP018225 1G6_H1.124_L1_IgG1_PVA_/S267K Light Chain

SEQ ID NO: 12961 - protein, 107 aa, synthetic construct; identical to SEQ ID NO: 6247
  source 1..107: note = Description of Artificial Sequence: Synthetic polypeptide; note = VL of XENP018225

SEQ ID NO: 12962 - protein, 11 aa, synthetic construct
  source 1..11: note = Description of Artificial Sequence: Synthetic peptide; note = XENP018225 vlCDR1
RASQSVSNDVA

SEQ ID NO: 12963 - protein, 7 aa, synthetic construct
  source 1..7: note = Description of Artificial Sequence: Synthetic peptide; note = XENP018225 vlCDR2
YASHRYT

SEQ ID NO: 12964 - protein, 9 aa, synthetic construct
  source 1..9: note = Description of Artificial Sequence: Synthetic peptide; note = XENP018225 vlCDR3
QQDYSSPRT

SEQ ID NO: 12965 - protein, 451 aa, synthetic construct
  source 1..451: note = Description of Artificial Sequence: Synthetic polypeptide; note = XENP018226 1G6_H1.125_L1_IgG1_PVA_/S267K Heavy Chain
EVQLVESGGGLVKPGGSLRLSCAASGFTFSNYWMNWVRQAPGKGLEWVGEIRLKSNNQATHYAEPVKGRFTISRDDSKSTVYLQMNSLKTEDTAVYYCTRYYGNYGGYFDVWGAGTLVTVSSASTKGPSVFPLAPSSKSTSGGTAALGCLVKDYFPEPVTVSWNSGALTSGVHTFPAVLQSSGLYSLSSVVTVPSSSLGTQTYICNVNHKPSNTKVDKKVEPKSCDKTHTCPPCPAPPVAGPSVFLFPPKPKDTLMISRTPEVTCVVVDVKHEDPEVKFNWYVDGVEVHNAKTKPREEQYNSTYRVVSVLTVLHQDWLNGKEYKCKVSNKALPAPIEKTISKAKGQPREPQVYTLPPSREEMTKNQVSLTCLVKGFYPSDIAVEWESNGQPENNYKTTPPVLDSDGSFFLYSKLTVDKSRWQQGNVFSCSVMHEALHNHYTQKSLSLSPGK

SEQ ID NO: 12966 - protein, 122 aa, synthetic construct; identical to SEQ ID NO: 7476
  source 1..122: note = Description of Artificial Sequence: Synthetic polypeptide; note = VH of XENP018226

SEQ ID NO: 12967 - protein, 5 aa, synthetic construct
  source 1..5: note = Description of Artificial Sequence: Synthetic peptide; note = XENP018226 vhCDR1
NYWMN

SEQ ID NO: 12968 - protein, 19 aa, synthetic construct
  source 1..19: note = Description of Artificial Sequence: Synthetic peptide; note = XENP018226 vhCDR2
EIRLKSNNQATHYAEPVKG

SEQ ID NO: 12969 - protein, 11 aa, synthetic construct
  source 1..11: note = Description of Artificial Sequence: Synthetic peptide; note = XENP018226 vhCDR3
YYGNYGGYFDV

SEQ ID NO: 12970 - protein, 214 aa, synthetic construct; identical to SEQ ID NO: 11550
  source 1..214: note = Description of Artificial Sequence: Synthetic polypeptide; note = XENP018226 1G6_H1.125_L1_IgG1_PVA_/S267K Light Chain

SEQ ID NO: 12971 - protein, 107 aa, synthetic construct; identical to SEQ ID NO: 6247
  source 1..107: note = Description of Artificial Sequence: Synthetic polypeptide; note = VL of XENP018226

SEQ ID NO: 12972 - protein, 11 aa, synthetic construct
  source 1..11: note = Description of Artificial Sequence: Synthetic peptide; note = XENP018226 vlCDR1
RASQSVSNDVA

SEQ ID NO: 12973 - protein, 7 aa, synthetic construct
  source 1..7: note = Description of Artificial Sequence: Synthetic peptide; note = XENP018226 vlCDR2
YASHRYT

SEQ ID NO: 12974 - protein, 9 aa, synthetic construct
  source 1..9: note = Description of Artificial Sequence: Synthetic peptide; note = XENP018226 vlCDR3
QQDYSSPRT

SEQ ID NO: 12975 - protein, 451 aa, synthetic construct
  source 1..451: note = Description of Artificial Sequence: Synthetic polypeptide; note = XENP018227 1G6_H1.126_L1_IgG1_PVA_/S267K Heavy Chain
EVQLVESGGGLVKPGGSLRLSCAASGFTFSNYWMNWVRQAPGKGLEWVGEIRLKSNNDATHYAEPVKGRFTISRDDSKSTVYLQMNSLKTEDTAVYYCTRYYGNYGGYFDVWGAGTLVTVSSASTKGPSVFPLAPSSKSTSGGTAALGCLVKDYFPEPVTVSWNSGALTSGVHTFPAVLQSSGLYSLSSVVTVPSSSLGTQTYICNVNHKPSNTKVDKKVEPKSCDKTHTCPPCPAPPVAGPSVFLFPPKPKDTLMISRTPEVTCVVVDVKHEDPEVKFNWYVDGVEVHNAKTKPREEQYNSTYRVVSVLTVLHQDWLNGKEYKCKVSNKALPAPIEKTISKAKGQPREPQVYTLPPSREEMTKNQVSLTCLVKGFYPSDIAVEWESNGQPENNYKTTPPVLDSDGSFFLYSKLTVDKSRWQQGNVFSCSVMHEALHNHYTQKSLSLSPGK

SEQ ID NO: 12976 - protein, 122 aa, synthetic construct; identical to SEQ ID NO: 7485
  source 1..122: note = Description of Artificial Sequence: Synthetic polypeptide; note = VH of XENP018227

SEQ ID NO: 12977 - protein, 5 aa, synthetic construct
  source 1..5: note = Description of Artificial Sequence: Synthetic peptide; note = XENP018227 vhCDR1
NYWMN

SEQ ID NO: 12978 - protein, 19 aa, synthetic construct
  source 1..19: note = Description of Artificial Sequence: Synthetic peptide; note = XENP018227 vhCDR2
EIRLKSNNDATHYAEPVKG

SEQ ID NO: 12979 - protein, 11 aa, synthetic construct
  source 1..11: note = Description of Artificial Sequence: Synthetic peptide; note = XENP018227 vhCDR3
YYGNYGGYFDV

SEQ ID NO: 12980 - protein, 214 aa, synthetic construct; identical to SEQ ID NO: 11550
  source 1..214: note = Description of Artificial Sequence: Synthetic polypeptide; note = XENP018227 1G6_H1.126_L1_IgG1_PVA_/S267K Light Chain

SEQ ID NO: 12981 - protein, 107 aa, synthetic construct; identical to SEQ ID NO: 6247
  source 1..107: note = Description of Artificial Sequence: Synthetic polypeptide; note = VL of XENP018227

SEQ ID NO: 12982 - protein, 11 aa, synthetic construct
  source 1..11: note = Description of Artificial Sequence: Synthetic peptide; note = XENP018227 vlCDR1
RASQSVSNDVA

SEQ ID NO: 12983 - protein, 7 aa, synthetic construct
  source 1..7: note = Description of Artificial Sequence: Synthetic peptide; note = XENP018227 vlCDR2
YASHRYT

SEQ ID NO: 12984 - protein, 9 aa, synthetic construct
  source 1..9: note = Description of Artificial Sequence: Synthetic peptide; note = XENP018227 vlCDR3
QQDYSSPRT

SEQ ID NO: 12985 - protein, 451 aa, synthetic construct
  source 1..451: note = Description of Artificial Sequence: Synthetic polypeptide; note = XENP018228 1G6_H1.127_L1_IgG1_PVA_/S267K Heavy Chain
EVQLVESGGGLVKPGGSLRLSCAASGFTFSNYWMNWVRQAPGKGLEWVGEIRLKSNNKATHYAEPVKGRFTISRDDSKSTVYLQMNSLKTEDTAVYYCTRYYGNYGGYFDVWGAGTLVTVSSASTKGPSVFPLAPSSKSTSGGTAALGCLVKDYFPEPVTVSWNSGALTSGVHTFPAVLQSSGLYSLSSVVTVPSSSLGTQTYICNVNHKPSNTKVDKKVEPKSCDKTHTCPPCPAPPVAGPSVFLFPPKPKDTLMISRTPEVTCVVVDVKHEDPEVKFNWYVDGVEVHNAKTKPREEQYNSTYRVVSVLTVLHQDWLNGKEYKCKVSNKALPAPIEKTISKAKGQPREPQVYTLPPSREEMTKNQVSLTCLVKGFYPSDIAVEWESNGQPENNYKTTPPVLDSDGSFFLYSKLTVDKSRWQQGNVFSCSVMHEALHNHYTQKSLSLSPGK

SEQ ID NO: 12986 - protein, 122 aa, synthetic construct; identical to SEQ ID NO: 7494
  source 1..122: note = Description of Artificial Sequence: Synthetic polypeptide; note = VH of XENP018228

SEQ ID NO: 12987 - protein, 5 aa, synthetic construct
  source 1..5: note = Description of Artificial Sequence: Synthetic peptide; note = XENP018228 vhCDR1
NYWMN

SEQ ID NO: 12988 - protein, 19 aa, synthetic construct
  source 1..19: note = Description of Artificial Sequence: Synthetic peptide; note = XENP018228 vhCDR2
EIRLKSNNKATHYAEPVKG

SEQ ID NO: 12989 - protein, 11 aa, synthetic construct
  source 1..11: note = Description of Artificial Sequence: Synthetic peptide; note = XENP018228 vhCDR3
YYGNYGGYFDV

SEQ ID NO: 12990 - protein, 214 aa, synthetic construct; identical to SEQ ID NO: 11550
  source 1..214: note = Description of Artificial Sequence: Synthetic polypeptide; note = XENP018228 1G6_H1.127_L1_IgG1_PVA_/S267K Light Chain

SEQ ID NO: 12991 - protein, 107 aa, synthetic construct; identical to SEQ ID NO: 6247
  source 1..107: note = Description of Artificial Sequence: Synthetic polypeptide; note = VL of XENP018228

SEQ ID NO: 12992 - protein, 11 aa, synthetic construct
  source 1..11: note = Description of Artificial Sequence: Synthetic peptide; note = XENP018228 vlCDR1
RASQSVSNDVA

SEQ ID NO: 12993 - protein, 7 aa, synthetic construct
  source 1..7: note = Description of Artificial Sequence: Synthetic peptide; note = XENP018228 vlCDR2
YASHRYT

SEQ ID NO: 12994 - protein, 9 aa, synthetic construct
  source 1..9: note = Description of Artificial Sequence: Synthetic peptide; note = XENP018228 vlCDR3
QQDYSSPRT

SEQ ID NO: 12995 - protein, 451 aa, synthetic construct
  source 1..451: note = Description of Artificial Sequence: Synthetic polypeptide; note = XENP018229 1G6_H1.128_L1_IgG1_PVA_/S267K Heavy Chain
EVQLVESGGGLVKPGGSLRLSCAASGFTFSNYWMNWVRQAPGKGLEWVGEIRLKSNNYGTHYAEPVKGRFTISRDDSKSTVYLQMNSLKTEDTAVYYCTRYYGNYGGYFDVWGAGTLVTVSSASTKGPSVFPLAPSSKSTSGGTAALGCLVKDYFPEPVTVSWNSGALTSGVHTFPAVLQSSGLYSLSSVVTVPSSSLGTQTYICNVNHKPSNTKVDKKVEPKSCDKTHTCPPCPAPPVAGPSVFLFPPKPKDTLMISRTPEVTCVVVDVKHEDPEVKFNWYVDGVEVHNAKTKPREEQYNSTYRVVSVLTVLHQDWLNGKEYKCKVSNKALPAPIEKTISKAKGQPREPQVYTLPPSREEMTKNQVSLTCLVKGFYPSDIAVEWESNGQPENNYKTTPPVLDSDGSFFLYSKLTVDKSRWQQGNVFSCSVMHEALHNHYTQKSLSLSPGK

SEQ ID NO: 12996 - protein, 122 aa, synthetic construct; identical to SEQ ID NO: 7503
  source 1..122: note = Description of Artificial Sequence: Synthetic polypeptide; note = VH of XENP018229

SEQ ID NO: 12997 - protein, 5 aa, synthetic construct
  source 1..5: note = Description of Artificial Sequence: Synthetic peptide; note = XENP018229 vhCDR1
NYWMN

SEQ ID NO: 12998 - protein, 19 aa, synthetic construct
  source 1..19: note = Description of Artificial Sequence: Synthetic peptide; note = XENP018229 vhCDR2
EIRLKSNNYGTHYAEPVKG

SEQ ID NO: 12999 - protein, 11 aa, synthetic construct
  source 1..11: note = Description of Artificial Sequence: Synthetic peptide; note = XENP018229 vhCDR3
YYGNYGGYFDV

SEQ ID NO: 13000 - protein, 214 aa, synthetic construct; identical to SEQ ID NO: 11550
  source 1..214: note = Description of Artificial Sequence: Synthetic polypeptide; note = XENP018229 1G6_H1.128_L1_IgG1_PVA_/S267K Light Chain

SEQ ID NO: 13001 - protein, 107 aa, synthetic construct; identical to SEQ ID NO: 6247
  source 1..107: note = Description of Artificial Sequence: Synthetic polypeptide; note = VL of XENP018229

SEQ ID NO: 13002 - protein, 11 aa, synthetic construct
  source 1..11: note = Description of Artificial Sequence: Synthetic peptide; note = XENP018229 vlCDR1
RASQSVSNDVA

SEQ ID NO: 13003 - protein, 7 aa, synthetic construct
  source 1..7: note = Description of Artificial Sequence: Synthetic peptide; note = XENP018229 vlCDR2
YASHRYT

SEQ ID NO: 13004 - protein, 9 aa, synthetic construct
  source 1..9: note = Description of Artificial Sequence: Synthetic peptide; note = XENP018229 vlCDR3
QQDYSSPRT

SEQ ID NO: 13005 - protein, 451 aa, synthetic construct
  source 1..451: note = Description of Artificial Sequence: Synthetic polypeptide; note = XENP018230 1G6_H1.129_L1_IgG1_PVA_/S267K Heavy Chain
EVQLVESGGGLVKPGGSLRLSCAASGFTFSNYWMNWVRQAPGKGLEWVGEIRLKSNNYHTHYAEPVKGRFTISRDDSKSTVYLQMNSLKTEDTAVYYCTRYYGNYGGYFDVWGAGTLVTVSSASTKGPSVFPLAPSSKSTSGGTAALGCLVKDYFPEPVTVSWNSGALTSGVHTFPAVLQSSGLYSLSSVVTVPSSSLGTQTYICNVNHKPSNTKVDKKVEPKSCDKTHTCPPCPAPPVAGPSVFLFPPKPKDTLMISRTPEVTCVVVDVKHEDPEVKFNWYVDGVEVHNAKTKPREEQYNSTYRVVSVLTVLHQDWLNGKEYKCKVSNKALPAPIEKTISKAKGQPREPQVYTLPPSREEMTKNQVSLTCLVKGFYPSDIAVEWESNGQPENNYKTTPPVLDSDGSFFLYSKLTVDKSRWQQGNVFSCSVMHEALHNHYTQKSLSLSPGK

SEQ ID NO: 13006 - protein, 122 aa, synthetic construct; identical to SEQ ID NO: 7512
  source 1..122: note = Description of Artificial Sequence: Synthetic polypeptide; note = VH of XENP018230

SEQ ID NO: 13007 - protein, 5 aa, synthetic construct
  source 1..5: note = Description of Artificial Sequence: Synthetic peptide; note = XENP018230 vhCDR1
NYWMN

SEQ ID NO: 13008 - protein, 19 aa, synthetic construct
  source 1..19: note = Description of Artificial Sequence: Synthetic peptide; note = XENP018230 vhCDR2
EIRLKSNNYHTHYAEPVKG

SEQ ID NO: 13009 - protein, 11 aa, synthetic construct
  source 1..11: note = Description of Artificial Sequence: Synthetic peptide; note = XENP018230 vhCDR3
YYGNYGGYFDV

SEQ ID NO: 13010 - protein, 214 aa, synthetic construct; identical to SEQ ID NO: 11550
  source 1..214: note = Description of Artificial Sequence: Synthetic polypeptide; note = XENP018230 1G6_H1.129_L1_IgG1_PVA_/S267K Light Chain

SEQ ID NO: 13011 - protein, 107 aa, synthetic construct; identical to SEQ ID NO: 6247
  source 1..107: note = Description of Artificial Sequence: Synthetic polypeptide; note = VL of XENP018230

SEQ ID NO: 13012 - protein, 11 aa, synthetic construct
  source 1..11: note = Description of Artificial Sequence: Synthetic peptide; note = XENP018230 vlCDR1
RASQSVSNDVA

SEQ ID NO: 13013 - protein, 7 aa, synthetic construct
  source 1..7: note = Description of Artificial Sequence: Synthetic peptide; note = XENP018230 vlCDR2
YASHRYT

SEQ ID NO: 13014 - protein, 9 aa, synthetic construct
  source 1..9: note = Description of Artificial Sequence: Synthetic peptide; note = XENP018230 vlCDR3
QQDYSSPRT

SEQ ID NO: 13015 - protein, 451 aa, synthetic construct
  source 1..451: note = Description of Artificial Sequence: Synthetic polypeptide; note = XENP018231 1G6_H1.130_L1_IgG1_PVA_/S267K Heavy Chain
EVQLVESGGGLVKPGGSLRLSCAASGFTFSNYWMNWVRQAPGKGLEWVGEIRLKSNNYQTHYAEPVKGRFTISRDDSKSTVYLQMNSLKTEDTAVYYCTRYYGNYGGYFDVWGAGTLVTVSSASTKGPSVFPLAPSSKSTSGGTAALGCLVKDYFPEPVTVSWNSGALTSGVHTFPAVLQSSGLYSLSSVVTVPSSSLGTQTYICNVNHKPSNTKVDKKVEPKSCDKTHTCPPCPAPPVAGPSVFLFPPKPKDTLMISRTPEVTCVVVDVKHEDPEVKFNWYVDGVEVHNAKTKPREEQYNSTYRVVSVLTVLHQDWLNGKEYKCKVSNKALPAPIEKTISKAKGQPREPQVYTLPPSREEMTKNQVSLTCLVKGFYPSDIAVEWESNGQPENNYKTTPPVLDSDGSFFLYSKLTVDKSRWQQGNVFSCSVMHEALHNHYTQKSLSLSPGK

SEQ ID NO: 13016 - protein, 122 aa, synthetic construct; identical to SEQ ID NO: 7521
  source 1..122: note = Description of Artificial Sequence: Synthetic polypeptide; note = VH of XENP018231

SEQ ID NO: 13017 - protein, 5 aa, synthetic construct
  source 1..5: note = Description of Artificial Sequence: Synthetic peptide; note = XENP018231 vhCDR1
NYWMN

SEQ ID NO: 13018 - protein, 19 aa, synthetic construct
  source 1..19: note = Description of Artificial Sequence: Synthetic peptide; note = XENP018231 vhCDR2
EIRLKSNNYQTHYAEPVKG

SEQ ID NO: 13019 - protein, 11 aa, synthetic construct
  source 1..11: note = Description of Artificial Sequence: Synthetic peptide; note = XENP018231 vhCDR3
YYGNYGGYFDV

SEQ ID NO: 13020 - protein, 214 aa, synthetic construct; identical to SEQ ID NO: 11550
  source 1..214: note = Description of Artificial Sequence: Synthetic polypeptide; note = XENP018231 1G6_H1.130_L1_IgG1_PVA_/S267K Light Chain

SEQ ID NO: 13021 - protein, 107 aa, synthetic construct; identical to SEQ ID NO: 6247
  source 1..107: note = Description of Artificial Sequence: Synthetic polypeptide; note = VL of XENP018231

SEQ ID NO: 13022 - protein, 11 aa, synthetic construct
  source 1..11: note = Description of Artificial Sequence: Synthetic peptide; note = XENP018231 vlCDR1
RASQSVSNDVA

SEQ ID NO: 13023 - protein, 7 aa, synthetic construct
  source 1..7: note = Description of Artificial Sequence: Synthetic peptide; note = XENP018231 vlCDR2
YASHRYT

SEQ ID NO: 13024 - protein, 9 aa, synthetic construct
  source 1..9: note = Description of Artificial Sequence: Synthetic peptide; note = XENP018231 vlCDR3
QQDYSSPRT

SEQ ID NO: 13025 - protein, 451 aa, synthetic construct
  source 1..451: note = Description of Artificial Sequence: Synthetic polypeptide; note = XENP018232 1G6_H1.131_L1_IgG1_PVA_/S267K Heavy Chain
EVQLVESGGGLVKPGGSLRLSCAASGFTFSNYWMNWVRQAPGKGLEWVGEIRLKSNNYDTHYAEPVKGRFTISRDDSKSTVYLQMNSLKTEDTAVYYCTRYYGNYGGYFDVWGAGTLVTVSSASTKGPSVFPLAPSSKSTSGGTAALGCLVKDYFPEPVTVSWNSGALTSGVHTFPAVLQSSGLYSLSSVVTVPSSSLGTQTYICNVNHKPSNTKVDKKVEPKSCDKTHTCPPCPAPPVAGPSVFLFPPKPKDTLMISRTPEVTCVVVDVKHEDPEVKFNWYVDGVEVHNAKTKPREEQYNSTYRVVSVLTVLHQDWLNGKEYKCKVSNKALPAPIEKTISKAKGQPREPQVYTLPPSREEMTKNQVSLTCLVKGFYPSDIAVEWESNGQPENNYKTTPPVLDSDGSFFLYSKLTVDKSRWQQGNVFSCSVMHEALHNHYTQKSLSLSPGK

SEQ ID NO: 13026 - protein, 122 aa, synthetic construct; identical to SEQ ID NO: 7530
  source 1..122: note = Description of Artificial Sequence: Synthetic polypeptide; note = VH of XENP018232

SEQ ID NO: 13027 - protein, 5 aa, synthetic construct
  source 1..5: note = Description of Artificial Sequence: Synthetic peptide; note = XENP018232 vhCDR1
NYWMN

SEQ ID NO: 13028 - protein, 19 aa, synthetic construct
  source 1..19: note = Description of Artificial Sequence: Synthetic peptide; note = XENP018232 vhCDR2
EIRLKSNNYDTHYAEPVKG

SEQ ID NO: 13029 - protein, 11 aa, synthetic construct
  source 1..11: note = Description of Artificial Sequence: Synthetic peptide; note = XENP018232 vhCDR3
YYGNYGGYFDV

SEQ ID NO: 13030 - protein, 214 aa, synthetic construct; identical to SEQ ID NO: 11550
  source 1..214: note = Description of Artificial Sequence: Synthetic polypeptide; note = XENP018232 1G6_H1.131_L1_IgG1_PVA_/S267K Light Chain

SEQ ID NO: 13031 - protein, 107 aa, synthetic construct; identical to SEQ ID NO: 6247
  source 1..107: note = Description of Artificial Sequence: Synthetic polypeptide; note = VL of XENP018232

SEQ ID NO: 13032 - protein, 11 aa, synthetic construct
  source 1..11: note = Description of Artificial Sequence: Synthetic peptide; note = XENP018232 vlCDR1
RASQSVSNDVA

SEQ ID NO: 13033 - protein, 7 aa, synthetic construct
  source 1..7: note = Description of Artificial Sequence: Synthetic peptide; note = XENP018232 vlCDR2
YASHRYT

SEQ ID NO: 13034 - protein, 9 aa, synthetic construct
  source 1..9: note = Description of Artificial Sequence: Synthetic peptide; note = XENP018232 vlCDR3
QQDYSSPRT

SEQ ID NO: 13035 - protein, 451 aa, synthetic construct
  source 1..451: note = Description of Artificial Sequence: Synthetic polypeptide; note = XENP018233 1G6_H1.132_L1_IgG1_PVA_/S267K Heavy Chain
EVQLVESGGGLVKPGGSLRLSCAASGFTFSNYWMNWVRQAPGKGLEWVGEIRLKSNNYLTHYAEPVKGRFTISRDDSKSTVYLQMNSLKTEDTAVYYCTRYYGNYGGYFDVWGAGTLVTVSSASTKGPSVFPLAPSSKSTSGGTAALGCLVKDYFPEPVTVSWNSGALTSGVHTFPAVLQSSGLYSLSSVVTVPSSSLGTQTYICNVNHKPSNTKVDKKVEPKSCDKTHTCPPCPAPPVAGPSVFLFPPKPKDTLMISRTPEVTCVVVDVKHEDPEVKFNWYVDGVEVHNAKTKPREEQYNSTYRVVSVLTVLHQDWLNGKEYKCKVSNKALPAPIEKTISKAKGQPREPQVYTLPPSREEMTKNQVSLTCLVKGFYPSDIAVEWESNGQPENNYKTTPPVLDSDGSFFLYSKLTVDKSRWQQGNVFSCSVMHEALHNHYTQKSLSLSPGK

SEQ ID NO: 13036 - protein, 122 aa, synthetic construct; identical to SEQ ID NO: 7539
  source 1..122: note = Description of Artificial Sequence: Synthetic polypeptide; note = VH of XENP018233

SEQ ID NO: 13037 - protein, 5 aa, synthetic construct
  source 1..5: note = Description of Artificial Sequence: Synthetic peptide; note = XENP018233 vhCDR1
NYWMN

SEQ ID NO: 13038 - protein, 19 aa, synthetic construct
  source 1..19: note = Description of Artificial Sequence: Synthetic peptide; note = XENP018233 vhCDR2
EIRLKSNNYLTHYAEPVKG

SEQ ID NO: 13039 - protein, 11 aa, synthetic construct
  source 1..11: note = Description of Artificial Sequence: Synthetic peptide; note = XENP018233 vhCDR3
YYGNYGGYFDV

SEQ ID NO: 13040 - protein, 214 aa, synthetic construct; identical to SEQ ID NO: 11550
  source 1..214: note = Description of Artificial Sequence: Synthetic polypeptide; note = XENP018233 1G6_H1.132_L1_IgG1_PVA_/S267K Light Chain

SEQ ID NO: 13041 - protein, 107 aa, synthetic construct; identical to SEQ ID NO: 6247
  source 1..107: note = Description of Artificial Sequence: Synthetic polypeptide; note = VL of XENP018233

SEQ ID NO: 13042 - protein, 11 aa, synthetic construct
  source 1..11: note = Description of Artificial Sequence: Synthetic peptide; note = XENP018233 vlCDR1
RASQSVSNDVA

SEQ ID NO: 13043 - protein, 7 aa, synthetic construct
  source 1..7: note = Description of Artificial Sequence: Synthetic peptide; note = XENP018233 vlCDR2
YASHRYT

SEQ ID NO: 13044 - protein, 9 aa, synthetic construct
  source 1..9: note = Description of Artificial Sequence: Synthetic peptide; note = XENP018233 vlCDR3
QQDYSSPRT

SEQ ID NO: 13045 - protein, 451 aa, synthetic construct
  source 1..451: note = Description of Artificial Sequence: Synthetic polypeptide; note = XENP018234 1G6_H1.133_L1_IgG1_PVA_/S267K Heavy Chain
EVQLVESGGGLVKPGGSLRLSCAASGFTFSNYWMNWVRQAPGKGLEWVGEIRLKSNNYKTHYAEPVKGRFTISRDDSKSTVYLQMNSLKTEDTAVYYCTRYYGNYGGYFDVWGAGTLVTVSSASTKGPSVFPLAPSSKSTSGGTAALGCLVKDYFPEPVTVSWNSGALTSGVHTFPAVLQSSGLYSLSSVVTVPSSSLGTQTYICNVNHKPSNTKVDKKVEPKSCDKTHTCPPCPAPPVAGPSVFLFPPKPKDTLMISRTPEVTCVVVDVKHEDPEVKFNWYVDGVEVHNAKTKPREEQYNSTYRVVSVLTVLHQDWLNGKEYKCKVSNKALPAPIEKTISKAKGQPREPQVYTLPPSREEMTKNQVSLTCLVKGFYPSDIAVEWESNGQPENNYKTTPPVLDSDGSFFLYSKLTVDKSRWQQGNVFSCSVMHEALHNHYTQKSLSLSPGK

SEQ ID NO: 13046 - protein, 122 aa, synthetic construct; identical to SEQ ID NO: 7548
  source 1..122: note = Description of Artificial Sequence: Synthetic polypeptide; note = VH of XENP018234

SEQ ID NO: 13047 - protein, 5 aa, synthetic construct
  source 1..5: note = Description of Artificial Sequence: Synthetic peptide; note = XENP018234 vhCDR1
NYWMN

SEQ ID NO: 13048 - protein, 19 aa, synthetic construct
  source 1..19: note = Description of Artificial Sequence: Synthetic peptide; note = XENP018234 vhCDR2
EIRLKSNNYKTHYAEPVKG

SEQ ID NO: 13049 - protein, 11 aa, synthetic construct
  source 1..11: note = Description of Artificial Sequence: Synthetic peptide; note = XENP018234 vhCDR3
YYGNYGGYFDV

SEQ ID NO: 13050 - protein, 214 aa, synthetic construct; identical to SEQ ID NO: 11550
  source 1..214: note = Description of Artificial Sequence: Synthetic polypeptide; note = XENP018234 1G6_H1.133_L1_IgG1_PVA_/S267K Light Chain

SEQ ID NO: 13051 - protein, 107 aa, synthetic construct; identical to SEQ ID NO: 6247
  source 1..107: note = Description of Artificial Sequence: Synthetic polypeptide; note = VL of XENP018234

SEQ ID NO: 13052 - protein, 11 aa, synthetic construct
  source 1..11: note = Description of Artificial Sequence: Synthetic peptide; note = XENP018234 vlCDR1
RASQSVSNDVA

SEQ ID NO: 13053 - protein, 7 aa, synthetic construct
  source 1..7: note = Description of Artificial Sequence: Synthetic peptide; note = XENP018234 vlCDR2
YASHRYT

SEQ ID NO: 13054 - protein, 9 aa, synthetic construct
  source 1..9: note = Description of Artificial Sequence: Synthetic peptide; note = XENP018234 vlCDR3
QQDYSSPRT

SEQ ID NO: 13055 - protein, 451 aa, synthetic construct
  source 1..451: note = Description of Artificial Sequence: Synthetic polypeptide; note = XENP018235 1G6_H1.134_L1_IgG1_PVA_/S267K Heavy Chain
EVQLVESGGGLVKPGGSLRLSCAASGFTFSNYWMNWVRQAPGKGLEWVGEIRLKSNNYYTHYAEPVKGRFTISRDDSKSTVYLQMNSLKTEDTAVYYCTRYYGNYGGYFDVWGAGTLVTVSSASTKGPSVFPLAPSSKSTSGGTAALGCLVKDYFPEPVTVSWNSGALTSGVHTFPAVLQSSGLYSLSSVVTVPSSSLGTQTYICNVNHKPSNTKVDKKVEPKSCDKTHTCPPCPAPPVAGPSVFLFPPKPKDTLMISRTPEVTCVVVDVKHEDPEVKFNWYVDGVEVHNAKTKPREEQYNSTYRVVSVLTVLHQDWLNGKEYKCKVSNKALPAPIEKTISKAKGQPREPQVYTLPPSREEMTKNQVSLTCLVKGFYPSDIAVEWESNGQPENNYKTTPPVLDSDGSFFLYSKLTVDKSRWQQGNVFSCSVMHEALHNHYTQKSLSLSPGK

SEQ ID NO: 13056 - protein, 122 aa, synthetic construct; identical to SEQ ID NO: 7557
  source 1..122: note = Description of Artificial Sequence: Synthetic polypeptide; note = VH of XENP018235

SEQ ID NO: 13057 - protein, 5 aa, synthetic construct
  source 1..5: note = Description of Artificial Sequence: Synthetic peptide; note = XENP018235 vhCDR1
NYWMN

SEQ ID NO: 13058 - protein, 19 aa, synthetic construct
  source 1..19: note = Description of Artificial Sequence: Synthetic peptide; note = XENP018235 vhCDR2
EIRLKSNNYYTHYAEPVKG

SEQ ID NO: 13059 - protein, 11 aa, synthetic construct
  source 1..11: note = Description of Artificial Sequence: Synthetic peptide; note = XENP018235 vhCDR3
YYGNYGGYFDV

SEQ ID NO: 13060 - protein, 214 aa, synthetic construct; identical to SEQ ID NO: 11550
  source 1..214: note = Description of Artificial Sequence: Synthetic polypeptide; note = XENP018235 1G6_H1.134_L1_IgG1_PVA_/S267K Light Chain

SEQ ID NO: 13061 - protein, 107 aa, synthetic construct; identical to SEQ ID NO: 6247
  source 1..107: note = Description of Artificial Sequence: Synthetic polypeptide; note = VL of XENP018235

SEQ ID NO: 13062 - protein, 11 aa, synthetic construct
  source 1..11: note = Description of Artificial Sequence: Synthetic peptide; note = XENP018235 vlCDR1
RASQSVSNDVA

SEQ ID NO: 13063 - protein, 7 aa, synthetic construct
  source 1..7: note = Description of Artificial Sequence: Synthetic peptide; note = XENP018235 vlCDR2
YASHRYT

SEQ ID NO: 13064 - protein, 9 aa, synthetic construct
  source 1..9: note = Description of Artificial Sequence: Synthetic peptide; note = XENP018235 vlCDR3
QQDYSSPRT

SEQ ID NO: 13065 - protein, 451 aa, synthetic construct
  source 1..451: note = Description of Artificial Sequence: Synthetic polypeptide; note = XENP018236 1G6_H1.135_L1_IgG1_PVA_/S267K Heavy Chain
EVQLVESGGGLVKPGGSLRLSCAASGFTFSNYWMNWVRQAPGKGLEWVGEIRLKSNNYAKHYAEPVKGRFTISRDDSKSTVYLQMNSLKTEDTAVYYCTRYYGNYGGYFDVWGAGTLVTVSSASTKGPSVFPLAPSSKSTSGGTAALGCLVKDYFPEPVTVSWNSGALTSGVHTFPAVLQSSGLYSLSSVVTVPSSSLGTQTYICNVNHKPSNTKVDKKVEPKSCDKTHTCPPCPAPPVAGPSVFLFPPKPKDTLMISRTPEVTCVVVDVKHEDPEVKFNWYVDGVEVHNAKTKPREEQYNSTYRVVSVLTVLHQDWLNGKEYKCKVSNKALPAPIEKTISKAKGQPREPQVYTLPPSREEMTKNQVSLTCLVKGFYPSDIAVEWESNGQPENNYKTTPPVLDSDGSFFLYSKLTVDKSRWQQGNVFSCSVMHEALHNHYTQKSLSLSPGK

SEQ ID NO: 13066 - protein, 122 aa, synthetic construct; identical to SEQ ID NO: 7566
  source 1..122: note = Description of Artificial Sequence: Synthetic polypeptide; note = VH of XENP018236

SEQ ID NO: 13067 - protein, 5 aa, synthetic construct
  source 1..5: note = Description of Artificial Sequence: Synthetic peptide; note = XENP018236 vhCDR1
NYWMN

SEQ ID NO: 13068 - protein, 19 aa, synthetic construct
  source 1..19: note = Description of Artificial Sequence: Synthetic peptide; note = XENP018236 vhCDR2
EIRLKSNNYAKHYAEPVKG

SEQ ID NO: 13069 - protein, 11 aa, synthetic construct
  source 1..11: note = Description of Artificial Sequence: Synthetic peptide; note = XENP018236 vhCDR3
YYGNYGGYFDV

SEQ ID NO: 13070 - protein, 214 aa, synthetic construct; identical to SEQ ID NO: 11550
  source 1..214: note = Description of Artificial Sequence: Synthetic polypeptide; note = XENP018236 1G6_H1.135_L1_IgG1_PVA_/S267K Light Chain

SEQ ID NO: 13071 - protein, 107 aa, synthetic construct; identical to SEQ ID NO: 6247
  source 1..107: note = Description of Artificial Sequence: Synthetic polypeptide; note = VL of XENP018236

SEQ ID NO: 13072 - protein, 11 aa, synthetic construct
  source 1..11: note = Description of Artificial Sequence: Synthetic peptide; note = XENP018236 vlCDR1
RASQSVSNDVA

SEQ ID NO: 13073 - protein, 7 aa, synthetic construct
  source 1..7: note = Description of Artificial Sequence: Synthetic peptide; note = XENP018236 vlCDR2
YASHRYT

SEQ ID NO: 13074 - protein, 9 aa, synthetic construct
  source 1..9: note = Description of Artificial Sequence: Synthetic peptide; note = XENP018236 vlCDR3
QQDYSSPRT

SEQ ID NO: 13075 - protein, 451 aa, synthetic construct
  source 1..451: note = Description of Artificial Sequence: Synthetic polypeptide; note = XENP018237 1G6_H1.136_L1_IgG1_PVA_/S267K Heavy Chain
EVQLVESGGGLVKPGGSLRLSCAASGFTFSNYWMNWVRQAPGKGLEWVGEIRLKSNNYAIHYAEPVKGRFTISRDDSKSTVYLQMNSLKTEDTAVYYCTRYYGNYGGYFDVWGAGTLVTVSSASTKGPSVFPLAPSSKSTSGGTAALGCLVKDYFPEPVTVSWNSGALTSGVHTFPAVLQSSGLYSLSSVVTVPSSSLGTQTYICNVNHKPSNTKVDKKVEPKSCDKTHTCPPCPAPPVAGPSVFLFPPKPKDTLMISRTPEVTCVVVDVKHEDPEVKFNWYVDGVEVHNAKTKPREEQYNSTYRVVSVLTVLHQDWLNGKEYKCKVSNKALPAPIEKTISKAKGQPREPQVYTLPPSREEMTKNQVSLTCLVKGFYPSDIAVEWESNGQPENNYKTTPPVLDSDGSFFLYSKLTVDKSRWQQGNVFSCSVMHEALHNHYTQKSLSLSPGK

SEQ ID NO: 13076 - protein, 122 aa, synthetic construct; identical to SEQ ID NO: 7575
  source 1..122: note = Description of Artificial Sequence: Synthetic polypeptide; note = VH of XENP018237

SEQ ID NO: 13077 - protein, 5 aa, synthetic construct
  source 1..5: note = Description of Artificial Sequence: Synthetic peptide; note = XENP018237 vhCDR1
NYWMN

SEQ ID NO: 13078 - protein, 19 aa, synthetic construct
  source 1..19: note = Description of Artificial Sequence: Synthetic peptide; note = XENP018237 vhCDR2
EIRLKSNNYAIHYAEPVKG

SEQ ID NO: 13079 - protein, 11 aa, synthetic construct
  source 1..11: note = Description of Artificial Sequence: Synthetic peptide; note = XENP018237 vhCDR3
YYGNYGGYFDV

SEQ ID NO: 13080 - protein, 214 aa, synthetic construct; identical to SEQ ID NO: 11550
  source 1..214: note = Description of Artificial Sequence: Synthetic polypeptide; note = XENP018237 1G6_H1.136_L1_IgG1_PVA_/S267K Light Chain

SEQ ID NO: 13081 - protein, 107 aa, synthetic construct; identical to SEQ ID NO: 6247
  source 1..107: note = Description of Artificial Sequence: Synthetic polypeptide; note = VL of XENP018237

SEQ ID NO: 13082 - protein, 11 aa, synthetic construct
  source 1..11: note = Description of Artificial Sequence: Synthetic peptide; note = XENP018237 vlCDR1
RASQSVSNDVA

SEQ ID NO: 13083 - protein, 7 aa, synthetic construct
  source 1..7: note = Description of Artificial Sequence: Synthetic peptide; note = XENP018237 vlCDR2
YASHRYT

SEQ ID NO: 13084 - protein, 9 aa, synthetic construct
  source 1..9: note = Description of Artificial Sequence: Synthetic peptide; note = XENP018237 vlCDR3
QQDYSSPRT

SEQ ID NO: 13085 - protein, 451 aa, synthetic construct
  source 1..451: note = Description of Artificial Sequence: Synthetic polypeptide; note = XENP018238 1G6_H1.137_L1_IgG1_PVA_/S267K Heavy Chain
EVQLVESGGGLVKPGGSLRLSCAASGFTFSNYWMNWVRQAPGKGLEWVGEIRLKSNNYATYYAEPVKGRFTISRDDSKSTVYLQMNSLKTEDTAVYYCTRYYGNYGGYFDVWGAGTLVTVSSASTKGPSVFPLAPSSKSTSGGTAALGCLVKDYFPEPVTVSWNSGALTSGVHTFPAVLQSSGLYSLSSVVTVPSSSLGTQTYICNVNHKPSNTKVDKKVEPKSCDKTHTCPPCPAPPVAGPSVFLFPPKPKDTLMISRTPEVTCVVVDVKHEDPEVKFNWYVDGVEVHNAKTKPREEQYNSTYRVVSVLTVLHQDWLNGKEYKCKVSNKALPAPIEKTISKAKGQPREPQVYTLPPSREEMTKNQVSLTCLVKGFYPSDIAVEWESNGQPENNYKTTPPVLDSDGSFFLYSKLTVDKSRWQQGNVFSCSVMHEALHNHYTQKSLSLSPGK

SEQ ID NO: 13086 - protein, 122 aa, synthetic construct; identical to SEQ ID NO: 7584
  source 1..122: note = Description of Artificial Sequence: Synthetic polypeptide; note = VH of XENP018238

SEQ ID NO: 13087 - protein, 5 aa, synthetic construct
  source 1..5: note = Description of Artificial Sequence: Synthetic peptide; note = XENP018238 vhCDR1
NYWMN

SEQ ID NO: 13088 - protein, 19 aa, synthetic construct
  source 1..19: note = Description of Artificial Sequence: Synthetic peptide; note = XENP018238 vhCDR2
EIRLKSNNYATYYAEPVKG

SEQ ID NO: 13089 - protein, 11 aa, synthetic construct
  source 1..11: note = Description of Artificial Sequence: Synthetic peptide; note = XENP018238 vhCDR3
YYGNYGGYFDV

SEQ ID NO: 13090 - protein, 214 aa, synthetic construct; identical to SEQ ID NO: 11550
  source 1..214: note = Description of Artificial Sequence: Synthetic polypeptide; note = XENP018238 1G6_H1.137_L1_IgG1_PVA_/S267K Light Chain

SEQ ID NO: 13091 - protein, 107 aa, synthetic construct; identical to SEQ ID NO: 6247
  source 1..107: note = Description of Artificial Sequence: Synthetic polypeptide; note = VL of XENP018238

SEQ ID NO: 13092 - protein, 11 aa, synthetic construct
  source 1..11: note = Description of Artificial Sequence: Synthetic peptide; note = XENP018238 vlCDR1
RASQSVSNDVA

SEQ ID NO: 13093 - protein, 7 aa, synthetic construct
  source 1..7: note = Description of Artificial Sequence: Synthetic peptide; note = XENP018238 vlCDR2
YASHRYT

SEQ ID NO: 13094 - protein, 9 aa, synthetic construct
  source 1..9: note = Description of Artificial Sequence: Synthetic peptide; note = XENP018238 vlCDR3
QQDYSSPRT

SEQ ID NO: 13095 - protein, 451 aa, synthetic construct
  source 1..451: note = Description of Artificial Sequence: Synthetic polypeptide; note = XENP018239 1G6_H1.138_L1_IgG1_PVA_/S267K Heavy Chain
EVQLVESGGGLVKPGGSLRLSCAASGFTFSNYWMNWVRQAPGKGLEWVGEIRLKSNNYATQYAEPVKGRFTISRDDSKSTVYLQMNSLKTEDTAVYYCTRYYGNYGGYFDVWGAGTLVTVSSASTKGPSVFPLAPSSKSTSGGTAALGCLVKDYFPEPVTVSWNSGALTSGVHTFPAVLQSSGLYSLSSVVTVPSSSLGTQTYICNVNHKPSNTKVDKKVEPKSCDKTHTCPPCPAPPVAGPSVFLFPPKPKDTLMISRTPEVTCVVVDVKHEDPEVKFNWYVDGVEVHNAKTKPREEQYNSTYRVVSVLTVLHQDWLNGKEYKCKVSNKALPAPIEKTISKAKGQPREPQVYTLPPSREEMTKNQVSLTCLVKGFYPSDIAVEWESNGQPENNYKTTPPVLDSDGSFFLYSKLTVDKSRWQQGNVFSCSVMHEALHNHYTQKSLSLSPGK

SEQ ID NO: 13096 - protein, 122 aa, synthetic construct; identical to SEQ ID NO: 7593
  source 1..122: note = Description of Artificial Sequence: Synthetic polypeptide; note = VH of XENP018239

SEQ ID NO: 13097 - protein, 5 aa, synthetic construct
  source 1..5: note = Description of Artificial Sequence: Synthetic peptide; note = XENP018239 vhCDR1
NYWMN

SEQ ID NO: 13098 - protein, 19 aa, synthetic construct
  source 1..19: note = Description of Artificial Sequence: Synthetic peptide; note = XENP018239 vhCDR2
EIRLKSNNYATQYAEPVKG

SEQ ID NO: 13099 - protein, 11 aa, synthetic construct
  source 1..11: note = Description of Artificial Sequence: Synthetic peptide; note = XENP018239 vhCDR3
YYGNYGGYFDV

SEQ ID NO: 13100 - protein, 214 aa, synthetic construct; identical to SEQ ID NO: 11550
  source 1..214: note = Description of Artificial Sequence: Synthetic polypeptide; note = XENP018239 1G6_H1.138_L1_IgG1_PVA_/S267K Light Chain

SEQ ID NO: 13101 - protein, 107 aa, synthetic construct; identical to SEQ ID NO: 6247
  source 1..107: note = Description of Artificial Sequence: Synthetic polypeptide; note = VL of XENP018239

SEQ ID NO: 13102 - protein, 11 aa, synthetic construct
  source 1..11: note = Description of Artificial Sequence: Synthetic peptide; note = XENP018239 vlCDR1
RASQSVSNDVA

SEQ ID NO: 13103 - protein, 7 aa, synthetic construct
  source 1..7: note = Description of Artificial Sequence: Synthetic peptide; note = XENP018239 vlCDR2
YASHRYT

SEQ ID NO: 13104 - protein, 9 aa, synthetic construct
  source 1..9: note = Description of Artificial Sequence: Synthetic peptide; note = XENP018239 vlCDR3
QQDYSSPRT

SEQ ID NO: 13105 - protein, 451 aa, synthetic construct
  source 1..451: note = Description of Artificial Sequence: Synthetic polypeptide; note = XENP018240 1G6_H1.139_L1_IgG1_PVA_/S267K Heavy Chain
EVQLVESGGGLVKPGGSLRLSCAASGFTFSNYWMNWVRQAPGKGLEWVGEIRLKSNNYATDYAEPVKGRFTISRDDSKSTVYLQMNSLKTEDTAVYYCTRYYGNYGGYFDVWGAGTLVTVSSASTKGPSVFPLAPSSKSTSGGTAALGCLVKDYFPEPVTVSWNSGALTSGVHTFPAVLQSSGLYSLSSVVTVPSSSLGTQTYICNVNHKPSNTKVDKKVEPKSCDKTHTCPPCPAPPVAGPSVFLFPPKPKDTLMISRTPEVTCVVVDVKHEDPEVKFNWYVDGVEVHNAKTKPREEQYNSTYRVVSVLTVLHQDWLNGKEYKCKVSNKALPAPIEKTISKAKGQPREPQVYTLPPSREEMTKNQVSLTCLVKGFYPSDIAVEWESNGQPENNYKTTPPVLDSDGSFFLYSKLTVDKSRWQQGNVFSCSVMHEALHNHYTQKSLSLSPGK

SEQ ID NO: 13106 - protein, 122 aa, synthetic construct; identical to SEQ ID NO: 7602
  source 1..122: note = Description of Artificial Sequence: Synthetic polypeptide; note = VH of XENP018240

SEQ ID NO: 13107 - protein, 5 aa, synthetic construct
  source 1..5: note = Description of Artificial Sequence: Synthetic peptide; note = XENP018240 vhCDR1
NYWMN

SEQ ID NO: 13108 - protein, 19 aa, synthetic construct
  source 1..19: note = Description of Artificial Sequence: Synthetic peptide; note = XENP018240 vhCDR2
EIRLKSNNYATDYAEPVKG

SEQ ID NO: 13109 - protein, 11 aa, synthetic construct
  source 1..11: note = Description of Artificial Sequence: Synthetic peptide; note = XENP018240 vhCDR3
YYGNYGGYFDV

SEQ ID NO: 13110 - protein, 214 aa, synthetic construct; identical to SEQ ID NO: 11550
  source 1..214: note = Description of Artificial Sequence: Synthetic polypeptide; note = XENP018240 1G6_H1.139_L1_IgG1_PVA_/S267K Light Chain

SEQ ID NO: 13111 - protein, 107 aa, synthetic construct; identical to SEQ ID NO: 6247
  source 1..107: note = Description of Artificial Sequence: Synthetic polypeptide; note = VL of XENP018240

SEQ ID NO: 13112 - protein, 11 aa, synthetic construct
  source 1..11: note = Description of Artificial Sequence: Synthetic peptide; note = XENP018240 vlCDR1
RASQSVSNDVA

SEQ ID NO: 13113 - protein, 7 aa, synthetic construct
  source 1..7: note = Description of Artificial Sequence: Synthetic peptide; note = XENP018240 vlCDR2
YASHRYT

SEQ ID NO: 13114 - protein, 9 aa, synthetic construct
  source 1..9: note = Description of Artificial Sequence: Synthetic peptide; note = XENP018240 vlCDR3
QQDYSSPRT

SEQ ID NO: 13115 - protein, 451 aa, synthetic construct
  source 1..451: note = Description of Artificial Sequence: Synthetic polypeptide; note = XENP018241 1G6_H1.140_L1_IgG1_PVA_/S267K Heavy Chain
EVQLVESGGGLVKPGGSLRLSCAASGFTFSNYWMNWVRQAPGKGLEWVGEIRLKSNNYATFYAEPVKGRFTISRDDSKSTVYLQMNSLKTEDTAVYYCTRYYGNYGGYFDVWGAGTLVTVSSASTKGPSVFPLAPSSKSTSGGTAALGCLVKDYFPEPVTVSWNSGALTSGVHTFPAVLQSSGLYSLSSVVTVPSSSLGTQTYICNVNHKPSNTKVDKKVEPKSCDKTHTCPPCPAPPVAGPSVFLFPPKPKDTLMISRTPEVTCVVVDVKHEDPEVKFNWYVDGVEVHNAKTKPREEQYNSTYRVVSVLTVLHQDWLNGKEYKCKVSNKALPAPIEKTISKAKGQPREPQVYTLPPSREEMTKNQVSLTCLVKGFYPSDIAVEWESNGQPENNYKTTPPVLDSDGSFFLYSKLTVDKSRWQQGNVFSCSVMHEALHNHYTQKSLSLSPGK

SEQ ID NO: 13116 - protein, 122 aa, synthetic construct; identical to SEQ ID NO: 7611
  source 1..122: note = Description of Artificial Sequence: Synthetic polypeptide; note = VH of XENP018241

SEQ ID NO: 13117 - protein, 5 aa, synthetic construct
  source 1..5: note = Description of Artificial Sequence: Synthetic peptide; note = XENP018241 vhCDR1
NYWMN

SEQ ID NO: 13118 - protein, 19 aa, synthetic construct
  source 1..19: note = Description of Artificial Sequence: Synthetic peptide; note = XENP018241 vhCDR2
EIRLKSNNYATFYAEPVKG

SEQ ID NO: 13119 - protein, 11 aa, synthetic construct
  source 1..11: note = Description of Artificial Sequence: Synthetic peptide; note = XENP018241 vhCDR3
YYGNYGGYFDV

SEQ ID NO: 13120 - protein, 214 aa, synthetic construct; identical to SEQ ID NO: 11550
  source 1..214: note = Description of Artificial Sequence: Synthetic polypeptide; note = XENP018241 1G6_H1.140_L1_IgG1_PVA_/S267K Light Chain

SEQ ID NO: 13121 - protein, 107 aa, synthetic construct; identical to SEQ ID NO: 6247
  source 1..107: note = Description of Artificial Sequence: Synthetic polypeptide; note = VL of XENP018241

SEQ ID NO: 13122 - protein, 11 aa, synthetic construct
  source 1..11: note = Description of Artificial Sequence: Synthetic peptide; note = XENP018241 vlCDR1
RASQSVSNDVA

SEQ ID NO: 13123 - protein, 7 aa, synthetic construct
  source 1..7: note = Description of Artificial Sequence: Synthetic peptide; note = XENP018241 vlCDR2
YASHRYT

SEQ ID NO: 13124 - protein, 9 aa, synthetic construct
  source 1..9: note = Description of Artificial Sequence: Synthetic peptide; note = XENP018241 vlCDR3
QQDYSSPRT

SEQ ID NO: 13125 - protein, 451 aa, synthetic construct
  source 1..451: note = Description of Artificial Sequence: Synthetic polypeptide; note = XENP018242 1G6_H1.141_L1_IgG1_PVA_/S267K Heavy Chain
EVQLVESGGGLVKPGGSLRLSCAASGFTFSNYWMNWVRQAPGKGLEWVGEIRLKSNNYATAYAEPVKGRFTISRDDSKSTVYLQMNSLKTEDTAVYYCTRYYGNYGGYFDVWGAGTLVTVSSASTKGPSVFPLAPSSKSTSGGTAALGCLVKDYFPEPVTVSWNSGALTSGVHTFPAVLQSSGLYSLSSVVTVPSSSLGTQTYICNVNHKPSNTKVDKKVEPKSCDKTHTCPPCPAPPVAGPSVFLFPPKPKDTLMISRTPEVTCVVVDVKHEDPEVKFNWYVDGVEVHNAKTKPREEQYNSTYRVVSVLTVLHQDWLNGKEYKCKVSNKALPAPIEKTISKAKGQPREPQVYTLPPSREEMTKNQVSLTCLVKGFYPSDIAVEWESNGQPENNYKTTPPVLDSDGSFFLYSKLTVDKSRWQQGNVFSCSVMHEALHNHYTQKSLSLSPGK

SEQ ID NO: 13126 - protein, 122 aa, synthetic construct; identical to SEQ ID NO: 7620
  source 1..122: note = Description of Artificial Sequence: Synthetic polypeptide; note = VH of XENP018242

SEQ ID NO: 13127 - protein, 5 aa, synthetic construct
  source 1..5: note = Description of Artificial Sequence: Synthetic peptide; note = XENP018242 vhCDR1
NYWMN

SEQ ID NO: 13128 - protein, 19 aa, synthetic construct
  source 1..19: note = Description of Artificial Sequence: Synthetic peptide; note = XENP018242 vhCDR2
EIRLKSNNYATAYAEPVKG

SEQ ID NO: 13129 - protein, 11 aa, synthetic construct
  source 1..11: note = Description of Artificial Sequence: Synthetic peptide; note = XENP018242 vhCDR3
YYGNYGGYFDV

SEQ ID NO: 13130 - protein, 214 aa, synthetic construct; identical to SEQ ID NO: 11550
  source 1..214: note = Description of Artificial Sequence: Synthetic polypeptide; note = XENP018242 1G6_H1.141_L1_IgG1_PVA_/S267K Light Chain

SEQ ID NO: 13131 - protein, 107 aa, synthetic construct; identical to SEQ ID NO: 6247
  source 1..107: note = Description of Artificial Sequence: Synthetic polypeptide; note = VL of XENP018242

SEQ ID NO: 13132 - protein, 11 aa, synthetic construct
  source 1..11: note = Description of Artificial Sequence: Synthetic peptide; note = XENP018242 vlCDR1
RASQSVSNDVA

SEQ ID NO: 13133 - protein, 7 aa, synthetic construct
  source 1..7: note = Description of Artificial Sequence: Synthetic peptide; note = XENP018242 vlCDR2
YASHRYT

SEQ ID NO: 13134 - protein, 9 aa, synthetic construct
  source 1..9: note = Description of Artificial Sequence: Synthetic peptide; note = XENP018242 vlCDR3
QQDYSSPRT

SEQ ID NO: 13135 - protein, 451 aa, synthetic construct
  source 1..451: note = Description of Artificial Sequence: Synthetic polypeptide; note = XENP018243 1G6_H1.142_L1_IgG1_PVA_/S267K Heavy Chain
EVQLVESGGGLVKPGGSLRLSCAASGFTFSNYWMNWVRQAPGKGLEWVGEIRLKSNNYATTYAEPVKGRFTISRDDSKSTVYLQMNSLKTEDTAVYYCTRYYGNYGGYFDVWGAGTLVTVSSASTKGPSVFPLAPSSKSTSGGTAALGCLVKDYFPEPVTVSWNSGALTSGVHTFPAVLQSSGLYSLSSVVTVPSSSLGTQTYICNVNHKPSNTKVDKKVEPKSCDKTHTCPPCPAPPVAGPSVFLFPPKPKDTLMISRTPEVTCVVVDVKHEDPEVKFNWYVDGVEVHNAKTKPREEQYNSTYRVVSVLTVLHQDWLNGKEYKCKVSNKALPAPIEKTISKAKGQPREPQVYTLPPSREEMTKNQVSLTCLVKGFYPSDIAVEWESNGQPENNYKTTPPVLDSDGSFFLYSKLTVDKSRWQQGNVFSCSVMHEALHNHYTQKSLSLSPGK

SEQ ID NO: 13136 - protein, 122 aa, synthetic construct; identical to SEQ ID NO: 7629
  source 1..122: note = Description of Artificial Sequence: Synthetic polypeptide; note = VH of XENP018243

SEQ ID NO: 13137 - protein, 5 aa, synthetic construct
  source 1..5: note = Description of Artificial Sequence: Synthetic peptide; note = XENP018243 vhCDR1
NYWMN

SEQ ID NO: 13138 - protein, 19 aa, synthetic construct
  source 1..19: note = Description of Artificial Sequence: Synthetic peptide; note = XENP018243 vhCDR2
EIRLKSNNYATTYAEPVKG

SEQ ID NO: 13139 - protein, 11 aa, synthetic construct
  source 1..11: note = Description of Artificial Sequence: Synthetic peptide; note = XENP018243 vhCDR3
YYGNYGGYFDV

SEQ ID NO: 13140 - protein, 214 aa, synthetic construct; identical to SEQ ID NO: 11550
  source 1..214: note = Description of Artificial Sequence: Synthetic polypeptide; note = XENP018243 1G6_H1.142_L1_IgG1_PVA_/S267K Light Chain

SEQ ID NO: 13141 - protein, 107 aa, synthetic construct; identical to SEQ ID NO: 6247
  source 1..107: note = Description of Artificial Sequence: Synthetic polypeptide; note = VL of XENP018243

SEQ ID NO: 13142 - protein, 11 aa, synthetic construct
  source 1..11: note = Description of Artificial Sequence: Synthetic peptide; note = XENP018243 vlCDR1
RASQSVSNDVA

SEQ ID NO: 13143 - protein, 7 aa, synthetic construct
  source 1..7: note = Description of Artificial Sequence: Synthetic peptide; note = XENP018243 vlCDR2
YASHRYT

SEQ ID NO: 13144 - protein, 9 aa, synthetic construct
  source 1..9: note = Description of Artificial Sequence: Synthetic peptide; note = XENP018243 vlCDR3
QQDYSSPRT

SEQ ID NO: 13145 - protein, 451 aa, synthetic construct
  source 1..451: note = Description of Artificial Sequence: Synthetic polypeptide; note = XENP018244 1G6_H1.143_L1_IgG1_PVA_/S267K Heavy Chain
EVQLVESGGGLVKPGGSLRLSCAASGFTFSNYWMNWVRQAPGKGLEWVGEIRLKSNNYATKYAEPVKGRFTISRDDSKSTVYLQMNSLKTEDTAVYYCTRYYGNYGGYFDVWGAGTLVTVSSASTKGPSVFPLAPSSKSTSGGTAALGCLVKDYFPEPVTVSWNSGALTSGVHTFPAVLQSSGLYSLSSVVTVPSSSLGTQTYICNVNHKPSNTKVDKKVEPKSCDKTHTCPPCPAPPVAGPSVFLFPPKPKDTLMISRTPEVTCVVVDVKHEDPEVKFNWYVDGVEVHNAKTKPREEQYNSTYRVVSVLTVLHQDWLNGKEYKCKVSNKALPAPIEKTISKAKGQPREPQVYTLPPSREEMTKNQVSLTCLVKGFYPSDIAVEWESNGQPENNYKTTPPVLDSDGSFFLYSKLTVDKSRWQQGNVFSCSVMHEALHNHYTQKSLSLSPGK

SEQ ID NO: 13146 - protein, 122 aa, synthetic construct; identical to SEQ ID NO: 7638
  source 1..122: note = Description of Artificial Sequence: Synthetic polypeptide; note = VH of XENP018244

SEQ ID NO: 13147 - protein, 5 aa, synthetic construct
  source 1..5: note = Description of Artificial Sequence: Synthetic peptide; note = XENP018244 vhCDR1
NYWMN

SEQ ID NO: 13148 - protein, 19 aa, synthetic construct
  source 1..19: note = Description of Artificial Sequence: Synthetic peptide; note = XENP018244 vhCDR2
EIRLKSNNYATKYAEPVKG

SEQ ID NO: 13149 - protein, 11 aa, synthetic construct
  source 1..11: note = Description of Artificial Sequence: Synthetic peptide; note = XENP018244 vhCDR3
YYGNYGGYFDV

SEQ ID NO: 13150 - protein, 214 aa, synthetic construct; identical to SEQ ID NO: 11550
  source 1..214: note = Description of Artificial Sequence: Synthetic polypeptide; note = XENP018244 1G6_H1.143_L1_IgG1_PVA_/S267K Light Chain

SEQ ID NO: 13151 - protein, 107 aa, synthetic construct; identical to SEQ ID NO: 6247
  source 1..107: note = Description of Artificial Sequence: Synthetic polypeptide; note = VL of XENP018244

SEQ ID NO: 13152 - protein, 11 aa, synthetic construct
  source 1..11: note = Description of Artificial Sequence: Synthetic peptide; note = XENP018244 vlCDR1
RASQSVSNDVA

SEQ ID NO: 13153 - protein, 7 aa, synthetic construct
  source 1..7: note = Description of Artificial Sequence: Synthetic peptide; note = XENP018244 vlCDR2
YASHRYT

SEQ ID NO: 13154 - protein, 9 aa, synthetic construct
  source 1..9: note = Description of Artificial Sequence: Synthetic peptide; note = XENP018244 vlCDR3
QQDYSSPRT

SEQ ID NO: 13155 - protein, 451 aa, synthetic construct
  source 1..451: note = Description of Artificial Sequence: Synthetic polypeptide; note = XENP018245 1G6_H1.144_L1_IgG1_PVA_/S267K Heavy Chain
EVQLVESGGGLVKPGGSLRLSCAASGFTFSNYWMNWVRQAPGKGLEWVGEIRLKSNNYATGYAEPVKGRFTISRDDSKSTVYLQMNSLKTEDTAVYYCTRYYGNYGGYFDVWGAGTLVTVSSASTKGPSVFPLAPSSKSTSGGTAALGCLVKDYFPEPVTVSWNSGALTSGVHTFPAVLQSSGLYSLSSVVTVPSSSLGTQTYICNVNHKPSNTKVDKKVEPKSCDKTHTCPPCPAPPVAGPSVFLFPPKPKDTLMISRTPEVTCVVVDVKHEDPEVKFNWYVDGVEVHNAKTKPREEQYNSTYRVVSVLTVLHQDWLNGKEYKCKVSNKALPAPIEKTISKAKGQPREPQVYTLPPSREEMTKNQVSLTCLVKGFYPSDIAVEWESNGQPENNYKTTPPVLDSDGSFFLYSKLTVDKSRWQQGNVFSCSVMHEALHNHYTQKSLSLSPGK

SEQ ID NO: 13156 - protein, 122 aa, synthetic construct; identical to SEQ ID NO: 7647
  source 1..122: note = Description of Artificial Sequence: Synthetic polypeptide; note = VH of XENP018245

SEQ ID NO: 13157 - protein, 5 aa, synthetic construct
  source 1..5: note = Description of Artificial Sequence: Synthetic peptide; note = XENP018245 vhCDR1
NYWMN

SEQ ID NO: 13158 - protein, 19 aa, synthetic construct
  source 1..19: note = Description of Artificial Sequence: Synthetic peptide; note = XENP018245 vhCDR2
EIRLKSNNYATGYAEPVKG

SEQ ID NO: 13159 - protein, 11 aa, synthetic construct
  source 1..11: note = Description of Artificial Sequence: Synthetic peptide; note = XENP018245 vhCDR3
YYGNYGGYFDV

SEQ ID NO: 13160 - protein, 214 aa, synthetic construct; identical to SEQ ID NO: 11550
  source 1..214: note = Description of Artificial Sequence: Synthetic polypeptide; note = XENP018245 1G6_H1.144_L1_IgG1_PVA_/S267K Light Chain

SEQ ID NO: 13161 - protein, 107 aa, synthetic construct; identical to SEQ ID NO: 6247
  source 1..107: note = Description of Artificial Sequence: Synthetic polypeptide; note = VL of XENP018245

SEQ ID NO: 13162 - protein, 11 aa, synthetic construct
  source 1..11: note = Description of Artificial Sequence: Synthetic peptide; note = XENP018245 vlCDR1
RASQSVSNDVA

SEQ ID NO: 13163 - protein, 7 aa, synthetic construct
  source 1..7: note = Description of Artificial Sequence: Synthetic peptide; note = XENP018245 vlCDR2
YASHRYT

SEQ ID NO: 13164 - protein, 9 aa, synthetic construct
  source 1..9: note = Description of Artificial Sequence: Synthetic peptide; note = XENP018245 vlCDR3
QQDYSSPRT

SEQ ID NO: 13165 - protein, 451 aa, synthetic construct
  source 1..451: note = Description of Artificial Sequence: Synthetic polypeptide; note = XENP018246 1G6_H1.145_L1_IgG1_PVA_/S267K Heavy Chain
EVQLVESGGGLVKPGGSLRLSCAASGFTFSNYWMNWVRQAPGKGLEWVGEIRLKSNNYATLYAEPVKGRFTISRDDSKSTVYLQMNSLKTEDTAVYYCTRYYGNYGGYFDVWGAGTLVTVSSASTKGPSVFPLAPSSKSTSGGTAALGCLVKDYFPEPVTVSWNSGALTSGVHTFPAVLQSSGLYSLSSVVTVPSSSLGTQTYICNVNHKPSNTKVDKKVEPKSCDKTHTCPPCPAPPVAGPSVFLFPPKPKDTLMISRTPEVTCVVVDVKHEDPEVKFNWYVDGVEVHNAKTKPREEQYNSTYRVVSVLTVLHQDWLNGKEYKCKVSNKALPAPIEKTISKAKGQPREPQVYTLPPSREEMTKNQVSLTCLVKGFYPSDIAVEWESNGQPENNYKTTPPVLDSDGSFFLYSKLTVDKSRWQQGNVFSCSVMHEALHNHYTQKSLSLSPGK

SEQ ID NO: 13166 - protein, 122 aa, synthetic construct; identical to SEQ ID NO: 7656
  source 1..122: note = Description of Artificial Sequence: Synthetic polypeptide; note = VH of XENP018246

SEQ ID NO: 13167 - protein, 5 aa, synthetic construct
  source 1..5: note = Description of Artificial Sequence: Synthetic peptide; note = XENP018246 vhCDR1
NYWMN

SEQ ID NO: 13168 - protein, 19 aa, synthetic construct
  source 1..19: note = Description of Artificial Sequence: Synthetic peptide; note = XENP018246 vhCDR2
EIRLKSNNYATLYAEPVKG

SEQ ID NO: 13169 - protein, 11 aa, synthetic construct
  source 1..11: note = Description of Artificial Sequence: Synthetic peptide; note = XENP018246 vhCDR3
YYGNYGGYFDV

SEQ ID NO: 13170 - protein, 214 aa, synthetic construct; identical to SEQ ID NO: 11550
  source 1..214: note = Description of Artificial Sequence: Synthetic polypeptide; note = XENP018246 1G6_H1.145_L1_IgG1_PVA_/S267K Light Chain

SEQ ID NO: 13171 - protein, 107 aa, synthetic construct; identical to SEQ ID NO: 6247
  source 1..107: note = Description of Artificial Sequence: Synthetic polypeptide; note = VL of XENP018246

SEQ ID NO: 13172 - protein, 11 aa, synthetic construct
  source 1..11: note = Description of Artificial Sequence: Synthetic peptide; note = XENP018246 vlCDR1
RASQSVSNDVA

SEQ ID NO: 13173 - protein, 7 aa, synthetic construct
  source 1..7: note = Description of Artificial Sequence: Synthetic peptide; note = XENP018246 vlCDR2
YASHRYT

SEQ ID NO: 13174 - protein, 9 aa, synthetic construct
  source 1..9: note = Description of Artificial Sequence: Synthetic peptide; note = XENP018246 vlCDR3
QQDYSSPRT

SEQ ID NO: 13175 - protein, 451 aa, synthetic construct
  source 1..451: note = Description of Artificial Sequence: Synthetic polypeptide; note = XENP018247 1G6_H1.146_L1_IgG1_PVA_/S267K Heavy Chain
EVQLVESGGGLVKPGGSLRLSCAASGFTFSNYWMNWVRQAPGKGLEWVGEIRLKSNNYATHYPEPVKGRFTISRDDSKSTVYLQMNSLKTEDTAVYYCTRYYGNYGGYFDVWGAGTLVTVSSASTKGPSVFPLAPSSKSTSGGTAALGCLVKDYFPEPVTVSWNSGALTSGVHTFPAVLQSSGLYSLSSVVTVPSSSLGTQTYICNVNHKPSNTKVDKKVEPKSCDKTHTCPPCPAPPVAGPSVFLFPPKPKDTLMISRTPEVTCVVVDVKHEDPEVKFNWYVDGVEVHNAKTKPREEQYNSTYRVVSVLTVLHQDWLNGKEYKCKVSNKALPAPIEKTISKAKGQPREPQVYTLPPSREEMTKNQVSLTCLVKGFYPSDIAVEWESNGQPENNYKTTPPVLDSDGSFFLYSKLTVDKSRWQQGNVFSCSVMHEALHNHYTQKSLSLSPGK

SEQ ID NO: 13176 - protein, 122 aa, synthetic construct; identical to SEQ ID NO: 7665
  source 1..122: note = Description of Artificial Sequence: Synthetic polypeptide; note = VH of XENP018247

SEQ ID NO: 13177 - protein, 5 aa, synthetic construct
  source 1..5: note = Description of Artificial Sequence: Synthetic peptide; note = XENP018247 vhCDR1
NYWMN

SEQ ID NO: 13178 - protein, 19 aa, synthetic construct
  source 1..19: note = Description of Artificial Sequence: Synthetic peptide; note = XENP018247 vhCDR2
EIRLKSNNYATHYPEPVKG

SEQ ID NO: 13179 - protein, 11 aa, synthetic construct
  source 1..11: note = Description of Artificial Sequence: Synthetic peptide; note = XENP018247 vhCDR3
YYGNYGGYFDV

SEQ ID NO: 13180 - protein, 214 aa, synthetic construct; identical to SEQ ID NO: 11550
  source 1..214: note = Description of Artificial Sequence: Synthetic polypeptide; note = XENP018247 1G6_H1.146_L1_IgG1_PVA_/S267K Light Chain

SEQ ID NO: 13181 - protein, 107 aa, synthetic construct; identical to SEQ ID NO: 6247
  source 1..107: note = Description of Artificial Sequence: Synthetic polypeptide; note = VL of XENP018247

SEQ ID NO: 13182 - protein, 11 aa, synthetic construct
  source 1..11: note = Description of Artificial Sequence: Synthetic peptide; note = XENP018247 vlCDR1
RASQSVSNDVA

SEQ ID NO: 13183 - protein, 7 aa, synthetic construct
  source 1..7: note = Description of Artificial Sequence: Synthetic peptide; note = XENP018247 vlCDR2
YASHRYT

SEQ ID NO: 13184 - protein, 9 aa, synthetic construct
  source 1..9: note = Description of Artificial Sequence: Synthetic peptide; note = XENP018247 vlCDR3
QQDYSSPRT

SEQ ID NO: 13185 - protein, 451 aa, synthetic construct
  source 1..451: note = Description of Artificial Sequence: Synthetic polypeptide; note = XENP018248 1G6_H1.147_L1_IgG1_PVA_/S267K Heavy Chain
EVQLVESGGGLVKPGGSLRLSCAASGFTFSNYWMNWVRQAPGKGLEWVGEIRLKSNNYATHYVEPVKGRFTISRDDSKSTVYLQMNSLKTEDTAVYYCTRYYGNYGGYFDVWGAGTLVTVSSASTKGPSVFPLAPSSKSTSGGTAALGCLVKDYFPEPVTVSWNSGALTSGVHTFPAVLQSSGLYSLSSVVTVPSSSLGTQTYICNVNHKPSNTKVDKKVEPKSCDKTHTCPPCPAPPVAGPSVFLFPPKPKDTLMISRTPEVTCVVVDVKHEDPEVKFNWYVDGVEVHNAKTKPREEQYNSTYRVVSVLTVLHQDWLNGKEYKCKVSNKALPAPIEKTISKAKGQPREPQVYTLPPSREEMTKNQVSLTCLVKGFYPSDIAVEWESNGQPENNYKTTPPVLDSDGSFFLYSKLTVDKSRWQQGNVFSCSVMHEALHNHYTQKSLSLSPGK

SEQ ID NO: 13186 - protein, 122 aa, synthetic construct; identical to SEQ ID NO: 7674
  source 1..122: note = Description of Artificial Sequence: Synthetic polypeptide; note = VH of XENP018248

SEQ ID NO: 13187 - protein, 5 aa, synthetic construct
  source 1..5: note = Description of Artificial Sequence: Synthetic peptide; note = XENP018248 vhCDR1
NYWMN

SEQ ID NO: 13188 - protein, 19 aa, synthetic construct
  source 1..19: note = Description of Artificial Sequence: Synthetic peptide; note = XENP018248 vhCDR2
EIRLKSNNYATHYVEPVKG

SEQ ID NO: 13189 - protein, 11 aa, synthetic construct
  source 1..11: note = Description of Artificial Sequence: Synthetic peptide; note = XENP018248 vhCDR3
YYGNYGGYFDV

SEQ ID NO: 13190 - protein, 214 aa, synthetic construct; identical to SEQ ID NO: 11550
  source 1..214: note = Description of Artificial Sequence: Synthetic polypeptide; note = XENP018248 1G6_H1.147_L1_IgG1_PVA_/S267K Light Chain

SEQ ID NO: 13191 - protein, 107 aa, synthetic construct; identical to SEQ ID NO: 6247
  source 1..107: note = Description of Artificial Sequence: Synthetic polypeptide; note = VL of XENP018248

SEQ ID NO: 13192 - protein, 11 aa, synthetic construct
  source 1..11: note = Description of Artificial Sequence: Synthetic peptide; note = XENP018248 vlCDR1
RASQSVSNDVA

SEQ ID NO: 13193 - protein, 7 aa, synthetic construct
  source 1..7: note = Description of Artificial Sequence: Synthetic peptide; note = XENP018248 vlCDR2
YASHRYT

SEQ ID NO: 13194 - protein, 9 aa, synthetic construct
  source 1..9: note = Description of Artificial Sequence: Synthetic peptide; note = XENP018248 vlCDR3
QQDYSSPRT

SEQ ID NO: 13195 - protein, 451 aa, synthetic construct
  source 1..451: note = Description of Artificial Sequence: Synthetic polypeptide; note = XENP018249 1G6_H1.148_L1_IgG1_PVA_/S267K Heavy Chain
EVQLVESGGGLVKPGGSLRLSCAASGFTFSNYWMNWVRQAPGKGLEWVGEIRLKSNNYATHYADPVKGRFTISRDDSKSTVYLQMNSLKTEDTAVYYCTRYYGNYGGYFDVWGAGTLVTVSSASTKGPSVFPLAPSSKSTSGGTAALGCLVKDYFPEPVTVSWNSGALTSGVHTFPAVLQSSGLYSLSSVVTVPSSSLGTQTYICNVNHKPSNTKVDKKVEPKSCDKTHTCPPCPAPPVAGPSVFLFPPKPKDTLMISRTPEVTCVVVDVKHEDPEVKFNWYVDGVEVHNAKTKPREEQYNSTYRVVSVLTVLHQDWLNGKEYKCKVSNKALPAPIEKTISKAKGQPREPQVYTLPPSREEMTKNQVSLTCLVKGFYPSDIAVEWESNGQPENNYKTTPPVLDSDGSFFLYSKLTVDKSRWQQGNVFSCSVMHEALHNHYTQKSLSLSPGK

SEQ ID NO: 13196 - protein, 122 aa, synthetic construct; identical to SEQ ID NO: 7683
  source 1..122: note = Description of Artificial Sequence: Synthetic polypeptide; note = VH of XENP018249

SEQ ID NO: 13197 - protein, 5 aa, synthetic construct
  source 1..5: note = Description of Artificial Sequence: Synthetic peptide; note = XENP018249 vhCDR1
NYWMN

SEQ ID NO: 13198 - protein, 19 aa, synthetic construct
  source 1..19: note = Description of Artificial Sequence: Synthetic peptide; note = XENP018249 vhCDR2
EIRLKSNNYATHYADPVKG

SEQ ID NO: 13199 - protein, 11 aa, synthetic construct
  source 1..11: note = Description of Artificial Sequence: Synthetic peptide; note = XENP018249 vhCDR3
YYGNYGGYFDV

SEQ ID NO: 13200 - protein, 214 aa, synthetic construct; identical to SEQ ID NO: 11550
  source 1..214: note = Description of Artificial Sequence: Synthetic polypeptide; note = XENP018249 1G6_H1.148_L1_IgG1_PVA_/S267K Light Chain

SEQ ID NO: 13201 - protein, 107 aa, synthetic construct; identical to SEQ ID NO: 6247
  source 1..107: note = Description of Artificial Sequence: Synthetic polypeptide; note = VL of XENP018249

SEQ ID NO: 13202 - protein, 11 aa, synthetic construct
  source 1..11: note = Description of Artificial Sequence: Synthetic peptide; note = XENP018249 vlCDR1
RASQSVSNDVA

SEQ ID NO: 13203 - protein, 7 aa, synthetic construct
  source 1..7: note = Description of Artificial Sequence: Synthetic peptide; note = XENP018249 vlCDR2
YASHRYT

SEQ ID NO: 13204 - protein, 9 aa, synthetic construct
  source 1..9: note = Description of Artificial Sequence: Synthetic peptide; note = XENP018249 vlCDR3
QQDYSSPRT

SEQ ID NO: 13205 - protein, 451 aa, synthetic construct
  source 1..451: note = Description of Artificial Sequence: Synthetic polypeptide; note = XENP018250 1G6_H1.149_L1_IgG1_PVA_/S267K Heavy Chain
EVQLVESGGGLVKPGGSLRLSCAASGFTFSNYWMNWVRQAPGKGLEWVGEIRLKSNNYATHYAGPVKGRFTISRDDSKSTVYLQMNSLKTEDTAVYYCTRYYGNYGGYFDVWGAGTLVTVSSASTKGPSVFPLAPSSKSTSGGTAALGCLVKDYFPEPVTVSWNSGALTSGVHTFPAVLQSSGLYSLSSVVTVPSSSLGTQTYICNVNHKPSNTKVDKKVEPKSCDKTHTCPPCPAPPVAGPSVFLFPPKPKDTLMISRTPEVTCVVVDVKHEDPEVKFNWYVDGVEVHNAKTKPREEQYNSTYRVVSVLTVLHQDWLNGKEYKCKVSNKALPAPIEKTISKAKGQPREPQVYTLPPSREEMTKNQVSLTCLVKGFYPSDIAVEWESNGQPENNYKTTPPVLDSDGSFFLYSKLTVDKSRWQQGNVFSCSVMHEALHNHYTQKSLSLSPGK

SEQ ID NO: 13206 - protein, 122 aa, synthetic construct; identical to SEQ ID NO: 7692
  source 1..122: note = Description of Artificial Sequence: Synthetic polypeptide; note = VH of XENP018250

SEQ ID NO: 13207 - protein, 5 aa, synthetic construct
  source 1..5: note = Description of Artificial Sequence: Synthetic peptide; note = XENP018250 vhCDR1
NYWMN

SEQ ID NO: 13208 - protein, 19 aa, synthetic construct
  source 1..19: note = Description of Artificial Sequence: Synthetic peptide; note = XENP018250 vhCDR2
EIRLKSNNYATHYAGPVKG

SEQ ID NO: 13209 - protein, 11 aa, synthetic construct
  source 1..11: note = Description of Artificial Sequence: Synthetic peptide; note = XENP018250 vhCDR3
YYGNYGGYFDV

SEQ ID NO: 13210 - protein, 214 aa, synthetic construct; identical to SEQ ID NO: 11550
  source 1..214: note = Description of Artificial Sequence: Synthetic polypeptide; note = XENP018250 1G6_H1.149_L1_IgG1_PVA_/S267K Light Chain

SEQ ID NO: 13211 - protein, 107 aa, synthetic construct; identical to SEQ ID NO: 6247
  source 1..107: note = Description of Artificial Sequence: Synthetic polypeptide; note = VL of XENP018250

SEQ ID NO: 13212 - protein, 11 aa, synthetic construct
  source 1..11: note = Description of Artificial Sequence: Synthetic peptide; note = XENP018250 vlCDR1
RASQSVSNDVA

SEQ ID NO: 13213 - protein, 7 aa, synthetic construct
  source 1..7: note = Description of Artificial Sequence: Synthetic peptide; note = XENP018250 vlCDR2
YASHRYT

SEQ ID NO: 13214 - protein, 9 aa, synthetic construct
  source 1..9: note = Description of Artificial Sequence: Synthetic peptide; note = XENP018250 vlCDR3
QQDYSSPRT

SEQ ID NO: 13215 - protein, 451 aa, synthetic construct
  source 1..451: note = Description of Artificial Sequence: Synthetic polypeptide; note = XENP018251 1G6_H1.150_L1_IgG1_PVA_/S267K Heavy Chain
EVQLVESGGGLVKPGGSLRLSCAASGFTFSNYWMNWVRQAPGKGLEWVGEIRLKSNNYATHYAAPVKGRFTISRDDSKSTVYLQMNSLKTEDTAVYYCTRYYGNYGGYFDVWGAGTLVTVSSASTKGPSVFPLAPSSKSTSGGTAALGCLVKDYFPEPVTVSWNSGALTSGVHTFPAVLQSSGLYSLSSVVTVPSSSLGTQTYICNVNHKPSNTKVDKKVEPKSCDKTHTCPPCPAPPVAGPSVFLFPPKPKDTLMISRTPEVTCVVVDVKHEDPEVKFNWYVDGVEVHNAKTKPREEQYNSTYRVVSVLTVLHQDWLNGKEYKCKVSNKALPAPIEKTISKAKGQPREPQVYTLPPSREEMTKNQVSLTCLVKGFYPSDIAVEWESNGQPENNYKTTPPVLDSDGSFFLYSKLTVDKSRWQQGNVFSCSVMHEALHNHYTQKSLSLSPGK

SEQ ID NO: 13216 - protein, 122 aa, synthetic construct; identical to SEQ ID NO: 7701
  source 1..122: note = Description of Artificial Sequence: Synthetic polypeptide; note = VH of XENP018251

SEQ ID NO: 13217 - protein, 5 aa, synthetic construct
  source 1..5: note = Description of Artificial Sequence: Synthetic peptide; note = XENP018251 vhCDR1
NYWMN

SEQ ID NO: 13218 - protein, 19 aa, synthetic construct
  source 1..19: note = Description of Artificial Sequence: Synthetic peptide; note = XENP018251 vhCDR2
EIRLKSNNYATHYAAPVKG

SEQ ID NO: 13219 - protein, 11 aa, synthetic construct
  source 1..11: note = Description of Artificial Sequence: Synthetic peptide; note = XENP018251 vhCDR3
YYGNYGGYFDV

SEQ ID NO: 13220 - protein, 214 aa, synthetic construct; identical to SEQ ID NO: 11550
  source 1..214: note = Description of Artificial Sequence: Synthetic polypeptide; note = XENP018251 1G6_H1.150_L1_IgG1_PVA_/S267K Light Chain

SEQ ID NO: 13221 - protein, 107 aa, synthetic construct; identical to SEQ ID NO: 6247
  source 1..107: note = Description of Artificial Sequence: Synthetic polypeptide; note = VL of XENP018251

SEQ ID NO: 13222 - protein, 11 aa, synthetic construct
  source 1..11: note = Description of Artificial Sequence: Synthetic peptide; note = XENP018251 vlCDR1
RASQSVSNDVA

SEQ ID NO: 13223 - protein, 7 aa, synthetic construct
  source 1..7: note = Description of Artificial Sequence: Synthetic peptide; note = XENP018251 vlCDR2
YASHRYT

SEQ ID NO: 13224 - protein, 9 aa, synthetic construct
  source 1..9: note = Description of Artificial Sequence: Synthetic peptide; note = XENP018251 vlCDR3
QQDYSSPRT

SEQ ID NO: 13225 - protein, 451 aa, synthetic construct
  source 1..451: note = Description of Artificial Sequence: Synthetic polypeptide; note = XENP018252 1G6_H1.151_L1_IgG1_PVA_/S267K Heavy Chain
EVQLVESGGGLVKPGGSLRLSCAASGFTFSNYWMNWVRQAPGKGLEWVGEIRLKSNNYATHYAESVKGRFTISRDDSKSTVYLQMNSLKTEDTAVYYCTRYYGNYGGYFDVWGAGTLVTVSSASTKGPSVFPLAPSSKSTSGGTAALGCLVKDYFPEPVTVSWNSGALTSGVHTFPAVLQSSGLYSLSSVVTVPSSSLGTQTYICNVNHKPSNTKVDKKVEPKSCDKTHTCPPCPAPPVAGPSVFLFPPKPKDTLMISRTPEVTCVVVDVKHEDPEVKFNWYVDGVEVHNAKTKPREEQYNSTYRVVSVLTVLHQDWLNGKEYKCKVSNKALPAPIEKTISKAKGQPREPQVYTLPPSREEMTKNQVSLTCLVKGFYPSDIAVEWESNGQPENNYKTTPPVLDSDGSFFLYSKLTVDKSRWQQGNVFSCSVMHEALHNHYTQKSLSLSPGK

SEQ ID NO: 13226 - protein, 122 aa, synthetic construct; identical to SEQ ID NO: 7710
  source 1..122: note = Description of Artificial Sequence: Synthetic polypeptide; note = VH of XENP018252

SEQ ID NO: 13227 - protein, 5 aa, synthetic construct
  source 1..5: note = Description of Artificial Sequence: Synthetic peptide; note = XENP018252 vhCDR1
NYWMN

SEQ ID NO: 13228 - protein, 19 aa, synthetic construct
  source 1..19: note = Description of Artificial Sequence: Synthetic peptide; note = XENP018252 vhCDR2
EIRLKSNNYATHYAESVKG

SEQ ID NO: 13229 - protein, 11 aa, synthetic construct
  source 1..11: note = Description of Artificial Sequence: Synthetic peptide; note = XENP018252 vhCDR3
YYGNYGGYFDV

SEQ ID NO: 13230 - protein, 214 aa, synthetic construct; identical to SEQ ID NO: 11550
  source 1..214: note = Description of Artificial Sequence: Synthetic polypeptide; note = XENP018252 1G6_H1.151_L1_IgG1_PVA_/S267K Light Chain

SEQ ID NO: 13231 - protein, 107 aa, synthetic construct; identical to SEQ ID NO: 6247
  source 1..107: note = Description of Artificial Sequence: Synthetic polypeptide; note = VL of XENP018252

SEQ ID NO: 13232 - protein, 11 aa, synthetic construct
  source 1..11: note = Description of Artificial Sequence: Synthetic peptide; note = XENP018252 vlCDR1
RASQSVSNDVA

SEQ ID NO: 13233 - protein, 7 aa, synthetic construct
  source 1..7: note = Description of Artificial Sequence: Synthetic peptide; note = XENP018252 vlCDR2
YASHRYT

SEQ ID NO: 13234 - protein, 9 aa, synthetic construct
  source 1..9: note = Description of Artificial Sequence: Synthetic peptide; note = XENP018252 vlCDR3
QQDYSSPRT

SEQ ID NO: 13235 - protein, 451 aa, synthetic construct
  source 1..451: note = Description of Artificial Sequence: Synthetic polypeptide; note = XENP018253 1G6_H1.152_L1_IgG1_PVA_/S267K Heavy Chain
EVQLVESGGGLVKPGGSLRLSCAASGFTFSNYWMNWVRQAPGKGLEWVGEIRLKSNNYATHYAEPVKGRFTISRDNSKSTVYLQMNSLKTEDTAVYYCTRYYGNYGGYFDVWGAGTLVTVSSASTKGPSVFPLAPSSKSTSGGTAALGCLVKDYFPEPVTVSWNSGALTSGVHTFPAVLQSSGLYSLSSVVTVPSSSLGTQTYICNVNHKPSNTKVDKKVEPKSCDKTHTCPPCPAPPVAGPSVFLFPPKPKDTLMISRTPEVTCVVVDVKHEDPEVKFNWYVDGVEVHNAKTKPREEQYNSTYRVVSVLTVLHQDWLNGKEYKCKVSNKALPAPIEKTISKAKGQPREPQVYTLPPSREEMTKNQVSLTCLVKGFYPSDIAVEWESNGQPENNYKTTPPVLDSDGSFFLYSKLTVDKSRWQQGNVFSCSVMHEALHNHYTQKSLSLSPGK

SEQ ID NO: 13236 - protein, 122 aa, synthetic construct; identical to SEQ ID NO: 7719
  source 1..122: note = Description of Artificial Sequence: Synthetic polypeptide; note = VH of XENP018253

SEQ ID NO: 13237 - protein, 5 aa, synthetic construct
  source 1..5: note = Description of Artificial Sequence: Synthetic peptide; note = XENP018253 vhCDR1
NYWMN

SEQ ID NO: 13238 - protein, 19 aa, synthetic construct
  source 1..19: note = Description of Artificial Sequence: Synthetic peptide; note = XENP018253 vhCDR2
EIRLKSNNYATHYAEPVKG

SEQ ID NO: 13239 - protein, 11 aa, synthetic construct
  source 1..11: note = Description of Artificial Sequence: Synthetic peptide; note = XENP018253 vhCDR3
YYGNYGGYFDV

SEQ ID NO: 13240 - protein, 214 aa, synthetic construct; identical to SEQ ID NO: 11550
  source 1..214: note = Description of Artificial Sequence: Synthetic polypeptide; note = XENP018253 1G6_H1.152_L1_IgG1_PVA_/S267K Light Chain

SEQ ID NO: 13241 - protein, 107 aa, synthetic construct; identical to SEQ ID NO: 6247
  source 1..107: note = Description of Artificial Sequence: Synthetic polypeptide; note = VL of XENP018253

SEQ ID NO: 13242 - protein, 11 aa, synthetic construct
  source 1..11: note = Description of Artificial Sequence: Synthetic peptide; note = XENP018253 vlCDR1
RASQSVSNDVA

SEQ ID NO: 13243 - protein, 7 aa, synthetic construct
  source 1..7: note = Description of Artificial Sequence: Synthetic peptide; note = XENP018253 vlCDR2
YASHRYT

SEQ ID NO: 13244 - protein, 9 aa, synthetic construct
  source 1..9: note = Description of Artificial Sequence: Synthetic peptide; note = XENP018253 vlCDR3
QQDYSSPRT

SEQ ID NO: 13245 - protein, 451 aa, synthetic construct
  source 1..451: note = Description of Artificial Sequence: Synthetic polypeptide; note = XENP018254 1G6_H1.153_L1_IgG1_PVA_/S267K Heavy Chain
EVQLVESGGGLVKPGGSLRLSCAASGFTFSNYWMNWVRQAPGKGLEWVGEIRLKSNNYATHYAEPVKGRFTISRDDSKNTVYLQMNSLKTEDTAVYYCTRYYGNYGGYFDVWGAGTLVTVSSASTKGPSVFPLAPSSKSTSGGTAALGCLVKDYFPEPVTVSWNSGALTSGVHTFPAVLQSSGLYSLSSVVTVPSSSLGTQTYICNVNHKPSNTKVDKKVEPKSCDKTHTCPPCPAPPVAGPSVFLFPPKPKDTLMISRTPEVTCVVVDVKHEDPEVKFNWYVDGVEVHNAKTKPREEQYNSTYRVVSVLTVLHQDWLNGKEYKCKVSNKALPAPIEKTISKAKGQPREPQVYTLPPSREEMTKNQVSLTCLVKGFYPSDIAVEWESNGQPENNYKTTPPVLDSDGSFFLYSKLTVDKSRWQQGNVFSCSVMHEALHNHYTQKSLSLSPGK

SEQ ID NO: 13246 - protein, 122 aa, synthetic construct; identical to SEQ ID NO: 7728
  source 1..122: note = Description of Artificial Sequence: Synthetic polypeptide; note = VH of XENP018254

SEQ ID NO: 13247 - protein, 5 aa, synthetic construct
  source 1..5: note = Description of Artificial Sequence: Synthetic peptide; note = XENP018254 vhCDR1
NYWMN

SEQ ID NO: 13248 - protein, 19 aa, synthetic construct
  source 1..19: note = Description of Artificial Sequence: Synthetic peptide; note = XENP018254 vhCDR2
EIRLKSNNYATHYAEPVKG

SEQ ID NO: 13249 - protein, 11 aa, synthetic construct
  source 1..11: note = Description of Artificial Sequence: Synthetic peptide; note = XENP018254 vhCDR3
YYGNYGGYFDV

SEQ ID NO: 13250 - protein, 214 aa, synthetic construct; identical to SEQ ID NO: 11550
  source 1..214: note = Description of Artificial Sequence: Synthetic polypeptide; note = XENP018254 1G6_H1.153_L1_IgG1_PVA_/S267K Light Chain

SEQ ID NO: 13251 - protein, 107 aa, synthetic construct; identical to SEQ ID NO: 6247
  source 1..107: note = Description of Artificial Sequence: Synthetic polypeptide; note = VL of XENP018254

SEQ ID NO: 13252 - protein, 11 aa, synthetic construct
  source 1..11: note = Description of Artificial Sequence: Synthetic peptide; note = XENP018254 vlCDR1
RASQSVSNDVA

SEQ ID NO: 13253 - protein, 7 aa, synthetic construct
  source 1..7: note = Description of Artificial Sequence: Synthetic peptide; note = XENP018254 vlCDR2
YASHRYT

SEQ ID NO: 13254 - protein, 9 aa, synthetic construct
  source 1..9: note = Description of Artificial Sequence: Synthetic peptide; note = XENP018254 vlCDR3
QQDYSSPRT

SEQ ID NO: 13255 - protein, 451 aa, synthetic construct
  source 1..451: note = Description of Artificial Sequence: Synthetic polypeptide; note = XENP018255 1G6_H1.154_L1_IgG1_PVA_/S267K Heavy Chain
EVQLVESGGGLVKPGGSLRLSCAASGFTFSNYWMNWVRQAPGKGLEWVGEIRLKSNNYATHYAEPVKGRFTISRDDSKSSVYLQMNSLKTEDTAVYYCTRYYGNYGGYFDVWGAGTLVTVSSASTKGPSVFPLAPSSKSTSGGTAALGCLVKDYFPEPVTVSWNSGALTSGVHTFPAVLQSSGLYSLSSVVTVPSSSLGTQTYICNVNHKPSNTKVDKKVEPKSCDKTHTCPPCPAPPVAGPSVFLFPPKPKDTLMISRTPEVTCVVVDVKHEDPEVKFNWYVDGVEVHNAKTKPREEQYNSTYRVVSVLTVLHQDWLNGKEYKCKVSNKALPAPIEKTISKAKGQPREPQVYTLPPSREEMTKNQVSLTCLVKGFYPSDIAVEWESNGQPENNYKTTPPVLDSDGSFFLYSKLTVDKSRWQQGNVFSCSVMHEALHNHYTQKSLSLSPGK

SEQ ID NO: 13256 - protein, 122 aa, synthetic construct; identical to SEQ ID NO: 7737
  source 1..122: note = Description of Artificial Sequence: Synthetic polypeptide; note = VH of XENP018255

SEQ ID NO: 13257 - protein, 5 aa, synthetic construct
  source 1..5: note = Description of Artificial Sequence: Synthetic peptide; note = XENP018255 vhCDR1
NYWMN

SEQ ID NO: 13258 - protein, 19 aa, synthetic construct
  source 1..19: note = Description of Artificial Sequence: Synthetic peptide; note = XENP018255 vhCDR2
EIRLKSNNYATHYAEPVKG

SEQ ID NO: 13259 - protein, 11 aa, synthetic construct
  source 1..11: note = Description of Artificial Sequence: Synthetic peptide; note = XENP018255 vhCDR3
YYGNYGGYFDV

SEQ ID NO: 13260 - protein, 214 aa, synthetic construct; identical to SEQ ID NO: 11550
  source 1..214: note = Description of Artificial Sequence: Synthetic polypeptide; note = XENP018255 1G6_H1.154_L1_IgG1_PVA_/S267K Light Chain

SEQ ID NO: 13261 - protein, 107 aa, synthetic construct; identical to SEQ ID NO: 6247
  source 1..107: note = Description of Artificial Sequence: Synthetic polypeptide; note = VL of XENP018255

SEQ ID NO: 13262 - protein, 11 aa, synthetic construct
  source 1..11: note = Description of Artificial Sequence: Synthetic peptide; note = XENP018255 vlCDR1
RASQSVSNDVA

SEQ ID NO: 13263 - protein, 7 aa, synthetic construct
  source 1..7: note = Description of Artificial Sequence: Synthetic peptide; note = XENP018255 vlCDR2
YASHRYT

SEQ ID NO: 13264 - protein, 9 aa, synthetic construct
  source 1..9: note = Description of Artificial Sequence: Synthetic peptide; note = XENP018255 vlCDR3
QQDYSSPRT

SEQ ID NO: 13265 - protein, 451 aa, synthetic construct
  source 1..451: note = Description of Artificial Sequence: Synthetic polypeptide; note = XENP018256 1G6_H1.155_L1_IgG1_PVA_/S267K Heavy Chain
EVQLVESGGGLVKPGGSLRLSCAASGFTFSNYWMNWVRQAPGKGLEWVGEIRLKSNNYATHYAEPVKGRFTISRDDSKSTLYLQMNSLKTEDTAVYYCTRYYGNYGGYFDVWGAGTLVTVSSASTKGPSVFPLAPSSKSTSGGTAALGCLVKDYFPEPVTVSWNSGALTSGVHTFPAVLQSSGLYSLSSVVTVPSSSLGTQTYICNVNHKPSNTKVDKKVEPKSCDKTHTCPPCPAPPVAGPSVFLFPPKPKDTLMISRTPEVTCVVVDVKHEDPEVKFNWYVDGVEVHNAKTKPREEQYNSTYRVVSVLTVLHQDWLNGKEYKCKVSNKALPAPIEKTISKAKGQPREPQVYTLPPSREEMTKNQVSLTCLVKGFYPSDIAVEWESNGQPENNYKTTPPVLDSDGSFFLYSKLTVDKSRWQQGNVFSCSVMHEALHNHYTQKSLSLSPGK

SEQ ID NO: 13266 - protein, 122 aa, synthetic construct; identical to SEQ ID NO: 7746
  source 1..122: note = Description of Artificial Sequence: Synthetic polypeptide; note = VH of XENP018256

SEQ ID NO: 13267 - protein, 5 aa, synthetic construct
  source 1..5: note = Description of Artificial Sequence: Synthetic peptide; note = XENP018256 vhCDR1
NYWMN

SEQ ID NO: 13268 - protein, 19 aa, synthetic construct
  source 1..19: note = Description of Artificial Sequence: Synthetic peptide; note = XENP018256 vhCDR2
EIRLKSNNYATHYAEPVKG

SEQ ID NO: 13269 - protein, 11 aa, synthetic construct
  source 1..11: note = Description of Artificial Sequence: Synthetic peptide; note = XENP018256 vhCDR3
YYGNYGGYFDV

SEQ ID NO: 13270 - protein, 214 aa, synthetic construct; identical to SEQ ID NO: 11550
  source 1..214: note = Description of Artificial Sequence: Synthetic polypeptide; note = XENP018256 1G6_H1.155_L1_IgG1_PVA_/S267K Light Chain

SEQ ID NO: 13271 - protein, 107 aa, synthetic construct; identical to SEQ ID NO: 6247
  source 1..107: note = Description of Artificial Sequence: Synthetic polypeptide; note = VL of XENP018256

SEQ ID NO: 13272 - protein, 11 aa, synthetic construct
  source 1..11: note = Description of Artificial Sequence: Synthetic peptide; note = XENP018256 vlCDR1
RASQSVSNDVA

SEQ ID NO: 13273 - protein, 7 aa, synthetic construct
  source 1..7: note = Description of Artificial Sequence: Synthetic peptide; note = XENP018256 vlCDR2
YASHRYT

SEQ ID NO: 13274 - protein, 9 aa, synthetic construct
  source 1..9: note = Description of Artificial Sequence: Synthetic peptide; note = XENP018256 vlCDR3
QQDYSSPRT

SEQ ID NO: 13275 - protein, 451 aa, synthetic construct
  source 1..451: note = Description of Artificial Sequence: Synthetic polypeptide; note = XENP018257 1G6_H1.156_L1_IgG1_PVA_/S267K Heavy Chain
EVQLVESGGGLVKPGGSLRLSCAASGFTFSNYWMNWVRQAPGKGLEWVGEIRLKSNNYATHYAEPVKGRFTISRDDSKSTAYLQMNSLKTEDTAVYYCTRYYGNYGGYFDVWGAGTLVTVSSASTKGPSVFPLAPSSKSTSGGTAALGCLVKDYFPEPVTVSWNSGALTSGVHTFPAVLQSSGLYSLSSVVTVPSSSLGTQTYICNVNHKPSNTKVDKKVEPKSCDKTHTCPPCPAPPVAGPSVFLFPPKPKDTLMISRTPEVTCVVVDVKHEDPEVKFNWYVDGVEVHNAKTKPREEQYNSTYRVVSVLTVLHQDWLNGKEYKCKVSNKALPAPIEKTISKAKGQPREPQVYTLPPSREEMTKNQVSLTCLVKGFYPSDIAVEWESNGQPENNYKTTPPVLDSDGSFFLYSKLTVDKSRWQQGNVFSCSVMHEALHNHYTQKSLSLSPGK

SEQ ID NO: 13276 - protein, 122 aa, synthetic construct; identical to SEQ ID NO: 7755
  source 1..122: note = Description of Artificial Sequence: Synthetic polypeptide; note = VH of XENP018257

SEQ ID NO: 13277 - protein, 5 aa, synthetic construct
  source 1..5: note = Description of Artificial Sequence: Synthetic peptide; note = XENP018257 vhCDR1
NYWMN

SEQ ID NO: 13278 - protein, 19 aa, synthetic construct
  source 1..19: note = Description of Artificial Sequence: Synthetic peptide; note = XENP018257 vhCDR2
EIRLKSNNYATHYAEPVKG

SEQ ID NO: 13279 - protein, 11 aa, synthetic construct
  source 1..11: note = Description of Artificial Sequence: Synthetic peptide; note = XENP018257 vhCDR3
YYGNYGGYFDV

SEQ ID NO: 13280 - protein, 214 aa, synthetic construct; identical to SEQ ID NO: 11550
  source 1..214: note = Description of Artificial Sequence: Synthetic polypeptide; note = XENP018257 1G6_H1.156_L1_IgG1_PVA_/S267K Light Chain

SEQ ID NO: 13281 - protein, 107 aa, synthetic construct; identical to SEQ ID NO: 6247
  source 1..107: note = Description of Artificial Sequence: Synthetic polypeptide; note = VL of XENP018257

SEQ ID NO: 13282 - protein, 11 aa, synthetic construct
  source 1..11: note = Description of Artificial Sequence: Synthetic peptide; note = XENP018257 vlCDR1
RASQSVSNDVA

SEQ ID NO: 13283 - protein, 7 aa, synthetic construct
  source 1..7: note = Description of Artificial Sequence: Synthetic peptide; note = XENP018257 vlCDR2
YASHRYT

SEQ ID NO: 13284 - protein, 9 aa, synthetic construct
  source 1..9: note = Description of Artificial Sequence: Synthetic peptide; note = XENP018257 vlCDR3
QQDYSSPRT

SEQ ID NO: 13285 - protein, 451 aa, synthetic construct
  source 1..451: note = Description of Artificial Sequence: Synthetic polypeptide; note = XENP018258 1G6_H1.157_L1_IgG1_PVA_/S267K Heavy Chain
EVQLVESGGGLVKPGGSLRLSCAASGFTFSNYWMNWVRQAPGKGLEWVGEIRLKSNNYATHYAEPVKGRFTISRDDSKSTVYLQMNNLKTEDTAVYYCTRYYGNYGGYFDVWGAGTLVTVSSASTKGPSVFPLAPSSKSTSGGTAALGCLVKDYFPEPVTVSWNSGALTSGVHTFPAVLQSSGLYSLSSVVTVPSSSLGTQTYICNVNHKPSNTKVDKKVEPKSCDKTHTCPPCPAPPVAGPSVFLFPPKPKDTLMISRTPEVTCVVVDVKHEDPEVKFNWYVDGVEVHNAKTKPREEQYNSTYRVVSVLTVLHQDWLNGKEYKCKVSNKALPAPIEKTISKAKGQPREPQVYTLPPSREEMTKNQVSLTCLVKGFYPSDIAVEWESNGQPENNYKTTPPVLDSDGSFFLYSKLTVDKSRWQQGNVFSCSVMHEALHNHYTQKSLSLSPGK

SEQ ID NO: 13286 - protein, 122 aa, synthetic construct; identical to SEQ ID NO: 7764
  source 1..122: note = Description of Artificial Sequence: Synthetic polypeptide; note = VH of XENP018258

SEQ ID NO: 13287 - protein, 5 aa, synthetic construct
  source 1..5: note = Description of Artificial Sequence: Synthetic peptide; note = XENP018258 vhCDR1
NYWMN

SEQ ID NO: 13288 - protein, 19 aa, synthetic construct
  source 1..19: note = Description of Artificial Sequence: Synthetic peptide; note = XENP018258 vhCDR2
EIRLKSNNYATHYAEPVKG

SEQ ID NO: 13289 - protein, 11 aa, synthetic construct
  source 1..11: note = Description of Artificial Sequence: Synthetic peptide; note = XENP018258 vhCDR3
YYGNYGGYFDV

SEQ ID NO: 13290 - protein, 214 aa, synthetic construct; identical to SEQ ID NO: 11550
  source 1..214: note = Description of Artificial Sequence: Synthetic polypeptide; note = XENP018258 1G6_H1.157_L1_IgG1_PVA_/S267K Light Chain

SEQ ID NO: 13291 - protein, 107 aa, synthetic construct; identical to SEQ ID NO: 6247
  source 1..107: note = Description of Artificial Sequence: Synthetic polypeptide; note = VL of XENP018258

SEQ ID NO: 13292 - protein, 11 aa, synthetic construct
  source 1..11: note = Description of Artificial Sequence: Synthetic peptide; note = XENP018258 vlCDR1
RASQSVSNDVA

SEQ ID NO: 13293 - protein, 7 aa, synthetic construct
  source 1..7: note = Description of Artificial Sequence: Synthetic peptide; note = XENP018258 vlCDR2
YASHRYT

SEQ ID NO: 13294 - protein, 9 aa, synthetic construct
  source 1..9: note = Description of Artificial Sequence: Synthetic peptide; note = XENP018258 vlCDR3
QQDYSSPRT

SEQ ID NO: 13295 - protein, 451 aa, synthetic construct
  source 1..451: note = Description of Artificial Sequence: Synthetic polypeptide; note = XENP018259 1G6_H1.158_L1_IgG1_PVA_/S267K Heavy Chain
EVQLVESGGGLVKPGGSLRLSCAASGFTFSNYWMNWVRQAPGKGLEWVGEIRLKSNNYATHYAEPVKGRFTISRDDSKSTVYLQMNSLRTEDTAVYYCTRYYGNYGGYFDVWGAGTLVTVSSASTKGPSVFPLAPSSKSTSGGTAALGCLVKDYFPEPVTVSWNSGALTSGVHTFPAVLQSSGLYSLSSVVTVPSSSLGTQTYICNVNHKPSNTKVDKKVEPKSCDKTHTCPPCPAPPVAGPSVFLFPPKPKDTLMISRTPEVTCVVVDVKHEDPEVKFNWYVDGVEVHNAKTKPREEQYNSTYRVVSVLTVLHQDWLNGKEYKCKVSNKALPAPIEKTISKAKGQPREPQVYTLPPSREEMTKNQVSLTCLVKGFYPSDIAVEWESNGQPENNYKTTPPVLDSDGSFFLYSKLTVDKSRWQQGNVFSCSVMHEALHNHYTQKSLSLSPGK

SEQ ID NO: 13296 - protein, 122 aa, synthetic construct; identical to SEQ ID NO: 7773
  source 1..122: note = Description of Artificial Sequence: Synthetic polypeptide; note = VH of XENP018259

SEQ ID NO: 13297 - protein, 5 aa, synthetic construct
  source 1..5: note = Description of Artificial Sequence: Synthetic peptide; note = XENP018259 vhCDR1
NYWMN

SEQ ID NO: 13298 - protein, 19 aa, synthetic construct
  source 1..19: note = Description of Artificial Sequence: Synthetic peptide; note = XENP018259 vhCDR2
EIRLKSNNYATHYAEPVKG

SEQ ID NO: 13299 - protein, 11 aa, synthetic construct
  source 1..11: note = Description of Artificial Sequence: Synthetic peptide; note = XENP018259 vhCDR3
YYGNYGGYFDV

SEQ ID NO: 13300 - protein, 214 aa, synthetic construct; identical to SEQ ID NO: 11550
  source 1..214: note = Description of Artificial Sequence: Synthetic polypeptide; note = XENP018259 1G6_H1.158_L1_IgG1_PVA_/S267K Light Chain

SEQ ID NO: 13301 - protein, 107 aa, synthetic construct; identical to SEQ ID NO: 6247
  source 1..107: note = Description of Artificial Sequence: Synthetic polypeptide; note = VL of XENP018259

SEQ ID NO: 13302 - protein, 11 aa, synthetic construct
  source 1..11: note = Description of Artificial Sequence: Synthetic peptide; note = XENP018259 vlCDR1
RASQSVSNDVA

SEQ ID NO: 13303 - protein, 7 aa, synthetic construct
  source 1..7: note = Description of Artificial Sequence: Synthetic peptide; note = XENP018259 vlCDR2
YASHRYT

SEQ ID NO: 13304 - protein, 9 aa, synthetic construct
  source 1..9: note = Description of Artificial Sequence: Synthetic peptide; note = XENP018259 vlCDR3
QQDYSSPRT

SEQ ID NO: 13305 - protein, 451 aa, synthetic construct
  source 1..451: note = Description of Artificial Sequence: Synthetic polypeptide; note = XENP018260 1G6_H1.159_L1_IgG1_PVA_/S267K Heavy Chain
EVQLVESGGGLVKPGGSLRLSCAASGFTFSNYWMNWVRQAPGKGLEWVGEIRLKSNNYATHYAEPVKGRFTISRDDSKSTVYLQMNSLKAEDTAVYYCTRYYGNYGGYFDVWGAGTLVTVSSASTKGPSVFPLAPSSKSTSGGTAALGCLVKDYFPEPVTVSWNSGALTSGVHTFPAVLQSSGLYSLSSVVTVPSSSLGTQTYICNVNHKPSNTKVDKKVEPKSCDKTHTCPPCPAPPVAGPSVFLFPPKPKDTLMISRTPEVTCVVVDVKHEDPEVKFNWYVDGVEVHNAKTKPREEQYNSTYRVVSVLTVLHQDWLNGKEYKCKVSNKALPAPIEKTISKAKGQPREPQVYTLPPSREEMTKNQVSLTCLVKGFYPSDIAVEWESNGQPENNYKTTPPVLDSDGSFFLYSKLTVDKSRWQQGNVFSCSVMHEALHNHYTQKSLSLSPGK

SEQ ID NO: 13306 - protein, 122 aa, synthetic construct; identical to SEQ ID NO: 7782
  source 1..122: note = Description of Artificial Sequence: Synthetic polypeptide; note = VH of XENP018260

SEQ ID NO: 13307 - protein, 5 aa, synthetic construct
  source 1..5: note = Description of Artificial Sequence: Synthetic peptide; note = XENP018260 vhCDR1
NYWMN

SEQ ID NO: 13308 - protein, 19 aa, synthetic construct
  source 1..19: note = Description of Artificial Sequence: Synthetic peptide; note = XENP018260 vhCDR2
EIRLKSNNYATHYAEPVKG

SEQ ID NO: 13309 - protein, 11 aa, synthetic construct
  source 1..11: note = Description of Artificial Sequence: Synthetic peptide; note = XENP018260 vhCDR3
YYGNYGGYFDV

SEQ ID NO: 13310 - protein, 214 aa, synthetic construct; identical to SEQ ID NO: 11550
  source 1..214: note = Description of Artificial Sequence: Synthetic polypeptide; note = XENP018260 1G6_H1.159_L1_IgG1_PVA_/S267K Light Chain

SEQ ID NO: 13311 - protein, 107 aa, synthetic construct; identical to SEQ ID NO: 6247
  source 1..107: note = Description of Artificial Sequence: Synthetic polypeptide; note = VL of XENP018260

SEQ ID NO: 13312 - protein, 11 aa, synthetic construct
  source 1..11: note = Description of Artificial Sequence: Synthetic peptide; note = XENP018260 vlCDR1
RASQSVSNDVA

SEQ ID NO: 13313 - protein, 7 aa, synthetic construct
  source 1..7: note = Description of Artificial Sequence: Synthetic peptide; note = XENP018260 vlCDR2
YASHRYT

SEQ ID NO: 13314 - protein, 9 aa, synthetic construct
  source 1..9: note = Description of Artificial Sequence: Synthetic peptide; note = XENP018260 vlCDR3
QQDYSSPRT

SEQ ID NO: 13315 - protein, 451 aa, synthetic construct
  source 1..451: note = Description of Artificial Sequence: Synthetic polypeptide; note = XENP018261 1G6_H1.160_L1_IgG1_PVA_/S267K Heavy Chain
EVQLVESGGGLVKPGGSLRLSCAASGFTFSNYWMNWVRQAPGKGLEWVGEIRLKSNNYATHYAEPVKGRFTISRDDSKSTVYLQMNSLKTEDTGVYYCTRYYGNYGGYFDVWGAGTLVTVSSASTKGPSVFPLAPSSKSTSGGTAALGCLVKDYFPEPVTVSWNSGALTSGVHTFPAVLQSSGLYSLSSVVTVPSSSLGTQTYICNVNHKPSNTKVDKKVEPKSCDKTHTCPPCPAPPVAGPSVFLFPPKPKDTLMISRTPEVTCVVVDVKHEDPEVKFNWYVDGVEVHNAKTKPREEQYNSTYRVVSVLTVLHQDWLNGKEYKCKVSNKALPAPIEKTISKAKGQPREPQVYTLPPSREEMTKNQVSLTCLVKGFYPSDIAVEWESNGQPENNYKTTPPVLDSDGSFFLYSKLTVDKSRWQQGNVFSCSVMHEALHNHYTQKSLSLSPGK

SEQ ID NO: 13316 - protein, 122 aa, synthetic construct; identical to SEQ ID NO: 7791
  source 1..122: note = Description of Artificial Sequence: Synthetic polypeptide; note = VH of XENP018261

SEQ ID NO: 13317 - protein, 5 aa, synthetic construct
  source 1..5: note = Description of Artificial Sequence: Synthetic peptide; note = XENP018261 vhCDR1
NYWMN

SEQ ID NO: 13318 - protein, 19 aa, synthetic construct
  source 1..19: note = Description of Artificial Sequence: Synthetic peptide; note = XENP018261 vhCDR2
EIRLKSNNYATHYAEPVKG

SEQ ID NO: 13319 - protein, 11 aa, synthetic construct
  source 1..11: note = Description of Artificial Sequence: Synthetic peptide; note = XENP018261 vhCDR3
YYGNYGGYFDV

SEQ ID NO: 13320 - protein, 214 aa, synthetic construct; identical to SEQ ID NO: 11550
  source 1..214: note = Description of Artificial Sequence: Synthetic polypeptide; note = XENP018261 1G6_H1.160_L1_IgG1_PVA_/S267K Light Chain

SEQ ID NO: 13321 - protein, 107 aa, synthetic construct; identical to SEQ ID NO: 6247
  source 1..107: note = Description of Artificial Sequence: Synthetic polypeptide; note = VL of XENP018261

SEQ ID NO: 13322 - protein, 11 aa, synthetic construct
  source 1..11: note = Description of Artificial Sequence: Synthetic peptide; note = XENP018261 vlCDR1
RASQSVSNDVA

SEQ ID NO: 13323 - protein, 7 aa, synthetic construct
  source 1..7: note = Description of Artificial Sequence: Synthetic peptide; note = XENP018261 vlCDR2
YASHRYT

SEQ ID NO: 13324 - protein, 9 aa, synthetic construct
  source 1..9: note = Description of Artificial Sequence: Synthetic peptide; note = XENP018261 vlCDR3
QQDYSSPRT

SEQ ID NO: 13325 - protein, 451 aa, synthetic construct
  source 1..451: note = Description of Artificial Sequence: Synthetic polypeptide; note = XENP018262 1G6_H1.161_L1_IgG1_PVA_/S267K Heavy Chain
EVQLVESGGGLVKPGGSLRLSCAASGFTFSNYWMNWVRQAPGKGLEWVGEIRLKSNNYATHYAEPVKGRFTISRDDSKSTVYLQMNSLKTEDTAIYYCTRYYGNYGGYFDVWGAGTLVTVSSASTKGPSVFPLAPSSKSTSGGTAALGCLVKDYFPEPVTVSWNSGALTSGVHTFPAVLQSSGLYSLSSVVTVPSSSLGTQTYICNVNHKPSNTKVDKKVEPKSCDKTHTCPPCPAPPVAGPSVFLFPPKPKDTLMISRTPEVTCVVVDVKHEDPEVKFNWYVDGVEVHNAKTKPREEQYNSTYRVVSVLTVLHQDWLNGKEYKCKVSNKALPAPIEKTISKAKGQPREPQVYTLPPSREEMTKNQVSLTCLVKGFYPSDIAVEWESNGQPENNYKTTPPVLDSDGSFFLYSKLTVDKSRWQQGNVFSCSVMHEALHNHYTQKSLSLSPGK

SEQ ID NO: 13326 - protein, 122 aa, synthetic construct; identical to SEQ ID NO: 7800
  source 1..122: note = Description of Artificial Sequence: Synthetic polypeptide; note = VH of XENP018262

SEQ ID NO: 13327 - protein, 5 aa, synthetic construct
  source 1..5: note = Description of Artificial Sequence: Synthetic peptide; note = XENP018262 vhCDR1
NYWMN

SEQ ID NO: 13328 - protein, 19 aa, synthetic construct
  source 1..19: note = Description of Artificial Sequence: Synthetic peptide; note = XENP018262 vhCDR2
EIRLKSNNYATHYAEPVKG

SEQ ID NO: 13329 - protein, 11 aa, synthetic construct
  source 1..11: note = Description of Artificial Sequence: Synthetic peptide; note = XENP018262 vhCDR3
YYGNYGGYFDV

SEQ ID NO: 13330 - protein, 214 aa, synthetic construct; identical to SEQ ID NO: 11550
  source 1..214: note = Description of Artificial Sequence: Synthetic polypeptide; note = XENP018262 1G6_H1.161_L1_IgG1_PVA_/S267K Light Chain

SEQ ID NO: 13331 - protein, 107 aa, synthetic construct; identical to SEQ ID NO: 6247
  source 1..107: note = Description of Artificial Sequence: Synthetic polypeptide; note = VL of XENP018262

SEQ ID NO: 13332 - protein, 11 aa, synthetic construct
  source 1..11: note = Description of Artificial Sequence: Synthetic peptide; note = XENP018262 vlCDR1
RASQSVSNDVA

SEQ ID NO: 13333 - protein, 7 aa, synthetic construct
  source 1..7: note = Description of Artificial Sequence: Synthetic peptide; note = XENP018262 vlCDR2
YASHRYT

SEQ ID NO: 13334 - protein, 9 aa, synthetic construct
  source 1..9: note = Description of Artificial Sequence: Synthetic peptide; note = XENP018262 vlCDR3
QQDYSSPRT

SEQ ID NO: 13335 - protein, 451 aa, synthetic construct
  source 1..451: note = Description of Artificial Sequence: Synthetic polypeptide; note = XENP018263 1G6_H1.162_L1_IgG1_PVA_/S267K Heavy Chain
EVQLVESGGGLVKPGGSLRLSCAASGFTFSNYWMNWVRQAPGKGLEWVGEIRLKSNNYATHYAEPVKGRFTISRDDSKSTVYLQMNSLKTEDTAVYHCTRYYGNYGGYFDVWGAGTLVTVSSASTKGPSVFPLAPSSKSTSGGTAALGCLVKDYFPEPVTVSWNSGALTSGVHTFPAVLQSSGLYSLSSVVTVPSSSLGTQTYICNVNHKPSNTKVDKKVEPKSCDKTHTCPPCPAPPVAGPSVFLFPPKPKDTLMISRTPEVTCVVVDVKHEDPEVKFNWYVDGVEVHNAKTKPREEQYNSTYRVVSVLTVLHQDWLNGKEYKCKVSNKALPAPIEKTISKAKGQPREPQVYTLPPSREEMTKNQVSLTCLVKGFYPSDIAVEWESNGQPENNYKTTPPVLDSDGSFFLYSKLTVDKSRWQQGNVFSCSVMHEALHNHYTQKSLSLSPGK

SEQ ID NO: 13336 - protein, 122 aa, synthetic construct; identical to SEQ ID NO: 7809
  source 1..122: note = Description of Artificial Sequence: Synthetic polypeptide; note = VH of XENP018263

SEQ ID NO: 13337 - protein, 5 aa, synthetic construct
  source 1..5: note = Description of Artificial Sequence: Synthetic peptide; note = XENP018263 vhCDR1
NYWMN

SEQ ID NO: 13338 - protein, 19 aa, synthetic construct
  source 1..19: note = Description of Artificial Sequence: Synthetic peptide; note = XENP018263 vhCDR2
EIRLKSNNYATHYAEPVKG

SEQ ID NO: 13339 - protein, 11 aa, synthetic construct
  source 1..11: note = Description of Artificial Sequence: Synthetic peptide; note = XENP018263 vhCDR3
YYGNYGGYFDV

SEQ ID NO: 13340 - protein, 214 aa, synthetic construct; identical to SEQ ID NO: 11550
  source 1..214: note = Description of Artificial Sequence: Synthetic polypeptide; note = XENP018263 1G6_H1.162_L1_IgG1_PVA_/S267K Light Chain

SEQ ID NO: 13341 - protein, 107 aa, synthetic construct; identical to SEQ ID NO: 6247
  source 1..107: note = Description of Artificial Sequence: Synthetic polypeptide; note = VL of XENP018263

SEQ ID NO: 13342 - protein, 11 aa, synthetic construct
  source 1..11: note = Description of Artificial Sequence: Synthetic peptide; note = XENP018263 vlCDR1
RASQSVSNDVA

SEQ ID NO: 13343 - protein, 7 aa, synthetic construct
  source 1..7: note = Description of Artificial Sequence: Synthetic peptide; note = XENP018263 vlCDR2
YASHRYT

SEQ ID NO: 13344 - protein, 9 aa, synthetic construct
  source 1..9: note = Description of Artificial Sequence: Synthetic peptide; note = XENP018263 vlCDR3
QQDYSSPRT

SEQ ID NO: 13345 - protein, 451 aa, synthetic construct
  source 1..451: note = Description of Artificial Sequence: Synthetic polypeptide; note = XENP018264 1G6_H1.163_L1_IgG1_PVA_/S267K Heavy Chain
EVQLVESGGGLVKPGGSLRLSCAASGFTFSNYWMNWVRQAPGKGLEWVGEIRLKSNNYATHYAEPVKGRFTISRDDSKSTVYLQMNSLKTEDTAVYYCARYYGNYGGYFDVWGAGTLVTVSSASTKGPSVFPLAPSSKSTSGGTAALGCLVKDYFPEPVTVSWNSGALTSGVHTFPAVLQSSGLYSLSSVVTVPSSSLGTQTYICNVNHKPSNTKVDKKVEPKSCDKTHTCPPCPAPPVAGPSVFLFPPKPKDTLMISRTPEVTCVVVDVKHEDPEVKFNWYVDGVEVHNAKTKPREEQYNSTYRVVSVLTVLHQDWLNGKEYKCKVSNKALPAPIEKTISKAKGQPREPQVYTLPPSREEMTKNQVSLTCLVKGFYPSDIAVEWESNGQPENNYKTTPPVLDSDGSFFLYSKLTVDKSRWQQGNVFSCSVMHEALHNHYTQKSLSLSPGK

SEQ ID NO: 13346 - protein, 122 aa, synthetic construct; identical to SEQ ID NO: 7818
  source 1..122: note = Description of Artificial Sequence: Synthetic polypeptide; note = VH of XENP018264

SEQ ID NO: 13347 - protein, 5 aa, synthetic construct
  source 1..5: note = Description of Artificial Sequence: Synthetic peptide; note = XENP018264 vhCDR1
NYWMN

SEQ ID NO: 13348 - protein, 19 aa, synthetic construct
  source 1..19: note = Description of Artificial Sequence: Synthetic peptide; note = XENP018264 vhCDR2
EIRLKSNNYATHYAEPVKG

SEQ ID NO: 13349 - protein, 11 aa, synthetic construct
  source 1..11: note = Description of Artificial Sequence: Synthetic peptide; note = XENP018264 vhCDR3
YYGNYGGYFDV

SEQ ID NO: 13350 - protein, 214 aa, synthetic construct; identical to SEQ ID NO: 11550
  source 1..214: note = Description of Artificial Sequence: Synthetic polypeptide; note = XENP018264 1G6_H1.163_L1_IgG1_PVA_/S267K Light Chain

SEQ ID NO: 13351 - protein, 107 aa, synthetic construct; identical to SEQ ID NO: 6247
  source 1..107: note = Description of Artificial Sequence: Synthetic polypeptide; note = VL of XENP018264

SEQ ID NO: 13352 - protein, 11 aa, synthetic construct
  source 1..11: note = Description of Artificial Sequence: Synthetic peptide; note = XENP018264 vlCDR1
RASQSVSNDVA

SEQ ID NO: 13353 - protein, 7 aa, synthetic construct
  source 1..7: note = Description of Artificial Sequence: Synthetic peptide; note = XENP018264 vlCDR2
YASHRYT

SEQ ID NO: 13354 - protein, 9 aa, synthetic construct
  source 1..9: note = Description of Artificial Sequence: Synthetic peptide; note = XENP018264 vlCDR3
QQDYSSPRT

SEQ ID NO: 13355 - protein, 451 aa, synthetic construct
  source 1..451: note = Description of Artificial Sequence: Synthetic polypeptide; note = XENP018265 1G6_H1.164_L1_IgG1_PVA_/S267K Heavy Chain
EVQLVESGGGLVKPGGSLRLSCAASGFTFSNYWMNWVRQAPGKGLEWVGEIRLKSNNYATHYAEPVKGRFTISRDDSKSTVYLQMNSLKTEDTAVYYCVRYYGNYGGYFDVWGAGTLVTVSSASTKGPSVFPLAPSSKSTSGGTAALGCLVKDYFPEPVTVSWNSGALTSGVHTFPAVLQSSGLYSLSSVVTVPSSSLGTQTYICNVNHKPSNTKVDKKVEPKSCDKTHTCPPCPAPPVAGPSVFLFPPKPKDTLMISRTPEVTCVVVDVKHEDPEVKFNWYVDGVEVHNAKTKPREEQYNSTYRVVSVLTVLHQDWLNGKEYKCKVSNKALPAPIEKTISKAKGQPREPQVYTLPPSREEMTKNQVSLTCLVKGFYPSDIAVEWESNGQPENNYKTTPPVLDSDGSFFLYSKLTVDKSRWQQGNVFSCSVMHEALHNHYTQKSLSLSPGK

SEQ ID NO: 13356 - protein, 122 aa, synthetic construct; identical to SEQ ID NO: 7827
  source 1..122: note = Description of Artificial Sequence: Synthetic polypeptide; note = VH of XENP018265

SEQ ID NO: 13357 - protein, 5 aa, synthetic construct
  source 1..5: note = Description of Artificial Sequence: Synthetic peptide; note = XENP018265 vhCDR1
NYWMN

SEQ ID NO: 13358 - protein, 19 aa, synthetic construct
  source 1..19: note = Description of Artificial Sequence: Synthetic peptide; note = XENP018265 vhCDR2
EIRLKSNNYATHYAEPVKG

SEQ ID NO: 13359 - protein, 11 aa, synthetic construct
  source 1..11: note = Description of Artificial Sequence: Synthetic peptide; note = XENP018265 vhCDR3
YYGNYGGYFDV

SEQ ID NO: 13360 - protein, 214 aa, synthetic construct; identical to SEQ ID NO: 11550
  source 1..214: note = Description of Artificial Sequence: Synthetic polypeptide; note = XENP018265 1G6_H1.164_L1_IgG1_PVA_/S267K Light Chain

SEQ ID NO: 13361 - protein, 107 aa, synthetic construct; identical to SEQ ID NO: 6247
  source 1..107: note = Description of Artificial Sequence: Synthetic polypeptide; note = VL of XENP018265

SEQ ID NO: 13362 - protein, 11 aa, synthetic construct
  source 1..11: note = Description of Artificial Sequence: Synthetic peptide; note = XENP018265 vlCDR1
RASQSVSNDVA

SEQ ID NO: 13363 - protein, 7 aa, synthetic construct
  source 1..7: note = Description of Artificial Sequence: Synthetic peptide; note = XENP018265 vlCDR2
YASHRYT

SEQ ID NO: 13364 - protein, 9 aa, synthetic construct
  source 1..9: note = Description of Artificial Sequence: Synthetic peptide; note = XENP018265 vlCDR3
QQDYSSPRT

SEQ ID NO: 13365 - protein, 451 aa, synthetic construct
  source 1..451: note = Description of Artificial Sequence: Synthetic polypeptide; note = XENP018266 1G6_H1.165_L1_IgG1_PVA_/S267K Heavy Chain
EVQLVESGGGLVKPGGSLRLSCAASGFTFSNYWMNWVRQAPGKGLEWVGEIRLKSNNYATHYAEPVKGRFTISRDDSKSTVYLQMNSLKTEDTAVYYCTTYYGNYGGYFDVWGAGTLVTVSSASTKGPSVFPLAPSSKSTSGGTAALGCLVKDYFPEPVTVSWNSGALTSGVHTFPAVLQSSGLYSLSSVVTVPSSSLGTQTYICNVNHKPSNTKVDKKVEPKSCDKTHTCPPCPAPPVAGPSVFLFPPKPKDTLMISRTPEVTCVVVDVKHEDPEVKFNWYVDGVEVHNAKTKPREEQYNSTYRVVSVLTVLHQDWLNGKEYKCKVSNKALPAPIEKTISKAKGQPREPQVYTLPPSREEMTKNQVSLTCLVKGFYPSDIAVEWESNGQPENNYKTTPPVLDSDGSFFLYSKLTVDKSRWQQGNVFSCSVMHEALHNHYTQKSLSLSPGK

SEQ ID NO: 13366 - protein, 122 aa, synthetic construct; identical to SEQ ID NO: 7836
  source 1..122: note = Description of Artificial Sequence: Synthetic polypeptide; note = VH of XENP018266

SEQ ID NO: 13367 - protein, 5 aa, synthetic construct
  source 1..5: note = Description of Artificial Sequence: Synthetic peptide; note = XENP018266 vhCDR1
NYWMN

SEQ ID NO: 13368 - protein, 19 aa, synthetic construct
  source 1..19: note = Description of Artificial Sequence: Synthetic peptide; note = XENP018266 vhCDR2
EIRLKSNNYATHYAEPVKG

SEQ ID NO: 13369 - protein, 11 aa, synthetic construct
  source 1..11: note = Description of Artificial Sequence: Synthetic peptide; note = XENP018266 vhCDR3
YYGNYGGYFDV

SEQ ID NO: 13370 - protein, 214 aa, synthetic construct; identical to SEQ ID NO: 11550
  source 1..214: note = Description of Artificial Sequence: Synthetic polypeptide; note = XENP018266 1G6_H1.165_L1_IgG1_PVA_/S267K Light Chain

SEQ ID NO: 13371 - protein, 107 aa, synthetic construct; identical to SEQ ID NO: 6247
  source 1..107: note = Description of Artificial Sequence: Synthetic polypeptide; note = VL of XENP018266

SEQ ID NO: 13372 - protein, 11 aa, synthetic construct
  source 1..11: note = Description of Artificial Sequence: Synthetic peptide; note = XENP018266 vlCDR1
RASQSVSNDVA

SEQ ID NO: 13373 - protein, 7 aa, synthetic construct
  source 1..7: note = Description of Artificial Sequence: Synthetic peptide; note = XENP018266 vlCDR2
YASHRYT

SEQ ID NO: 13374 - protein, 9 aa, synthetic construct
  source 1..9: note = Description of Artificial Sequence: Synthetic peptide; note = XENP018266 vlCDR3
QQDYSSPRT

SEQ ID NO: 13375 - protein, 451 aa, synthetic construct
  source 1..451: note = Description of Artificial Sequence: Synthetic polypeptide; note = XENP018267 1G6_H1.166_L1_IgG1_PVA_/S267K Heavy Chain
EVQLVESGGGLVKPGGSLRLSCAASGFTFSNYWMNWVRQAPGKGLEWVGEIRLKSNNYATHYAEPVKGRFTISRDDSKSTVYLQMNSLKTEDTAVYYCTKYYGNYGGYFDVWGAGTLVTVSSASTKGPSVFPLAPSSKSTSGGTAALGCLVKDYFPEPVTVSWNSGALTSGVHTFPAVLQSSGLYSLSSVVTVPSSSLGTQTYICNVNHKPSNTKVDKKVEPKSCDKTHTCPPCPAPPVAGPSVFLFPPKPKDTLMISRTPEVTCVVVDVKHEDPEVKFNWYVDGVEVHNAKTKPREEQYNSTYRVVSVLTVLHQDWLNGKEYKCKVSNKALPAPIEKTISKAKGQPREPQVYTLPPSREEMTKNQVSLTCLVKGFYPSDIAVEWESNGQPENNYKTTPPVLDSDGSFFLYSKLTVDKSRWQQGNVFSCSVMHEALHNHYTQKSLSLSPGK

SEQ ID NO: 13376 - protein, 122 aa, synthetic construct; identical to SEQ ID NO: 7845
  source 1..122: note = Description of Artificial Sequence: Synthetic polypeptide; note = VH of XENP018267

SEQ ID NO: 13377 - protein, 5 aa, synthetic construct
  source 1..5: note = Description of Artificial Sequence: Synthetic peptide; note = XENP018267 vhCDR1
NYWMN

SEQ ID NO: 13378 - protein, 19 aa, synthetic construct
  source 1..19: note = Description of Artificial Sequence: Synthetic peptide; note = XENP018267 vhCDR2
EIRLKSNNYATHYAEPVKG

SEQ ID NO: 13379 - protein, 11 aa, synthetic construct
  source 1..11: note = Description of Artificial Sequence: Synthetic peptide; note = XENP018267 vhCDR3
YYGNYGGYFDV

SEQ ID NO: 13380 - protein, 214 aa, synthetic construct; identical to SEQ ID NO: 11550
  source 1..214: note = Description of Artificial Sequence: Synthetic polypeptide; note = XENP018267 1G6_H1.166_L1_IgG1_PVA_/S267K Light Chain

SEQ ID NO: 13381 - protein, 107 aa, synthetic construct; identical to SEQ ID NO: 6247
  source 1..107: note = Description of Artificial Sequence: Synthetic polypeptide; note = VL of XENP018267

SEQ ID NO: 13382 - protein, 11 aa, synthetic construct
  source 1..11: note = Description of Artificial Sequence: Synthetic peptide; note = XENP018267 vlCDR1
RASQSVSNDVA

SEQ ID NO: 13383 - protein, 7 aa, synthetic construct
  source 1..7: note = Description of Artificial Sequence: Synthetic peptide; note = XENP018267 vlCDR2
YASHRYT

SEQ ID NO: 13384 - protein, 9 aa, synthetic construct
  source 1..9: note = Description of Artificial Sequence: Synthetic peptide; note = XENP018267 vlCDR3
QQDYSSPRT

SEQ ID NO: 13385 - protein, 451 aa, synthetic construct
  source 1..451: note = Description of Artificial Sequence: Synthetic polypeptide; note = XENP018268 1G6_H1.167_L1_IgG1_PVA_/S267K Heavy Chain
EVQLVESGGGLVKPGGSLRLSCAASGFTFSNYWMNWVRQAPGKGLEWVGEIRLKSNNYATHYAEPVKGRFTISRDDSKSTVYLQMNSLKTEDTAVYYCTRFYGNYGGYFDVWGAGTLVTVSSASTKGPSVFPLAPSSKSTSGGTAALGCLVKDYFPEPVTVSWNSGALTSGVHTFPAVLQSSGLYSLSSVVTVPSSSLGTQTYICNVNHKPSNTKVDKKVEPKSCDKTHTCPPCPAPPVAGPSVFLFPPKPKDTLMISRTPEVTCVVVDVKHEDPEVKFNWYVDGVEVHNAKTKPREEQYNSTYRVVSVLTVLHQDWLNGKEYKCKVSNKALPAPIEKTISKAKGQPREPQVYTLPPSREEMTKNQVSLTCLVKGFYPSDIAVEWESNGQPENNYKTTPPVLDSDGSFFLYSKLTVDKSRWQQGNVFSCSVMHEALHNHYTQKSLSLSPGK

SEQ ID NO: 13386 - protein, 122 aa, synthetic construct; identical to SEQ ID NO: 7854
  source 1..122: note = Description of Artificial Sequence: Synthetic polypeptide; note = VH of XENP018268

SEQ ID NO: 13387 - protein, 5 aa, synthetic construct
  source 1..5: note = Description of Artificial Sequence: Synthetic peptide; note = XENP018268 vhCDR1
NYWMN

SEQ ID NO: 13388 - protein, 19 aa, synthetic construct
  source 1..19: note = Description of Artificial Sequence: Synthetic peptide; note = XENP018268 vhCDR2
EIRLKSNNYATHYAEPVKG

SEQ ID NO: 13389 - protein, 11 aa, synthetic construct
  source 1..11: note = Description of Artificial Sequence: Synthetic peptide; note = XENP018268 vhCDR3
FYGNYGGYFDV

SEQ ID NO: 13390 - protein, 214 aa, synthetic construct; identical to SEQ ID NO: 11550
  source 1..214: note = Description of Artificial Sequence: Synthetic polypeptide; note = XENP018268 1G6_H1.167_L1_IgG1_PVA_/S267K Light Chain

SEQ ID NO: 13391 - protein, 107 aa, synthetic construct; identical to SEQ ID NO: 6247
  source 1..107: note = Description of Artificial Sequence: Synthetic polypeptide; note = VL of XENP018268

SEQ ID NO: 13392 - protein, 11 aa, synthetic construct
  source 1..11: note = Description of Artificial Sequence: Synthetic peptide; note = XENP018268 vlCDR1
RASQSVSNDVA

SEQ ID NO: 13393 - protein, 7 aa, synthetic construct
  source 1..7: note = Description of Artificial Sequence: Synthetic peptide; note = XENP018268 vlCDR2
YASHRYT

SEQ ID NO: 13394 - protein, 9 aa, synthetic construct
  source 1..9: note = Description of Artificial Sequence: Synthetic peptide; note = XENP018268 vlCDR3
QQDYSSPRT

SEQ ID NO: 13395 - protein, 451 aa, synthetic construct
  source 1..451: note = Description of Artificial Sequence: Synthetic polypeptide; note = XENP018269 1G6_H1.168_L1_IgG1_PVA_/S267K Heavy Chain
EVQLVESGGGLVKPGGSLRLSCAASGFTFSNYWMNWVRQAPGKGLEWVGEIRLKSNNYATHYAEPVKGRFTISRDDSKSTVYLQMNSLKTEDTAVYYCTRHYGNYGGYFDVWGAGTLVTVSSASTKGPSVFPLAPSSKSTSGGTAALGCLVKDYFPEPVTVSWNSGALTSGVHTFPAVLQSSGLYSLSSVVTVPSSSLGTQTYICNVNHKPSNTKVDKKVEPKSCDKTHTCPPCPAPPVAGPSVFLFPPKPKDTLMISRTPEVTCVVVDVKHEDPEVKFNWYVDGVEVHNAKTKPREEQYNSTYRVVSVLTVLHQDWLNGKEYKCKVSNKALPAPIEKTISKAKGQPREPQVYTLPPSREEMTKNQVSLTCLVKGFYPSDIAVEWESNGQPENNYKTTPPVLDSDGSFFLYSKLTVDKSRWQQGNVFSCSVMHEALHNHYTQKSLSLSPGK

SEQ ID NO: 13396 - protein, 122 aa, synthetic construct; identical to SEQ ID NO: 7863
  source 1..122: note = Description of Artificial Sequence: Synthetic polypeptide; note = VH of XENP018269

SEQ ID NO: 13397 - protein, 5 aa, synthetic construct
  source 1..5: note = Description of Artificial Sequence: Synthetic peptide; note = XENP018269 vhCDR1
NYWMN

SEQ ID NO: 13398 - protein, 19 aa, synthetic construct
  source 1..19: note = Description of Artificial Sequence: Synthetic peptide; note = XENP018269 vhCDR2
EIRLKSNNYATHYAEPVKG

SEQ ID NO: 13399 - protein, 11 aa, synthetic construct
  source 1..11: note = Description of Artificial Sequence: Synthetic peptide; note = XENP018269 vhCDR3
HYGNYGGYFDV

SEQ ID NO: 13400 - protein, 214 aa, synthetic construct; identical to SEQ ID NO: 11550
  source 1..214: note = Description of Artificial Sequence: Synthetic polypeptide; note = XENP018269 1G6_H1.168_L1_IgG1_PVA_/S267K Light Chain

SEQ ID NO: 13401 - protein, 107 aa, synthetic construct; identical to SEQ ID NO: 6247
  source 1..107: note = Description of Artificial Sequence: Synthetic polypeptide; note = VL of XENP018269

SEQ ID NO: 13402 - protein, 11 aa, synthetic construct
  source 1..11: note = Description of Artificial Sequence: Synthetic peptide; note = XENP018269 vlCDR1
RASQSVSNDVA

SEQ ID NO: 13403 - protein, 7 aa, synthetic construct
  source 1..7: note = Description of Artificial Sequence: Synthetic peptide; note = XENP018269 vlCDR2
YASHRYT

SEQ ID NO: 13404 - protein, 9 aa, synthetic construct
  source 1..9: note = Description of Artificial Sequence: Synthetic peptide; note = XENP018269 vlCDR3
QQDYSSPRT

SEQ ID NO: 13405 - protein, 451 aa, synthetic construct
  source 1..451: note = Description of Artificial Sequence: Synthetic polypeptide; note = XENP018270 1G6_H1.169_L1_IgG1_PVA_/S267K Heavy Chain
EVQLVESGGGLVKPGGSLRLSCAASGFTFSNYWMNWVRQAPGKGLEWVGEIRLKSNNYATHYAEPVKGRFTISRDDSKSTVYLQMNSLKTEDTAVYYCTRLYGNYGGYFDVWGAGTLVTVSSASTKGPSVFPLAPSSKSTSGGTAALGCLVKDYFPEPVTVSWNSGALTSGVHTFPAVLQSSGLYSLSSVVTVPSSSLGTQTYICNVNHKPSNTKVDKKVEPKSCDKTHTCPPCPAPPVAGPSVFLFPPKPKDTLMISRTPEVTCVVVDVKHEDPEVKFNWYVDGVEVHNAKTKPREEQYNSTYRVVSVLTVLHQDWLNGKEYKCKVSNKALPAPIEKTISKAKGQPREPQVYTLPPSREEMTKNQVSLTCLVKGFYPSDIAVEWESNGQPENNYKTTPPVLDSDGSFFLYSKLTVDKSRWQQGNVFSCSVMHEALHNHYTQKSLSLSPGK

SEQ ID NO: 13406 - protein, 122 aa, synthetic construct; identical to SEQ ID NO: 7872
  source 1..122: note = Description of Artificial Sequence: Synthetic polypeptide; note = VH of XENP018270

SEQ ID NO: 13407 - protein, 5 aa, synthetic construct
  source 1..5: note = Description of Artificial Sequence: Synthetic peptide; note = XENP018270 vhCDR1
NYWMN

SEQ ID NO: 13408 - protein, 19 aa, synthetic construct
  source 1..19: note = Description of Artificial Sequence: Synthetic peptide; note = XENP018270 vhCDR2
EIRLKSNNYATHYAEPVKG

SEQ ID NO: 13409 - protein, 11 aa, synthetic construct
  source 1..11: note = Description of Artificial Sequence: Synthetic peptide; note = XENP018270 vhCDR3
LYGNYGGYFDV

SEQ ID NO: 13410 - protein, 214 aa, synthetic construct; identical to SEQ ID NO: 11550
  source 1..214: note = Description of Artificial Sequence: Synthetic polypeptide; note = XENP018270 1G6_H1.169_L1_IgG1_PVA_/S267K Light Chain

SEQ ID NO: 13411 - protein, 107 aa, synthetic construct; identical to SEQ ID NO: 6247
  source 1..107: note = Description of Artificial Sequence: Synthetic polypeptide; note = VL of XENP018270

SEQ ID NO: 13412 - protein, 11 aa, synthetic construct
  source 1..11: note = Description of Artificial Sequence: Synthetic peptide; note = XENP018270 vlCDR1
RASQSVSNDVA

SEQ ID NO: 13413 - protein, 7 aa, synthetic construct
  source 1..7: note = Description of Artificial Sequence: Synthetic peptide; note = XENP018270 vlCDR2
YASHRYT

SEQ ID NO: 13414 - protein, 9 aa, synthetic construct
  source 1..9: note = Description of Artificial Sequence: Synthetic peptide; note = XENP018270 vlCDR3
QQDYSSPRT

SEQ ID NO: 13415 - protein, 451 aa, synthetic construct
  source 1..451: note = Description of Artificial Sequence: Synthetic polypeptide; note = XENP018271 1G6_H1.170_L1_IgG1_PVA_/S267K Heavy Chain
EVQLVESGGGLVKPGGSLRLSCAASGFTFSNYWMNWVRQAPGKGLEWVGEIRLKSNNYATHYAEPVKGRFTISRDDSKSTVYLQMNSLKTEDTAVYYCTRWYGNYGGYFDVWGAGTLVTVSSASTKGPSVFPLAPSSKSTSGGTAALGCLVKDYFPEPVTVSWNSGALTSGVHTFPAVLQSSGLYSLSSVVTVPSSSLGTQTYICNVNHKPSNTKVDKKVEPKSCDKTHTCPPCPAPPVAGPSVFLFPPKPKDTLMISRTPEVTCVVVDVKHEDPEVKFNWYVDGVEVHNAKTKPREEQYNSTYRVVSVLTVLHQDWLNGKEYKCKVSNKALPAPIEKTISKAKGQPREPQVYTLPPSREEMTKNQVSLTCLVKGFYPSDIAVEWESNGQPENNYKTTPPVLDSDGSFFLYSKLTVDKSRWQQGNVFSCSVMHEALHNHYTQKSLSLSPGK

SEQ ID NO: 13416 - protein, 122 aa, synthetic construct; identical to SEQ ID NO: 7881
  source 1..122: note = Description of Artificial Sequence: Synthetic polypeptide; note = VH of XENP018271

SEQ ID NO: 13417 - protein, 5 aa, synthetic construct
  source 1..5: note = Description of Artificial Sequence: Synthetic peptide; note = XENP018271 vhCDR1
NYWMN

SEQ ID NO: 13418 - protein, 19 aa, synthetic construct
  source 1..19: note = Description of Artificial Sequence: Synthetic peptide; note = XENP018271 vhCDR2
EIRLKSNNYATHYAEPVKG

SEQ ID NO: 13419 - protein, 11 aa, synthetic construct
  source 1..11: note = Description of Artificial Sequence: Synthetic peptide; note = XENP018271 vhCDR3
WYGNYGGYFDV

SEQ ID NO: 13420 - protein, 214 aa, synthetic construct; identical to SEQ ID NO: 11550
  source 1..214: note = Description of Artificial Sequence: Synthetic polypeptide; note = XENP018271 1G6_H1.170_L1_IgG1_PVA_/S267K Light Chain

SEQ ID NO: 13421 - protein, 107 aa, synthetic construct; identical to SEQ ID NO: 6247
  source 1..107: note = Description of Artificial Sequence: Synthetic polypeptide; note = VL of XENP018271

SEQ ID NO: 13422 - protein, 11 aa, synthetic construct
  source 1..11: note = Description of Artificial Sequence: Synthetic peptide; note = XENP018271 vlCDR1
RASQSVSNDVA

SEQ ID NO: 13423 - protein, 7 aa, synthetic construct
  source 1..7: note = Description of Artificial Sequence: Synthetic peptide; note = XENP018271 vlCDR2
YASHRYT

SEQ ID NO: 13424 - protein, 9 aa, synthetic construct
  source 1..9: note = Description of Artificial Sequence: Synthetic peptide; note = XENP018271 vlCDR3
QQDYSSPRT

SEQ ID NO: 13425 - protein, 451 aa, synthetic construct
  source 1..451: note = Description of Artificial Sequence: Synthetic polypeptide; note = XENP018272 1G6_H1.171_L1_IgG1_PVA_/S267K Heavy Chain
EVQLVESGGGLVKPGGSLRLSCAASGFTFSNYWMNWVRQAPGKGLEWVGEIRLKSNNYATHYAEPVKGRFTISRDDSKSTVYLQMNSLKTEDTAVYYCTRVYGNYGGYFDVWGAGTLVTVSSASTKGPSVFPLAPSSKSTSGGTAALGCLVKDYFPEPVTVSWNSGALTSGVHTFPAVLQSSGLYSLSSVVTVPSSSLGTQTYICNVNHKPSNTKVDKKVEPKSCDKTHTCPPCPAPPVAGPSVFLFPPKPKDTLMISRTPEVTCVVVDVKHEDPEVKFNWYVDGVEVHNAKTKPREEQYNSTYRVVSVLTVLHQDWLNGKEYKCKVSNKALPAPIEKTISKAKGQPREPQVYTLPPSREEMTKNQVSLTCLVKGFYPSDIAVEWESNGQPENNYKTTPPVLDSDGSFFLYSKLTVDKSRWQQGNVFSCSVMHEALHNHYTQKSLSLSPGK

SEQ ID NO: 13426 - protein, 122 aa, synthetic construct; identical to SEQ ID NO: 7890
  source 1..122: note = Description of Artificial Sequence: Synthetic polypeptide; note = VH of XENP018272

SEQ ID NO: 13427 - protein, 5 aa, synthetic construct
  source 1..5: note = Description of Artificial Sequence: Synthetic peptide; note = XENP018272 vhCDR1
NYWMN

SEQ ID NO: 13428 - protein, 19 aa, synthetic construct
  source 1..19: note = Description of Artificial Sequence: Synthetic peptide; note = XENP018272 vhCDR2
EIRLKSNNYATHYAEPVKG

SEQ ID NO: 13429 - protein, 11 aa, synthetic construct
  source 1..11: note = Description of Artificial Sequence: Synthetic peptide; note = XENP018272 vhCDR3
VYGNYGGYFDV

SEQ ID NO: 13430 - protein, 214 aa, synthetic construct; identical to SEQ ID NO: 11550
  source 1..214: note = Description of Artificial Sequence: Synthetic polypeptide; note = XENP018272 1G6_H1.171_L1_IgG1_PVA_/S267K Light Chain

SEQ ID NO: 13431 - protein, 107 aa, synthetic construct; identical to SEQ ID NO: 6247
  source 1..107: note = Description of Artificial Sequence: Synthetic polypeptide; note = VL of XENP018272

SEQ ID NO: 13432 - protein, 11 aa, synthetic construct
  source 1..11: note = Description of Artificial Sequence: Synthetic peptide; note = XENP018272 vlCDR1
RASQSVSNDVA

SEQ ID NO: 13433 - protein, 7 aa, synthetic construct
  source 1..7: note = Description of Artificial Sequence: Synthetic peptide; note = XENP018272 vlCDR2
YASHRYT

SEQ ID NO: 13434 - protein, 9 aa, synthetic construct
  source 1..9: note = Description of Artificial Sequence: Synthetic peptide; note = XENP018272 vlCDR3
QQDYSSPRT

SEQ ID NO: 13435 - protein, 451 aa, synthetic construct
  source 1..451: note = Description of Artificial Sequence: Synthetic polypeptide; note = XENP018273 1G6_H1.172_L1_IgG1_PVA_/S267K Heavy Chain
EVQLVESGGGLVKPGGSLRLSCAASGFTFSNYWMNWVRQAPGKGLEWVGEIRLKSNNYATHYAEPVKGRFTISRDDSKSTVYLQMNSLKTEDTAVYYCTRAYGNYGGYFDVWGAGTLVTVSSASTKGPSVFPLAPSSKSTSGGTAALGCLVKDYFPEPVTVSWNSGALTSGVHTFPAVLQSSGLYSLSSVVTVPSSSLGTQTYICNVNHKPSNTKVDKKVEPKSCDKTHTCPPCPAPPVAGPSVFLFPPKPKDTLMISRTPEVTCVVVDVKHEDPEVKFNWYVDGVEVHNAKTKPREEQYNSTYRVVSVLTVLHQDWLNGKEYKCKVSNKALPAPIEKTISKAKGQPREPQVYTLPPSREEMTKNQVSLTCLVKGFYPSDIAVEWESNGQPENNYKTTPPVLDSDGSFFLYSKLTVDKSRWQQGNVFSCSVMHEALHNHYTQKSLSLSPGK

SEQ ID NO: 13436 - protein, 122 aa, synthetic construct; identical to SEQ ID NO: 7899
  source 1..122: note = Description of Artificial Sequence: Synthetic polypeptide; note = VH of XENP018273

SEQ ID NO: 13437 - protein, 5 aa, synthetic construct
  source 1..5: note = Description of Artificial Sequence: Synthetic peptide; note = XENP018273 vhCDR1
NYWMN

SEQ ID NO: 13438 - protein, 19 aa, synthetic construct
  source 1..19: note = Description of Artificial Sequence: Synthetic peptide; note = XENP018273 vhCDR2
EIRLKSNNYATHYAEPVKG

SEQ ID NO: 13439 - protein, 11 aa, synthetic construct
  source 1..11: note = Description of Artificial Sequence: Synthetic peptide; note = XENP018273 vhCDR3
AYGNYGGYFDV

SEQ ID NO: 13440 - protein, 214 aa, synthetic construct; identical to SEQ ID NO: 11550
  source 1..214: note = Description of Artificial Sequence: Synthetic polypeptide; note = XENP018273 1G6_H1.172_L1_IgG1_PVA_/S267K Light Chain

SEQ ID NO: 13441 - protein, 107 aa, synthetic construct; identical to SEQ ID NO: 6247
  source 1..107: note = Description of Artificial Sequence: Synthetic polypeptide; note = VL of XENP018273

SEQ ID NO: 13442 - protein, 11 aa, synthetic construct
  source 1..11: note = Description of Artificial Sequence: Synthetic peptide; note = XENP018273 vlCDR1
RASQSVSNDVA

SEQ ID NO: 13443 - protein, 7 aa, synthetic construct
  source 1..7: note = Description of Artificial Sequence: Synthetic peptide; note = XENP018273 vlCDR2
YASHRYT

SEQ ID NO: 13444 - protein, 9 aa, synthetic construct
  source 1..9: note = Description of Artificial Sequence: Synthetic peptide; note = XENP018273 vlCDR3
QQDYSSPRT

SEQ ID NO: 13445 - protein, 451 aa, synthetic construct
  source 1..451: note = Description of Artificial Sequence: Synthetic polypeptide; note = XENP018274 1G6_H1.173_L1_IgG1_PVA_/S267K Heavy Chain
EVQLVESGGGLVKPGGSLRLSCAASGFTFSNYWMNWVRQAPGKGLEWVGEIRLKSNNYATHYAEPVKGRFTISRDDSKSTVYLQMNSLKTEDTAVYYCTRQYGNYGGYFDVWGAGTLVTVSSASTKGPSVFPLAPSSKSTSGGTAALGCLVKDYFPEPVTVSWNSGALTSGVHTFPAVLQSSGLYSLSSVVTVPSSSLGTQTYICNVNHKPSNTKVDKKVEPKSCDKTHTCPPCPAPPVAGPSVFLFPPKPKDTLMISRTPEVTCVVVDVKHEDPEVKFNWYVDGVEVHNAKTKPREEQYNSTYRVVSVLTVLHQDWLNGKEYKCKVSNKALPAPIEKTISKAKGQPREPQVYTLPPSREEMTKNQVSLTCLVKGFYPSDIAVEWESNGQPENNYKTTPPVLDSDGSFFLYSKLTVDKSRWQQGNVFSCSVMHEALHNHYTQKSLSLSPGK

SEQ ID NO: 13446 - protein, 122 aa, synthetic construct; identical to SEQ ID NO: 7908
  source 1..122: note = Description of Artificial Sequence: Synthetic polypeptide; note = VH of XENP018274

SEQ ID NO: 13447 - protein, 5 aa, synthetic construct
  source 1..5: note = Description of Artificial Sequence: Synthetic peptide; note = XENP018274 vhCDR1
NYWMN

SEQ ID NO: 13448 - protein, 19 aa, synthetic construct
  source 1..19: note = Description of Artificial Sequence: Synthetic peptide; note = XENP018274 vhCDR2
EIRLKSNNYATHYAEPVKG

SEQ ID NO: 13449 - protein, 11 aa, synthetic construct
  source 1..11: note = Description of Artificial Sequence: Synthetic peptide; note = XENP018274 vhCDR3
QYGNYGGYFDV

SEQ ID NO: 13450 - protein, 214 aa, synthetic construct; identical to SEQ ID NO: 11550
  source 1..214: note = Description of Artificial Sequence: Synthetic polypeptide; note = XENP018274 1G6_H1.173_L1_IgG1_PVA_/S267K Light Chain

SEQ ID NO: 13451 - protein, 107 aa, synthetic construct; identical to SEQ ID NO: 6247
  source 1..107: note = Description of Artificial Sequence: Synthetic polypeptide; note = VL of XENP018274

SEQ ID NO: 13452 - protein, 11 aa, synthetic construct
  source 1..11: note = Description of Artificial Sequence: Synthetic peptide; note = XENP018274 vlCDR1
RASQSVSNDVA

SEQ ID NO: 13453 - protein, 7 aa, synthetic construct
  source 1..7: note = Description of Artificial Sequence: Synthetic peptide; note = XENP018274 vlCDR2
YASHRYT

SEQ ID NO: 13454 - protein, 9 aa, synthetic construct
  source 1..9: note = Description of Artificial Sequence: Synthetic peptide; note = XENP018274 vlCDR3
QQDYSSPRT

SEQ ID NO: 13455 - protein, 451 aa, synthetic construct
  source 1..451: note = Description of Artificial Sequence: Synthetic polypeptide; note = XENP018275 1G6_H1.174_L1_IgG1_PVA_/S267K Heavy Chain
EVQLVESGGGLVKPGGSLRLSCAASGFTFSNYWMNWVRQAPGKGLEWVGEIRLKSNNYATHYAEPVKGRFTISRDDSKSTVYLQMNSLKTEDTAVYYCTRDYGNYGGYFDVWGAGTLVTVSSASTKGPSVFPLAPSSKSTSGGTAALGCLVKDYFPEPVTVSWNSGALTSGVHTFPAVLQSSGLYSLSSVVTVPSSSLGTQTYICNVNHKPSNTKVDKKVEPKSCDKTHTCPPCPAPPVAGPSVFLFPPKPKDTLMISRTPEVTCVVVDVKHEDPEVKFNWYVDGVEVHNAKTKPREEQYNSTYRVVSVLTVLHQDWLNGKEYKCKVSNKALPAPIEKTISKAKGQPREPQVYTLPPSREEMTKNQVSLTCLVKGFYPSDIAVEWESNGQPENNYKTTPPVLDSDGSFFLYSKLTVDKSRWQQGNVFSCSVMHEALHNHYTQKSLSLSPGK

SEQ ID NO: 13456 - protein, 122 aa, synthetic construct; identical to SEQ ID NO: 7917
  source 1..122: note = Description of Artificial Sequence: Synthetic polypeptide; note = VH of XENP018275

SEQ ID NO: 13457 - protein, 5 aa, synthetic construct
  source 1..5: note = Description of Artificial Sequence: Synthetic peptide; note = XENP018275 vhCDR1
NYWMN

SEQ ID NO: 13458 - protein, 19 aa, synthetic construct
  source 1..19: note = Description of Artificial Sequence: Synthetic peptide; note = XENP018275 vhCDR2
EIRLKSNNYATHYAEPVKG

SEQ ID NO: 13459 - protein, 11 aa, synthetic construct
  source 1..11: note = Description of Artificial Sequence: Synthetic peptide; note = XENP018275 vhCDR3
DYGNYGGYFDV

SEQ ID NO: 13460 - protein, 214 aa, synthetic construct; identical to SEQ ID NO: 11550
  source 1..214: note = Description of Artificial Sequence: Synthetic polypeptide; note = XENP018275 1G6_H1.174_L1_IgG1_PVA_/S267K Light Chain

SEQ ID NO: 13461 - protein, 107 aa, synthetic construct; identical to SEQ ID NO: 6247
  source 1..107: note = Description of Artificial Sequence: Synthetic polypeptide; note = VL of XENP018275

SEQ ID NO: 13462 - protein, 11 aa, synthetic construct
  source 1..11: note = Description of Artificial Sequence: Synthetic peptide; note = XENP018275 vlCDR1
RASQSVSNDVA

SEQ ID NO: 13463 - protein, 7 aa, synthetic construct
  source 1..7: note = Description of Artificial Sequence: Synthetic peptide; note = XENP018275 vlCDR2
YASHRYT

SEQ ID NO: 13464 - protein, 9 aa, synthetic construct
  source 1..9: note = Description of Artificial Sequence: Synthetic peptide; note = XENP018275 vlCDR3
QQDYSSPRT

SEQ ID NO: 13465 - protein, 451 aa, synthetic construct
  source 1..451: note = Description of Artificial Sequence: Synthetic polypeptide; note = XENP018276 1G6_H1.175_L1_IgG1_PVA_/S267K Heavy Chain
EVQLVESGGGLVKPGGSLRLSCAASGFTFSNYWMNWVRQAPGKGLEWVGEIRLKSNNYATHYAEPVKGRFTISRDDSKSTVYLQMNSLKTEDTAVYYCTRKYGNYGGYFDVWGAGTLVTVSSASTKGPSVFPLAPSSKSTSGGTAALGCLVKDYFPEPVTVSWNSGALTSGVHTFPAVLQSSGLYSLSSVVTVPSSSLGTQTYICNVNHKPSNTKVDKKVEPKSCDKTHTCPPCPAPPVAGPSVFLFPPKPKDTLMISRTPEVTCVVVDVKHEDPEVKFNWYVDGVEVHNAKTKPREEQYNSTYRVVSVLTVLHQDWLNGKEYKCKVSNKALPAPIEKTISKAKGQPREPQVYTLPPSREEMTKNQVSLTCLVKGFYPSDIAVEWESNGQPENNYKTTPPVLDSDGSFFLYSKLTVDKSRWQQGNVFSCSVMHEALHNHYTQKSLSLSPGK

SEQ ID NO: 13466 - protein, 122 aa, synthetic construct; identical to SEQ ID NO: 7926
  source 1..122: note = Description of Artificial Sequence: Synthetic polypeptide; note = VH of XENP018276

SEQ ID NO: 13467 - protein, 5 aa, synthetic construct
  source 1..5: note = Description of Artificial Sequence: Synthetic peptide; note = XENP018276 vhCDR1
NYWMN

SEQ ID NO: 13468 - protein, 19 aa, synthetic construct
  source 1..19: note = Description of Artificial Sequence: Synthetic peptide; note = XENP018276 vhCDR2
EIRLKSNNYATHYAEPVKG

SEQ ID NO: 13469 - protein, 11 aa, synthetic construct
  source 1..11: note = Description of Artificial Sequence: Synthetic peptide; note = XENP018276 vhCDR3
KYGNYGGYFDV

SEQ ID NO: 13470 - protein, 214 aa, synthetic construct; identical to SEQ ID NO: 11550
  source 1..214: note = Description of Artificial Sequence: Synthetic polypeptide; note = XENP018276 1G6_H1.175_L1_IgG1_PVA_/S267K Light Chain

SEQ ID NO: 13471 - protein, 107 aa, synthetic construct; identical to SEQ ID NO: 6247
  source 1..107: note = Description of Artificial Sequence: Synthetic polypeptide; note = VL of XENP018276

SEQ ID NO: 13472 - protein, 11 aa, synthetic construct
  source 1..11: note = Description of Artificial Sequence: Synthetic peptide; note = XENP018276 vlCDR1
RASQSVSNDVA

SEQ ID NO: 13473 - protein, 7 aa, synthetic construct
  source 1..7: note = Description of Artificial Sequence: Synthetic peptide; note = XENP018276 vlCDR2
YASHRYT

SEQ ID NO: 13474 - protein, 9 aa, synthetic construct
  source 1..9: note = Description of Artificial Sequence: Synthetic peptide; note = XENP018276 vlCDR3
QQDYSSPRT

SEQ ID NO: 13475 - protein, 451 aa, synthetic construct
  source 1..451: note = Description of Artificial Sequence: Synthetic polypeptide; note = XENP018277 1G6_H1.176_L1_IgG1_PVA_/S267K Heavy Chain
EVQLVESGGGLVKPGGSLRLSCAASGFTFSNYWMNWVRQAPGKGLEWVGEIRLKSNNYATHYAEPVKGRFTISRDDSKSTVYLQMNSLKTEDTAVYYCTRYFGNYGGYFDVWGAGTLVTVSSASTKGPSVFPLAPSSKSTSGGTAALGCLVKDYFPEPVTVSWNSGALTSGVHTFPAVLQSSGLYSLSSVVTVPSSSLGTQTYICNVNHKPSNTKVDKKVEPKSCDKTHTCPPCPAPPVAGPSVFLFPPKPKDTLMISRTPEVTCVVVDVKHEDPEVKFNWYVDGVEVHNAKTKPREEQYNSTYRVVSVLTVLHQDWLNGKEYKCKVSNKALPAPIEKTISKAKGQPREPQVYTLPPSREEMTKNQVSLTCLVKGFYPSDIAVEWESNGQPENNYKTTPPVLDSDGSFFLYSKLTVDKSRWQQGNVFSCSVMHEALHNHYTQKSLSLSPGK

SEQ ID NO: 13476 - protein, 122 aa, synthetic construct; identical to SEQ ID NO: 7935
  source 1..122: note = Description of Artificial Sequence: Synthetic polypeptide; note = VH of XENP018277

SEQ ID NO: 13477 - protein, 5 aa, synthetic construct
  source 1..5: note = Description of Artificial Sequence: Synthetic peptide; note = XENP018277 vhCDR1
NYWMN

SEQ ID NO: 13478 - protein, 19 aa, synthetic construct
  source 1..19: note = Description of Artificial Sequence: Synthetic peptide; note = XENP018277 vhCDR2
EIRLKSNNYATHYAEPVKG

SEQ ID NO: 13479 - protein, 11 aa, synthetic construct
  source 1..11: note = Description of Artificial Sequence: Synthetic peptide; note = XENP018277 vhCDR3
YFGNYGGYFDV

SEQ ID NO: 13480 - protein, 214 aa, synthetic construct; identical to SEQ ID NO: 11550
  source 1..214: note = Description of Artificial Sequence: Synthetic polypeptide; note = XENP018277 1G6_H1.176_L1_IgG1_PVA_/S267K Light Chain

SEQ ID NO: 13481 - protein, 107 aa, synthetic construct; identical to SEQ ID NO: 6247
  source 1..107: note = Description of Artificial Sequence: Synthetic polypeptide; note = VL of XENP018277

SEQ ID NO: 13482 - protein, 11 aa, synthetic construct
  source 1..11: note = Description of Artificial Sequence: Synthetic peptide; note = XENP018277 vlCDR1
RASQSVSNDVA

SEQ ID NO: 13483 - protein, 7 aa, synthetic construct
  source 1..7: note = Description of Artificial Sequence: Synthetic peptide; note = XENP018277 vlCDR2
YASHRYT

SEQ ID NO: 13484 - protein, 9 aa, synthetic construct
  source 1..9: note = Description of Artificial Sequence: Synthetic peptide; note = XENP018277 vlCDR3
QQDYSSPRT

SEQ ID NO: 13485 - protein, 451 aa, synthetic construct
  source 1..451: note = Description of Artificial Sequence: Synthetic polypeptide; note = XENP018278 1G6_H1.177_L1_IgG1_PVA_/S267K Heavy Chain
EVQLVESGGGLVKPGGSLRLSCAASGFTFSNYWMNWVRQAPGKGLEWVGEIRLKSNNYATHYAEPVKGRFTISRDDSKSTVYLQMNSLKTEDTAVYYCTRYHGNYGGYFDVWGAGTLVTVSSASTKGPSVFPLAPSSKSTSGGTAALGCLVKDYFPEPVTVSWNSGALTSGVHTFPAVLQSSGLYSLSSVVTVPSSSLGTQTYICNVNHKPSNTKVDKKVEPKSCDKTHTCPPCPAPPVAGPSVFLFPPKPKDTLMISRTPEVTCVVVDVKHEDPEVKFNWYVDGVEVHNAKTKPREEQYNSTYRVVSVLTVLHQDWLNGKEYKCKVSNKALPAPIEKTISKAKGQPREPQVYTLPPSREEMTKNQVSLTCLVKGFYPSDIAVEWESNGQPENNYKTTPPVLDSDGSFFLYSKLTVDKSRWQQGNVFSCSVMHEALHNHYTQKSLSLSPGK

SEQ ID NO: 13486 - protein, 122 aa, synthetic construct; identical to SEQ ID NO: 7944
  source 1..122: note = Description of Artificial Sequence: Synthetic polypeptide; note = VH of XENP018278

SEQ ID NO: 13487 - protein, 5 aa, synthetic construct
  source 1..5: note = Description of Artificial Sequence: Synthetic peptide; note = XENP018278 vhCDR1
NYWMN

SEQ ID NO: 13488 - protein, 19 aa, synthetic construct
  source 1..19: note = Description of Artificial Sequence: Synthetic peptide; note = XENP018278 vhCDR2
EIRLKSNNYATHYAEPVKG

SEQ ID NO: 13489 - protein, 11 aa, synthetic construct
  source 1..11: note = Description of Artificial Sequence: Synthetic peptide; note = XENP018278 vhCDR3
YHGNYGGYFDV

SEQ ID NO: 13490 - protein, 214 aa, synthetic construct; identical to SEQ ID NO: 11550
  source 1..214: note = Description of Artificial Sequence: Synthetic polypeptide; note = XENP018278 1G6_H1.177_L1_IgG1_PVA_/S267K Light Chain

SEQ ID NO: 13491 - protein, 107 aa, synthetic construct; identical to SEQ ID NO: 6247
  source 1..107: note = Description of Artificial Sequence: Synthetic polypeptide; note = VL of XENP018278

SEQ ID NO: 13492 - protein, 11 aa, synthetic construct
  source 1..11: note = Description of Artificial Sequence: Synthetic peptide; note = XENP018278 vlCDR1
RASQSVSNDVA

SEQ ID NO: 13493 - protein, 7 aa, synthetic construct
  source 1..7: note = Description of Artificial Sequence: Synthetic peptide; note = XENP018278 vlCDR2
YASHRYT

SEQ ID NO: 13494 - protein, 9 aa, synthetic construct
  source 1..9: note = Description of Artificial Sequence: Synthetic peptide; note = XENP018278 vlCDR3
QQDYSSPRT

SEQ ID NO: 13495 - protein, 451 aa, synthetic construct
  source 1..451: note = Description of Artificial Sequence: Synthetic polypeptide; note = XENP018279 1G6_H1.178_L1_IgG1_PVA_/S267K Heavy Chain
EVQLVESGGGLVKPGGSLRLSCAASGFTFSNYWMNWVRQAPGKGLEWVGEIRLKSNNYATHYAEPVKGRFTISRDDSKSTVYLQMNSLKTEDTAVYYCTRYLGNYGGYFDVWGAGTLVTVSSASTKGPSVFPLAPSSKSTSGGTAALGCLVKDYFPEPVTVSWNSGALTSGVHTFPAVLQSSGLYSLSSVVTVPSSSLGTQTYICNVNHKPSNTKVDKKVEPKSCDKTHTCPPCPAPPVAGPSVFLFPPKPKDTLMISRTPEVTCVVVDVKHEDPEVKFNWYVDGVEVHNAKTKPREEQYNSTYRVVSVLTVLHQDWLNGKEYKCKVSNKALPAPIEKTISKAKGQPREPQVYTLPPSREEMTKNQVSLTCLVKGFYPSDIAVEWESNGQPENNYKTTPPVLDSDGSFFLYSKLTVDKSRWQQGNVFSCSVMHEALHNHYTQKSLSLSPGK

SEQ ID NO: 13496 - protein, 122 aa, synthetic construct; identical to SEQ ID NO: 7953
  source 1..122: note = Description of Artificial Sequence: Synthetic polypeptide; note = VH of XENP018279

SEQ ID NO: 13497 - protein, 5 aa, synthetic construct
  source 1..5: note = Description of Artificial Sequence: Synthetic peptide; note = XENP018279 vhCDR1
NYWMN

SEQ ID NO: 13498 - protein, 19 aa, synthetic construct
  source 1..19: note = Description of Artificial Sequence: Synthetic peptide; note = XENP018279 vhCDR2
EIRLKSNNYATHYAEPVKG

SEQ ID NO: 13499 - protein, 11 aa, synthetic construct
  source 1..11: note = Description of Artificial Sequence: Synthetic peptide; note = XENP018279 vhCDR3
YLGNYGGYFDV

SEQ ID NO: 13500 - protein, 214 aa, synthetic construct; identical to SEQ ID NO: 11550
  source 1..214: note = Description of Artificial Sequence: Synthetic polypeptide; note = XENP018279 1G6_H1.178_L1_IgG1_PVA_/S267K Light Chain

SEQ ID NO: 13501 - protein, 107 aa, synthetic construct; identical to SEQ ID NO: 6247
  source 1..107: note = Description of Artificial Sequence: Synthetic polypeptide; note = VL of XENP018279

SEQ ID NO: 13502 - protein, 11 aa, synthetic construct
  source 1..11: note = Description of Artificial Sequence: Synthetic peptide; note = XENP018279 vlCDR1
RASQSVSNDVA

SEQ ID NO: 13503 - protein, 7 aa, synthetic construct
  source 1..7: note = Description of Artificial Sequence: Synthetic peptide; note = XENP018279 vlCDR2
YASHRYT

SEQ ID NO: 13504 - protein, 9 aa, synthetic construct
  source 1..9: note = Description of Artificial Sequence: Synthetic peptide; note = XENP018279 vlCDR3
QQDYSSPRT

SEQ ID NO: 13505 - protein, 451 aa, synthetic construct
  source 1..451: note = Description of Artificial Sequence: Synthetic polypeptide; note = XENP018280 1G6_H1.179_L1_IgG1_PVA_/S267K Heavy Chain
EVQLVESGGGLVKPGGSLRLSCAASGFTFSNYWMNWVRQAPGKGLEWVGEIRLKSNNYATHYAEPVKGRFTISRDDSKSTVYLQMNSLKTEDTAVYYCTRYWGNYGGYFDVWGAGTLVTVSSASTKGPSVFPLAPSSKSTSGGTAALGCLVKDYFPEPVTVSWNSGALTSGVHTFPAVLQSSGLYSLSSVVTVPSSSLGTQTYICNVNHKPSNTKVDKKVEPKSCDKTHTCPPCPAPPVAGPSVFLFPPKPKDTLMISRTPEVTCVVVDVKHEDPEVKFNWYVDGVEVHNAKTKPREEQYNSTYRVVSVLTVLHQDWLNGKEYKCKVSNKALPAPIEKTISKAKGQPREPQVYTLPPSREEMTKNQVSLTCLVKGFYPSDIAVEWESNGQPENNYKTTPPVLDSDGSFFLYSKLTVDKSRWQQGNVFSCSVMHEALHNHYTQKSLSLSPGK

SEQ ID NO: 13506 - protein, 122 aa, synthetic construct; identical to SEQ ID NO: 7962
  source 1..122: note = Description of Artificial Sequence: Synthetic polypeptide; note = VH of XENP018280

SEQ ID NO: 13507 - protein, 5 aa, synthetic construct
  source 1..5: note = Description of Artificial Sequence: Synthetic peptide; note = XENP018280 vhCDR1
NYWMN

SEQ ID NO: 13508 - protein, 19 aa, synthetic construct
  source 1..19: note = Description of Artificial Sequence: Synthetic peptide; note = XENP018280 vhCDR2
EIRLKSNNYATHYAEPVKG

SEQ ID NO: 13509 - protein, 11 aa, synthetic construct
  source 1..11: note = Description of Artificial Sequence: Synthetic peptide; note = XENP018280 vhCDR3
YWGNYGGYFDV

SEQ ID NO: 13510 - protein, 214 aa, synthetic construct; identical to SEQ ID NO: 11550
  source 1..214: note = Description of Artificial Sequence: Synthetic polypeptide; note = XENP018280 1G6_H1.179_L1_IgG1_PVA_/S267K Light Chain

SEQ ID NO: 13511 - protein, 107 aa, synthetic construct; identical to SEQ ID NO: 6247
  source 1..107: note = Description of Artificial Sequence: Synthetic polypeptide; note = VL of XENP018280

SEQ ID NO: 13512 - protein, 11 aa, synthetic construct
  source 1..11: note = Description of Artificial Sequence: Synthetic peptide; note = XENP018280 vlCDR1
RASQSVSNDVA

SEQ ID NO: 13513 - protein, 7 aa, synthetic construct
  source 1..7: note = Description of Artificial Sequence: Synthetic peptide; note = XENP018280 vlCDR2
YASHRYT

SEQ ID NO: 13514 - protein, 9 aa, synthetic construct
  source 1..9: note = Description of Artificial Sequence: Synthetic peptide; note = XENP018280 vlCDR3
QQDYSSPRT

SEQ ID NO: 13515 - protein, 451 aa, synthetic construct
  source 1..451: note = Description of Artificial Sequence: Synthetic polypeptide; note = XENP018281 1G6_H1.180_L1_IgG1_PVA_/S267K Heavy Chain
EVQLVESGGGLVKPGGSLRLSCAASGFTFSNYWMNWVRQAPGKGLEWVGEIRLKSNNYATHYAEPVKGRFTISRDDSKSTVYLQMNSLKTEDTAVYYCTRYVGNYGGYFDVWGAGTLVTVSSASTKGPSVFPLAPSSKSTSGGTAALGCLVKDYFPEPVTVSWNSGALTSGVHTFPAVLQSSGLYSLSSVVTVPSSSLGTQTYICNVNHKPSNTKVDKKVEPKSCDKTHTCPPCPAPPVAGPSVFLFPPKPKDTLMISRTPEVTCVVVDVKHEDPEVKFNWYVDGVEVHNAKTKPREEQYNSTYRVVSVLTVLHQDWLNGKEYKCKVSNKALPAPIEKTISKAKGQPREPQVYTLPPSREEMTKNQVSLTCLVKGFYPSDIAVEWESNGQPENNYKTTPPVLDSDGSFFLYSKLTVDKSRWQQGNVFSCSVMHEALHNHYTQKSLSLSPGK

SEQ ID NO: 13516 - protein, 122 aa, synthetic construct; identical to SEQ ID NO: 7971
  source 1..122: note = Description of Artificial Sequence: Synthetic polypeptide; note = VH of XENP018281

SEQ ID NO: 13517 - protein, 5 aa, synthetic construct
  source 1..5: note = Description of Artificial Sequence: Synthetic peptide; note = XENP018281 vhCDR1
NYWMN

SEQ ID NO: 13518 - protein, 19 aa, synthetic construct
  source 1..19: note = Description of Artificial Sequence: Synthetic peptide; note = XENP018281 vhCDR2
EIRLKSNNYATHYAEPVKG

SEQ ID NO: 13519 - protein, 11 aa, synthetic construct
  source 1..11: note = Description of Artificial Sequence: Synthetic peptide; note = XENP018281 vhCDR3
YVGNYGGYFDV

SEQ ID NO: 13520 - protein, 214 aa, synthetic construct; identical to SEQ ID NO: 11550
  source 1..214: note = Description of Artificial Sequence: Synthetic polypeptide; note = XENP018281 1G6_H1.180_L1_IgG1_PVA_/S267K Light Chain

SEQ ID NO: 13521 - protein, 107 aa, synthetic construct; identical to SEQ ID NO: 6247
  source 1..107: note = Description of Artificial Sequence: Synthetic polypeptide; note = VL of XENP018281

SEQ ID NO: 13522 - protein, 11 aa, synthetic construct
  source 1..11: note = Description of Artificial Sequence: Synthetic peptide; note = XENP018281 vlCDR1
RASQSVSNDVA

SEQ ID NO: 13523 - protein, 7 aa, synthetic construct
  source 1..7: note = Description of Artificial Sequence: Synthetic peptide; note = XENP018281 vlCDR2
YASHRYT

SEQ ID NO: 13524 - protein, 9 aa, synthetic construct
  source 1..9: note = Description of Artificial Sequence: Synthetic peptide; note = XENP018281 vlCDR3
QQDYSSPRT

SEQ ID NO: 13525 - protein, 451 aa, synthetic construct
  source 1..451: note = Description of Artificial Sequence: Synthetic polypeptide; note = XENP018282 1G6_H1.181_L1_IgG1_PVA_/S267K Heavy Chain
EVQLVESGGGLVKPGGSLRLSCAASGFTFSNYWMNWVRQAPGKGLEWVGEIRLKSNNYATHYAEPVKGRFTISRDDSKSTVYLQMNSLKTEDTAVYYCTRYAGNYGGYFDVWGAGTLVTVSSASTKGPSVFPLAPSSKSTSGGTAALGCLVKDYFPEPVTVSWNSGALTSGVHTFPAVLQSSGLYSLSSVVTVPSSSLGTQTYICNVNHKPSNTKVDKKVEPKSCDKTHTCPPCPAPPVAGPSVFLFPPKPKDTLMISRTPEVTCVVVDVKHEDPEVKFNWYVDGVEVHNAKTKPREEQYNSTYRVVSVLTVLHQDWLNGKEYKCKVSNKALPAPIEKTISKAKGQPREPQVYTLPPSREEMTKNQVSLTCLVKGFYPSDIAVEWESNGQPENNYKTTPPVLDSDGSFFLYSKLTVDKSRWQQGNVFSCSVMHEALHNHYTQKSLSLSPGK

SEQ ID NO: 13526 - protein, 122 aa, synthetic construct; identical to SEQ ID NO: 7980
  source 1..122: note = Description of Artificial Sequence: Synthetic polypeptide; note = VH of XENP018282

SEQ ID NO: 13527 - protein, 5 aa, synthetic construct
  source 1..5: note = Description of Artificial Sequence: Synthetic peptide; note = XENP018282 vhCDR1
NYWMN

SEQ ID NO: 13528 - protein, 19 aa, synthetic construct
  source 1..19: note = Description of Artificial Sequence: Synthetic peptide; note = XENP018282 vhCDR2
EIRLKSNNYATHYAEPVKG

SEQ ID NO: 13529 - protein, 11 aa, synthetic construct
  source 1..11: note = Description of Artificial Sequence: Synthetic peptide; note = XENP018282 vhCDR3
YAGNYGGYFDV

SEQ ID NO: 13530 - protein, 214 aa, synthetic construct; identical to SEQ ID NO: 11550
  source 1..214: note = Description of Artificial Sequence: Synthetic polypeptide; note = XENP018282 1G6_H1.181_L1_IgG1_PVA_/S267K Light Chain

SEQ ID NO: 13531 - protein, 107 aa, synthetic construct; identical to SEQ ID NO: 6247
  source 1..107: note = Description of Artificial Sequence: Synthetic polypeptide; note = VL of XENP018282

SEQ ID NO: 13532 - protein, 11 aa, synthetic construct
  source 1..11: note = Description of Artificial Sequence: Synthetic peptide; note = XENP018282 vlCDR1
RASQSVSNDVA

SEQ ID NO: 13533 - protein, 7 aa, synthetic construct
  source 1..7: note = Description of Artificial Sequence: Synthetic peptide; note = XENP018282 vlCDR2
YASHRYT

SEQ ID NO: 13534 - protein, 9 aa, synthetic construct
  source 1..9: note = Description of Artificial Sequence: Synthetic peptide; note = XENP018282 vlCDR3
QQDYSSPRT

SEQ ID NO: 13535 - protein, 451 aa, synthetic construct
  source 1..451: note = Description of Artificial Sequence: Synthetic polypeptide; note = XENP018283 1G6_H1.182_L1_IgG1_PVA_/S267K Heavy Chain
EVQLVESGGGLVKPGGSLRLSCAASGFTFSNYWMNWVRQAPGKGLEWVGEIRLKSNNYATHYAEPVKGRFTISRDDSKSTVYLQMNSLKTEDTAVYYCTRYQGNYGGYFDVWGAGTLVTVSSASTKGPSVFPLAPSSKSTSGGTAALGCLVKDYFPEPVTVSWNSGALTSGVHTFPAVLQSSGLYSLSSVVTVPSSSLGTQTYICNVNHKPSNTKVDKKVEPKSCDKTHTCPPCPAPPVAGPSVFLFPPKPKDTLMISRTPEVTCVVVDVKHEDPEVKFNWYVDGVEVHNAKTKPREEQYNSTYRVVSVLTVLHQDWLNGKEYKCKVSNKALPAPIEKTISKAKGQPREPQVYTLPPSREEMTKNQVSLTCLVKGFYPSDIAVEWESNGQPENNYKTTPPVLDSDGSFFLYSKLTVDKSRWQQGNVFSCSVMHEALHNHYTQKSLSLSPGK

SEQ ID NO: 13536 - protein, 122 aa, synthetic construct; identical to SEQ ID NO: 7989
  source 1..122: note = Description of Artificial Sequence: Synthetic polypeptide; note = VH of XENP018283

SEQ ID NO: 13537 - protein, 5 aa, synthetic construct
  source 1..5: note = Description of Artificial Sequence: Synthetic peptide; note = XENP018283 vhCDR1
NYWMN

SEQ ID NO: 13538 - protein, 19 aa, synthetic construct
  source 1..19: note = Description of Artificial Sequence: Synthetic peptide; note = XENP018283 vhCDR2
EIRLKSNNYATHYAEPVKG

SEQ ID NO: 13539 - protein, 11 aa, synthetic construct
  source 1..11: note = Description of Artificial Sequence: Synthetic peptide; note = XENP018283 vhCDR3
YQGNYGGYFDV

SEQ ID NO: 13540 - protein, 214 aa, synthetic construct; identical to SEQ ID NO: 11550
  source 1..214: note = Description of Artificial Sequence: Synthetic polypeptide; note = XENP018283 1G6_H1.182_L1_IgG1_PVA_/S267K Light Chain

SEQ ID NO: 13541 - protein, 107 aa, synthetic construct; identical to SEQ ID NO: 6247
  source 1..107: note = Description of Artificial Sequence: Synthetic polypeptide; note = VL of XENP018283

SEQ ID NO: 13542 - protein, 11 aa, synthetic construct
  source 1..11: note = Description of Artificial Sequence: Synthetic peptide; note = XENP018283 vlCDR1
RASQSVSNDVA

SEQ ID NO: 13543 - protein, 7 aa, synthetic construct
  source 1..7: note = Description of Artificial Sequence: Synthetic peptide; note = XENP018283 vlCDR2
YASHRYT

SEQ ID NO: 13544 - protein, 9 aa, synthetic construct
  source 1..9: note = Description of Artificial Sequence: Synthetic peptide; note = XENP018283 vlCDR3
QQDYSSPRT

SEQ ID NO: 13545 - protein, 451 aa, synthetic construct
  source 1..451: note = Description of Artificial Sequence: Synthetic polypeptide; note = XENP018284 1G6_H1.183_L1_IgG1_PVA_/S267K Heavy Chain
EVQLVESGGGLVKPGGSLRLSCAASGFTFSNYWMNWVRQAPGKGLEWVGEIRLKSNNYATHYAEPVKGRFTISRDDSKSTVYLQMNSLKTEDTAVYYCTRYDGNYGGYFDVWGAGTLVTVSSASTKGPSVFPLAPSSKSTSGGTAALGCLVKDYFPEPVTVSWNSGALTSGVHTFPAVLQSSGLYSLSSVVTVPSSSLGTQTYICNVNHKPSNTKVDKKVEPKSCDKTHTCPPCPAPPVAGPSVFLFPPKPKDTLMISRTPEVTCVVVDVKHEDPEVKFNWYVDGVEVHNAKTKPREEQYNSTYRVVSVLTVLHQDWLNGKEYKCKVSNKALPAPIEKTISKAKGQPREPQVYTLPPSREEMTKNQVSLTCLVKGFYPSDIAVEWESNGQPENNYKTTPPVLDSDGSFFLYSKLTVDKSRWQQGNVFSCSVMHEALHNHYTQKSLSLSPGK

SEQ ID NO: 13546 - protein, 122 aa, synthetic construct; identical to SEQ ID NO: 7998
  source 1..122: note = Description of Artificial Sequence: Synthetic polypeptide; note = VH of XENP018284

SEQ ID NO: 13547 - protein, 5 aa, synthetic construct
  source 1..5: note = Description of Artificial Sequence: Synthetic peptide; note = XENP018284 vhCDR1
NYWMN

SEQ ID NO: 13548 - protein, 19 aa, synthetic construct
  source 1..19: note = Description of Artificial Sequence: Synthetic peptide; note = XENP018284 vhCDR2
EIRLKSNNYATHYAEPVKG

SEQ ID NO: 13549 - protein, 11 aa, synthetic construct
  source 1..11: note = Description of Artificial Sequence: Synthetic peptide; note = XENP018284 vhCDR3
YDGNYGGYFDV

SEQ ID NO: 13550 - protein, 214 aa, synthetic construct; identical to SEQ ID NO: 11550
  source 1..214: note = Description of Artificial Sequence: Synthetic polypeptide; note = XENP018284 1G6_H1.183_L1_IgG1_PVA_/S267K Light Chain

SEQ ID NO: 13551 - protein, 107 aa, synthetic construct; identical to SEQ ID NO: 6247
  source 1..107: note = Description of Artificial Sequence: Synthetic polypeptide; note = VL of XENP018284

SEQ ID NO: 13552 - protein, 11 aa, synthetic construct
  source 1..11: note = Description of Artificial Sequence: Synthetic peptide; note = XENP018284 vlCDR1
RASQSVSNDVA

SEQ ID NO: 13553 - protein, 7 aa, synthetic construct
  source 1..7: note = Description of Artificial Sequence: Synthetic peptide; note = XENP018284 vlCDR2
YASHRYT

SEQ ID NO: 13554 - protein, 9 aa, synthetic construct
  source 1..9: note = Description of Artificial Sequence: Synthetic peptide; note = XENP018284 vlCDR3
QQDYSSPRT

SEQ ID NO: 13555 - protein, 451 aa, synthetic construct
  source 1..451: note = Description of Artificial Sequence: Synthetic polypeptide; note = XENP018285 1G6_H1.184_L1_IgG1_PVA_/S267K Heavy Chain
EVQLVESGGGLVKPGGSLRLSCAASGFTFSNYWMNWVRQAPGKGLEWVGEIRLKSNNYATHYAEPVKGRFTISRDDSKSTVYLQMNSLKTEDTAVYYCTRYKGNYGGYFDVWGAGTLVTVSSASTKGPSVFPLAPSSKSTSGGTAALGCLVKDYFPEPVTVSWNSGALTSGVHTFPAVLQSSGLYSLSSVVTVPSSSLGTQTYICNVNHKPSNTKVDKKVEPKSCDKTHTCPPCPAPPVAGPSVFLFPPKPKDTLMISRTPEVTCVVVDVKHEDPEVKFNWYVDGVEVHNAKTKPREEQYNSTYRVVSVLTVLHQDWLNGKEYKCKVSNKALPAPIEKTISKAKGQPREPQVYTLPPSREEMTKNQVSLTCLVKGFYPSDIAVEWESNGQPENNYKTTPPVLDSDGSFFLYSKLTVDKSRWQQGNVFSCSVMHEALHNHYTQKSLSLSPGK

SEQ ID NO: 13556 - protein, 122 aa, synthetic construct; identical to SEQ ID NO: 8007
  source 1..122: note = Description of Artificial Sequence: Synthetic polypeptide; note = VH of XENP018285

SEQ ID NO: 13557 - protein, 5 aa, synthetic construct
  source 1..5: note = Description of Artificial Sequence: Synthetic peptide; note = XENP018285 vhCDR1
NYWMN

SEQ ID NO: 13558 - protein, 19 aa, synthetic construct
  source 1..19: note = Description of Artificial Sequence: Synthetic peptide; note = XENP018285 vhCDR2
EIRLKSNNYATHYAEPVKG

SEQ ID NO: 13559 - protein, 11 aa, synthetic construct
  source 1..11: note = Description of Artificial Sequence: Synthetic peptide; note = XENP018285 vhCDR3
YKGNYGGYFDV

SEQ ID NO: 13560 - protein, 214 aa, synthetic construct; identical to SEQ ID NO: 11550
  source 1..214: note = Description of Artificial Sequence: Synthetic polypeptide; note = XENP018285 1G6_H1.184_L1_IgG1_PVA_/S267K Light Chain

SEQ ID NO: 13561 - protein, 107 aa, synthetic construct; identical to SEQ ID NO: 6247
  source 1..107: note = Description of Artificial Sequence: Synthetic polypeptide; note = VL of XENP018285

SEQ ID NO: 13562 - protein, 11 aa, synthetic construct
  source 1..11: note = Description of Artificial Sequence: Synthetic peptide; note = XENP018285 vlCDR1
RASQSVSNDVA

SEQ ID NO: 13563 - protein, 7 aa, synthetic construct
  source 1..7: note = Description of Artificial Sequence: Synthetic peptide; note = XENP018285 vlCDR2
YASHRYT

SEQ ID NO: 13564 - protein, 9 aa, synthetic construct
  source 1..9: note = Description of Artificial Sequence: Synthetic peptide; note = XENP018285 vlCDR3
QQDYSSPRT

SEQ ID NO: 13565 - protein, 451 aa, synthetic construct
  source 1..451: note = Description of Artificial Sequence: Synthetic polypeptide; note = XENP018286 1G6_H1.185_L1_IgG1_PVA_/S267K Heavy Chain
EVQLVESGGGLVKPGGSLRLSCAASGFTFSNYWMNWVRQAPGKGLEWVGEIRLKSNNYATHYAEPVKGRFTISRDDSKSTVYLQMNSLKTEDTAVYYCTRYYANYGGYFDVWGAGTLVTVSSASTKGPSVFPLAPSSKSTSGGTAALGCLVKDYFPEPVTVSWNSGALTSGVHTFPAVLQSSGLYSLSSVVTVPSSSLGTQTYICNVNHKPSNTKVDKKVEPKSCDKTHTCPPCPAPPVAGPSVFLFPPKPKDTLMISRTPEVTCVVVDVKHEDPEVKFNWYVDGVEVHNAKTKPREEQYNSTYRVVSVLTVLHQDWLNGKEYKCKVSNKALPAPIEKTISKAKGQPREPQVYTLPPSREEMTKNQVSLTCLVKGFYPSDIAVEWESNGQPENNYKTTPPVLDSDGSFFLYSKLTVDKSRWQQGNVFSCSVMHEALHNHYTQKSLSLSPGK

SEQ ID NO: 13566 - protein, 122 aa, synthetic construct; identical to SEQ ID NO: 8016
  source 1..122: note = Description of Artificial Sequence: Synthetic polypeptide; note = VH of XENP018286

SEQ ID NO: 13567 - protein, 5 aa, synthetic construct
  source 1..5: note = Description of Artificial Sequence: Synthetic peptide; note = XENP018286 vhCDR1
NYWMN

SEQ ID NO: 13568 - protein, 19 aa, synthetic construct
  source 1..19: note = Description of Artificial Sequence: Synthetic peptide; note = XENP018286 vhCDR2
EIRLKSNNYATHYAEPVKG

SEQ ID NO: 13569 - protein, 11 aa, synthetic construct
  source 1..11: note = Description of Artificial Sequence: Synthetic peptide; note = XENP018286 vhCDR3
YYANYGGYFDV

SEQ ID NO: 13570 - protein, 214 aa, synthetic construct; identical to SEQ ID NO: 11550
  source 1..214: note = Description of Artificial Sequence: Synthetic polypeptide; note = XENP018286 1G6_H1.185_L1_IgG1_PVA_/S267K Light Chain

SEQ ID NO: 13571 - protein, 107 aa, synthetic construct; identical to SEQ ID NO: 6247
  source 1..107: note = Description of Artificial Sequence: Synthetic polypeptide; note = VL of XENP018286

SEQ ID NO: 13572 - protein, 11 aa, synthetic construct
  source 1..11: note = Description of Artificial Sequence: Synthetic peptide; note = XENP018286 vlCDR1
RASQSVSNDVA

SEQ ID NO: 13573 - protein, 7 aa, synthetic construct
  source 1..7: note = Description of Artificial Sequence: Synthetic peptide; note = XENP018286 vlCDR2
YASHRYT

SEQ ID NO: 13574 - protein, 9 aa, synthetic construct
  source 1..9: note = Description of Artificial Sequence: Synthetic peptide; note = XENP018286 vlCDR3
QQDYSSPRT

SEQ ID NO: 13575 - protein, 451 aa, synthetic construct
  source 1..451: note = Description of Artificial Sequence: Synthetic polypeptide; note = XENP018287 1G6_H1.186_L1_IgG1_PVA_/S267K Heavy Chain
EVQLVESGGGLVKPGGSLRLSCAASGFTFSNYWMNWVRQAPGKGLEWVGEIRLKSNNYATHYAEPVKGRFTISRDDSKSTVYLQMNSLKTEDTAVYYCTRYYSNYGGYFDVWGAGTLVTVSSASTKGPSVFPLAPSSKSTSGGTAALGCLVKDYFPEPVTVSWNSGALTSGVHTFPAVLQSSGLYSLSSVVTVPSSSLGTQTYICNVNHKPSNTKVDKKVEPKSCDKTHTCPPCPAPPVAGPSVFLFPPKPKDTLMISRTPEVTCVVVDVKHEDPEVKFNWYVDGVEVHNAKTKPREEQYNSTYRVVSVLTVLHQDWLNGKEYKCKVSNKALPAPIEKTISKAKGQPREPQVYTLPPSREEMTKNQVSLTCLVKGFYPSDIAVEWESNGQPENNYKTTPPVLDSDGSFFLYSKLTVDKSRWQQGNVFSCSVMHEALHNHYTQKSLSLSPGK

SEQ ID NO: 13576 - protein, 122 aa, synthetic construct; identical to SEQ ID NO: 8025
  source 1..122: note = Description of Artificial Sequence: Synthetic polypeptide; note = VH of XENP018287

SEQ ID NO: 13577 - protein, 5 aa, synthetic construct
  source 1..5: note = Description of Artificial Sequence: Synthetic peptide; note = XENP018287 vhCDR1
NYWMN

SEQ ID NO: 13578 - protein, 19 aa, synthetic construct
  source 1..19: note = Description of Artificial Sequence: Synthetic peptide; note = XENP018287 vhCDR2
EIRLKSNNYATHYAEPVKG

SEQ ID NO: 13579 - protein, 11 aa, synthetic construct
  source 1..11: note = Description of Artificial Sequence: Synthetic peptide; note = XENP018287 vhCDR3
YYSNYGGYFDV

SEQ ID NO: 13580 - protein, 214 aa, synthetic construct; identical to SEQ ID NO: 11550
  source 1..214: note = Description of Artificial Sequence: Synthetic polypeptide; note = XENP018287 1G6_H1.186_L1_IgG1_PVA_/S267K Light Chain

SEQ ID NO: 13581 - protein, 107 aa, synthetic construct; identical to SEQ ID NO: 6247
  source 1..107: note = Description of Artificial Sequence: Synthetic polypeptide; note = VL of XENP018287

SEQ ID NO: 13582 - protein, 11 aa, synthetic construct
  source 1..11: note = Description of Artificial Sequence: Synthetic peptide; note = XENP018287 vlCDR1
RASQSVSNDVA

SEQ ID NO: 13583 - protein, 7 aa, synthetic construct
  source 1..7: note = Description of Artificial Sequence: Synthetic peptide; note = XENP018287 vlCDR2
YASHRYT

SEQ ID NO: 13584 - protein, 9 aa, synthetic construct
  source 1..9: note = Description of Artificial Sequence: Synthetic peptide; note = XENP018287 vlCDR3
QQDYSSPRT

SEQ ID NO: 13585 - protein, 451 aa, synthetic construct
  source 1..451: note = Description of Artificial Sequence: Synthetic polypeptide; note = XENP018288 1G6_H1.187_L1_IgG1_PVA_/S267K Heavy Chain
EVQLVESGGGLVKPGGSLRLSCAASGFTFSNYWMNWVRQAPGKGLEWVGEIRLKSNNYATHYAEPVKGRFTISRDDSKSTVYLQMNSLKTEDTAVYYCTRYYTNYGGYFDVWGAGTLVTVSSASTKGPSVFPLAPSSKSTSGGTAALGCLVKDYFPEPVTVSWNSGALTSGVHTFPAVLQSSGLYSLSSVVTVPSSSLGTQTYICNVNHKPSNTKVDKKVEPKSCDKTHTCPPCPAPPVAGPSVFLFPPKPKDTLMISRTPEVTCVVVDVKHEDPEVKFNWYVDGVEVHNAKTKPREEQYNSTYRVVSVLTVLHQDWLNGKEYKCKVSNKALPAPIEKTISKAKGQPREPQVYTLPPSREEMTKNQVSLTCLVKGFYPSDIAVEWESNGQPENNYKTTPPVLDSDGSFFLYSKLTVDKSRWQQGNVFSCSVMHEALHNHYTQKSLSLSPGK

SEQ ID NO: 13586 - protein, 122 aa, synthetic construct; identical to SEQ ID NO: 8034
  source 1..122: note = Description of Artificial Sequence: Synthetic polypeptide; note = VH of XENP018288

SEQ ID NO: 13587 - protein, 5 aa, synthetic construct
  source 1..5: note = Description of Artificial Sequence: Synthetic peptide; note = XENP018288 vhCDR1
NYWMN

SEQ ID NO: 13588 - protein, 19 aa, synthetic construct
  source 1..19: note = Description of Artificial Sequence: Synthetic peptide; note = XENP018288 vhCDR2
EIRLKSNNYATHYAEPVKG

SEQ ID NO: 13589 - protein, 11 aa, synthetic construct
  source 1..11: note = Description of Artificial Sequence: Synthetic peptide; note = XENP018288 vhCDR3
YYTNYGGYFDV

SEQ ID NO: 13590 - protein, 214 aa, synthetic construct; identical to SEQ ID NO: 11550
  source 1..214: note = Description of Artificial Sequence: Synthetic polypeptide; note = XENP018288 1G6_H1.187_L1_IgG1_PVA_/S267K Light Chain

SEQ ID NO: 13591 - protein, 107 aa, synthetic construct; identical to SEQ ID NO: 6247
  source 1..107: note = Description of Artificial Sequence: Synthetic polypeptide; note = VL of XENP018288

SEQ ID NO: 13592 - protein, 11 aa, synthetic construct
  source 1..11: note = Description of Artificial Sequence: Synthetic peptide; note = XENP018288 vlCDR1
RASQSVSNDVA

SEQ ID NO: 13593 - protein, 7 aa, synthetic construct
  source 1..7: note = Description of Artificial Sequence: Synthetic peptide; note = XENP018288 vlCDR2
YASHRYT

SEQ ID NO: 13594 - protein, 9 aa, synthetic construct
  source 1..9: note = Description of Artificial Sequence: Synthetic peptide; note = XENP018288 vlCDR3
QQDYSSPRT

SEQ ID NO: 13595 - protein, 451 aa, synthetic construct
  source 1..451: note = Description of Artificial Sequence: Synthetic polypeptide; note = XENP018289 1G6_H1.188_L1_IgG1_PVA_/S267K Heavy Chain
EVQLVESGGGLVKPGGSLRLSCAASGFTFSNYWMNWVRQAPGKGLEWVGEIRLKSNNYATHYAEPVKGRFTISRDDSKSTVYLQMNSLKTEDTAVYYCTRYYQNYGGYFDVWGAGTLVTVSSASTKGPSVFPLAPSSKSTSGGTAALGCLVKDYFPEPVTVSWNSGALTSGVHTFPAVLQSSGLYSLSSVVTVPSSSLGTQTYICNVNHKPSNTKVDKKVEPKSCDKTHTCPPCPAPPVAGPSVFLFPPKPKDTLMISRTPEVTCVVVDVKHEDPEVKFNWYVDGVEVHNAKTKPREEQYNSTYRVVSVLTVLHQDWLNGKEYKCKVSNKALPAPIEKTISKAKGQPREPQVYTLPPSREEMTKNQVSLTCLVKGFYPSDIAVEWESNGQPENNYKTTPPVLDSDGSFFLYSKLTVDKSRWQQGNVFSCSVMHEALHNHYTQKSLSLSPGK

SEQ ID NO: 13596 - protein, 122 aa, synthetic construct; identical to SEQ ID NO: 8043
  source 1..122: note = Description of Artificial Sequence: Synthetic polypeptide; note = VH of XENP018289

SEQ ID NO: 13597 - protein, 5 aa, synthetic construct
  source 1..5: note = Description of Artificial Sequence: Synthetic peptide; note = XENP018289 vhCDR1
NYWMN

SEQ ID NO: 13598 - protein, 19 aa, synthetic construct
  source 1..19: note = Description of Artificial Sequence: Synthetic peptide; note = XENP018289 vhCDR2
EIRLKSNNYATHYAEPVKG

SEQ ID NO: 13599 - protein, 11 aa, synthetic construct
  source 1..11: note = Description of Artificial Sequence: Synthetic peptide; note = XENP018289 vhCDR3
YYQNYGGYFDV

SEQ ID NO: 13600 - protein, 214 aa, synthetic construct; identical to SEQ ID NO: 11550
  source 1..214: note = Description of Artificial Sequence: Synthetic polypeptide; note = XENP018289 1G6_H1.188_L1_IgG1_PVA_/S267K Light Chain

SEQ ID NO: 13601 - protein, 107 aa, synthetic construct; identical to SEQ ID NO: 6247
  source 1..107: note = Description of Artificial Sequence: Synthetic polypeptide; note = VL of XENP018289

SEQ ID NO: 13602 - protein, 11 aa, synthetic construct
  source 1..11: note = Description of Artificial Sequence: Synthetic peptide; note = XENP018289 vlCDR1
RASQSVSNDVA

SEQ ID NO: 13603 - protein, 7 aa, synthetic construct
  source 1..7: note = Description of Artificial Sequence: Synthetic peptide; note = XENP018289 vlCDR2
YASHRYT

SEQ ID NO: 13604 - protein, 9 aa, synthetic construct
  source 1..9: note = Description of Artificial Sequence: Synthetic peptide; note = XENP018289 vlCDR3
QQDYSSPRT

SEQ ID NO: 13605 - protein, 451 aa, synthetic construct
  source 1..451: note = Description of Artificial Sequence: Synthetic polypeptide; note = XENP018290 1G6_H1.189_L1_IgG1_PVA_/S267K Heavy Chain
EVQLVESGGGLVKPGGSLRLSCAASGFTFSNYWMNWVRQAPGKGLEWVGEIRLKSNNYATHYAEPVKGRFTISRDDSKSTVYLQMNSLKTEDTAVYYCTRYYHNYGGYFDVWGAGTLVTVSSASTKGPSVFPLAPSSKSTSGGTAALGCLVKDYFPEPVTVSWNSGALTSGVHTFPAVLQSSGLYSLSSVVTVPSSSLGTQTYICNVNHKPSNTKVDKKVEPKSCDKTHTCPPCPAPPVAGPSVFLFPPKPKDTLMISRTPEVTCVVVDVKHEDPEVKFNWYVDGVEVHNAKTKPREEQYNSTYRVVSVLTVLHQDWLNGKEYKCKVSNKALPAPIEKTISKAKGQPREPQVYTLPPSREEMTKNQVSLTCLVKGFYPSDIAVEWESNGQPENNYKTTPPVLDSDGSFFLYSKLTVDKSRWQQGNVFSCSVMHEALHNHYTQKSLSLSPGK

SEQ ID NO: 13606 - protein, 122 aa, synthetic construct; identical to SEQ ID NO: 8052
  source 1..122: note = Description of Artificial Sequence: Synthetic polypeptide; note = VH of XENP018290

SEQ ID NO: 13607 - protein, 5 aa, synthetic construct
  source 1..5: note = Description of Artificial Sequence: Synthetic peptide; note = XENP018290 vhCDR1
NYWMN

SEQ ID NO: 13608 - protein, 19 aa, synthetic construct
  source 1..19: note = Description of Artificial Sequence: Synthetic peptide; note = XENP018290 vhCDR2
EIRLKSNNYATHYAEPVKG

SEQ ID NO: 13609 - protein, 11 aa, synthetic construct
  source 1..11: note = Description of Artificial Sequence: Synthetic peptide; note = XENP018290 vhCDR3
YYHNYGGYFDV

SEQ ID NO: 13610 - protein, 214 aa, synthetic construct; identical to SEQ ID NO: 11550
  source 1..214: note = Description of Artificial Sequence: Synthetic polypeptide; note = XENP018290 1G6_H1.189_L1_IgG1_PVA_/S267K Light Chain

SEQ ID NO: 13611 - protein, 107 aa, synthetic construct; identical to SEQ ID NO: 6247
  source 1..107: note = Description of Artificial Sequence: Synthetic polypeptide; note = VL of XENP018290

SEQ ID NO: 13612 - protein, 11 aa, synthetic construct
  source 1..11: note = Description of Artificial Sequence: Synthetic peptide; note = XENP018290 vlCDR1
RASQSVSNDVA

SEQ ID NO: 13613 - protein, 7 aa, synthetic construct
  source 1..7: note = Description of Artificial Sequence: Synthetic peptide; note = XENP018290 vlCDR2
YASHRYT

SEQ ID NO: 13614 - protein, 9 aa, synthetic construct
  source 1..9: note = Description of Artificial Sequence: Synthetic peptide; note = XENP018290 vlCDR3
QQDYSSPRT

SEQ ID NO: 13615 - protein, 451 aa, synthetic construct
  source 1..451: note = Description of Artificial Sequence: Synthetic polypeptide; note = XENP018291 1G6_H1.190_L1_IgG1_PVA_/S267K Heavy Chain
EVQLVESGGGLVKPGGSLRLSCAASGFTFSNYWMNWVRQAPGKGLEWVGEIRLKSNNYATHYAEPVKGRFTISRDDSKSTVYLQMNSLKTEDTAVYYCTRYYDNYGGYFDVWGAGTLVTVSSASTKGPSVFPLAPSSKSTSGGTAALGCLVKDYFPEPVTVSWNSGALTSGVHTFPAVLQSSGLYSLSSVVTVPSSSLGTQTYICNVNHKPSNTKVDKKVEPKSCDKTHTCPPCPAPPVAGPSVFLFPPKPKDTLMISRTPEVTCVVVDVKHEDPEVKFNWYVDGVEVHNAKTKPREEQYNSTYRVVSVLTVLHQDWLNGKEYKCKVSNKALPAPIEKTISKAKGQPREPQVYTLPPSREEMTKNQVSLTCLVKGFYPSDIAVEWESNGQPENNYKTTPPVLDSDGSFFLYSKLTVDKSRWQQGNVFSCSVMHEALHNHYTQKSLSLSPGK

SEQ ID NO: 13616 - protein, 122 aa, synthetic construct; identical to SEQ ID NO: 8061
  source 1..122: note = Description of Artificial Sequence: Synthetic polypeptide; note = VH of XENP018291

SEQ ID NO: 13617 - protein, 5 aa, synthetic construct
  source 1..5: note = Description of Artificial Sequence: Synthetic peptide; note = XENP018291 vhCDR1
NYWMN

SEQ ID NO: 13618 - protein, 19 aa, synthetic construct
  source 1..19: note = Description of Artificial Sequence: Synthetic peptide; note = XENP018291 vhCDR2
EIRLKSNNYATHYAEPVKG

SEQ ID NO: 13619 - protein, 11 aa, synthetic construct
  source 1..11: note = Description of Artificial Sequence: Synthetic peptide; note = XENP018291 vhCDR3
YYDNYGGYFDV

SEQ ID NO: 13620 - protein, 214 aa, synthetic construct; identical to SEQ ID NO: 11550
  source 1..214: note = Description of Artificial Sequence: Synthetic polypeptide; note = XENP018291 1G6_H1.190_L1_IgG1_PVA_/S267K Light Chain

SEQ ID NO: 13621 - protein, 107 aa, synthetic construct; identical to SEQ ID NO: 6247
  source 1..107: note = Description of Artificial Sequence: Synthetic polypeptide; note = VL of XENP018291

SEQ ID NO: 13622 - protein, 11 aa, synthetic construct
  source 1..11: note = Description of Artificial Sequence: Synthetic peptide; note = XENP018291 vlCDR1
RASQSVSNDVA

SEQ ID NO: 13623 - protein, 7 aa, synthetic construct
  source 1..7: note = Description of Artificial Sequence: Synthetic peptide; note = XENP018291 vlCDR2
YASHRYT

SEQ ID NO: 13624 - protein, 9 aa, synthetic construct
  source 1..9: note = Description of Artificial Sequence: Synthetic peptide; note = XENP018291 vlCDR3
QQDYSSPRT

SEQ ID NO: 13625 - protein, 451 aa, synthetic construct
  source 1..451: note = Description of Artificial Sequence: Synthetic polypeptide; note = XENP018292 1G6_H1.191_L1_IgG1_PVA_/S267K Heavy Chain
EVQLVESGGGLVKPGGSLRLSCAASGFTFSNYWMNWVRQAPGKGLEWVGEIRLKSNNYATHYAEPVKGRFTISRDDSKSTVYLQMNSLKTEDTAVYYCTRYYKNYGGYFDVWGAGTLVTVSSASTKGPSVFPLAPSSKSTSGGTAALGCLVKDYFPEPVTVSWNSGALTSGVHTFPAVLQSSGLYSLSSVVTVPSSSLGTQTYICNVNHKPSNTKVDKKVEPKSCDKTHTCPPCPAPPVAGPSVFLFPPKPKDTLMISRTPEVTCVVVDVKHEDPEVKFNWYVDGVEVHNAKTKPREEQYNSTYRVVSVLTVLHQDWLNGKEYKCKVSNKALPAPIEKTISKAKGQPREPQVYTLPPSREEMTKNQVSLTCLVKGFYPSDIAVEWESNGQPENNYKTTPPVLDSDGSFFLYSKLTVDKSRWQQGNVFSCSVMHEALHNHYTQKSLSLSPGK

SEQ ID NO: 13626 - protein, 122 aa, synthetic construct; identical to SEQ ID NO: 8070
  source 1..122: note = Description of Artificial Sequence: Synthetic polypeptide; note = VH of XENP018292

SEQ ID NO: 13627 - protein, 5 aa, synthetic construct
  source 1..5: note = Description of Artificial Sequence: Synthetic peptide; note = XENP018292 vhCDR1
NYWMN

SEQ ID NO: 13628 - protein, 19 aa, synthetic construct
  source 1..19: note = Description of Artificial Sequence: Synthetic peptide; note = XENP018292 vhCDR2
EIRLKSNNYATHYAEPVKG

SEQ ID NO: 13629 - protein, 11 aa, synthetic construct
  source 1..11: note = Description of Artificial Sequence: Synthetic peptide; note = XENP018292 vhCDR3
YYKNYGGYFDV

SEQ ID NO: 13630 - protein, 214 aa, synthetic construct; identical to SEQ ID NO: 11550
  source 1..214: note = Description of Artificial Sequence: Synthetic polypeptide; note = XENP018292 1G6_H1.191_L1_IgG1_PVA_/S267K Light Chain

SEQ ID NO: 13631 - protein, 107 aa, synthetic construct; identical to SEQ ID NO: 6247
  source 1..107: note = Description of Artificial Sequence: Synthetic polypeptide; note = VL of XENP018292

SEQ ID NO: 13632 - protein, 11 aa, synthetic construct
  source 1..11: note = Description of Artificial Sequence: Synthetic peptide; note = XENP018292 vlCDR1
RASQSVSNDVA

SEQ ID NO: 13633 - protein, 7 aa, synthetic construct
  source 1..7: note = Description of Artificial Sequence: Synthetic peptide; note = XENP018292 vlCDR2
YASHRYT

SEQ ID NO: 13634 - protein, 9 aa, synthetic construct
  source 1..9: note = Description of Artificial Sequence: Synthetic peptide; note = XENP018292 vlCDR3
QQDYSSPRT

SEQ ID NO: 13635 - protein, 451 aa, synthetic construct
  source 1..451: note = Description of Artificial Sequence: Synthetic polypeptide; note = XENP018293 1G6_H1.192_L1_IgG1_PVA_/S267K Heavy Chain
EVQLVESGGGLVKPGGSLRLSCAASGFTFSNYWMNWVRQAPGKGLEWVGEIRLKSNNYATHYAEPVKGRFTISRDDSKSTVYLQMNSLKTEDTAVYYCTRYYLNYGGYFDVWGAGTLVTVSSASTKGPSVFPLAPSSKSTSGGTAALGCLVKDYFPEPVTVSWNSGALTSGVHTFPAVLQSSGLYSLSSVVTVPSSSLGTQTYICNVNHKPSNTKVDKKVEPKSCDKTHTCPPCPAPPVAGPSVFLFPPKPKDTLMISRTPEVTCVVVDVKHEDPEVKFNWYVDGVEVHNAKTKPREEQYNSTYRVVSVLTVLHQDWLNGKEYKCKVSNKALPAPIEKTISKAKGQPREPQVYTLPPSREEMTKNQVSLTCLVKGFYPSDIAVEWESNGQPENNYKTTPPVLDSDGSFFLYSKLTVDKSRWQQGNVFSCSVMHEALHNHYTQKSLSLSPGK

SEQ ID NO: 13636 - protein, 122 aa, synthetic construct; identical to SEQ ID NO: 8079
  source 1..122: note = Description of Artificial Sequence: Synthetic polypeptide; note = VH of XENP018293

SEQ ID NO: 13637 - protein, 5 aa, synthetic construct
  source 1..5: note = Description of Artificial Sequence: Synthetic peptide; note = XENP018293 vhCDR1
NYWMN

SEQ ID NO: 13638 - protein, 19 aa, synthetic construct
  source 1..19: note = Description of Artificial Sequence: Synthetic peptide; note = XENP018293 vhCDR2
EIRLKSNNYATHYAEPVKG

SEQ ID NO: 13639 - protein, 11 aa, synthetic construct
  source 1..11: note = Description of Artificial Sequence: Synthetic peptide; note = XENP018293 vhCDR3
YYLNYGGYFDV

SEQ ID NO: 13640 - protein, 214 aa, synthetic construct; identical to SEQ ID NO: 11550
  source 1..214: note = Description of Artificial Sequence: Synthetic polypeptide; note = XENP018293 1G6_H1.192_L1_IgG1_PVA_/S267K Light Chain

SEQ ID NO: 13641 - protein, 107 aa, synthetic construct; identical to SEQ ID NO: 6247
  source 1..107: note = Description of Artificial Sequence: Synthetic polypeptide; note = VL of XENP018293

SEQ ID NO: 13642 - protein, 11 aa, synthetic construct
  source 1..11: note = Description of Artificial Sequence: Synthetic peptide; note = XENP018293 vlCDR1
RASQSVSNDVA

SEQ ID NO: 13643 - protein, 7 aa, synthetic construct
  source 1..7: note = Description of Artificial Sequence: Synthetic peptide; note = XENP018293 vlCDR2
YASHRYT

SEQ ID NO: 13644 - protein, 9 aa, synthetic construct
  source 1..9: note = Description of Artificial Sequence: Synthetic peptide; note = XENP018293 vlCDR3
QQDYSSPRT

SEQ ID NO: 13645 - protein, 451 aa, synthetic construct
  source 1..451: note = Description of Artificial Sequence: Synthetic polypeptide; note = XENP018294 1G6_H1.193_L1_IgG1_PVA_/S267K Heavy Chain
EVQLVESGGGLVKPGGSLRLSCAASGFTFSNYWMNWVRQAPGKGLEWVGEIRLKSNNYATHYAEPVKGRFTISRDDSKSTVYLQMNSLKTEDTAVYYCTRYYFNYGGYFDVWGAGTLVTVSSASTKGPSVFPLAPSSKSTSGGTAALGCLVKDYFPEPVTVSWNSGALTSGVHTFPAVLQSSGLYSLSSVVTVPSSSLGTQTYICNVNHKPSNTKVDKKVEPKSCDKTHTCPPCPAPPVAGPSVFLFPPKPKDTLMISRTPEVTCVVVDVKHEDPEVKFNWYVDGVEVHNAKTKPREEQYNSTYRVVSVLTVLHQDWLNGKEYKCKVSNKALPAPIEKTISKAKGQPREPQVYTLPPSREEMTKNQVSLTCLVKGFYPSDIAVEWESNGQPENNYKTTPPVLDSDGSFFLYSKLTVDKSRWQQGNVFSCSVMHEALHNHYTQKSLSLSPGK

SEQ ID NO: 13646 - protein, 122 aa, synthetic construct; identical to SEQ ID NO: 8088
  source 1..122: note = Description of Artificial Sequence: Synthetic polypeptide; note = VH of XENP018294

SEQ ID NO: 13647 - protein, 5 aa, synthetic construct
  source 1..5: note = Description of Artificial Sequence: Synthetic peptide; note = XENP018294 vhCDR1
NYWMN

SEQ ID NO: 13648 - protein, 19 aa, synthetic construct
  source 1..19: note = Description of Artificial Sequence: Synthetic peptide; note = XENP018294 vhCDR2
EIRLKSNNYATHYAEPVKG

SEQ ID NO: 13649 - protein, 11 aa, synthetic construct
  source 1..11: note = Description of Artificial Sequence: Synthetic peptide; note = XENP018294 vhCDR3
YYFNYGGYFDV

SEQ ID NO: 13650 - protein, 214 aa, synthetic construct; identical to SEQ ID NO: 11550
  source 1..214: note = Description of Artificial Sequence: Synthetic polypeptide; note = XENP018294 1G6_H1.193_L1_IgG1_PVA_/S267K Light Chain

SEQ ID NO: 13651 - protein, 107 aa, synthetic construct; identical to SEQ ID NO: 6247
  source 1..107: note = Description of Artificial Sequence: Synthetic polypeptide; note = VL of XENP018294

SEQ ID NO: 13652 - protein, 11 aa, synthetic construct
  source 1..11: note = Description of Artificial Sequence: Synthetic peptide; note = XENP018294 vlCDR1
RASQSVSNDVA

SEQ ID NO: 13653 - protein, 7 aa, synthetic construct
  source 1..7: note = Description of Artificial Sequence: Synthetic peptide; note = XENP018294 vlCDR2
YASHRYT

SEQ ID NO: 13654 - protein, 9 aa, synthetic construct
  source 1..9: note = Description of Artificial Sequence: Synthetic peptide; note = XENP018294 vlCDR3
QQDYSSPRT

SEQ ID NO: 13655 - protein, 451 aa, synthetic construct
  source 1..451: note = Description of Artificial Sequence: Synthetic polypeptide; note = XENP018295 1G6_H1.194_L1_IgG1_PVA_/S267K Heavy Chain
EVQLVESGGGLVKPGGSLRLSCAASGFTFSNYWMNWVRQAPGKGLEWVGEIRLKSNNYATHYAEPVKGRFTISRDDSKSTVYLQMNSLKTEDTAVYYCTRYYGDYGGYFDVWGAGTLVTVSSASTKGPSVFPLAPSSKSTSGGTAALGCLVKDYFPEPVTVSWNSGALTSGVHTFPAVLQSSGLYSLSSVVTVPSSSLGTQTYICNVNHKPSNTKVDKKVEPKSCDKTHTCPPCPAPPVAGPSVFLFPPKPKDTLMISRTPEVTCVVVDVKHEDPEVKFNWYVDGVEVHNAKTKPREEQYNSTYRVVSVLTVLHQDWLNGKEYKCKVSNKALPAPIEKTISKAKGQPREPQVYTLPPSREEMTKNQVSLTCLVKGFYPSDIAVEWESNGQPENNYKTTPPVLDSDGSFFLYSKLTVDKSRWQQGNVFSCSVMHEALHNHYTQKSLSLSPGK

SEQ ID NO: 13656 - protein, 122 aa, synthetic construct; identical to SEQ ID NO: 8097
  source 1..122: note = Description of Artificial Sequence: Synthetic polypeptide; note = VH of XENP018295

SEQ ID NO: 13657 - protein, 5 aa, synthetic construct
  source 1..5: note = Description of Artificial Sequence: Synthetic peptide; note = XENP018295 vhCDR1
NYWMN

SEQ ID NO: 13658 - protein, 19 aa, synthetic construct
  source 1..19: note = Description of Artificial Sequence: Synthetic peptide; note = XENP018295 vhCDR2
EIRLKSNNYATHYAEPVKG

SEQ ID NO: 13659 - protein, 11 aa, synthetic construct
  source 1..11: note = Description of Artificial Sequence: Synthetic peptide; note = XENP018295 vhCDR3
YYGDYGGYFDV

SEQ ID NO: 13660 - protein, 214 aa, synthetic construct; identical to SEQ ID NO: 11550
  source 1..214: note = Description of Artificial Sequence: Synthetic polypeptide; note = XENP018295 1G6_H1.194_L1_IgG1_PVA_/S267K Light Chain

SEQ ID NO: 13661 - protein, 107 aa, synthetic construct; identical to SEQ ID NO: 6247
  source 1..107: note = Description of Artificial Sequence: Synthetic polypeptide; note = VL of XENP018295

SEQ ID NO: 13662 - protein, 11 aa, synthetic construct
  source 1..11: note = Description of Artificial Sequence: Synthetic peptide; note = XENP018295 vlCDR1
RASQSVSNDVA

SEQ ID NO: 13663 - protein, 7 aa, synthetic construct
  source 1..7: note = Description of Artificial Sequence: Synthetic peptide; note = XENP018295 vlCDR2
YASHRYT

SEQ ID NO: 13664 - protein, 9 aa, synthetic construct
  source 1..9: note = Description of Artificial Sequence: Synthetic peptide; note = XENP018295 vlCDR3
QQDYSSPRT

SEQ ID NO: 13665 - protein, 451 aa, synthetic construct
  source 1..451: note = Description of Artificial Sequence: Synthetic polypeptide; note = XENP018296 1G6_H1.195_L1_IgG1_PVA_/S267K Heavy Chain
EVQLVESGGGLVKPGGSLRLSCAASGFTFSNYWMNWVRQAPGKGLEWVGEIRLKSNNYATHYAEPVKGRFTISRDDSKSTVYLQMNSLKTEDTAVYYCTRYYGHYGGYFDVWGAGTLVTVSSASTKGPSVFPLAPSSKSTSGGTAALGCLVKDYFPEPVTVSWNSGALTSGVHTFPAVLQSSGLYSLSSVVTVPSSSLGTQTYICNVNHKPSNTKVDKKVEPKSCDKTHTCPPCPAPPVAGPSVFLFPPKPKDTLMISRTPEVTCVVVDVKHEDPEVKFNWYVDGVEVHNAKTKPREEQYNSTYRVVSVLTVLHQDWLNGKEYKCKVSNKALPAPIEKTISKAKGQPREPQVYTLPPSREEMTKNQVSLTCLVKGFYPSDIAVEWESNGQPENNYKTTPPVLDSDGSFFLYSKLTVDKSRWQQGNVFSCSVMHEALHNHYTQKSLSLSPGK

SEQ ID NO: 13666 - protein, 122 aa, synthetic construct; identical to SEQ ID NO: 8106
  source 1..122: note = Description of Artificial Sequence: Synthetic polypeptide; note = VH of XENP018296

SEQ ID NO: 13667 - protein, 5 aa, synthetic construct
  source 1..5: note = Description of Artificial Sequence: Synthetic peptide; note = XENP018296 vhCDR1
NYWMN

SEQ ID NO: 13668 - protein, 19 aa, synthetic construct
  source 1..19: note = Description of Artificial Sequence: Synthetic peptide; note = XENP018296 vhCDR2
EIRLKSNNYATHYAEPVKG

SEQ ID NO: 13669 - protein, 11 aa, synthetic construct
  source 1..11: note = Description of Artificial Sequence: Synthetic peptide; note = XENP018296 vhCDR3
YYGHYGGYFDV

SEQ ID NO: 13670 - protein, 214 aa, synthetic construct; identical to SEQ ID NO: 11550
  source 1..214: note = Description of Artificial Sequence: Synthetic polypeptide; note = XENP018296 1G6_H1.195_L1_IgG1_PVA_/S267K Light Chain

SEQ ID NO: 13671 - protein, 107 aa, synthetic construct; identical to SEQ ID NO: 6247
  source 1..107: note = Description of Artificial Sequence: Synthetic polypeptide; note = VL of XENP018296

SEQ ID NO: 13672 - protein, 11 aa, synthetic construct
  source 1..11: note = Description of Artificial Sequence: Synthetic peptide; note = XENP018296 vlCDR1
RASQSVSNDVA

SEQ ID NO: 13673 - protein, 7 aa, synthetic construct
  source 1..7: note = Description of Artificial Sequence: Synthetic peptide; note = XENP018296 vlCDR2
YASHRYT

SEQ ID NO: 13674 - protein, 9 aa, synthetic construct
  source 1..9: note = Description of Artificial Sequence: Synthetic peptide; note = XENP018296 vlCDR3
QQDYSSPRT

SEQ ID NO: 13675 - protein, 451 aa, synthetic construct
  source 1..451: note = Description of Artificial Sequence: Synthetic polypeptide; note = XENP018301 1G6_H1.196_L1_IgG1_PVA_/S267K Heavy Chain
EVQLVESGGGLVKPGGSLRLSCAASGFTFSNYWMNWVRQAPGKGLEWVGEIRLKSNNYATHYAEPVKGRFTISRDDSKSTVYLQMNSLKTEDTAVYYCTRYYGEYGGYFDVWGAGTLVTVSSASTKGPSVFPLAPSSKSTSGGTAALGCLVKDYFPEPVTVSWNSGALTSGVHTFPAVLQSSGLYSLSSVVTVPSSSLGTQTYICNVNHKPSNTKVDKKVEPKSCDKTHTCPPCPAPPVAGPSVFLFPPKPKDTLMISRTPEVTCVVVDVKHEDPEVKFNWYVDGVEVHNAKTKPREEQYNSTYRVVSVLTVLHQDWLNGKEYKCKVSNKALPAPIEKTISKAKGQPREPQVYTLPPSREEMTKNQVSLTCLVKGFYPSDIAVEWESNGQPENNYKTTPPVLDSDGSFFLYSKLTVDKSRWQQGNVFSCSVMHEALHNHYTQKSLSLSPGK

SEQ ID NO: 13676 - protein, 122 aa, synthetic construct; identical to SEQ ID NO: 8115
  source 1..122: note = Description of Artificial Sequence: Synthetic polypeptide; note = VH of XENP018301

SEQ ID NO: 13677 - protein, 5 aa, synthetic construct
  source 1..5: note = Description of Artificial Sequence: Synthetic peptide; note = XENP018301 vhCDR1
NYWMN

SEQ ID NO: 13678 - protein, 19 aa, synthetic construct
  source 1..19: note = Description of Artificial Sequence: Synthetic peptide; note = XENP018301 vhCDR2
EIRLKSNNYATHYAEPVKG

SEQ ID NO: 13679 - protein, 11 aa, synthetic construct
  source 1..11: note = Description of Artificial Sequence: Synthetic peptide; note = XENP018301 vhCDR3
YYGEYGGYFDV

SEQ ID NO: 13680 - protein, 214 aa, synthetic construct; identical to SEQ ID NO: 11550
  source 1..214: note = Description of Artificial Sequence: Synthetic polypeptide; note = XENP018301 1G6_H1.196_L1_IgG1_PVA_/S267K Light Chain

SEQ ID NO: 13681 - protein, 107 aa, synthetic construct; identical to SEQ ID NO: 6247
  source 1..107: note = Description of Artificial Sequence: Synthetic polypeptide; note = VL of XENP018301

SEQ ID NO: 13682 - protein, 11 aa, synthetic construct
  source 1..11: note = Description of Artificial Sequence: Synthetic peptide; note = XENP018301 vlCDR1
RASQSVSNDVA

SEQ ID NO: 13683 - protein, 7 aa, synthetic construct
  source 1..7: note = Description of Artificial Sequence: Synthetic peptide; note = XENP018301 vlCDR2
YASHRYT

SEQ ID NO: 13684 - protein, 9 aa, synthetic construct
  source 1..9: note = Description of Artificial Sequence: Synthetic peptide; note = XENP018301 vlCDR3
QQDYSSPRT

SEQ ID NO: 13685 - protein, 451 aa, synthetic construct
  source 1..451: note = Description of Artificial Sequence: Synthetic polypeptide; note = XENP018302 1G6_H1.197_L1_IgG1_PVA_/S267K Heavy Chain
EVQLVESGGGLVKPGGSLRLSCAASGFTFSNYWMNWVRQAPGKGLEWVGEIRLKSNNYATHYAEPVKGRFTISRDDSKSTVYLQMNSLKTEDTAVYYCTRYYGSYGGYFDVWGAGTLVTVSSASTKGPSVFPLAPSSKSTSGGTAALGCLVKDYFPEPVTVSWNSGALTSGVHTFPAVLQSSGLYSLSSVVTVPSSSLGTQTYICNVNHKPSNTKVDKKVEPKSCDKTHTCPPCPAPPVAGPSVFLFPPKPKDTLMISRTPEVTCVVVDVKHEDPEVKFNWYVDGVEVHNAKTKPREEQYNSTYRVVSVLTVLHQDWLNGKEYKCKVSNKALPAPIEKTISKAKGQPREPQVYTLPPSREEMTKNQVSLTCLVKGFYPSDIAVEWESNGQPENNYKTTPPVLDSDGSFFLYSKLTVDKSRWQQGNVFSCSVMHEALHNHYTQKSLSLSPGK

SEQ ID NO: 13686 - protein, 122 aa, synthetic construct; identical to SEQ ID NO: 8124
  source 1..122: note = Description of Artificial Sequence: Synthetic polypeptide; note = VH of XENP018302

SEQ ID NO: 13687 - protein, 5 aa, synthetic construct
  source 1..5: note = Description of Artificial Sequence: Synthetic peptide; note = XENP018302 vhCDR1
NYWMN

SEQ ID NO: 13688 - protein, 19 aa, synthetic construct
  source 1..19: note = Description of Artificial Sequence: Synthetic peptide; note = XENP018302 vhCDR2
EIRLKSNNYATHYAEPVKG

SEQ ID NO: 13689 - protein, 11 aa, synthetic construct
  source 1..11: note = Description of Artificial Sequence: Synthetic peptide; note = XENP018302 vhCDR3
YYGSYGGYFDV

SEQ ID NO: 13690 - protein, 214 aa, synthetic construct; identical to SEQ ID NO: 11550
  source 1..214: note = Description of Artificial Sequence: Synthetic polypeptide; note = XENP018302 1G6_H1.197_L1_IgG1_PVA_/S267K Light Chain

SEQ ID NO: 13691 - protein, 107 aa, synthetic construct; identical to SEQ ID NO: 6247
  source 1..107: note = Description of Artificial Sequence: Synthetic polypeptide; note = VL of XENP018302

SEQ ID NO: 13692 - protein, 11 aa, synthetic construct
  source 1..11: note = Description of Artificial Sequence: Synthetic peptide; note = XENP018302 vlCDR1
RASQSVSNDVA

SEQ ID NO: 13693 - protein, 7 aa, synthetic construct
  source 1..7: note = Description of Artificial Sequence: Synthetic peptide; note = XENP018302 vlCDR2
YASHRYT

SEQ ID NO: 13694 - protein, 9 aa, synthetic construct
  source 1..9: note = Description of Artificial Sequence: Synthetic peptide; note = XENP018302 vlCDR3
QQDYSSPRT

SEQ ID NO: 13695 - protein, 451 aa, synthetic construct
  source 1..451: note = Description of Artificial Sequence: Synthetic polypeptide; note = XENP018303 1G6_H1.198_L1_IgG1_PVA_/S267K Heavy Chain
EVQLVESGGGLVKPGGSLRLSCAASGFTFSNYWMNWVRQAPGKGLEWVGEIRLKSNNYATHYAEPVKGRFTISRDDSKSTVYLQMNSLKTEDTAVYYCTRYYGRYGGYFDVWGAGTLVTVSSASTKGPSVFPLAPSSKSTSGGTAALGCLVKDYFPEPVTVSWNSGALTSGVHTFPAVLQSSGLYSLSSVVTVPSSSLGTQTYICNVNHKPSNTKVDKKVEPKSCDKTHTCPPCPAPPVAGPSVFLFPPKPKDTLMISRTPEVTCVVVDVKHEDPEVKFNWYVDGVEVHNAKTKPREEQYNSTYRVVSVLTVLHQDWLNGKEYKCKVSNKALPAPIEKTISKAKGQPREPQVYTLPPSREEMTKNQVSLTCLVKGFYPSDIAVEWESNGQPENNYKTTPPVLDSDGSFFLYSKLTVDKSRWQQGNVFSCSVMHEALHNHYTQKSLSLSPGK

SEQ ID NO: 13696 - protein, 122 aa, synthetic construct; identical to SEQ ID NO: 8133
  source 1..122: note = Description of Artificial Sequence: Synthetic polypeptide; note = VH of XENP018303

SEQ ID NO: 13697 - protein, 5 aa, synthetic construct
  source 1..5: note = Description of Artificial Sequence: Synthetic peptide; note = XENP018303 vhCDR1
NYWMN

SEQ ID NO: 13698 - protein, 19 aa, synthetic construct
  source 1..19: note = Description of Artificial Sequence: Synthetic peptide; note = XENP018303 vhCDR2
EIRLKSNNYATHYAEPVKG

SEQ ID NO: 13699 - protein, 11 aa, synthetic construct
  source 1..11: note = Description of Artificial Sequence: Synthetic peptide; note = XENP018303 vhCDR3
YYGRYGGYFDV

SEQ ID NO: 13700 - protein, 214 aa, synthetic construct; identical to SEQ ID NO: 11550
  source 1..214: note = Description of Artificial Sequence: Synthetic polypeptide; note = XENP018303 1G6_H1.198_L1_IgG1_PVA_/S267K Light Chain

SEQ ID NO: 13701 - protein, 107 aa, synthetic construct; identical to SEQ ID NO: 6247
  source 1..107: note = Description of Artificial Sequence: Synthetic polypeptide; note = VL of XENP018303

SEQ ID NO: 13702 - protein, 11 aa, synthetic construct
  source 1..11: note = Description of Artificial Sequence: Synthetic peptide; note = XENP018303 vlCDR1
RASQSVSNDVA

SEQ ID NO: 13703 - protein, 7 aa, synthetic construct
  source 1..7: note = Description of Artificial Sequence: Synthetic peptide; note = XENP018303 vlCDR2
YASHRYT

SEQ ID NO: 13704 - protein, 9 aa, synthetic construct
  source 1..9: note = Description of Artificial Sequence: Synthetic peptide; note = XENP018303 vlCDR3
QQDYSSPRT

SEQ ID NO: 13705 - protein, 451 aa, synthetic construct
  source 1..451: note = Description of Artificial Sequence: Synthetic polypeptide; note = XENP018304 1G6_H1.199_L1_IgG1_PVA_/S267K Heavy Chain
EVQLVESGGGLVKPGGSLRLSCAASGFTFSNYWMNWVRQAPGKGLEWVGEIRLKSNNYATHYAEPVKGRFTISRDDSKSTVYLQMNSLKTEDTAVYYCTRYYGLYGGYFDVWGAGTLVTVSSASTKGPSVFPLAPSSKSTSGGTAALGCLVKDYFPEPVTVSWNSGALTSGVHTFPAVLQSSGLYSLSSVVTVPSSSLGTQTYICNVNHKPSNTKVDKKVEPKSCDKTHTCPPCPAPPVAGPSVFLFPPKPKDTLMISRTPEVTCVVVDVKHEDPEVKFNWYVDGVEVHNAKTKPREEQYNSTYRVVSVLTVLHQDWLNGKEYKCKVSNKALPAPIEKTISKAKGQPREPQVYTLPPSREEMTKNQVSLTCLVKGFYPSDIAVEWESNGQPENNYKTTPPVLDSDGSFFLYSKLTVDKSRWQQGNVFSCSVMHEALHNHYTQKSLSLSPGK

SEQ ID NO: 13706 - protein, 122 aa, synthetic construct; identical to SEQ ID NO: 8142
  source 1..122: note = Description of Artificial Sequence: Synthetic polypeptide; note = VH of XENP018304

SEQ ID NO: 13707 - protein, 5 aa, synthetic construct
  source 1..5: note = Description of Artificial Sequence: Synthetic peptide; note = XENP018304 vhCDR1
NYWMN

SEQ ID NO: 13708 - protein, 19 aa, synthetic construct
  source 1..19: note = Description of Artificial Sequence: Synthetic peptide; note = XENP018304 vhCDR2
EIRLKSNNYATHYAEPVKG

SEQ ID NO: 13709 - protein, 11 aa, synthetic construct
  source 1..11: note = Description of Artificial Sequence: Synthetic peptide; note = XENP018304 vhCDR3
YYGLYGGYFDV

SEQ ID NO: 13710 - protein, 214 aa, synthetic construct; identical to SEQ ID NO: 11550
  source 1..214: note = Description of Artificial Sequence: Synthetic polypeptide; note = XENP018304 1G6_H1.199_L1_IgG1_PVA_/S267K Light Chain

SEQ ID NO: 13711 - protein, 107 aa, synthetic construct; identical to SEQ ID NO: 6247
  source 1..107: note = Description of Artificial Sequence: Synthetic polypeptide; note = VL of XENP018304

SEQ ID NO: 13712 - protein, 11 aa, synthetic construct
  source 1..11: note = Description of Artificial Sequence: Synthetic peptide; note = XENP018304 vlCDR1
RASQSVSNDVA

SEQ ID NO: 13713 - protein, 7 aa, synthetic construct
  source 1..7: note = Description of Artificial Sequence: Synthetic peptide; note = XENP018304 vlCDR2
YASHRYT

SEQ ID NO: 13714 - protein, 9 aa, synthetic construct
  source 1..9: note = Description of Artificial Sequence: Synthetic peptide; note = XENP018304 vlCDR3
QQDYSSPRT

SEQ ID NO: 13715 - protein, 451 aa, synthetic construct
  source 1..451: note = Description of Artificial Sequence: Synthetic polypeptide; note = XENP018305 1G6_H1.200_L1_IgG1_PVA_/S267K Heavy Chain
EVQLVESGGGLVKPGGSLRLSCAASGFTFSNYWMNWVRQAPGKGLEWVGEIRLKSNNYATHYAEPVKGRFTISRDDSKSTVYLQMNSLKTEDTAVYYCTRYYGTYGGYFDVWGAGTLVTVSSASTKGPSVFPLAPSSKSTSGGTAALGCLVKDYFPEPVTVSWNSGALTSGVHTFPAVLQSSGLYSLSSVVTVPSSSLGTQTYICNVNHKPSNTKVDKKVEPKSCDKTHTCPPCPAPPVAGPSVFLFPPKPKDTLMISRTPEVTCVVVDVKHEDPEVKFNWYVDGVEVHNAKTKPREEQYNSTYRVVSVLTVLHQDWLNGKEYKCKVSNKALPAPIEKTISKAKGQPREPQVYTLPPSREEMTKNQVSLTCLVKGFYPSDIAVEWESNGQPENNYKTTPPVLDSDGSFFLYSKLTVDKSRWQQGNVFSCSVMHEALHNHYTQKSLSLSPGK

SEQ ID NO: 13716 - protein, 122 aa, synthetic construct; identical to SEQ ID NO: 8151
  source 1..122: note = Description of Artificial Sequence: Synthetic polypeptide; note = VH of XENP018305

SEQ ID NO: 13717 - protein, 5 aa, synthetic construct
  source 1..5: note = Description of Artificial Sequence: Synthetic peptide; note = XENP018305 vhCDR1
NYWMN

SEQ ID NO: 13718 - protein, 19 aa, synthetic construct
  source 1..19: note = Description of Artificial Sequence: Synthetic peptide; note = XENP018305 vhCDR2
EIRLKSNNYATHYAEPVKG

SEQ ID NO: 13719 - protein, 11 aa, synthetic construct
  source 1..11: note = Description of Artificial Sequence: Synthetic peptide; note = XENP018305 vhCDR3
YYGTYGGYFDV

SEQ ID NO: 13720 - protein, 214 aa, synthetic construct; identical to SEQ ID NO: 11550
  source 1..214: note = Description of Artificial Sequence: Synthetic polypeptide; note = XENP018305 1G6_H1.200_L1_IgG1_PVA_/S267K Light Chain

SEQ ID NO: 13721 - protein, 107 aa, synthetic construct; identical to SEQ ID NO: 6247
  source 1..107: note = Description of Artificial Sequence: Synthetic polypeptide; note = VL of XENP018305

SEQ ID NO: 13722 - protein, 11 aa, synthetic construct
  source 1..11: note = Description of Artificial Sequence: Synthetic peptide; note = XENP018305 vlCDR1
RASQSVSNDVA

SEQ ID NO: 13723 - protein, 7 aa, synthetic construct
  source 1..7: note = Description of Artificial Sequence: Synthetic peptide; note = XENP018305 vlCDR2
YASHRYT

SEQ ID NO: 13724 - protein, 9 aa, synthetic construct
  source 1..9: note = Description of Artificial Sequence: Synthetic peptide; note = XENP018305 vlCDR3
QQDYSSPRT

SEQ ID NO: 13725 - protein, 451 aa, synthetic construct
  source 1..451: note = Description of Artificial Sequence: Synthetic polypeptide; note = XENP018306 1G6_H1.201_L1_IgG1_PVA_/S267K Heavy Chain
EVQLVESGGGLVKPGGSLRLSCAASGFTFSNYWMNWVRQAPGKGLEWVGEIRLKSNNYATHYAEPVKGRFTISRDDSKSTVYLQMNSLKTEDTAVYYCTRYYGGYGGYFDVWGAGTLVTVSSASTKGPSVFPLAPSSKSTSGGTAALGCLVKDYFPEPVTVSWNSGALTSGVHTFPAVLQSSGLYSLSSVVTVPSSSLGTQTYICNVNHKPSNTKVDKKVEPKSCDKTHTCPPCPAPPVAGPSVFLFPPKPKDTLMISRTPEVTCVVVDVKHEDPEVKFNWYVDGVEVHNAKTKPREEQYNSTYRVVSVLTVLHQDWLNGKEYKCKVSNKALPAPIEKTISKAKGQPREPQVYTLPPSREEMTKNQVSLTCLVKGFYPSDIAVEWESNGQPENNYKTTPPVLDSDGSFFLYSKLTVDKSRWQQGNVFSCSVMHEALHNHYTQKSLSLSPGK

SEQ ID NO: 13726 - protein, 122 aa, synthetic construct; identical to SEQ ID NO: 8160
  source 1..122: note = Description of Artificial Sequence: Synthetic polypeptide; note = VH of XENP018306

SEQ ID NO: 13727 - protein, 5 aa, synthetic construct
  source 1..5: note = Description of Artificial Sequence: Synthetic peptide; note = XENP018306 vhCDR1
NYWMN

SEQ ID NO: 13728 - protein, 19 aa, synthetic construct
  source 1..19: note = Description of Artificial Sequence: Synthetic peptide; note = XENP018306 vhCDR2
EIRLKSNNYATHYAEPVKG

SEQ ID NO: 13729 - protein, 11 aa, synthetic construct
  source 1..11: note = Description of Artificial Sequence: Synthetic peptide; note = XENP018306 vhCDR3
YYGGYGGYFDV

SEQ ID NO: 13730 - protein, 214 aa, synthetic construct; identical to SEQ ID NO: 11550
  source 1..214: note = Description of Artificial Sequence: Synthetic polypeptide; note = XENP018306 1G6_H1.201_L1_IgG1_PVA_/S267K Light Chain

SEQ ID NO: 13731 - protein, 107 aa, synthetic construct; identical to SEQ ID NO: 6247
  source 1..107: note = Description of Artificial Sequence: Synthetic polypeptide; note = VL of XENP018306

SEQ ID NO: 13732 - protein, 11 aa, synthetic construct
  source 1..11: note = Description of Artificial Sequence: Synthetic peptide; note = XENP018306 vlCDR1
RASQSVSNDVA

SEQ ID NO: 13733 - protein, 7 aa, synthetic construct
  source 1..7: note = Description of Artificial Sequence: Synthetic peptide; note = XENP018306 vlCDR2
YASHRYT

SEQ ID NO: 13734 - protein, 9 aa, synthetic construct
  source 1..9: note = Description of Artificial Sequence: Synthetic peptide; note = XENP018306 vlCDR3
QQDYSSPRT

SEQ ID NO: 13735 - protein, 451 aa, synthetic construct
  source 1..451: note = Description of Artificial Sequence: Synthetic polypeptide; note = XENP018307 1G6_H1.202_L1_IgG1_PVA_/S267K Heavy Chain
EVQLVESGGGLVKPGGSLRLSCAASGFTFSNYWMNWVRQAPGKGLEWVGEIRLKSNNYATHYAEPVKGRFTISRDDSKSTVYLQMNSLKTEDTAVYYCTRYYGFYGGYFDVWGAGTLVTVSSASTKGPSVFPLAPSSKSTSGGTAALGCLVKDYFPEPVTVSWNSGALTSGVHTFPAVLQSSGLYSLSSVVTVPSSSLGTQTYICNVNHKPSNTKVDKKVEPKSCDKTHTCPPCPAPPVAGPSVFLFPPKPKDTLMISRTPEVTCVVVDVKHEDPEVKFNWYVDGVEVHNAKTKPREEQYNSTYRVVSVLTVLHQDWLNGKEYKCKVSNKALPAPIEKTISKAKGQPREPQVYTLPPSREEMTKNQVSLTCLVKGFYPSDIAVEWESNGQPENNYKTTPPVLDSDGSFFLYSKLTVDKSRWQQGNVFSCSVMHEALHNHYTQKSLSLSPGK

SEQ ID NO: 13736 - protein, 122 aa, synthetic construct; identical to SEQ ID NO: 8169
  source 1..122: note = Description of Artificial Sequence: Synthetic polypeptide; note = VH of XENP018307

SEQ ID NO: 13737 - protein, 5 aa, synthetic construct
  source 1..5: note = Description of Artificial Sequence: Synthetic peptide; note = XENP018307 vhCDR1
NYWMN

SEQ ID NO: 13738 - protein, 19 aa, synthetic construct
  source 1..19: note = Description of Artificial Sequence: Synthetic peptide; note = XENP018307 vhCDR2
EIRLKSNNYATHYAEPVKG

SEQ ID NO: 13739 - protein, 11 aa, synthetic construct
  source 1..11: note = Description of Artificial Sequence: Synthetic peptide; note = XENP018307 vhCDR3
YYGFYGGYFDV

SEQ ID NO: 13740 - protein, 214 aa, synthetic construct; identical to SEQ ID NO: 11550
  source 1..214: note = Description of Artificial Sequence: Synthetic polypeptide; note = XENP018307 1G6_H1.202_L1_IgG1_PVA_/S267K Light Chain

SEQ ID NO: 13741 - protein, 107 aa, synthetic construct; identical to SEQ ID NO: 6247
  source 1..107: note = Description of Artificial Sequence: Synthetic polypeptide; note = VL of XENP018307

SEQ ID NO: 13742 - protein, 11 aa, synthetic construct
  source 1..11: note = Description of Artificial Sequence: Synthetic peptide; note = XENP018307 vlCDR1
RASQSVSNDVA

SEQ ID NO: 13743 - protein, 7 aa, synthetic construct
  source 1..7: note = Description of Artificial Sequence: Synthetic peptide; note = XENP018307 vlCDR2
YASHRYT

SEQ ID NO: 13744 - protein, 9 aa, synthetic construct
  source 1..9: note = Description of Artificial Sequence: Synthetic peptide; note = XENP018307 vlCDR3
QQDYSSPRT

SEQ ID NO: 13745 - protein, 451 aa, synthetic construct
  source 1..451: note = Description of Artificial Sequence: Synthetic polypeptide; note = XENP018308 1G6_H1.203_L1_IgG1_PVA_/S267K Heavy Chain
EVQLVESGGGLVKPGGSLRLSCAASGFTFSNYWMNWVRQAPGKGLEWVGEIRLKSNNYATHYAEPVKGRFTISRDDSKSTVYLQMNSLKTEDTAVYYCTRYYGNFGGYFDVWGAGTLVTVSSASTKGPSVFPLAPSSKSTSGGTAALGCLVKDYFPEPVTVSWNSGALTSGVHTFPAVLQSSGLYSLSSVVTVPSSSLGTQTYICNVNHKPSNTKVDKKVEPKSCDKTHTCPPCPAPPVAGPSVFLFPPKPKDTLMISRTPEVTCVVVDVKHEDPEVKFNWYVDGVEVHNAKTKPREEQYNSTYRVVSVLTVLHQDWLNGKEYKCKVSNKALPAPIEKTISKAKGQPREPQVYTLPPSREEMTKNQVSLTCLVKGFYPSDIAVEWESNGQPENNYKTTPPVLDSDGSFFLYSKLTVDKSRWQQGNVFSCSVMHEALHNHYTQKSLSLSPGK

SEQ ID NO: 13746 - protein, 122 aa, synthetic construct; identical to SEQ ID NO: 8178
  source 1..122: note = Description of Artificial Sequence: Synthetic polypeptide; note = VH of XENP018308

SEQ ID NO: 13747 - protein, 5 aa, synthetic construct
  source 1..5: note = Description of Artificial Sequence: Synthetic peptide; note = XENP018308 vhCDR1
NYWMN

SEQ ID NO: 13748 - protein, 19 aa, synthetic construct
  source 1..19: note = Description of Artificial Sequence: Synthetic peptide; note = XENP018308 vhCDR2
EIRLKSNNYATHYAEPVKG

SEQ ID NO: 13749 - protein, 11 aa, synthetic construct
  source 1..11: note = Description of Artificial Sequence: Synthetic peptide; note = XENP018308 vhCDR3
YYGNFGGYFDV

SEQ ID NO: 13750 - protein, 214 aa, synthetic construct; identical to SEQ ID NO: 11550
  source 1..214: note = Description of Artificial Sequence: Synthetic polypeptide; note = XENP018308 1G6_H1.203_L1_IgG1_PVA_/S267K Light Chain

SEQ ID NO: 13751 - protein, 107 aa, synthetic construct; identical to SEQ ID NO: 6247
  source 1..107: note = Description of Artificial Sequence: Synthetic polypeptide; note = VL of XENP018308

SEQ ID NO: 13752 - protein, 11 aa, synthetic construct
  source 1..11: note = Description of Artificial Sequence: Synthetic peptide; note = XENP018308 vlCDR1
RASQSVSNDVA

SEQ ID NO: 13753 - protein, 7 aa, synthetic construct
  source 1..7: note = Description of Artificial Sequence: Synthetic peptide; note = XENP018308 vlCDR2
YASHRYT

SEQ ID NO: 13754 - protein, 9 aa, synthetic construct
  source 1..9: note = Description of Artificial Sequence: Synthetic peptide; note = XENP018308 vlCDR3
QQDYSSPRT

SEQ ID NO: 13755 - protein, 451 aa, synthetic construct
  source 1..451: note = Description of Artificial Sequence: Synthetic polypeptide; note = XENP018309 1G6_H1.204_L1_IgG1_PVA_/S267K Heavy Chain
EVQLVESGGGLVKPGGSLRLSCAASGFTFSNYWMNWVRQAPGKGLEWVGEIRLKSNNYATHYAEPVKGRFTISRDDSKSTVYLQMNSLKTEDTAVYYCTRYYGNHGGYFDVWGAGTLVTVSSASTKGPSVFPLAPSSKSTSGGTAALGCLVKDYFPEPVTVSWNSGALTSGVHTFPAVLQSSGLYSLSSVVTVPSSSLGTQTYICNVNHKPSNTKVDKKVEPKSCDKTHTCPPCPAPPVAGPSVFLFPPKPKDTLMISRTPEVTCVVVDVKHEDPEVKFNWYVDGVEVHNAKTKPREEQYNSTYRVVSVLTVLHQDWLNGKEYKCKVSNKALPAPIEKTISKAKGQPREPQVYTLPPSREEMTKNQVSLTCLVKGFYPSDIAVEWESNGQPENNYKTTPPVLDSDGSFFLYSKLTVDKSRWQQGNVFSCSVMHEALHNHYTQKSLSLSPGK

SEQ ID NO: 13756 - protein, 122 aa, synthetic construct; identical to SEQ ID NO: 8187
  source 1..122: note = Description of Artificial Sequence: Synthetic polypeptide; note = VH of XENP018309

SEQ ID NO: 13757 - protein, 5 aa, synthetic construct
  source 1..5: note = Description of Artificial Sequence: Synthetic peptide; note = XENP018309 vhCDR1
NYWMN

SEQ ID NO: 13758 - protein, 19 aa, synthetic construct
  source 1..19: note = Description of Artificial Sequence: Synthetic peptide; note = XENP018309 vhCDR2
EIRLKSNNYATHYAEPVKG

SEQ ID NO: 13759 - protein, 11 aa, synthetic construct
  source 1..11: note = Description of Artificial Sequence: Synthetic peptide; note = XENP018309 vhCDR3
YYGNHGGYFDV

SEQ ID NO: 13760 - protein, 214 aa, synthetic construct; identical to SEQ ID NO: 11550
  source 1..214: note = Description of Artificial Sequence: Synthetic polypeptide; note = XENP018309 1G6_H1.204_L1_IgG1_PVA_/S267K Light Chain

SEQ ID NO: 13761 - protein, 107 aa, synthetic construct; identical to SEQ ID NO: 6247
  source 1..107: note = Description of Artificial Sequence: Synthetic polypeptide; note = VL of XENP018309

SEQ ID NO: 13762 - protein, 11 aa, synthetic construct
  source 1..11: note = Description of Artificial Sequence: Synthetic peptide; note = XENP018309 vlCDR1
RASQSVSNDVA

SEQ ID NO: 13763 - protein, 7 aa, synthetic construct
  source 1..7: note = Description of Artificial Sequence: Synthetic peptide; note = XENP018309 vlCDR2
YASHRYT

SEQ ID NO: 13764 - protein, 9 aa, synthetic construct
  source 1..9: note = Description of Artificial Sequence: Synthetic peptide; note = XENP018309 vlCDR3
QQDYSSPRT

SEQ ID NO: 13765 - protein, 451 aa, synthetic construct
  source 1..451: note = Description of Artificial Sequence: Synthetic polypeptide; note = XENP018310 1G6_H1.205_L1_IgG1_PVA_/S267K Heavy Chain
EVQLVESGGGLVKPGGSLRLSCAASGFTFSNYWMNWVRQAPGKGLEWVGEIRLKSNNYATHYAEPVKGRFTISRDDSKSTVYLQMNSLKTEDTAVYYCTRYYGNLGGYFDVWGAGTLVTVSSASTKGPSVFPLAPSSKSTSGGTAALGCLVKDYFPEPVTVSWNSGALTSGVHTFPAVLQSSGLYSLSSVVTVPSSSLGTQTYICNVNHKPSNTKVDKKVEPKSCDKTHTCPPCPAPPVAGPSVFLFPPKPKDTLMISRTPEVTCVVVDVKHEDPEVKFNWYVDGVEVHNAKTKPREEQYNSTYRVVSVLTVLHQDWLNGKEYKCKVSNKALPAPIEKTISKAKGQPREPQVYTLPPSREEMTKNQVSLTCLVKGFYPSDIAVEWESNGQPENNYKTTPPVLDSDGSFFLYSKLTVDKSRWQQGNVFSCSVMHEALHNHYTQKSLSLSPGK

SEQ ID NO: 13766 - protein, 122 aa, synthetic construct; identical to SEQ ID NO: 8196
  source 1..122: note = Description of Artificial Sequence: Synthetic polypeptide; note = VH of XENP018310

SEQ ID NO: 13767 - protein, 5 aa, synthetic construct
  source 1..5: note = Description of Artificial Sequence: Synthetic peptide; note = XENP018310 vhCDR1
NYWMN

SEQ ID NO: 13768 - protein, 19 aa, synthetic construct
  source 1..19: note = Description of Artificial Sequence: Synthetic peptide; note = XENP018310 vhCDR2
EIRLKSNNYATHYAEPVKG

SEQ ID NO: 13769 - protein, 11 aa, synthetic construct
  source 1..11: note = Description of Artificial Sequence: Synthetic peptide; note = XENP018310 vhCDR3
YYGNLGGYFDV

SEQ ID NO: 13770 - protein, 214 aa, synthetic construct; identical to SEQ ID NO: 11550
  source 1..214: note = Description of Artificial Sequence: Synthetic polypeptide; note = XENP018310 1G6_H1.205_L1_IgG1_PVA_/S267K Light Chain

SEQ ID NO: 13771 - protein, 107 aa, synthetic construct; identical to SEQ ID NO: 6247
  source 1..107: note = Description of Artificial Sequence: Synthetic polypeptide; note = VL of XENP018310

SEQ ID NO: 13772 - protein, 11 aa, synthetic construct
  source 1..11: note = Description of Artificial Sequence: Synthetic peptide; note = XENP018310 vlCDR1
RASQSVSNDVA

SEQ ID NO: 13773 - protein, 7 aa, synthetic construct
  source 1..7: note = Description of Artificial Sequence: Synthetic peptide; note = XENP018310 vlCDR2
YASHRYT

SEQ ID NO: 13774 - protein, 9 aa, synthetic construct
  source 1..9: note = Description of Artificial Sequence: Synthetic peptide; note = XENP018310 vlCDR3
QQDYSSPRT

SEQ ID NO: 13775 - protein, 451 aa, synthetic construct
  source 1..451: note = Description of Artificial Sequence: Synthetic polypeptide; note = XENP018311 1G6_H1.206_L1_IgG1_PVA_/S267K Heavy Chain
EVQLVESGGGLVKPGGSLRLSCAASGFTFSNYWMNWVRQAPGKGLEWVGEIRLKSNNYATHYAEPVKGRFTISRDDSKSTVYLQMNSLKTEDTAVYYCTRYYGNWGGYFDVWGAGTLVTVSSASTKGPSVFPLAPSSKSTSGGTAALGCLVKDYFPEPVTVSWNSGALTSGVHTFPAVLQSSGLYSLSSVVTVPSSSLGTQTYICNVNHKPSNTKVDKKVEPKSCDKTHTCPPCPAPPVAGPSVFLFPPKPKDTLMISRTPEVTCVVVDVKHEDPEVKFNWYVDGVEVHNAKTKPREEQYNSTYRVVSVLTVLHQDWLNGKEYKCKVSNKALPAPIEKTISKAKGQPREPQVYTLPPSREEMTKNQVSLTCLVKGFYPSDIAVEWESNGQPENNYKTTPPVLDSDGSFFLYSKLTVDKSRWQQGNVFSCSVMHEALHNHYTQKSLSLSPGK

SEQ ID NO: 13776 - protein, 122 aa, synthetic construct; identical to SEQ ID NO: 8205
  source 1..122: note = Description of Artificial Sequence: Synthetic polypeptide; note = VH of XENP018311

SEQ ID NO: 13777 - protein, 5 aa, synthetic construct
  source 1..5: note = Description of Artificial Sequence: Synthetic peptide; note = XENP018311 vhCDR1
NYWMN

SEQ ID NO: 13778 - protein, 19 aa, synthetic construct
  source 1..19: note = Description of Artificial Sequence: Synthetic peptide; note = XENP018311 vhCDR2
EIRLKSNNYATHYAEPVKG

SEQ ID NO: 13779 - protein, 11 aa, synthetic construct
  source 1..11: note = Description of Artificial Sequence: Synthetic peptide; note = XENP018311 vhCDR3
YYGNWGGYFDV

SEQ ID NO: 13780 - protein, 214 aa, synthetic construct; identical to SEQ ID NO: 11550
  source 1..214: note = Description of Artificial Sequence: Synthetic polypeptide; note = XENP018311 1G6_H1.206_L1_IgG1_PVA_/S267K Light Chain

SEQ ID NO: 13781 - protein, 107 aa, synthetic construct; identical to SEQ ID NO: 6247
  source 1..107: note = Description of Artificial Sequence: Synthetic polypeptide; note = VL of XENP018311

SEQ ID NO: 13782 - protein, 11 aa, synthetic construct
  source 1..11: note = Description of Artificial Sequence: Synthetic peptide; note = XENP018311 vlCDR1
RASQSVSNDVA

SEQ ID NO: 13783 - protein, 7 aa, synthetic construct
  source 1..7: note = Description of Artificial Sequence: Synthetic peptide; note = XENP018311 vlCDR2
YASHRYT

SEQ ID NO: 13784 - protein, 9 aa, synthetic construct
  source 1..9: note = Description of Artificial Sequence: Synthetic peptide; note = XENP018311 vlCDR3
QQDYSSPRT

SEQ ID NO: 13785 - protein, 451 aa, synthetic construct
  source 1..451: note = Description of Artificial Sequence: Synthetic polypeptide; note = XENP018312 1G6_H1.207_L1_IgG1_PVA_/S267K Heavy Chain
EVQLVESGGGLVKPGGSLRLSCAASGFTFSNYWMNWVRQAPGKGLEWVGEIRLKSNNYATHYAEPVKGRFTISRDDSKSTVYLQMNSLKTEDTAVYYCTRYYGNVGGYFDVWGAGTLVTVSSASTKGPSVFPLAPSSKSTSGGTAALGCLVKDYFPEPVTVSWNSGALTSGVHTFPAVLQSSGLYSLSSVVTVPSSSLGTQTYICNVNHKPSNTKVDKKVEPKSCDKTHTCPPCPAPPVAGPSVFLFPPKPKDTLMISRTPEVTCVVVDVKHEDPEVKFNWYVDGVEVHNAKTKPREEQYNSTYRVVSVLTVLHQDWLNGKEYKCKVSNKALPAPIEKTISKAKGQPREPQVYTLPPSREEMTKNQVSLTCLVKGFYPSDIAVEWESNGQPENNYKTTPPVLDSDGSFFLYSKLTVDKSRWQQGNVFSCSVMHEALHNHYTQKSLSLSPGK

SEQ ID NO: 13786 - protein, 122 aa, synthetic construct; identical to SEQ ID NO: 8214
  source 1..122: note = Description of Artificial Sequence: Synthetic polypeptide; note = VH of XENP018312

SEQ ID NO: 13787 - protein, 5 aa, synthetic construct
  source 1..5: note = Description of Artificial Sequence: Synthetic peptide; note = XENP018312 vhCDR1
NYWMN

SEQ ID NO: 13788 - protein, 19 aa, synthetic construct
  source 1..19: note = Description of Artificial Sequence: Synthetic peptide; note = XENP018312 vhCDR2
EIRLKSNNYATHYAEPVKG

SEQ ID NO: 13789 - protein, 11 aa, synthetic construct
  source 1..11: note = Description of Artificial Sequence: Synthetic peptide; note = XENP018312 vhCDR3
YYGNVGGYFDV

SEQ ID NO: 13790 - protein, 214 aa, synthetic construct; identical to SEQ ID NO: 11550
  source 1..214: note = Description of Artificial Sequence: Synthetic polypeptide; note = XENP018312 1G6_H1.207_L1_IgG1_PVA_/S267K Light Chain

SEQ ID NO: 13791 - protein, 107 aa, synthetic construct; identical to SEQ ID NO: 6247
  source 1..107: note = Description of Artificial Sequence: Synthetic polypeptide; note = VL of XENP018312

SEQ ID NO: 13792 - protein, 11 aa, synthetic construct
  source 1..11: note = Description of Artificial Sequence: Synthetic peptide; note = XENP018312 vlCDR1
RASQSVSNDVA

SEQ ID NO: 13793 - protein, 7 aa, synthetic construct
  source 1..7: note = Description of Artificial Sequence: Synthetic peptide; note = XENP018312 vlCDR2
YASHRYT

SEQ ID NO: 13794 - protein, 9 aa, synthetic construct
  source 1..9: note = Description of Artificial Sequence: Synthetic peptide; note = XENP018312 vlCDR3
QQDYSSPRT

SEQ ID NO: 13795 - protein, 451 aa, synthetic construct
  source 1..451: note = Description of Artificial Sequence: Synthetic polypeptide; note = XENP018313 1G6_H1.208_L1_IgG1_PVA_/S267K Heavy Chain
EVQLVESGGGLVKPGGSLRLSCAASGFTFSNYWMNWVRQAPGKGLEWVGEIRLKSNNYATHYAEPVKGRFTISRDDSKSTVYLQMNSLKTEDTAVYYCTRYYGNAGGYFDVWGAGTLVTVSSASTKGPSVFPLAPSSKSTSGGTAALGCLVKDYFPEPVTVSWNSGALTSGVHTFPAVLQSSGLYSLSSVVTVPSSSLGTQTYICNVNHKPSNTKVDKKVEPKSCDKTHTCPPCPAPPVAGPSVFLFPPKPKDTLMISRTPEVTCVVVDVKHEDPEVKFNWYVDGVEVHNAKTKPREEQYNSTYRVVSVLTVLHQDWLNGKEYKCKVSNKALPAPIEKTISKAKGQPREPQVYTLPPSREEMTKNQVSLTCLVKGFYPSDIAVEWESNGQPENNYKTTPPVLDSDGSFFLYSKLTVDKSRWQQGNVFSCSVMHEALHNHYTQKSLSLSPGK

SEQ ID NO: 13796 - protein, 122 aa, synthetic construct; identical to SEQ ID NO: 8223
  source 1..122: note = Description of Artificial Sequence: Synthetic polypeptide; note = VH of XENP018313

SEQ ID NO: 13797 - protein, 5 aa, synthetic construct
  source 1..5: note = Description of Artificial Sequence: Synthetic peptide; note = XENP018313 vhCDR1
NYWMN

SEQ ID NO: 13798 - protein, 19 aa, synthetic construct
  source 1..19: note = Description of Artificial Sequence: Synthetic peptide; note = XENP018313 vhCDR2
EIRLKSNNYATHYAEPVKG

SEQ ID NO: 13799 - protein, 11 aa, synthetic construct
  source 1..11: note = Description of Artificial Sequence: Synthetic peptide; note = XENP018313 vhCDR3
YYGNAGGYFDV

SEQ ID NO: 13800 - protein, 214 aa, synthetic construct; identical to SEQ ID NO: 11550
  source 1..214: note = Description of Artificial Sequence: Synthetic polypeptide; note = XENP018313 1G6_H1.208_L1_IgG1_PVA_/S267K Light Chain

SEQ ID NO: 13801 - protein, 107 aa, synthetic construct; identical to SEQ ID NO: 6247
  source 1..107: note = Description of Artificial Sequence: Synthetic polypeptide; note = VL of XENP018313

SEQ ID NO: 13802 - protein, 11 aa, synthetic construct
  source 1..11: note = Description of Artificial Sequence: Synthetic peptide; note = XENP018313 vlCDR1
RASQSVSNDVA

SEQ ID NO: 13803 - protein, 7 aa, synthetic construct
  source 1..7: note = Description of Artificial Sequence: Synthetic peptide; note = XENP018313 vlCDR2
YASHRYT

SEQ ID NO: 13804 - protein, 9 aa, synthetic construct
  source 1..9: note = Description of Artificial Sequence: Synthetic peptide; note = XENP018313 vlCDR3
QQDYSSPRT

SEQ ID NO: 13805 - protein, 451 aa, synthetic construct
  source 1..451: note = Description of Artificial Sequence: Synthetic polypeptide; note = XENP018314 1G6_H1.209_L1_IgG1_PVA_/S267K Heavy Chain
EVQLVESGGGLVKPGGSLRLSCAASGFTFSNYWMNWVRQAPGKGLEWVGEIRLKSNNYATHYAEPVKGRFTISRDDSKSTVYLQMNSLKTEDTAVYYCTRYYGNQGGYFDVWGAGTLVTVSSASTKGPSVFPLAPSSKSTSGGTAALGCLVKDYFPEPVTVSWNSGALTSGVHTFPAVLQSSGLYSLSSVVTVPSSSLGTQTYICNVNHKPSNTKVDKKVEPKSCDKTHTCPPCPAPPVAGPSVFLFPPKPKDTLMISRTPEVTCVVVDVKHEDPEVKFNWYVDGVEVHNAKTKPREEQYNSTYRVVSVLTVLHQDWLNGKEYKCKVSNKALPAPIEKTISKAKGQPREPQVYTLPPSREEMTKNQVSLTCLVKGFYPSDIAVEWESNGQPENNYKTTPPVLDSDGSFFLYSKLTVDKSRWQQGNVFSCSVMHEALHNHYTQKSLSLSPGK

SEQ ID NO: 13806 - protein, 122 aa, synthetic construct; identical to SEQ ID NO: 8232
  source 1..122: note = Description of Artificial Sequence: Synthetic polypeptide; note = VH of XENP018314

SEQ ID NO: 13807 - protein, 5 aa, synthetic construct
  source 1..5: note = Description of Artificial Sequence: Synthetic peptide; note = XENP018314 vhCDR1
NYWMN

SEQ ID NO: 13808 - protein, 19 aa, synthetic construct
  source 1..19: note = Description of Artificial Sequence: Synthetic peptide; note = XENP018314 vhCDR2
EIRLKSNNYATHYAEPVKG

SEQ ID NO: 13809 - protein, 11 aa, synthetic construct
  source 1..11: note = Description of Artificial Sequence: Synthetic peptide; note = XENP018314 vhCDR3
YYGNQGGYFDV

SEQ ID NO: 13810 - protein, 214 aa, synthetic construct; identical to SEQ ID NO: 11550
  source 1..214: note = Description of Artificial Sequence: Synthetic polypeptide; note = XENP018314 1G6_H1.209_L1_IgG1_PVA_/S267K Light Chain

SEQ ID NO: 13811 - protein, 107 aa, synthetic construct; identical to SEQ ID NO: 6247
  source 1..107: note = Description of Artificial Sequence: Synthetic polypeptide; note = VL of XENP018314

SEQ ID NO: 13812 - protein, 11 aa, synthetic construct
  source 1..11: note = Description of Artificial Sequence: Synthetic peptide; note = XENP018314 vlCDR1
RASQSVSNDVA

SEQ ID NO: 13813 - protein, 7 aa, synthetic construct
  source 1..7: note = Description of Artificial Sequence: Synthetic peptide; note = XENP018314 vlCDR2
YASHRYT

SEQ ID NO: 13814 - protein, 9 aa, synthetic construct
  source 1..9: note = Description of Artificial Sequence: Synthetic peptide; note = XENP018314 vlCDR3
QQDYSSPRT

SEQ ID NO: 13815 - protein, 451 aa, synthetic construct
  source 1..451: note = Description of Artificial Sequence: Synthetic polypeptide; note = XENP018315 1G6_H1.210_L1_IgG1_PVA_/S267K Heavy Chain
EVQLVESGGGLVKPGGSLRLSCAASGFTFSNYWMNWVRQAPGKGLEWVGEIRLKSNNYATHYAEPVKGRFTISRDDSKSTVYLQMNSLKTEDTAVYYCTRYYGNEGGYFDVWGAGTLVTVSSASTKGPSVFPLAPSSKSTSGGTAALGCLVKDYFPEPVTVSWNSGALTSGVHTFPAVLQSSGLYSLSSVVTVPSSSLGTQTYICNVNHKPSNTKVDKKVEPKSCDKTHTCPPCPAPPVAGPSVFLFPPKPKDTLMISRTPEVTCVVVDVKHEDPEVKFNWYVDGVEVHNAKTKPREEQYNSTYRVVSVLTVLHQDWLNGKEYKCKVSNKALPAPIEKTISKAKGQPREPQVYTLPPSREEMTKNQVSLTCLVKGFYPSDIAVEWESNGQPENNYKTTPPVLDSDGSFFLYSKLTVDKSRWQQGNVFSCSVMHEALHNHYTQKSLSLSPGK

SEQ ID NO: 13816 - protein, 122 aa, synthetic construct; identical to SEQ ID NO: 8241
  source 1..122: note = Description of Artificial Sequence: Synthetic polypeptide; note = VH of XENP018315

SEQ ID NO: 13817 - protein, 5 aa, synthetic construct
  source 1..5: note = Description of Artificial Sequence: Synthetic peptide; note = XENP018315 vhCDR1
NYWMN

SEQ ID NO: 13818 - protein, 19 aa, synthetic construct
  source 1..19: note = Description of Artificial Sequence: Synthetic peptide; note = XENP018315 vhCDR2
EIRLKSNNYATHYAEPVKG

SEQ ID NO: 13819 - protein, 11 aa, synthetic construct
  source 1..11: note = Description of Artificial Sequence: Synthetic peptide; note = XENP018315 vhCDR3
YYGNEGGYFDV

SEQ ID NO: 13820 - protein, 214 aa, synthetic construct; identical to SEQ ID NO: 11550
  source 1..214: note = Description of Artificial Sequence: Synthetic polypeptide; note = XENP018315 1G6_H1.210_L1_IgG1_PVA_/S267K Light Chain

SEQ ID NO: 13821 - protein, 107 aa, synthetic construct; identical to SEQ ID NO: 6247
  source 1..107: note = Description of Artificial Sequence: Synthetic polypeptide; note = VL of XENP018315

SEQ ID NO: 13822 - protein, 11 aa, synthetic construct
  source 1..11: note = Description of Artificial Sequence: Synthetic peptide; note = XENP018315 vlCDR1
RASQSVSNDVA

SEQ ID NO: 13823 - protein, 7 aa, synthetic construct
  source 1..7: note = Description of Artificial Sequence: Synthetic peptide; note = XENP018315 vlCDR2
YASHRYT

SEQ ID NO: 13824 - protein, 9 aa, synthetic construct
  source 1..9: note = Description of Artificial Sequence: Synthetic peptide; note = XENP018315 vlCDR3
QQDYSSPRT

SEQ ID NO: 13825 - protein, 451 aa, synthetic construct
  source 1..451: note = Description of Artificial Sequence: Synthetic polypeptide; note = XENP018316 1G6_H1.211_L1_IgG1_PVA_/S267K Heavy Chain
EVQLVESGGGLVKPGGSLRLSCAASGFTFSNYWMNWVRQAPGKGLEWVGEIRLKSNNYATHYAEPVKGRFTISRDDSKSTVYLQMNSLKTEDTAVYYCTRYYGNKGGYFDVWGAGTLVTVSSASTKGPSVFPLAPSSKSTSGGTAALGCLVKDYFPEPVTVSWNSGALTSGVHTFPAVLQSSGLYSLSSVVTVPSSSLGTQTYICNVNHKPSNTKVDKKVEPKSCDKTHTCPPCPAPPVAGPSVFLFPPKPKDTLMISRTPEVTCVVVDVKHEDPEVKFNWYVDGVEVHNAKTKPREEQYNSTYRVVSVLTVLHQDWLNGKEYKCKVSNKALPAPIEKTISKAKGQPREPQVYTLPPSREEMTKNQVSLTCLVKGFYPSDIAVEWESNGQPENNYKTTPPVLDSDGSFFLYSKLTVDKSRWQQGNVFSCSVMHEALHNHYTQKSLSLSPGK

SEQ ID NO: 13826 - protein, 122 aa, synthetic construct; identical to SEQ ID NO: 8250
  source 1..122: note = Description of Artificial Sequence: Synthetic polypeptide; note = VH of XENP018316

SEQ ID NO: 13827 - protein, 5 aa, synthetic construct
  source 1..5: note = Description of Artificial Sequence: Synthetic peptide; note = XENP018316 vhCDR1
NYWMN

SEQ ID NO: 13828 - protein, 19 aa, synthetic construct
  source 1..19: note = Description of Artificial Sequence: Synthetic peptide; note = XENP018316 vhCDR2
EIRLKSNNYATHYAEPVKG

SEQ ID NO: 13829 - protein, 11 aa, synthetic construct
  source 1..11: note = Description of Artificial Sequence: Synthetic peptide; note = XENP018316 vhCDR3
YYGNKGGYFDV

SEQ ID NO: 13830 - protein, 214 aa, synthetic construct; identical to SEQ ID NO: 11550
  source 1..214: note = Description of Artificial Sequence: Synthetic polypeptide; note = XENP018316 1G6_H1.211_L1_IgG1_PVA_/S267K Light Chain

SEQ ID NO: 13831 - protein, 107 aa, synthetic construct; identical to SEQ ID NO: 6247
  source 1..107: note = Description of Artificial Sequence: Synthetic polypeptide; note = VL of XENP018316

SEQ ID NO: 13832 - protein, 11 aa, synthetic construct
  source 1..11: note = Description of Artificial Sequence: Synthetic peptide; note = XENP018316 vlCDR1
RASQSVSNDVA

SEQ ID NO: 13833 - protein, 7 aa, synthetic construct
  source 1..7: note = Description of Artificial Sequence: Synthetic peptide; note = XENP018316 vlCDR2
YASHRYT

SEQ ID NO: 13834 - protein, 9 aa, synthetic construct
  source 1..9: note = Description of Artificial Sequence: Synthetic peptide; note = XENP018316 vlCDR3
QQDYSSPRT

SEQ ID NO: 13835 - protein, 451 aa, synthetic construct
  source 1..451: note = Description of Artificial Sequence: Synthetic polypeptide; note = XENP018317 1G6_H1.212_L1_IgG1_PVA_/S267K Heavy Chain
EVQLVESGGGLVKPGGSLRLSCAASGFTFSNYWMNWVRQAPGKGLEWVGEIRLKSNNYATHYAEPVKGRFTISRDDSKSTVYLQMNSLKTEDTAVYYCTRYYGNYAGYFDVWGAGTLVTVSSASTKGPSVFPLAPSSKSTSGGTAALGCLVKDYFPEPVTVSWNSGALTSGVHTFPAVLQSSGLYSLSSVVTVPSSSLGTQTYICNVNHKPSNTKVDKKVEPKSCDKTHTCPPCPAPPVAGPSVFLFPPKPKDTLMISRTPEVTCVVVDVKHEDPEVKFNWYVDGVEVHNAKTKPREEQYNSTYRVVSVLTVLHQDWLNGKEYKCKVSNKALPAPIEKTISKAKGQPREPQVYTLPPSREEMTKNQVSLTCLVKGFYPSDIAVEWESNGQPENNYKTTPPVLDSDGSFFLYSKLTVDKSRWQQGNVFSCSVMHEALHNHYTQKSLSLSPGK

SEQ ID NO: 13836 - protein, 122 aa, synthetic construct; identical to SEQ ID NO: 8259
  source 1..122: note = Description of Artificial Sequence: Synthetic polypeptide; note = VH of XENP018317

SEQ ID NO: 13837 - protein, 5 aa, synthetic construct
  source 1..5: note = Description of Artificial Sequence: Synthetic peptide; note = XENP018317 vhCDR1
NYWMN

SEQ ID NO: 13838 - protein, 19 aa, synthetic construct
  source 1..19: note = Description of Artificial Sequence: Synthetic peptide; note = XENP018317 vhCDR2
EIRLKSNNYATHYAEPVKG

SEQ ID NO: 13839 - protein, 11 aa, synthetic construct
  source 1..11: note = Description of Artificial Sequence: Synthetic peptide; note = XENP018317 vhCDR3
YYGNYAGYFDV

SEQ ID NO: 13840 - protein, 214 aa, synthetic construct; identical to SEQ ID NO: 11550
  source 1..214: note = Description of Artificial Sequence: Synthetic polypeptide; note = XENP018317 1G6_H1.212_L1_IgG1_PVA_/S267K Light Chain

SEQ ID NO: 13841 - protein, 107 aa, synthetic construct; identical to SEQ ID NO: 6247
  source 1..107: note = Description of Artificial Sequence: Synthetic polypeptide; note = VL of XENP018317

SEQ ID NO: 13842 - protein, 11 aa, synthetic construct
  source 1..11: note = Description of Artificial Sequence: Synthetic peptide; note = XENP018317 vlCDR1
RASQSVSNDVA

SEQ ID NO: 13843 - protein, 7 aa, synthetic construct
  source 1..7: note = Description of Artificial Sequence: Synthetic peptide; note = XENP018317 vlCDR2
YASHRYT

SEQ ID NO: 13844 - protein, 9 aa, synthetic construct
  source 1..9: note = Description of Artificial Sequence: Synthetic peptide; note = XENP018317 vlCDR3
QQDYSSPRT

SEQ ID NO: 13845 - protein, 451 aa, synthetic construct
  source 1..451: note = Description of Artificial Sequence: Synthetic polypeptide; note = XENP018318 1G6_H1.213_L1_IgG1_PVA_/S267K Heavy Chain
EVQLVESGGGLVKPGGSLRLSCAASGFTFSNYWMNWVRQAPGKGLEWVGEIRLKSNNYATHYAEPVKGRFTISRDDSKSTVYLQMNSLKTEDTAVYYCTRYYGNYQGYFDVWGAGTLVTVSSASTKGPSVFPLAPSSKSTSGGTAALGCLVKDYFPEPVTVSWNSGALTSGVHTFPAVLQSSGLYSLSSVVTVPSSSLGTQTYICNVNHKPSNTKVDKKVEPKSCDKTHTCPPCPAPPVAGPSVFLFPPKPKDTLMISRTPEVTCVVVDVKHEDPEVKFNWYVDGVEVHNAKTKPREEQYNSTYRVVSVLTVLHQDWLNGKEYKCKVSNKALPAPIEKTISKAKGQPREPQVYTLPPSREEMTKNQVSLTCLVKGFYPSDIAVEWESNGQPENNYKTTPPVLDSDGSFFLYSKLTVDKSRWQQGNVFSCSVMHEALHNHYTQKSLSLSPGK

SEQ ID NO: 13846 - protein, 122 aa, synthetic construct; identical to SEQ ID NO: 8268
  source 1..122: note = Description of Artificial Sequence: Synthetic polypeptide; note = VH of XENP018318

SEQ ID NO: 13847 - protein, 5 aa, synthetic construct
  source 1..5: note = Description of Artificial Sequence: Synthetic peptide; note = XENP018318 vhCDR1
NYWMN

SEQ ID NO: 13848 - protein, 19 aa, synthetic construct
  source 1..19: note = Description of Artificial Sequence: Synthetic peptide; note = XENP018318 vhCDR2
EIRLKSNNYATHYAEPVKG

SEQ ID NO: 13849 - protein, 11 aa, synthetic construct
  source 1..11: note = Description of Artificial Sequence: Synthetic peptide; note = XENP018318 vhCDR3
YYGNYQGYFDV

SEQ ID NO: 13850 - protein, 214 aa, synthetic construct; identical to SEQ ID NO: 11550
  source 1..214: note = Description of Artificial Sequence: Synthetic polypeptide; note = XENP018318 1G6_H1.213_L1_IgG1_PVA_/S267K Light Chain

SEQ ID NO: 13851 - protein, 107 aa, synthetic construct; identical to SEQ ID NO: 6247
  source 1..107: note = Description of Artificial Sequence: Synthetic polypeptide; note = VL of XENP018318

SEQ ID NO: 13852 - protein, 11 aa, synthetic construct
  source 1..11: note = Description of Artificial Sequence: Synthetic peptide; note = XENP018318 vlCDR1
RASQSVSNDVA

SEQ ID NO: 13853 - protein, 7 aa, synthetic construct
  source 1..7: note = Description of Artificial Sequence: Synthetic peptide; note = XENP018318 vlCDR2
YASHRYT

SEQ ID NO: 13854 - protein, 9 aa, synthetic construct
  source 1..9: note = Description of Artificial Sequence: Synthetic peptide; note = XENP018318 vlCDR3
QQDYSSPRT

SEQ ID NO: 13855 - protein, 451 aa, synthetic construct
  source 1..451: note = Description of Artificial Sequence: Synthetic polypeptide; note = XENP018319 1G6_H1.214_L1_IgG1_PVA_/S267K Heavy Chain
EVQLVESGGGLVKPGGSLRLSCAASGFTFSNYWMNWVRQAPGKGLEWVGEIRLKSNNYATHYAEPVKGRFTISRDDSKSTVYLQMNSLKTEDTAVYYCTRYYGNYHGYFDVWGAGTLVTVSSASTKGPSVFPLAPSSKSTSGGTAALGCLVKDYFPEPVTVSWNSGALTSGVHTFPAVLQSSGLYSLSSVVTVPSSSLGTQTYICNVNHKPSNTKVDKKVEPKSCDKTHTCPPCPAPPVAGPSVFLFPPKPKDTLMISRTPEVTCVVVDVKHEDPEVKFNWYVDGVEVHNAKTKPREEQYNSTYRVVSVLTVLHQDWLNGKEYKCKVSNKALPAPIEKTISKAKGQPREPQVYTLPPSREEMTKNQVSLTCLVKGFYPSDIAVEWESNGQPENNYKTTPPVLDSDGSFFLYSKLTVDKSRWQQGNVFSCSVMHEALHNHYTQKSLSLSPGK

SEQ ID NO: 13856 - protein, 122 aa, synthetic construct; identical to SEQ ID NO: 8277
  source 1..122: note = Description of Artificial Sequence: Synthetic polypeptide; note = VH of XENP018319

SEQ ID NO: 13857 - protein, 5 aa, synthetic construct
  source 1..5: note = Description of Artificial Sequence: Synthetic peptide; note = XENP018319 vhCDR1
NYWMN

SEQ ID NO: 13858 - protein, 19 aa, synthetic construct
  source 1..19: note = Description of Artificial Sequence: Synthetic peptide; note = XENP018319 vhCDR2
EIRLKSNNYATHYAEPVKG

SEQ ID NO: 13859 - protein, 11 aa, synthetic construct
  source 1..11: note = Description of Artificial Sequence: Synthetic peptide; note = XENP018319 vhCDR3
YYGNYHGYFDV

SEQ ID NO: 13860 - protein, 214 aa, synthetic construct; identical to SEQ ID NO: 11550
  source 1..214: note = Description of Artificial Sequence: Synthetic polypeptide; note = XENP018319 1G6_H1.214_L1_IgG1_PVA_/S267K Light Chain

SEQ ID NO: 13861 - protein, 107 aa, synthetic construct; identical to SEQ ID NO: 6247
  source 1..107: note = Description of Artificial Sequence: Synthetic polypeptide; note = VL of XENP018319

SEQ ID NO: 13862 - protein, 11 aa, synthetic construct
  source 1..11: note = Description of Artificial Sequence: Synthetic peptide; note = XENP018319 vlCDR1
RASQSVSNDVA

SEQ ID NO: 13863 - protein, 7 aa, synthetic construct
  source 1..7: note = Description of Artificial Sequence: Synthetic peptide; note = XENP018319 vlCDR2
YASHRYT

SEQ ID NO: 13864 - protein, 9 aa, synthetic construct
  source 1..9: note = Description of Artificial Sequence: Synthetic peptide; note = XENP018319 vlCDR3
QQDYSSPRT

SEQ ID NO: 13865 - protein, 451 aa, synthetic construct
  source 1..451: note = Description of Artificial Sequence: Synthetic polypeptide; note = XENP018320 1G6_H1.215_L1_IgG1_PVA_/S267K Heavy Chain
EVQLVESGGGLVKPGGSLRLSCAASGFTFSNYWMNWVRQAPGKGLEWVGEIRLKSNNYATHYAEPVKGRFTISRDDSKSTVYLQMNSLKTEDTAVYYCTRYYGNYDGYFDVWGAGTLVTVSSASTKGPSVFPLAPSSKSTSGGTAALGCLVKDYFPEPVTVSWNSGALTSGVHTFPAVLQSSGLYSLSSVVTVPSSSLGTQTYICNVNHKPSNTKVDKKVEPKSCDKTHTCPPCPAPPVAGPSVFLFPPKPKDTLMISRTPEVTCVVVDVKHEDPEVKFNWYVDGVEVHNAKTKPREEQYNSTYRVVSVLTVLHQDWLNGKEYKCKVSNKALPAPIEKTISKAKGQPREPQVYTLPPSREEMTKNQVSLTCLVKGFYPSDIAVEWESNGQPENNYKTTPPVLDSDGSFFLYSKLTVDKSRWQQGNVFSCSVMHEALHNHYTQKSLSLSPGK

SEQ ID NO: 13866 - protein, 122 aa, synthetic construct; identical to SEQ ID NO: 8286
  source 1..122: note = Description of Artificial Sequence: Synthetic polypeptide; note = VH of XENP018320

SEQ ID NO: 13867 - protein, 5 aa, synthetic construct
  source 1..5: note = Description of Artificial Sequence: Synthetic peptide; note = XENP018320 vhCDR1
NYWMN

SEQ ID NO: 13868 - protein, 19 aa, synthetic construct
  source 1..19: note = Description of Artificial Sequence: Synthetic peptide; note = XENP018320 vhCDR2
EIRLKSNNYATHYAEPVKG

SEQ ID NO: 13869 - protein, 11 aa, synthetic construct
  source 1..11: note = Description of Artificial Sequence: Synthetic peptide; note = XENP018320 vhCDR3
YYGNYDGYFDV

SEQ ID NO: 13870 - protein, 214 aa, synthetic construct; identical to SEQ ID NO: 11550
  source 1..214: note = Description of Artificial Sequence: Synthetic polypeptide; note = XENP018320 1G6_H1.215_L1_IgG1_PVA_/S267K Light Chain

SEQ ID NO: 13871 - protein, 107 aa, synthetic construct; identical to SEQ ID NO: 6247
  source 1..107: note = Description of Artificial Sequence: Synthetic polypeptide; note = VL of XENP018320

SEQ ID NO: 13872 - protein, 11 aa, synthetic construct
  source 1..11: note = Description of Artificial Sequence: Synthetic peptide; note = XENP018320 vlCDR1
RASQSVSNDVA

SEQ ID NO: 13873 - protein, 7 aa, synthetic construct
  source 1..7: note = Description of Artificial Sequence: Synthetic peptide; note = XENP018320 vlCDR2
YASHRYT

SEQ ID NO: 13874 - protein, 9 aa, synthetic construct
  source 1..9: note = Description of Artificial Sequence: Synthetic peptide; note = XENP018320 vlCDR3
QQDYSSPRT

SEQ ID NO: 13875 - protein, 451 aa, synthetic construct
  source 1..451: note = Description of Artificial Sequence: Synthetic polypeptide; note = XENP018321 1G6_H1.216_L1_IgG1_PVA_/S267K Heavy Chain
EVQLVESGGGLVKPGGSLRLSCAASGFTFSNYWMNWVRQAPGKGLEWVGEIRLKSNNYATHYAEPVKGRFTISRDDSKSTVYLQMNSLKTEDTAVYYCTRYYGNYKGYFDVWGAGTLVTVSSASTKGPSVFPLAPSSKSTSGGTAALGCLVKDYFPEPVTVSWNSGALTSGVHTFPAVLQSSGLYSLSSVVTVPSSSLGTQTYICNVNHKPSNTKVDKKVEPKSCDKTHTCPPCPAPPVAGPSVFLFPPKPKDTLMISRTPEVTCVVVDVKHEDPEVKFNWYVDGVEVHNAKTKPREEQYNSTYRVVSVLTVLHQDWLNGKEYKCKVSNKALPAPIEKTISKAKGQPREPQVYTLPPSREEMTKNQVSLTCLVKGFYPSDIAVEWESNGQPENNYKTTPPVLDSDGSFFLYSKLTVDKSRWQQGNVFSCSVMHEALHNHYTQKSLSLSPGK

SEQ ID NO: 13876 - protein, 122 aa, synthetic construct; identical to SEQ ID NO: 8295
  source 1..122: note = Description of Artificial Sequence: Synthetic polypeptide; note = VH of XENP018321

SEQ ID NO: 13877 - protein, 5 aa, synthetic construct
  source 1..5: note = Description of Artificial Sequence: Synthetic peptide; note = XENP018321 vhCDR1
NYWMN

SEQ ID NO: 13878 - protein, 19 aa, synthetic construct
  source 1..19: note = Description of Artificial Sequence: Synthetic peptide; note = XENP018321 vhCDR2
EIRLKSNNYATHYAEPVKG

SEQ ID NO: 13879 - protein, 11 aa, synthetic construct
  source 1..11: note = Description of Artificial Sequence: Synthetic peptide; note = XENP018321 vhCDR3
YYGNYKGYFDV

SEQ ID NO: 13880 - protein, 214 aa, synthetic construct; identical to SEQ ID NO: 11550
  source 1..214: note = Description of Artificial Sequence: Synthetic polypeptide; note = XENP018321 1G6_H1.216_L1_IgG1_PVA_/S267K Light Chain

SEQ ID NO: 13881 - protein, 107 aa, synthetic construct; identical to SEQ ID NO: 6247
  source 1..107: note = Description of Artificial Sequence: Synthetic polypeptide; note = VL of XENP018321

SEQ ID NO: 13882 - protein, 11 aa, synthetic construct
  source 1..11: note = Description of Artificial Sequence: Synthetic peptide; note = XENP018321 vlCDR1
RASQSVSNDVA

SEQ ID NO: 13883 - protein, 7 aa, synthetic construct
  source 1..7: note = Description of Artificial Sequence: Synthetic peptide; note = XENP018321 vlCDR2
YASHRYT

SEQ ID NO: 13884 - protein, 9 aa, synthetic construct
  source 1..9: note = Description of Artificial Sequence: Synthetic peptide; note = XENP018321 vlCDR3
QQDYSSPRT

SEQ ID NO: 13885 - protein, 451 aa, synthetic construct
  source 1..451: note = Description of Artificial Sequence: Synthetic polypeptide; note = XENP018322 1G6_H1.217_L1_IgG1_PVA_/S267K Heavy Chain
EVQLVESGGGLVKPGGSLRLSCAASGFTFSNYWMNWVRQAPGKGLEWVGEIRLKSNNYATHYAEPVKGRFTISRDDSKSTVYLQMNSLKTEDTAVYYCTRYYGNYLGYFDVWGAGTLVTVSSASTKGPSVFPLAPSSKSTSGGTAALGCLVKDYFPEPVTVSWNSGALTSGVHTFPAVLQSSGLYSLSSVVTVPSSSLGTQTYICNVNHKPSNTKVDKKVEPKSCDKTHTCPPCPAPPVAGPSVFLFPPKPKDTLMISRTPEVTCVVVDVKHEDPEVKFNWYVDGVEVHNAKTKPREEQYNSTYRVVSVLTVLHQDWLNGKEYKCKVSNKALPAPIEKTISKAKGQPREPQVYTLPPSREEMTKNQVSLTCLVKGFYPSDIAVEWESNGQPENNYKTTPPVLDSDGSFFLYSKLTVDKSRWQQGNVFSCSVMHEALHNHYTQKSLSLSPGK

SEQ ID NO: 13886 - protein, 122 aa, synthetic construct; identical to SEQ ID NO: 8304
  source 1..122: note = Description of Artificial Sequence: Synthetic polypeptide; note = VH of XENP018322

SEQ ID NO: 13887 - protein, 5 aa, synthetic construct
  source 1..5: note = Description of Artificial Sequence: Synthetic peptide; note = XENP018322 vhCDR1
NYWMN

SEQ ID NO: 13888 - protein, 19 aa, synthetic construct
  source 1..19: note = Description of Artificial Sequence: Synthetic peptide; note = XENP018322 vhCDR2
EIRLKSNNYATHYAEPVKG

SEQ ID NO: 13889 - protein, 11 aa, synthetic construct
  source 1..11: note = Description of Artificial Sequence: Synthetic peptide; note = XENP018322 vhCDR3
YYGNYLGYFDV

SEQ ID NO: 13890 - protein, 214 aa, synthetic construct; identical to SEQ ID NO: 11550
  source 1..214: note = Description of Artificial Sequence: Synthetic polypeptide; note = XENP018322 1G6_H1.217_L1_IgG1_PVA_/S267K Light Chain

SEQ ID NO: 13891 - protein, 107 aa, synthetic construct; identical to SEQ ID NO: 6247
  source 1..107: note = Description of Artificial Sequence: Synthetic polypeptide; note = VL of XENP018322

SEQ ID NO: 13892 - protein, 11 aa, synthetic construct
  source 1..11: note = Description of Artificial Sequence: Synthetic peptide; note = XENP018322 vlCDR1
RASQSVSNDVA

SEQ ID NO: 13893 - protein, 7 aa, synthetic construct
  source 1..7: note = Description of Artificial Sequence: Synthetic peptide; note = XENP018322 vlCDR2
YASHRYT

SEQ ID NO: 13894 - protein, 9 aa, synthetic construct
  source 1..9: note = Description of Artificial Sequence: Synthetic peptide; note = XENP018322 vlCDR3
QQDYSSPRT

SEQ ID NO: 13895 - protein, 451 aa, synthetic construct
  source 1..451: note = Description of Artificial Sequence: Synthetic polypeptide; note = XENP018323 1G6_H1.218_L1_IgG1_PVA_/S267K Heavy Chain
EVQLVESGGGLVKPGGSLRLSCAASGFTFSNYWMNWVRQAPGKGLEWVGEIRLKSNNYATHYAEPVKGRFTISRDDSKSTVYLQMNSLKTEDTAVYYCTRYYGNYFGYFDVWGAGTLVTVSSASTKGPSVFPLAPSSKSTSGGTAALGCLVKDYFPEPVTVSWNSGALTSGVHTFPAVLQSSGLYSLSSVVTVPSSSLGTQTYICNVNHKPSNTKVDKKVEPKSCDKTHTCPPCPAPPVAGPSVFLFPPKPKDTLMISRTPEVTCVVVDVKHEDPEVKFNWYVDGVEVHNAKTKPREEQYNSTYRVVSVLTVLHQDWLNGKEYKCKVSNKALPAPIEKTISKAKGQPREPQVYTLPPSREEMTKNQVSLTCLVKGFYPSDIAVEWESNGQPENNYKTTPPVLDSDGSFFLYSKLTVDKSRWQQGNVFSCSVMHEALHNHYTQKSLSLSPGK

SEQ ID NO: 13896 - protein, 122 aa, synthetic construct; identical to SEQ ID NO: 8313
  source 1..122: note = Description of Artificial Sequence: Synthetic polypeptide; note = VH of XENP018323

SEQ ID NO: 13897 - protein, 5 aa, synthetic construct
  source 1..5: note = Description of Artificial Sequence: Synthetic peptide; note = XENP018323 vhCDR1
NYWMN

SEQ ID NO: 13898 - protein, 19 aa, synthetic construct
  source 1..19: note = Description of Artificial Sequence: Synthetic peptide; note = XENP018323 vhCDR2
EIRLKSNNYATHYAEPVKG

SEQ ID NO: 13899 - protein, 11 aa, synthetic construct
  source 1..11: note = Description of Artificial Sequence: Synthetic peptide; note = XENP018323 vhCDR3
YYGNYFGYFDV

SEQ ID NO: 13900 - protein, 214 aa, synthetic construct; identical to SEQ ID NO: 11550
  source 1..214: note = Description of Artificial Sequence: Synthetic polypeptide; note = XENP018323 1G6_H1.218_L1_IgG1_PVA_/S267K Light Chain

SEQ ID NO: 13901 - protein, 107 aa, synthetic construct; identical to SEQ ID NO: 6247
  source 1..107: note = Description of Artificial Sequence: Synthetic polypeptide; note = VL of XENP018323

SEQ ID NO: 13902 - protein, 11 aa, synthetic construct
  source 1..11: note = Description of Artificial Sequence: Synthetic peptide; note = XENP018323 vlCDR1
RASQSVSNDVA

SEQ ID NO: 13903 - protein, 7 aa, synthetic construct
  source 1..7: note = Description of Artificial Sequence: Synthetic peptide; note = XENP018323 vlCDR2
YASHRYT

SEQ ID NO: 13904 - protein, 9 aa, synthetic construct
  source 1..9: note = Description of Artificial Sequence: Synthetic peptide; note = XENP018323 vlCDR3
QQDYSSPRT

SEQ ID NO: 13905 - protein, 451 aa, synthetic construct
  source 1..451: note = Description of Artificial Sequence: Synthetic polypeptide; note = XENP018324 1G6_H1.219_L1_IgG1_PVA_/S267K Heavy Chain
EVQLVESGGGLVKPGGSLRLSCAASGFTFSNYWMNWVRQAPGKGLEWVGEIRLKSNNYATHYAEPVKGRFTISRDDSKSTVYLQMNSLKTEDTAVYYCTRYYGNYGAYFDVWGAGTLVTVSSASTKGPSVFPLAPSSKSTSGGTAALGCLVKDYFPEPVTVSWNSGALTSGVHTFPAVLQSSGLYSLSSVVTVPSSSLGTQTYICNVNHKPSNTKVDKKVEPKSCDKTHTCPPCPAPPVAGPSVFLFPPKPKDTLMISRTPEVTCVVVDVKHEDPEVKFNWYVDGVEVHNAKTKPREEQYNSTYRVVSVLTVLHQDWLNGKEYKCKVSNKALPAPIEKTISKAKGQPREPQVYTLPPSREEMTKNQVSLTCLVKGFYPSDIAVEWESNGQPENNYKTTPPVLDSDGSFFLYSKLTVDKSRWQQGNVFSCSVMHEALHNHYTQKSLSLSPGK

SEQ ID NO: 13906 - protein, 122 aa, synthetic construct; identical to SEQ ID NO: 8322
  source 1..122: note = Description of Artificial Sequence: Synthetic polypeptide; note = VH of XENP018324

SEQ ID NO: 13907 - protein, 5 aa, synthetic construct
  source 1..5: note = Description of Artificial Sequence: Synthetic peptide; note = XENP018324 vhCDR1
NYWMN

SEQ ID NO: 13908 - protein, 19 aa, synthetic construct
  source 1..19: note = Description of Artificial Sequence: Synthetic peptide; note = XENP018324 vhCDR2
EIRLKSNNYATHYAEPVKG

SEQ ID NO: 13909 - protein, 11 aa, synthetic construct
  source 1..11: note = Description of Artificial Sequence: Synthetic peptide; note = XENP018324 vhCDR3
YYGNYGAYFDV

SEQ ID NO: 13910 - protein, 214 aa, synthetic construct; identical to SEQ ID NO: 11550
  source 1..214: note = Description of Artificial Sequence: Synthetic polypeptide; note = XENP018324 1G6_H1.219_L1_IgG1_PVA_/S267K Light Chain

SEQ ID NO: 13911 - protein, 107 aa, synthetic construct; identical to SEQ ID NO: 6247
  source 1..107: note = Description of Artificial Sequence: Synthetic polypeptide; note = VL of XENP018324

SEQ ID NO: 13912 - protein, 11 aa, synthetic construct
  source 1..11: note = Description of Artificial Sequence: Synthetic peptide; note = XENP018324 vlCDR1
RASQSVSNDVA

SEQ ID NO: 13913 - protein, 7 aa, synthetic construct
  source 1..7: note = Description of Artificial Sequence: Synthetic peptide; note = XENP018324 vlCDR2
YASHRYT

SEQ ID NO: 13914 - protein, 9 aa, synthetic construct
  source 1..9: note = Description of Artificial Sequence: Synthetic peptide; note = XENP018324 vlCDR3
QQDYSSPRT

SEQ ID NO: 13915 - protein, 451 aa, synthetic construct
  source 1..451: note = Description of Artificial Sequence: Synthetic polypeptide; note = XENP018325 1G6_H1.220_L1_IgG1_PVA_/S267K Heavy Chain
EVQLVESGGGLVKPGGSLRLSCAASGFTFSNYWMNWVRQAPGKGLEWVGEIRLKSNNYATHYAEPVKGRFTISRDDSKSTVYLQMNSLKTEDTAVYYCTRYYGNYGSYFDVWGAGTLVTVSSASTKGPSVFPLAPSSKSTSGGTAALGCLVKDYFPEPVTVSWNSGALTSGVHTFPAVLQSSGLYSLSSVVTVPSSSLGTQTYICNVNHKPSNTKVDKKVEPKSCDKTHTCPPCPAPPVAGPSVFLFPPKPKDTLMISRTPEVTCVVVDVKHEDPEVKFNWYVDGVEVHNAKTKPREEQYNSTYRVVSVLTVLHQDWLNGKEYKCKVSNKALPAPIEKTISKAKGQPREPQVYTLPPSREEMTKNQVSLTCLVKGFYPSDIAVEWESNGQPENNYKTTPPVLDSDGSFFLYSKLTVDKSRWQQGNVFSCSVMHEALHNHYTQKSLSLSPGK

SEQ ID NO: 13916 - protein, 122 aa, synthetic construct; identical to SEQ ID NO: 8331
  source 1..122: note = Description of Artificial Sequence: Synthetic polypeptide; note = VH of XENP018325

SEQ ID NO: 13917 - protein, 5 aa, synthetic construct
  source 1..5: note = Description of Artificial Sequence: Synthetic peptide; note = XENP018325 vhCDR1
NYWMN

SEQ ID NO: 13918 - protein, 19 aa, synthetic construct
  source 1..19: note = Description of Artificial Sequence: Synthetic peptide; note = XENP018325 vhCDR2
EIRLKSNNYATHYAEPVKG

SEQ ID NO: 13919 - protein, 11 aa, synthetic construct
  source 1..11: note = Description of Artificial Sequence: Synthetic peptide; note = XENP018325 vhCDR3
YYGNYGSYFDV

SEQ ID NO: 13920 - protein, 214 aa, synthetic construct; identical to SEQ ID NO: 11550
  source 1..214: note = Description of Artificial Sequence: Synthetic polypeptide; note = XENP018325 1G6_H1.220_L1_IgG1_PVA_/S267K Light Chain

SEQ ID NO: 13921 - protein, 107 aa, synthetic construct; identical to SEQ ID NO: 6247
  source 1..107: note = Description of Artificial Sequence: Synthetic polypeptide; note = VL of XENP018325

SEQ ID NO: 13922 - protein, 11 aa, synthetic construct
  source 1..11: note = Description of Artificial Sequence: Synthetic peptide; note = XENP018325 vlCDR1
RASQSVSNDVA

SEQ ID NO: 13923 - protein, 7 aa, synthetic construct
  source 1..7: note = Description of Artificial Sequence: Synthetic peptide; note = XENP018325 vlCDR2
YASHRYT

SEQ ID NO: 13924 - protein, 9 aa, synthetic construct
  source 1..9: note = Description of Artificial Sequence: Synthetic peptide; note = XENP018325 vlCDR3
QQDYSSPRT

SEQ ID NO: 13925 - protein, 451 aa, synthetic construct
  source 1..451: note = Description of Artificial Sequence: Synthetic polypeptide; note = XENP018326 1G6_H1.221_L1_IgG1_PVA_/S267K Heavy Chain
EVQLVESGGGLVKPGGSLRLSCAASGFTFSNYWMNWVRQAPGKGLEWVGEIRLKSNNYATHYAEPVKGRFTISRDDSKSTVYLQMNSLKTEDTAVYYCTRYYGNYGTYFDVWGAGTLVTVSSASTKGPSVFPLAPSSKSTSGGTAALGCLVKDYFPEPVTVSWNSGALTSGVHTFPAVLQSSGLYSLSSVVTVPSSSLGTQTYICNVNHKPSNTKVDKKVEPKSCDKTHTCPPCPAPPVAGPSVFLFPPKPKDTLMISRTPEVTCVVVDVKHEDPEVKFNWYVDGVEVHNAKTKPREEQYNSTYRVVSVLTVLHQDWLNGKEYKCKVSNKALPAPIEKTISKAKGQPREPQVYTLPPSREEMTKNQVSLTCLVKGFYPSDIAVEWESNGQPENNYKTTPPVLDSDGSFFLYSKLTVDKSRWQQGNVFSCSVMHEALHNHYTQKSLSLSPGK

SEQ ID NO: 13926 - protein, 122 aa, synthetic construct; identical to SEQ ID NO: 8340
  source 1..122: note = Description of Artificial Sequence: Synthetic polypeptide; note = VH of XENP018326

SEQ ID NO: 13927 - protein, 5 aa, synthetic construct
  source 1..5: note = Description of Artificial Sequence: Synthetic peptide; note = XENP018326 vhCDR1
NYWMN

SEQ ID NO: 13928 - protein, 19 aa, synthetic construct
  source 1..19: note = Description of Artificial Sequence: Synthetic peptide; note = XENP018326 vhCDR2
EIRLKSNNYATHYAEPVKG

SEQ ID NO: 13929 - protein, 11 aa, synthetic construct
  source 1..11: note = Description of Artificial Sequence: Synthetic peptide; note = XENP018326 vhCDR3
YYGNYGTYFDV

SEQ ID NO: 13930 - protein, 214 aa, synthetic construct; identical to SEQ ID NO: 11550
  source 1..214: note = Description of Artificial Sequence: Synthetic polypeptide; note = XENP018326 1G6_H1.221_L1_IgG1_PVA_/S267K Light Chain

SEQ ID NO: 13931 - protein, 107 aa, synthetic construct; identical to SEQ ID NO: 6247
  source 1..107: note = Description of Artificial Sequence: Synthetic polypeptide; note = VL of XENP018326

SEQ ID NO: 13932 - protein, 11 aa, synthetic construct
  source 1..11: note = Description of Artificial Sequence: Synthetic peptide; note = XENP018326 vlCDR1
RASQSVSNDVA

SEQ ID NO: 13933 - protein, 7 aa, synthetic construct
  source 1..7: note = Description of Artificial Sequence: Synthetic peptide; note = XENP018326 vlCDR2
YASHRYT

SEQ ID NO: 13934 - protein, 9 aa, synthetic construct
  source 1..9: note = Description of Artificial Sequence: Synthetic peptide; note = XENP018326 vlCDR3
QQDYSSPRT

SEQ ID NO: 13935 - protein, 451 aa, synthetic construct
  source 1..451: note = Description of Artificial Sequence: Synthetic polypeptide; note = XENP018327 1G6_H1.222_L1_IgG1_PVA_/S267K Heavy Chain
EVQLVESGGGLVKPGGSLRLSCAASGFTFSNYWMNWVRQAPGKGLEWVGEIRLKSNNYATHYAEPVKGRFTISRDDSKSTVYLQMNSLKTEDTAVYYCTRYYGNYGNYFDVWGAGTLVTVSSASTKGPSVFPLAPSSKSTSGGTAALGCLVKDYFPEPVTVSWNSGALTSGVHTFPAVLQSSGLYSLSSVVTVPSSSLGTQTYICNVNHKPSNTKVDKKVEPKSCDKTHTCPPCPAPPVAGPSVFLFPPKPKDTLMISRTPEVTCVVVDVKHEDPEVKFNWYVDGVEVHNAKTKPREEQYNSTYRVVSVLTVLHQDWLNGKEYKCKVSNKALPAPIEKTISKAKGQPREPQVYTLPPSREEMTKNQVSLTCLVKGFYPSDIAVEWESNGQPENNYKTTPPVLDSDGSFFLYSKLTVDKSRWQQGNVFSCSVMHEALHNHYTQKSLSLSPGK

SEQ ID NO: 13936 - protein, 122 aa, synthetic construct; identical to SEQ ID NO: 8349
  source 1..122: note = Description of Artificial Sequence: Synthetic polypeptide; note = VH of XENP018327

SEQ ID NO: 13937 - protein, 5 aa, synthetic construct
  source 1..5: note = Description of Artificial Sequence: Synthetic peptide; note = XENP018327 vhCDR1
NYWMN

SEQ ID NO: 13938 - protein, 19 aa, synthetic construct
  source 1..19: note = Description of Artificial Sequence: Synthetic peptide; note = XENP018327 vhCDR2
EIRLKSNNYATHYAEPVKG

SEQ ID NO: 13939 - protein, 11 aa, synthetic construct
  source 1..11: note = Description of Artificial Sequence: Synthetic peptide; note = XENP018327 vhCDR3
YYGNYGNYFDV

SEQ ID NO: 13940 - protein, 214 aa, synthetic construct; identical to SEQ ID NO: 11550
  source 1..214: note = Description of Artificial Sequence: Synthetic polypeptide; note = XENP018327 1G6_H1.222_L1_IgG1_PVA_/S267K Light Chain

SEQ ID NO: 13941 - protein, 107 aa, synthetic construct; identical to SEQ ID NO: 6247
  source 1..107: note = Description of Artificial Sequence: Synthetic polypeptide; note = VL of XENP018327

SEQ ID NO: 13942 - protein, 11 aa, synthetic construct
  source 1..11: note = Description of Artificial Sequence: Synthetic peptide; note = XENP018327 vlCDR1
RASQSVSNDVA

SEQ ID NO: 13943 - protein, 7 aa, synthetic construct
  source 1..7: note = Description of Artificial Sequence: Synthetic peptide; note = XENP018327 vlCDR2
YASHRYT

SEQ ID NO: 13944 - protein, 9 aa, synthetic construct
  source 1..9: note = Description of Artificial Sequence: Synthetic peptide; note = XENP018327 vlCDR3
QQDYSSPRT

SEQ ID NO: 13945 - protein, 451 aa, synthetic construct
  source 1..451: note = Description of Artificial Sequence: Synthetic polypeptide; note = XENP018328 1G6_H1.223_L1_IgG1_PVA_/S267K Heavy Chain
EVQLVESGGGLVKPGGSLRLSCAASGFTFSNYWMNWVRQAPGKGLEWVGEIRLKSNNYATHYAEPVKGRFTISRDDSKSTVYLQMNSLKTEDTAVYYCTRYYGNYGHYFDVWGAGTLVTVSSASTKGPSVFPLAPSSKSTSGGTAALGCLVKDYFPEPVTVSWNSGALTSGVHTFPAVLQSSGLYSLSSVVTVPSSSLGTQTYICNVNHKPSNTKVDKKVEPKSCDKTHTCPPCPAPPVAGPSVFLFPPKPKDTLMISRTPEVTCVVVDVKHEDPEVKFNWYVDGVEVHNAKTKPREEQYNSTYRVVSVLTVLHQDWLNGKEYKCKVSNKALPAPIEKTISKAKGQPREPQVYTLPPSREEMTKNQVSLTCLVKGFYPSDIAVEWESNGQPENNYKTTPPVLDSDGSFFLYSKLTVDKSRWQQGNVFSCSVMHEALHNHYTQKSLSLSPGK

SEQ ID NO: 13946 - protein, 122 aa, synthetic construct; identical to SEQ ID NO: 8358
  source 1..122: note = Description of Artificial Sequence: Synthetic polypeptide; note = VH of XENP018328

SEQ ID NO: 13947 - protein, 5 aa, synthetic construct
  source 1..5: note = Description of Artificial Sequence: Synthetic peptide; note = XENP018328 vhCDR1
NYWMN

SEQ ID NO: 13948 - protein, 19 aa, synthetic construct
  source 1..19: note = Description of Artificial Sequence: Synthetic peptide; note = XENP018328 vhCDR2
EIRLKSNNYATHYAEPVKG

SEQ ID NO: 13949 - protein, 11 aa, synthetic construct
  source 1..11: note = Description of Artificial Sequence: Synthetic peptide; note = XENP018328 vhCDR3
YYGNYGHYFDV

SEQ ID NO: 13950 - protein, 214 aa, synthetic construct; identical to SEQ ID NO: 11550
  source 1..214: note = Description of Artificial Sequence: Synthetic polypeptide; note = XENP018328 1G6_H1.223_L1_IgG1_PVA_/S267K Light Chain

SEQ ID NO: 13951 - protein, 107 aa, synthetic construct; identical to SEQ ID NO: 6247
  source 1..107: note = Description of Artificial Sequence: Synthetic polypeptide; note = VL of XENP018328

SEQ ID NO: 13952 - protein, 11 aa, synthetic construct
  source 1..11: note = Description of Artificial Sequence: Synthetic peptide; note = XENP018328 vlCDR1
RASQSVSNDVA

SEQ ID NO: 13953 - protein, 7 aa, synthetic construct
  source 1..7: note = Description of Artificial Sequence: Synthetic peptide; note = XENP018328 vlCDR2
YASHRYT

SEQ ID NO: 13954 - protein, 9 aa, synthetic construct
  source 1..9: note = Description of Artificial Sequence: Synthetic peptide; note = XENP018328 vlCDR3
QQDYSSPRT

SEQ ID NO: 13955 - protein, 451 aa, synthetic construct
  source 1..451: note = Description of Artificial Sequence: Synthetic polypeptide; note = XENP018329 1G6_H1.224_L1_IgG1_PVA_/S267K Heavy Chain
EVQLVESGGGLVKPGGSLRLSCAASGFTFSNYWMNWVRQAPGKGLEWVGEIRLKSNNYATHYAEPVKGRFTISRDDSKSTVYLQMNSLKTEDTAVYYCTRYYGNYGDYFDVWGAGTLVTVSSASTKGPSVFPLAPSSKSTSGGTAALGCLVKDYFPEPVTVSWNSGALTSGVHTFPAVLQSSGLYSLSSVVTVPSSSLGTQTYICNVNHKPSNTKVDKKVEPKSCDKTHTCPPCPAPPVAGPSVFLFPPKPKDTLMISRTPEVTCVVVDVKHEDPEVKFNWYVDGVEVHNAKTKPREEQYNSTYRVVSVLTVLHQDWLNGKEYKCKVSNKALPAPIEKTISKAKGQPREPQVYTLPPSREEMTKNQVSLTCLVKGFYPSDIAVEWESNGQPENNYKTTPPVLDSDGSFFLYSKLTVDKSRWQQGNVFSCSVMHEALHNHYTQKSLSLSPGK

SEQ ID NO: 13956 - protein, 122 aa, synthetic construct; identical to SEQ ID NO: 8367
  source 1..122: note = Description of Artificial Sequence: Synthetic polypeptide; note = VH of XENP018329

SEQ ID NO: 13957 - protein, 5 aa, synthetic construct
  source 1..5: note = Description of Artificial Sequence: Synthetic peptide; note = XENP018329 vhCDR1
NYWMN

SEQ ID NO: 13958 - protein, 19 aa, synthetic construct
  source 1..19: note = Description of Artificial Sequence: Synthetic peptide; note = XENP018329 vhCDR2
EIRLKSNNYATHYAEPVKG

SEQ ID NO: 13959 - protein, 11 aa, synthetic construct
  source 1..11: note = Description of Artificial Sequence: Synthetic peptide; note = XENP018329 vhCDR3
YYGNYGDYFDV

SEQ ID NO: 13960 - protein, 214 aa, synthetic construct; identical to SEQ ID NO: 11550
  source 1..214: note = Description of Artificial Sequence: Synthetic polypeptide; note = XENP018329 1G6_H1.224_L1_IgG1_PVA_/S267K Light Chain

SEQ ID NO: 13961 - protein, 107 aa, synthetic construct; identical to SEQ ID NO: 6247
  source 1..107: note = Description of Artificial Sequence: Synthetic polypeptide; note = VL of XENP018329

SEQ ID NO: 13962 - protein, 11 aa, synthetic construct
  source 1..11: note = Description of Artificial Sequence: Synthetic peptide; note = XENP018329 vlCDR1
RASQSVSNDVA

SEQ ID NO: 13963 - protein, 7 aa, synthetic construct
  source 1..7: note = Description of Artificial Sequence: Synthetic peptide; note = XENP018329 vlCDR2
YASHRYT

SEQ ID NO: 13964 - protein, 9 aa, synthetic construct
  source 1..9: note = Description of Artificial Sequence: Synthetic peptide; note = XENP018329 vlCDR3
QQDYSSPRT

SEQ ID NO: 13965 - protein, 451 aa, synthetic construct
  source 1..451: note = Description of Artificial Sequence: Synthetic polypeptide; note = XENP018330 1G6_H1.225_L1_IgG1_PVA_/S267K Heavy Chain
EVQLVESGGGLVKPGGSLRLSCAASGFTFSNYWMNWVRQAPGKGLEWVGEIRLKSNNYATHYAEPVKGRFTISRDDSKSTVYLQMNSLKTEDTAVYYCTRYYGNYGKYFDVWGAGTLVTVSSASTKGPSVFPLAPSSKSTSGGTAALGCLVKDYFPEPVTVSWNSGALTSGVHTFPAVLQSSGLYSLSSVVTVPSSSLGTQTYICNVNHKPSNTKVDKKVEPKSCDKTHTCPPCPAPPVAGPSVFLFPPKPKDTLMISRTPEVTCVVVDVKHEDPEVKFNWYVDGVEVHNAKTKPREEQYNSTYRVVSVLTVLHQDWLNGKEYKCKVSNKALPAPIEKTISKAKGQPREPQVYTLPPSREEMTKNQVSLTCLVKGFYPSDIAVEWESNGQPENNYKTTPPVLDSDGSFFLYSKLTVDKSRWQQGNVFSCSVMHEALHNHYTQKSLSLSPGK

SEQ ID NO: 13966 - protein, 122 aa, synthetic construct; identical to SEQ ID NO: 8376
  source 1..122: note = Description of Artificial Sequence: Synthetic polypeptide; note = VH of XENP018330

SEQ ID NO: 13967 - protein, 5 aa, synthetic construct
  source 1..5: note = Description of Artificial Sequence: Synthetic peptide; note = XENP018330 vhCDR1
NYWMN

SEQ ID NO: 13968 - protein, 19 aa, synthetic construct
  source 1..19: note = Description of Artificial Sequence: Synthetic peptide; note = XENP018330 vhCDR2
EIRLKSNNYATHYAEPVKG

SEQ ID NO: 13969 - protein, 11 aa, synthetic construct
  source 1..11: note = Description of Artificial Sequence: Synthetic peptide; note = XENP018330 vhCDR3
YYGNYGKYFDV

SEQ ID NO: 13970 - protein, 214 aa, synthetic construct; identical to SEQ ID NO: 11550
  source 1..214: note = Description of Artificial Sequence: Synthetic polypeptide; note = XENP018330 1G6_H1.225_L1_IgG1_PVA_/S267K Light Chain

SEQ ID NO: 13971 - protein, 107 aa, synthetic construct; identical to SEQ ID NO: 6247
  source 1..107: note = Description of Artificial Sequence: Synthetic polypeptide; note = VL of XENP018330

SEQ ID NO: 13972 - protein, 11 aa, synthetic construct
  source 1..11: note = Description of Artificial Sequence: Synthetic peptide; note = XENP018330 vlCDR1
RASQSVSNDVA

SEQ ID NO: 13973 - protein, 7 aa, synthetic construct
  source 1..7: note = Description of Artificial Sequence: Synthetic peptide; note = XENP018330 vlCDR2
YASHRYT

SEQ ID NO: 13974 - protein, 9 aa, synthetic construct
  source 1..9: note = Description of Artificial Sequence: Synthetic peptide; note = XENP018330 vlCDR3
QQDYSSPRT

SEQ ID NO: 13975 - protein, 451 aa, synthetic construct
  source 1..451: note = Description of Artificial Sequence: Synthetic polypeptide; note = XENP018331 1G6_H1.226_L1_IgG1_PVA_/S267K Heavy Chain
EVQLVESGGGLVKPGGSLRLSCAASGFTFSNYWMNWVRQAPGKGLEWVGEIRLKSNNYATHYAEPVKGRFTISRDDSKSTVYLQMNSLKTEDTAVYYCTRYYGNYGLYFDVWGAGTLVTVSSASTKGPSVFPLAPSSKSTSGGTAALGCLVKDYFPEPVTVSWNSGALTSGVHTFPAVLQSSGLYSLSSVVTVPSSSLGTQTYICNVNHKPSNTKVDKKVEPKSCDKTHTCPPCPAPPVAGPSVFLFPPKPKDTLMISRTPEVTCVVVDVKHEDPEVKFNWYVDGVEVHNAKTKPREEQYNSTYRVVSVLTVLHQDWLNGKEYKCKVSNKALPAPIEKTISKAKGQPREPQVYTLPPSREEMTKNQVSLTCLVKGFYPSDIAVEWESNGQPENNYKTTPPVLDSDGSFFLYSKLTVDKSRWQQGNVFSCSVMHEALHNHYTQKSLSLSPGK

SEQ ID NO: 13976 - protein, 122 aa, synthetic construct; identical to SEQ ID NO: 8385
  source 1..122: note = Description of Artificial Sequence: Synthetic polypeptide; note = VH of XENP018331

SEQ ID NO: 13977 - protein, 5 aa, synthetic construct
  source 1..5: note = Description of Artificial Sequence: Synthetic peptide; note = XENP018331 vhCDR1
NYWMN

SEQ ID NO: 13978 - protein, 19 aa, synthetic construct
  source 1..19: note = Description of Artificial Sequence: Synthetic peptide; note = XENP018331 vhCDR2
EIRLKSNNYATHYAEPVKG

SEQ ID NO: 13979 - protein, 11 aa, synthetic construct
  source 1..11: note = Description of Artificial Sequence: Synthetic peptide; note = XENP018331 vhCDR3
YYGNYGLYFDV

SEQ ID NO: 13980 - protein, 214 aa, synthetic construct; identical to SEQ ID NO: 11550
  source 1..214: note = Description of Artificial Sequence: Synthetic polypeptide; note = XENP018331 1G6_H1.226_L1_IgG1_PVA_/S267K Light Chain

SEQ ID NO: 13981 - protein, 107 aa, synthetic construct; identical to SEQ ID NO: 6247
  source 1..107: note = Description of Artificial Sequence: Synthetic polypeptide; note = VL of XENP018331

SEQ ID NO: 13982 - protein, 11 aa, synthetic construct
  source 1..11: note = Description of Artificial Sequence: Synthetic peptide; note = XENP018331 vlCDR1
RASQSVSNDVA

SEQ ID NO: 13983 - protein, 7 aa, synthetic construct
  source 1..7: note = Description of Artificial Sequence: Synthetic peptide; note = XENP018331 vlCDR2
YASHRYT

SEQ ID NO: 13984 - protein, 9 aa, synthetic construct
  source 1..9: note = Description of Artificial Sequence: Synthetic peptide; note = XENP018331 vlCDR3
QQDYSSPRT

SEQ ID NO: 13985 - protein, 451 aa, synthetic construct
  source 1..451: note = Description of Artificial Sequence: Synthetic polypeptide; note = XENP018332 1G6_H1.227_L1_IgG1_PVA_/S267K Heavy Chain
EVQLVESGGGLVKPGGSLRLSCAASGFTFSNYWMNWVRQAPGKGLEWVGEIRLKSNNYATHYAEPVKGRFTISRDDSKSTVYLQMNSLKTEDTAVYYCTRYYGNYGFYFDVWGAGTLVTVSSASTKGPSVFPLAPSSKSTSGGTAALGCLVKDYFPEPVTVSWNSGALTSGVHTFPAVLQSSGLYSLSSVVTVPSSSLGTQTYICNVNHKPSNTKVDKKVEPKSCDKTHTCPPCPAPPVAGPSVFLFPPKPKDTLMISRTPEVTCVVVDVKHEDPEVKFNWYVDGVEVHNAKTKPREEQYNSTYRVVSVLTVLHQDWLNGKEYKCKVSNKALPAPIEKTISKAKGQPREPQVYTLPPSREEMTKNQVSLTCLVKGFYPSDIAVEWESNGQPENNYKTTPPVLDSDGSFFLYSKLTVDKSRWQQGNVFSCSVMHEALHNHYTQKSLSLSPGK

SEQ ID NO: 13986 - protein, 122 aa, synthetic construct; identical to SEQ ID NO: 8394
  source 1..122: note = Description of Artificial Sequence: Synthetic polypeptide; note = VH of XENP018332

SEQ ID NO: 13987 - protein, 5 aa, synthetic construct
  source 1..5: note = Description of Artificial Sequence: Synthetic peptide; note = XENP018332 vhCDR1
NYWMN

SEQ ID NO: 13988 - protein, 19 aa, synthetic construct
  source 1..19: note = Description of Artificial Sequence: Synthetic peptide; note = XENP018332 vhCDR2
EIRLKSNNYATHYAEPVKG

SEQ ID NO: 13989 - protein, 11 aa, synthetic construct
  source 1..11: note = Description of Artificial Sequence: Synthetic peptide; note = XENP018332 vhCDR3
YYGNYGFYFDV

SEQ ID NO: 13990 - protein, 214 aa, synthetic construct; identical to SEQ ID NO: 11550
  source 1..214: note = Description of Artificial Sequence: Synthetic polypeptide; note = XENP018332 1G6_H1.227_L1_IgG1_PVA_/S267K Light Chain

SEQ ID NO: 13991 - protein, 107 aa, synthetic construct; identical to SEQ ID NO: 6247
  source 1..107: note = Description of Artificial Sequence: Synthetic polypeptide; note = VL of XENP018332

SEQ ID NO: 13992 - protein, 11 aa, synthetic construct
  source 1..11: note = Description of Artificial Sequence: Synthetic peptide; note = XENP018332 vlCDR1
RASQSVSNDVA

SEQ ID NO: 13993 - protein, 7 aa, synthetic construct
  source 1..7: note = Description of Artificial Sequence: Synthetic peptide; note = XENP018332 vlCDR2
YASHRYT

SEQ ID NO: 13994 - protein, 9 aa, synthetic construct
  source 1..9: note = Description of Artificial Sequence: Synthetic peptide; note = XENP018332 vlCDR3
QQDYSSPRT

SEQ ID NO: 13995 - protein, 451 aa, synthetic construct
  source 1..451: note = Description of Artificial Sequence: Synthetic polypeptide; note = XENP018333 1G6_H1.228_L1_IgG1_PVA_/S267K Heavy Chain
EVQLVESGGGLVKPGGSLRLSCAASGFTFSNYWMNWVRQAPGKGLEWVGEIRLKSNNYATHYAEPVKGRFTISRDDSKSTVYLQMNSLKTEDTAVYYCTRYYGNYGGFFDVWGAGTLVTVSSASTKGPSVFPLAPSSKSTSGGTAALGCLVKDYFPEPVTVSWNSGALTSGVHTFPAVLQSSGLYSLSSVVTVPSSSLGTQTYICNVNHKPSNTKVDKKVEPKSCDKTHTCPPCPAPPVAGPSVFLFPPKPKDTLMISRTPEVTCVVVDVKHEDPEVKFNWYVDGVEVHNAKTKPREEQYNSTYRVVSVLTVLHQDWLNGKEYKCKVSNKALPAPIEKTISKAKGQPREPQVYTLPPSREEMTKNQVSLTCLVKGFYPSDIAVEWESNGQPENNYKTTPPVLDSDGSFFLYSKLTVDKSRWQQGNVFSCSVMHEALHNHYTQKSLSLSPGK

SEQ ID NO: 13996 - protein, 122 aa, synthetic construct; identical to SEQ ID NO: 8403
  source 1..122: note = Description of Artificial Sequence: Synthetic polypeptide; note = VH of XENP018333

SEQ ID NO: 13997 - protein, 5 aa, synthetic construct
  source 1..5: note = Description of Artificial Sequence: Synthetic peptide; note = XENP018333 vhCDR1
NYWMN

SEQ ID NO: 13998 - protein, 19 aa, synthetic construct
  source 1..19: note = Description of Artificial Sequence: Synthetic peptide; note = XENP018333 vhCDR2
EIRLKSNNYATHYAEPVKG

SEQ ID NO: 13999 - protein, 11 aa, synthetic construct
  source 1..11: note = Description of Artificial Sequence: Synthetic peptide; note = XENP018333 vhCDR3
YYGNYGGFFDV

SEQ ID NO: 14000 - protein, 214 aa, synthetic construct; identical to SEQ ID NO: 11550
  source 1..214: note = Description of Artificial Sequence: Synthetic polypeptide; note = XENP018333 1G6_H1.228_L1_IgG1_PVA_/S267K Light Chain

SEQ ID NO: 14001 - protein, 107 aa, synthetic construct; identical to SEQ ID NO: 6247
  source 1..107: note = Description of Artificial Sequence: Synthetic polypeptide; note = VL of XENP018333

SEQ ID NO: 14002 - protein, 11 aa, synthetic construct
  source 1..11: note = Description of Artificial Sequence: Synthetic peptide; note = XENP018333 vlCDR1
RASQSVSNDVA

SEQ ID NO: 14003 - protein, 7 aa, synthetic construct
  source 1..7: note = Description of Artificial Sequence: Synthetic peptide; note = XENP018333 vlCDR2
YASHRYT

SEQ ID NO: 14004 - protein, 9 aa, synthetic construct
  source 1..9: note = Description of Artificial Sequence: Synthetic peptide; note = XENP018333 vlCDR3
QQDYSSPRT

SEQ ID NO: 14005 - protein, 451 aa, synthetic construct
  source 1..451: note = Description of Artificial Sequence: Synthetic polypeptide; note = XENP018334 1G6_H1.229_L1_IgG1_PVA_/S267K Heavy Chain
EVQLVESGGGLVKPGGSLRLSCAASGFTFSNYWMNWVRQAPGKGLEWVGEIRLKSNNYATHYAEPVKGRFTISRDDSKSTVYLQMNSLKTEDTAVYYCTRYYGNYGGHFDVWGAGTLVTVSSASTKGPSVFPLAPSSKSTSGGTAALGCLVKDYFPEPVTVSWNSGALTSGVHTFPAVLQSSGLYSLSSVVTVPSSSLGTQTYICNVNHKPSNTKVDKKVEPKSCDKTHTCPPCPAPPVAGPSVFLFPPKPKDTLMISRTPEVTCVVVDVKHEDPEVKFNWYVDGVEVHNAKTKPREEQYNSTYRVVSVLTVLHQDWLNGKEYKCKVSNKALPAPIEKTISKAKGQPREPQVYTLPPSREEMTKNQVSLTCLVKGFYPSDIAVEWESNGQPENNYKTTPPVLDSDGSFFLYSKLTVDKSRWQQGNVFSCSVMHEALHNHYTQKSLSLSPGK

SEQ ID NO: 14006 - protein, 122 aa, synthetic construct; identical to SEQ ID NO: 8412
  source 1..122: note = Description of Artificial Sequence: Synthetic polypeptide; note = VH of XENP018334

SEQ ID NO: 14007 - protein, 5 aa, synthetic construct
  source 1..5: note = Description of Artificial Sequence: Synthetic peptide; note = XENP018334 vhCDR1
NYWMN

SEQ ID NO: 14008 - protein, 19 aa, synthetic construct
  source 1..19: note = Description of Artificial Sequence: Synthetic peptide; note = XENP018334 vhCDR2
EIRLKSNNYATHYAEPVKG

SEQ ID NO: 14009 - protein, 11 aa, synthetic construct
  source 1..11: note = Description of Artificial Sequence: Synthetic peptide; note = XENP018334 vhCDR3
YYGNYGGHFDV

SEQ ID NO: 14010 - protein, 214 aa, synthetic construct; identical to SEQ ID NO: 11550
  source 1..214: note = Description of Artificial Sequence: Synthetic polypeptide; note = XENP018334 1G6_H1.229_L1_IgG1_PVA_/S267K Light Chain

SEQ ID NO: 14011 - protein, 107 aa, synthetic construct; identical to SEQ ID NO: 6247
  source 1..107: note = Description of Artificial Sequence: Synthetic polypeptide; note = VL of XENP018334

SEQ ID NO: 14012 - protein, 11 aa, synthetic construct
  source 1..11: note = Description of Artificial Sequence: Synthetic peptide; note = XENP018334 vlCDR1
RASQSVSNDVA

SEQ ID NO: 14013 - protein, 7 aa, synthetic construct
  source 1..7: note = Description of Artificial Sequence: Synthetic peptide; note = XENP018334 vlCDR2
YASHRYT

SEQ ID NO: 14014 - protein, 9 aa, synthetic construct
  source 1..9: note = Description of Artificial Sequence: Synthetic peptide; note = XENP018334 vlCDR3
QQDYSSPRT

SEQ ID NO: 14015 - protein, 451 aa, synthetic construct
  source 1..451: note = Description of Artificial Sequence: Synthetic polypeptide; note = XENP018335 1G6_H1.230_L1_IgG1_PVA_/S267K Heavy Chain
EVQLVESGGGLVKPGGSLRLSCAASGFTFSNYWMNWVRQAPGKGLEWVGEIRLKSNNYATHYAEPVKGRFTISRDDSKSTVYLQMNSLKTEDTAVYYCTRYYGNYGGLFDVWGAGTLVTVSSASTKGPSVFPLAPSSKSTSGGTAALGCLVKDYFPEPVTVSWNSGALTSGVHTFPAVLQSSGLYSLSSVVTVPSSSLGTQTYICNVNHKPSNTKVDKKVEPKSCDKTHTCPPCPAPPVAGPSVFLFPPKPKDTLMISRTPEVTCVVVDVKHEDPEVKFNWYVDGVEVHNAKTKPREEQYNSTYRVVSVLTVLHQDWLNGKEYKCKVSNKALPAPIEKTISKAKGQPREPQVYTLPPSREEMTKNQVSLTCLVKGFYPSDIAVEWESNGQPENNYKTTPPVLDSDGSFFLYSKLTVDKSRWQQGNVFSCSVMHEALHNHYTQKSLSLSPGK

SEQ ID NO: 14016 - protein, 122 aa, synthetic construct; identical to SEQ ID NO: 8421
  source 1..122: note = Description of Artificial Sequence: Synthetic polypeptide; note = VH of XENP018335

SEQ ID NO: 14017 - protein, 5 aa, synthetic construct
  source 1..5: note = Description of Artificial Sequence: Synthetic peptide; note = XENP018335 vhCDR1
NYWMN

SEQ ID NO: 14018 - protein, 19 aa, synthetic construct
  source 1..19: note = Description of Artificial Sequence: Synthetic peptide; note = XENP018335 vhCDR2
EIRLKSNNYATHYAEPVKG

SEQ ID NO: 14019 - protein, 11 aa, synthetic construct
  source 1..11: note = Description of Artificial Sequence: Synthetic peptide; note = XENP018335 vhCDR3
YYGNYGGLFDV

SEQ ID NO: 14020 - protein, 214 aa, synthetic construct; identical to SEQ ID NO: 11550
  source 1..214: note = Description of Artificial Sequence: Synthetic polypeptide; note = XENP018335 1G6_H1.230_L1_IgG1_PVA_/S267K Light Chain

SEQ ID NO: 14021 - protein, 107 aa, synthetic construct; identical to SEQ ID NO: 6247
  source 1..107: note = Description of Artificial Sequence: Synthetic polypeptide; note = VL of XENP018335

SEQ ID NO: 14022 - protein, 11 aa, synthetic construct
  source 1..11: note = Description of Artificial Sequence: Synthetic peptide; note = XENP018335 vlCDR1
RASQSVSNDVA

SEQ ID NO: 14023 - protein, 7 aa, synthetic construct
  source 1..7: note = Description of Artificial Sequence: Synthetic peptide; note = XENP018335 vlCDR2
YASHRYT

SEQ ID NO: 14024 - protein, 9 aa, synthetic construct
  source 1..9: note = Description of Artificial Sequence: Synthetic peptide; note = XENP018335 vlCDR3
QQDYSSPRT

SEQ ID NO: 14025 - protein, 451 aa, synthetic construct
  source 1..451: note = Description of Artificial Sequence: Synthetic polypeptide; note = XENP018336 1G6_H1.231_L1_IgG1_PVA_/S267K Heavy Chain
EVQLVESGGGLVKPGGSLRLSCAASGFTFSNYWMNWVRQAPGKGLEWVGEIRLKSNNYATHYAEPVKGRFTISRDDSKSTVYLQMNSLKTEDTAVYYCTRYYGNYGGWFDVWGAGTLVTVSSASTKGPSVFPLAPSSKSTSGGTAALGCLVKDYFPEPVTVSWNSGALTSGVHTFPAVLQSSGLYSLSSVVTVPSSSLGTQTYICNVNHKPSNTKVDKKVEPKSCDKTHTCPPCPAPPVAGPSVFLFPPKPKDTLMISRTPEVTCVVVDVKHEDPEVKFNWYVDGVEVHNAKTKPREEQYNSTYRVVSVLTVLHQDWLNGKEYKCKVSNKALPAPIEKTISKAKGQPREPQVYTLPPSREEMTKNQVSLTCLVKGFYPSDIAVEWESNGQPENNYKTTPPVLDSDGSFFLYSKLTVDKSRWQQGNVFSCSVMHEALHNHYTQKSLSLSPGK

SEQ ID NO: 14026 - protein, 122 aa, synthetic construct; identical to SEQ ID NO: 8430
  source 1..122: note = Description of Artificial Sequence: Synthetic polypeptide; note = VH of XENP018336

SEQ ID NO: 14027 - protein, 5 aa, synthetic construct
  source 1..5: note = Description of Artificial Sequence: Synthetic peptide; note = XENP018336 vhCDR1
NYWMN

SEQ ID NO: 14028 - protein, 19 aa, synthetic construct
  source 1..19: note = Description of Artificial Sequence: Synthetic peptide; note = XENP018336 vhCDR2
EIRLKSNNYATHYAEPVKG

SEQ ID NO: 14029 - protein, 11 aa, synthetic construct
  source 1..11: note = Description of Artificial Sequence: Synthetic peptide; note = XENP018336 vhCDR3
YYGNYGGWFDV

SEQ ID NO: 14030 - protein, 214 aa, synthetic construct; identical to SEQ ID NO: 11550
  source 1..214: note = Description of Artificial Sequence: Synthetic polypeptide; note = XENP018336 1G6_H1.231_L1_IgG1_PVA_/S267K Light Chain

SEQ ID NO: 14031 - protein, 107 aa, synthetic construct; identical to SEQ ID NO: 6247
  source 1..107: note = Description of Artificial Sequence: Synthetic polypeptide; note = VL of XENP018336

SEQ ID NO: 14032 - protein, 11 aa, synthetic construct
  source 1..11: note = Description of Artificial Sequence: Synthetic peptide; note = XENP018336 vlCDR1
RASQSVSNDVA

SEQ ID NO: 14033 - protein, 7 aa, synthetic construct
  source 1..7: note = Description of Artificial Sequence: Synthetic peptide; note = XENP018336 vlCDR2
YASHRYT

SEQ ID NO: 14034 - protein, 9 aa, synthetic construct
  source 1..9: note = Description of Artificial Sequence: Synthetic peptide; note = XENP018336 vlCDR3
QQDYSSPRT

SEQ ID NO: 14035 - protein, 451 aa, synthetic construct
  source 1..451: note = Description of Artificial Sequence: Synthetic polypeptide; note = XENP018337 1G6_H1.232_L1_IgG1_PVA_/S267K Heavy Chain
EVQLVESGGGLVKPGGSLRLSCAASGFTFSNYWMNWVRQAPGKGLEWVGEIRLKSNNYATHYAEPVKGRFTISRDDSKSTVYLQMNSLKTEDTAVYYCTRYYGNYGGVFDVWGAGTLVTVSSASTKGPSVFPLAPSSKSTSGGTAALGCLVKDYFPEPVTVSWNSGALTSGVHTFPAVLQSSGLYSLSSVVTVPSSSLGTQTYICNVNHKPSNTKVDKKVEPKSCDKTHTCPPCPAPPVAGPSVFLFPPKPKDTLMISRTPEVTCVVVDVKHEDPEVKFNWYVDGVEVHNAKTKPREEQYNSTYRVVSVLTVLHQDWLNGKEYKCKVSNKALPAPIEKTISKAKGQPREPQVYTLPPSREEMTKNQVSLTCLVKGFYPSDIAVEWESNGQPENNYKTTPPVLDSDGSFFLYSKLTVDKSRWQQGNVFSCSVMHEALHNHYTQKSLSLSPGK

SEQ ID NO: 14036 - protein, 122 aa, synthetic construct; identical to SEQ ID NO: 8439
  source 1..122: note = Description of Artificial Sequence: Synthetic polypeptide; note = VH of XENP018337

SEQ ID NO: 14037 - protein, 5 aa, synthetic construct
  source 1..5: note = Description of Artificial Sequence: Synthetic peptide; note = XENP018337 vhCDR1
NYWMN

SEQ ID NO: 14038 - protein, 19 aa, synthetic construct
  source 1..19: note = Description of Artificial Sequence: Synthetic peptide; note = XENP018337 vhCDR2
EIRLKSNNYATHYAEPVKG

SEQ ID NO: 14039 - protein, 11 aa, synthetic construct
  source 1..11: note = Description of Artificial Sequence: Synthetic peptide; note = XENP018337 vhCDR3
YYGNYGGVFDV

SEQ ID NO: 14040 - protein, 214 aa, synthetic construct; identical to SEQ ID NO: 11550
  source 1..214: note = Description of Artificial Sequence: Synthetic polypeptide; note = XENP018337 1G6_H1.232_L1_IgG1_PVA_/S267K Light Chain

SEQ ID NO: 14041 - protein, 107 aa, synthetic construct; identical to SEQ ID NO: 6247
  source 1..107: note = Description of Artificial Sequence: Synthetic polypeptide; note = VL of XENP018337

SEQ ID NO: 14042 - protein, 11 aa, synthetic construct
  source 1..11: note = Description of Artificial Sequence: Synthetic peptide; note = XENP018337 vlCDR1
RASQSVSNDVA

SEQ ID NO: 14043 - protein, 7 aa, synthetic construct
  source 1..7: note = Description of Artificial Sequence: Synthetic peptide; note = XENP018337 vlCDR2
YASHRYT

SEQ ID NO: 14044 - protein, 9 aa, synthetic construct
  source 1..9: note = Description of Artificial Sequence: Synthetic peptide; note = XENP018337 vlCDR3
QQDYSSPRT

SEQ ID NO: 14045 - protein, 451 aa, synthetic construct
  source 1..451: note = Description of Artificial Sequence: Synthetic polypeptide; note = XENP018338 1G6_H1.233_L1_IgG1_PVA_/S267K Heavy Chain
EVQLVESGGGLVKPGGSLRLSCAASGFTFSNYWMNWVRQAPGKGLEWVGEIRLKSNNYATHYAEPVKGRFTISRDDSKSTVYLQMNSLKTEDTAVYYCTRYYGNYGGAFDVWGAGTLVTVSSASTKGPSVFPLAPSSKSTSGGTAALGCLVKDYFPEPVTVSWNSGALTSGVHTFPAVLQSSGLYSLSSVVTVPSSSLGTQTYICNVNHKPSNTKVDKKVEPKSCDKTHTCPPCPAPPVAGPSVFLFPPKPKDTLMISRTPEVTCVVVDVKHEDPEVKFNWYVDGVEVHNAKTKPREEQYNSTYRVVSVLTVLHQDWLNGKEYKCKVSNKALPAPIEKTISKAKGQPREPQVYTLPPSREEMTKNQVSLTCLVKGFYPSDIAVEWESNGQPENNYKTTPPVLDSDGSFFLYSKLTVDKSRWQQGNVFSCSVMHEALHNHYTQKSLSLSPGK

SEQ ID NO: 14046 - protein, 122 aa, synthetic construct; identical to SEQ ID NO: 8448
  source 1..122: note = Description of Artificial Sequence: Synthetic polypeptide; note = VH of XENP018338

SEQ ID NO: 14047 - protein, 5 aa, synthetic construct
  source 1..5: note = Description of Artificial Sequence: Synthetic peptide; note = XENP018338 vhCDR1
NYWMN

SEQ ID NO: 14048 - protein, 19 aa, synthetic construct
  source 1..19: note = Description of Artificial Sequence: Synthetic peptide; note = XENP018338 vhCDR2
EIRLKSNNYATHYAEPVKG

SEQ ID NO: 14049 - protein, 11 aa, synthetic construct
  source 1..11: note = Description of Artificial Sequence: Synthetic peptide; note = XENP018338 vhCDR3
YYGNYGGAFDV

SEQ ID NO: 14050 - protein, 214 aa, synthetic construct; identical to SEQ ID NO: 11550
  source 1..214: note = Description of Artificial Sequence: Synthetic polypeptide; note = XENP018338 1G6_H1.233_L1_IgG1_PVA_/S267K Light Chain

SEQ ID NO: 14051 - protein, 107 aa, synthetic construct; identical to SEQ ID NO: 6247
  source 1..107: note = Description of Artificial Sequence: Synthetic polypeptide; note = VL of XENP018338

SEQ ID NO: 14052 - protein, 11 aa, synthetic construct
  source 1..11: note = Description of Artificial Sequence: Synthetic peptide; note = XENP018338 vlCDR1
RASQSVSNDVA

SEQ ID NO: 14053 - protein, 7 aa, synthetic construct
  source 1..7: note = Description of Artificial Sequence: Synthetic peptide; note = XENP018338 vlCDR2
YASHRYT

SEQ ID NO: 14054 - protein, 9 aa, synthetic construct
  source 1..9: note = Description of Artificial Sequence: Synthetic peptide; note = XENP018338 vlCDR3
QQDYSSPRT

SEQ ID NO: 14055 - protein, 451 aa, synthetic construct
  source 1..451: note = Description of Artificial Sequence: Synthetic polypeptide; note = XENP018339 1G6_H1.234_L1_IgG1_PVA_/S267K Heavy Chain
EVQLVESGGGLVKPGGSLRLSCAASGFTFSNYWMNWVRQAPGKGLEWVGEIRLKSNNYATHYAEPVKGRFTISRDDSKSTVYLQMNSLKTEDTAVYYCTRYYGNYGGQFDVWGAGTLVTVSSASTKGPSVFPLAPSSKSTSGGTAALGCLVKDYFPEPVTVSWNSGALTSGVHTFPAVLQSSGLYSLSSVVTVPSSSLGTQTYICNVNHKPSNTKVDKKVEPKSCDKTHTCPPCPAPPVAGPSVFLFPPKPKDTLMISRTPEVTCVVVDVKHEDPEVKFNWYVDGVEVHNAKTKPREEQYNSTYRVVSVLTVLHQDWLNGKEYKCKVSNKALPAPIEKTISKAKGQPREPQVYTLPPSREEMTKNQVSLTCLVKGFYPSDIAVEWESNGQPENNYKTTPPVLDSDGSFFLYSKLTVDKSRWQQGNVFSCSVMHEALHNHYTQKSLSLSPGK

SEQ ID NO: 14056 - protein, 122 aa, synthetic construct; identical to SEQ ID NO: 8457
  source 1..122: note = Description of Artificial Sequence: Synthetic polypeptide; note = VH of XENP018339

SEQ ID NO: 14057 - protein, 5 aa, synthetic construct
  source 1..5: note = Description of Artificial Sequence: Synthetic peptide; note = XENP018339 vhCDR1
NYWMN

SEQ ID NO: 14058 - protein, 19 aa, synthetic construct
  source 1..19: note = Description of Artificial Sequence: Synthetic peptide; note = XENP018339 vhCDR2
EIRLKSNNYATHYAEPVKG

SEQ ID NO: 14059 - protein, 11 aa, synthetic construct
  source 1..11: note = Description of Artificial Sequence: Synthetic peptide; note = XENP018339 vhCDR3
YYGNYGGQFDV

SEQ ID NO: 14060 - protein, 214 aa, synthetic construct; identical to SEQ ID NO: 11550
  source 1..214: note = Description of Artificial Sequence: Synthetic polypeptide; note = XENP018339 1G6_H1.234_L1_IgG1_PVA_/S267K Light Chain

SEQ ID NO: 14061 - protein, 107 aa, synthetic construct; identical to SEQ ID NO: 6247
  source 1..107: note = Description of Artificial Sequence: Synthetic polypeptide; note = VL of XENP018339

SEQ ID NO: 14062 - protein, 11 aa, synthetic construct
  source 1..11: note = Description of Artificial Sequence: Synthetic peptide; note = XENP018339 vlCDR1
RASQSVSNDVA

SEQ ID NO: 14063 - protein, 7 aa, synthetic construct
  source 1..7: note = Description of Artificial Sequence: Synthetic peptide; note = XENP018339 vlCDR2
YASHRYT

SEQ ID NO: 14064 - protein, 9 aa, synthetic construct
  source 1..9: note = Description of Artificial Sequence: Synthetic peptide; note = XENP018339 vlCDR3
QQDYSSPRT

SEQ ID NO: 14065 - protein, 451 aa, synthetic construct
  source 1..451: note = Description of Artificial Sequence: Synthetic polypeptide; note = XENP018340 1G6_H1.235_L1_IgG1_PVA_/S267K Heavy Chain
EVQLVESGGGLVKPGGSLRLSCAASGFTFSNYWMNWVRQAPGKGLEWVGEIRLKSNNYATHYAEPVKGRFTISRDDSKSTVYLQMNSLKTEDTAVYYCTRYYGNYGGDFDVWGAGTLVTVSSASTKGPSVFPLAPSSKSTSGGTAALGCLVKDYFPEPVTVSWNSGALTSGVHTFPAVLQSSGLYSLSSVVTVPSSSLGTQTYICNVNHKPSNTKVDKKVEPKSCDKTHTCPPCPAPPVAGPSVFLFPPKPKDTLMISRTPEVTCVVVDVKHEDPEVKFNWYVDGVEVHNAKTKPREEQYNSTYRVVSVLTVLHQDWLNGKEYKCKVSNKALPAPIEKTISKAKGQPREPQVYTLPPSREEMTKNQVSLTCLVKGFYPSDIAVEWESNGQPENNYKTTPPVLDSDGSFFLYSKLTVDKSRWQQGNVFSCSVMHEALHNHYTQKSLSLSPGK

SEQ ID NO: 14066 - protein, 122 aa, synthetic construct; identical to SEQ ID NO: 8466
  source 1..122: note = Description of Artificial Sequence: Synthetic polypeptide; note = VH of XENP018340

SEQ ID NO: 14067 - protein, 5 aa, synthetic construct
  source 1..5: note = Description of Artificial Sequence: Synthetic peptide; note = XENP018340 vhCDR1
NYWMN

SEQ ID NO: 14068 - protein, 19 aa, synthetic construct
  source 1..19: note = Description of Artificial Sequence: Synthetic peptide; note = XENP018340 vhCDR2
EIRLKSNNYATHYAEPVKG

SEQ ID NO: 14069 - protein, 11 aa, synthetic construct
  source 1..11: note = Description of Artificial Sequence: Synthetic peptide; note = XENP018340 vhCDR3
YYGNYGGDFDV

SEQ ID NO: 14070 - protein, 214 aa, synthetic construct; identical to SEQ ID NO: 11550
  source 1..214: note = Description of Artificial Sequence: Synthetic polypeptide; note = XENP018340 1G6_H1.235_L1_IgG1_PVA_/S267K Light Chain

SEQ ID NO: 14071 - protein, 107 aa, synthetic construct; identical to SEQ ID NO: 6247
  source 1..107: note = Description of Artificial Sequence: Synthetic polypeptide; note = VL of XENP018340

SEQ ID NO: 14072 - protein, 11 aa, synthetic construct
  source 1..11: note = Description of Artificial Sequence: Synthetic peptide; note = XENP018340 vlCDR1
RASQSVSNDVA

SEQ ID NO: 14073 - protein, 7 aa, synthetic construct
  source 1..7: note = Description of Artificial Sequence: Synthetic peptide; note = XENP018340 vlCDR2
YASHRYT

SEQ ID NO: 14074 - protein, 9 aa, synthetic construct
  source 1..9: note = Description of Artificial Sequence: Synthetic peptide; note = XENP018340 vlCDR3
QQDYSSPRT

SEQ ID NO: 14075 - protein, 451 aa, synthetic construct
  source 1..451: note = Description of Artificial Sequence: Synthetic polypeptide; note = XENP018341 1G6_H1.236_L1_IgG1_PVA_/S267K Heavy Chain
EVQLVESGGGLVKPGGSLRLSCAASGFTFSNYWMNWVRQAPGKGLEWVGEIRLKSNNYATHYAEPVKGRFTISRDDSKSTVYLQMNSLKTEDTAVYYCTRYYGNYGGKFDVWGAGTLVTVSSASTKGPSVFPLAPSSKSTSGGTAALGCLVKDYFPEPVTVSWNSGALTSGVHTFPAVLQSSGLYSLSSVVTVPSSSLGTQTYICNVNHKPSNTKVDKKVEPKSCDKTHTCPPCPAPPVAGPSVFLFPPKPKDTLMISRTPEVTCVVVDVKHEDPEVKFNWYVDGVEVHNAKTKPREEQYNSTYRVVSVLTVLHQDWLNGKEYKCKVSNKALPAPIEKTISKAKGQPREPQVYTLPPSREEMTKNQVSLTCLVKGFYPSDIAVEWESNGQPENNYKTTPPVLDSDGSFFLYSKLTVDKSRWQQGNVFSCSVMHEALHNHYTQKSLSLSPGK

SEQ ID NO: 14076 - protein, 122 aa, synthetic construct; identical to SEQ ID NO: 8475
  source 1..122: note = Description of Artificial Sequence: Synthetic polypeptide; note = VH of XENP018341

SEQ ID NO: 14077 - protein, 5 aa, synthetic construct
  source 1..5: note = Description of Artificial Sequence: Synthetic peptide; note = XENP018341 vhCDR1
NYWMN

SEQ ID NO: 14078 - protein, 19 aa, synthetic construct
  source 1..19: note = Description of Artificial Sequence: Synthetic peptide; note = XENP018341 vhCDR2
EIRLKSNNYATHYAEPVKG

SEQ ID NO: 14079 - protein, 11 aa, synthetic construct
  source 1..11: note = Description of Artificial Sequence: Synthetic peptide; note = XENP018341 vhCDR3
YYGNYGGKFDV

SEQ ID NO: 14080 - protein, 214 aa, synthetic construct; identical to SEQ ID NO: 11550
  source 1..214: note = Description of Artificial Sequence: Synthetic polypeptide; note = XENP018341 1G6_H1.236_L1_IgG1_PVA_/S267K Light Chain

SEQ ID NO: 14081 - protein, 107 aa, synthetic construct; identical to SEQ ID NO: 6247
  source 1..107: note = Description of Artificial Sequence: Synthetic polypeptide; note = VL of XENP018341

SEQ ID NO: 14082 - protein, 11 aa, synthetic construct
  source 1..11: note = Description of Artificial Sequence: Synthetic peptide; note = XENP018341 vlCDR1
RASQSVSNDVA

SEQ ID NO: 14083 - protein, 7 aa, synthetic construct
  source 1..7: note = Description of Artificial Sequence: Synthetic peptide; note = XENP018341 vlCDR2
YASHRYT

SEQ ID NO: 14084 - protein, 9 aa, synthetic construct
  source 1..9: note = Description of Artificial Sequence: Synthetic peptide; note = XENP018341 vlCDR3
QQDYSSPRT

SEQ ID NO: 14085 - protein, 451 aa, synthetic construct
  source 1..451: note = Description of Artificial Sequence: Synthetic polypeptide; note = XENP018342 1G6_H1.237_L1_IgG1_PVA_/S267K Heavy Chain
EVQLVESGGGLVKPGGSLRLSCAASGFTFSNYWMNWVRQAPGKGLEWVGEIRLKSNNYATHYAEPVKGRFTISRDDSKSTVYLQMNSLKTEDTAVYYCTRYYGNYGGYFDYWGAGTLVTVSSASTKGPSVFPLAPSSKSTSGGTAALGCLVKDYFPEPVTVSWNSGALTSGVHTFPAVLQSSGLYSLSSVVTVPSSSLGTQTYICNVNHKPSNTKVDKKVEPKSCDKTHTCPPCPAPPVAGPSVFLFPPKPKDTLMISRTPEVTCVVVDVKHEDPEVKFNWYVDGVEVHNAKTKPREEQYNSTYRVVSVLTVLHQDWLNGKEYKCKVSNKALPAPIEKTISKAKGQPREPQVYTLPPSREEMTKNQVSLTCLVKGFYPSDIAVEWESNGQPENNYKTTPPVLDSDGSFFLYSKLTVDKSRWQQGNVFSCSVMHEALHNHYTQKSLSLSPGK

SEQ ID NO: 14086 - protein, 122 aa, synthetic construct; identical to SEQ ID NO: 8484
  source 1..122: note = Description of Artificial Sequence: Synthetic polypeptide; note = VH of XENP018342

SEQ ID NO: 14087 - protein, 5 aa, synthetic construct
  source 1..5: note = Description of Artificial Sequence: Synthetic peptide; note = XENP018342 vhCDR1
NYWMN

SEQ ID NO: 14088 - protein, 19 aa, synthetic construct
  source 1..19: note = Description of Artificial Sequence: Synthetic peptide; note = XENP018342 vhCDR2
EIRLKSNNYATHYAEPVKG

SEQ ID NO: 14089 - protein, 11 aa, synthetic construct
  source 1..11: note = Description of Artificial Sequence: Synthetic peptide; note = XENP018342 vhCDR3
YYGNYGGYFDY

SEQ ID NO: 14090 - protein, 214 aa, synthetic construct; identical to SEQ ID NO: 11550
  source 1..214: note = Description of Artificial Sequence: Synthetic polypeptide; note = XENP018342 1G6_H1.237_L1_IgG1_PVA_/S267K Light Chain

SEQ ID NO: 14091 - protein, 107 aa, synthetic construct; identical to SEQ ID NO: 6247
  source 1..107: note = Description of Artificial Sequence: Synthetic polypeptide; note = VL of XENP018342

SEQ ID NO: 14092 - protein, 11 aa, synthetic construct
  source 1..11: note = Description of Artificial Sequence: Synthetic peptide; note = XENP018342 vlCDR1
RASQSVSNDVA

SEQ ID NO: 14093 - protein, 7 aa, synthetic construct
  source 1..7: note = Description of Artificial Sequence: Synthetic peptide; note = XENP018342 vlCDR2
YASHRYT

SEQ ID NO: 14094 - protein, 9 aa, synthetic construct
  source 1..9: note = Description of Artificial Sequence: Synthetic peptide; note = XENP018342 vlCDR3
QQDYSSPRT

SEQ ID NO: 14095 - protein, 451 aa, synthetic construct
  source 1..451: note = Description of Artificial Sequence: Synthetic polypeptide; note = XENP018343 1G6_H1.238_L1_IgG1_PVA_/S267K Heavy Chain
EVQLVESGGGLVKPGGSLRLSCAASGFTFSNYWMNWVRQAPGKGLEWVGEIRLKSNNYATHYAEPVKGRFTISRDDSKSTVYLQMNSLKTEDTAVYYCTRYYGNYGGYFDVWGQGTLVTVSSASTKGPSVFPLAPSSKSTSGGTAALGCLVKDYFPEPVTVSWNSGALTSGVHTFPAVLQSSGLYSLSSVVTVPSSSLGTQTYICNVNHKPSNTKVDKKVEPKSCDKTHTCPPCPAPPVAGPSVFLFPPKPKDTLMISRTPEVTCVVVDVKHEDPEVKFNWYVDGVEVHNAKTKPREEQYNSTYRVVSVLTVLHQDWLNGKEYKCKVSNKALPAPIEKTISKAKGQPREPQVYTLPPSREEMTKNQVSLTCLVKGFYPSDIAVEWESNGQPENNYKTTPPVLDSDGSFFLYSKLTVDKSRWQQGNVFSCSVMHEALHNHYTQKSLSLSPGK

SEQ ID NO: 14096 - protein, 122 aa, synthetic construct; identical to SEQ ID NO: 8493
  source 1..122: note = Description of Artificial Sequence: Synthetic polypeptide; note = VH of XENP018343

SEQ ID NO: 14097 - protein, 5 aa, synthetic construct
  source 1..5: note = Description of Artificial Sequence: Synthetic peptide; note = XENP018343 vhCDR1
NYWMN

SEQ ID NO: 14098 - protein, 19 aa, synthetic construct
  source 1..19: note = Description of Artificial Sequence: Synthetic peptide; note = XENP018343 vhCDR2
EIRLKSNNYATHYAEPVKG

SEQ ID NO: 14099 - protein, 11 aa, synthetic construct
  source 1..11: note = Description of Artificial Sequence: Synthetic peptide; note = XENP018343 vhCDR3
YYGNYGGYFDV

SEQ ID NO: 14100 - protein, 214 aa, synthetic construct; identical to SEQ ID NO: 11550
  source 1..214: note = Description of Artificial Sequence: Synthetic polypeptide; note = XENP018343 1G6_H1.238_L1_IgG1_PVA_/S267K Light Chain

SEQ ID NO: 14101 - protein, 107 aa, synthetic construct; identical to SEQ ID NO: 6247
  source 1..107: note = Description of Artificial Sequence: Synthetic polypeptide; note = VL of XENP018343

SEQ ID NO: 14102 - protein, 11 aa, synthetic construct
  source 1..11: note = Description of Artificial Sequence: Synthetic peptide; note = XENP018343 vlCDR1
RASQSVSNDVA

SEQ ID NO: 14103 - protein, 7 aa, synthetic construct
  source 1..7: note = Description of Artificial Sequence: Synthetic peptide; note = XENP018343 vlCDR2
YASHRYT

SEQ ID NO: 14104 - protein, 9 aa, synthetic construct
  source 1..9: note = Description of Artificial Sequence: Synthetic peptide; note = XENP018343 vlCDR3
QQDYSSPRT

SEQ ID NO: 14105 - protein, 451 aa, synthetic construct; identical to SEQ ID NO: 11545
  source 1..451: note = Description of Artificial Sequence: Synthetic polypeptide; note = XENP018344 1G6_H1_L1.1_IgG1_PVA_/S267K Heavy Chain

SEQ ID NO: 14106 - protein, 122 aa, synthetic construct; identical to SEQ ID NO: 6246
  source 1..122: note = Description of Artificial Sequence: Synthetic polypeptide; note = VH of XENP018344

SEQ ID NO: 14107 - protein, 5 aa, synthetic construct
  source 1..5: note = Description of Artificial Sequence: Synthetic peptide; note = XENP018344 vhCDR1
NYWMN

SEQ ID NO: 14108 - protein, 19 aa, synthetic construct
  source 1..19: note = Description of Artificial Sequence: Synthetic peptide; note = XENP018344 vhCDR2
EIRLKSNNYATHYAEPVKG

SEQ ID NO: 14109 - protein, 11 aa, synthetic construct
  source 1..11: note = Description of Artificial Sequence: Synthetic peptide; note = XENP018344 vhCDR3
YYGNYGGYFDV

SEQ ID NO: 14110 - protein, 214 aa, synthetic construct
  source 1..214: note = Description of Artificial Sequence: Synthetic polypeptide; note = XENP018344 1G6_H1_L1.1_IgG1_PVA_/S267K Light Chain
EIVMTQSPATLSVSPGERATLSCRASQSVSNDVAWYQQKPGQSPRLLINYASHRYTGVPDRFTGSGYGTEFTLTISSLQSEDFAVYFCQQDYSSPRTFGGGTKVEIKRTVAAPSVFIFPPSDEQLKSGTASVVCLLNNFYPREAKVQWKVDNALQSGNSQESVTEQDSKDSTYSLSSTLTLSKADYEKHKVYACEVTHQGLSSPVTKSFNRGEC

SEQ ID NO: 14111 - protein, 107 aa, synthetic construct; identical to SEQ ID NO: 8503
  source 1..107: note = Description of Artificial Sequence: Synthetic polypeptide; note = VL of XENP018344

SEQ ID NO: 14112 - protein, 11 aa, synthetic construct
  source 1..11: note = Description of Artificial Sequence: Synthetic peptide; note = XENP018344 vlCDR1
RASQSVSNDVA

SEQ ID NO: 14113 - protein, 7 aa, synthetic construct
  source 1..7: note = Description of Artificial Sequence: Synthetic peptide; note = XENP018344 vlCDR2
YASHRYT

SEQ ID NO: 14114 - protein, 9 aa, synthetic construct
  source 1..9: note = Description of Artificial Sequence: Synthetic peptide; note = XENP018344 vlCDR3
QQDYSSPRT

SEQ ID NO: 14115 - protein, 451 aa, synthetic construct; identical to SEQ ID NO: 11545
  source 1..451: note = Description of Artificial Sequence: Synthetic polypeptide; note = XENP018345 1G6_H1_L1.2_IgG1_PVA_/S267K Heavy Chain

SEQ ID NO: 14116 - protein, 122 aa, synthetic construct; identical to SEQ ID NO: 6246
  source 1..122: note = Description of Artificial Sequence: Synthetic polypeptide; note = VH of XENP018345

SEQ ID NO: 14117 - protein, 5 aa, synthetic construct
  source 1..5: note = Description of Artificial Sequence: Synthetic peptide; note = XENP018345 vhCDR1
NYWMN

SEQ ID NO: 14118 - protein, 19 aa, synthetic construct
  source 1..19: note = Description of Artificial Sequence: Synthetic peptide; note = XENP018345 vhCDR2
EIRLKSNNYATHYAEPVKG

SEQ ID NO: 14119 - protein, 11 aa, synthetic construct
  source 1..11: note = Description of Artificial Sequence: Synthetic peptide; note = XENP018345 vhCDR3
YYGNYGGYFDV

SEQ ID NO: 14120 - protein, 214 aa, synthetic construct
  source 1..214: note = Description of Artificial Sequence: Synthetic polypeptide; note = XENP018345 1G6_H1_L1.2_IgG1_PVA_/S267K Light Chain
DIVMTQSPATLSVSPGERATLSCRASQSVSNDVAWYQQKPGQSPRLLINYASHRYTGVPDRFTGSGYGTEFTLTISSLQSEDFAVYFCQQDYSSPRTFGGGTKVEIKRTVAAPSVFIFPPSDEQLKSGTASVVCLLNNFYPREAKVQWKVDNALQSGNSQESVTEQDSKDSTYSLSSTLTLSKADYEKHKVYACEVTHQGLSSPVTKSFNRGEC

SEQ ID NO: 14121 - protein, 107 aa, synthetic construct; identical to SEQ ID NO: 8512
  source 1..107: note = Description of Artificial Sequence: Synthetic polypeptide; note = VL of XENP018345

SEQ ID NO: 14122 - protein, 11 aa, synthetic construct
  source 1..11: note = Description of Artificial Sequence: Synthetic peptide; note = XENP018345 vlCDR1
RASQSVSNDVA

SEQ ID NO: 14123 - protein, 7 aa, synthetic construct
  source 1..7: note = Description of Artificial Sequence: Synthetic peptide; note = XENP018345 vlCDR2
YASHRYT

SEQ ID NO: 14124 - protein, 9 aa, synthetic construct
  source 1..9: note = Description of Artificial Sequence: Synthetic peptide; note = XENP018345 vlCDR3
QQDYSSPRT

SEQ ID NO: 14125 - protein, 451 aa, synthetic construct; identical to SEQ ID NO: 11545
  source 1..451: note = Description of Artificial Sequence: Synthetic polypeptide; note = XENP018346 1G6_H1_L1.3_IgG1_PVA_/S267K Heavy Chain

SEQ ID NO: 14126 - protein, 122 aa, synthetic construct; identical to SEQ ID NO: 6246
  source 1..122: note = Description of Artificial Sequence: Synthetic polypeptide; note = VH of XENP018346

SEQ ID NO: 14127 - protein, 5 aa, synthetic construct
  source 1..5: note = Description of Artificial Sequence: Synthetic peptide; note = XENP018346 vhCDR1
NYWMN

SEQ ID NO: 14128 - protein, 19 aa, synthetic construct
  source 1..19: note = Description of Artificial Sequence: Synthetic peptide; note = XENP018346 vhCDR2
EIRLKSNNYATHYAEPVKG

SEQ ID NO: 14129 - protein, 11 aa, synthetic construct
  source 1..11: note = Description of Artificial Sequence: Synthetic peptide; note = XENP018346 vhCDR3
YYGNYGGYFDV

SEQ ID NO: 14130 - protein, 214 aa, synthetic construct
  source 1..214: note = Description of Artificial Sequence: Synthetic polypeptide; note = XENP018346 1G6_H1_L1.3_IgG1_PVA_/S267K Light Chain
SVVMTQSPATLSVSPGERATLSCRASQSVSNDVAWYQQKPGQSPRLLINYASHRYTGVPDRFTGSGYGTEFTLTISSLQSEDFAVYFCQQDYSSPRTFGGGTKVEIKRTVAAPSVFIFPPSDEQLKSGTASVVCLLNNFYPREAKVQWKVDNALQSGNSQESVTEQDSKDSTYSLSSTLTLSKADYEKHKVYACEVTHQGLSSPVTKSFNRGEC

SEQ ID NO: 14131 - protein, 107 aa, synthetic construct; identical to SEQ ID NO: 8521
  source 1..107: note = Description of Artificial Sequence: Synthetic polypeptide; note = VL of XENP018346

SEQ ID NO: 14132 - protein, 11 aa, synthetic construct
  source 1..11: note = Description of Artificial Sequence: Synthetic peptide; note = XENP018346 vlCDR1
RASQSVSNDVA

SEQ ID NO: 14133 - protein, 7 aa, synthetic construct
  source 1..7: note = Description of Artificial Sequence: Synthetic peptide; note = XENP018346 vlCDR2
YASHRYT

SEQ ID NO: 14134 - protein, 9 aa, synthetic construct
  source 1..9: note = Description of Artificial Sequence: Synthetic peptide; note = XENP018346 vlCDR3
QQDYSSPRT

SEQ ID NO: 14135 - protein, 451 aa, synthetic construct; identical to SEQ ID NO: 11545
  source 1..451: note = Description of Artificial Sequence: Synthetic polypeptide; note = XENP018347 1G6_H1_L1.4_IgG1_PVA_/S267K Heavy Chain

SEQ ID NO: 14136 - protein, 122 aa, synthetic construct; identical to SEQ ID NO: 6246
  source 1..122: note = Description of Artificial Sequence: Synthetic polypeptide; note = VH of XENP018347

SEQ ID NO: 14137 - protein, 5 aa, synthetic construct
  source 1..5: note = Description of Artificial Sequence: Synthetic peptide; note = XENP018347 vhCDR1
NYWMN

SEQ ID NO: 14138 - protein, 19 aa, synthetic construct
  source 1..19: note = Description of Artificial Sequence: Synthetic peptide; note = XENP018347 vhCDR2
EIRLKSNNYATHYAEPVKG

SEQ ID NO: 14139 - protein, 11 aa, synthetic construct
  source 1..11: note = Description of Artificial Sequence: Synthetic peptide; note = XENP018347 vhCDR3
YYGNYGGYFDV

SEQ ID NO: 14140 - protein, 214 aa, synthetic construct
  source 1..214: note = Description of Artificial Sequence: Synthetic polypeptide; note = XENP018347 1G6_H1_L1.4_IgG1_PVA_/S267K Light Chain
SIVLTQSPATLSVSPGERATLSCRASQSVSNDVAWYQQKPGQSPRLLINYASHRYTGVPDRFTGSGYGTEFTLTISSLQSEDFAVYFCQQDYSSPRTFGGGTKVEIKRTVAAPSVFIFPPSDEQLKSGTASVVCLLNNFYPREAKVQWKVDNALQSGNSQESVTEQDSKDSTYSLSSTLTLSKADYEKHKVYACEVTHQGLSSPVTKSFNRGEC

SEQ ID NO: 14141 - protein, 107 aa, synthetic construct; identical to SEQ ID NO: 8530
  source 1..107: note = Description of Artificial Sequence: Synthetic polypeptide; note = VL of XENP018347

SEQ ID NO: 14142 - protein, 11 aa, synthetic construct
  source 1..11: note = Description of Artificial Sequence: Synthetic peptide; note = XENP018347 vlCDR1
RASQSVSNDVA

SEQ ID NO: 14143 - protein, 7 aa, synthetic construct
  source 1..7: note = Description of Artificial Sequence: Synthetic peptide; note = XENP018347 vlCDR2
YASHRYT

SEQ ID NO: 14144 - protein, 9 aa, synthetic construct
  source 1..9: note = Description of Artificial Sequence: Synthetic peptide; note = XENP018347 vlCDR3
QQDYSSPRT

SEQ ID NO: 14145 - protein, 451 aa, synthetic construct; identical to SEQ ID NO: 11545
  source 1..451: note = Description of Artificial Sequence: Synthetic polypeptide; note = XENP018348 1G6_H1_L1.5_IgG1_PVA_/S267K Heavy Chain

SEQ ID NO: 14146 - protein, 122 aa, synthetic construct; identical to SEQ ID NO: 6246
  source 1..122: note = Description of Artificial Sequence: Synthetic polypeptide; note = VH of XENP018348

SEQ ID NO: 14147 - protein, 5 aa, synthetic construct
  source 1..5: note = Description of Artificial Sequence: Synthetic peptide; note = XENP018348 vhCDR1
NYWMN

SEQ ID NO: 14148 - protein, 19 aa, synthetic construct
  source 1..19: note = Description of Artificial Sequence: Synthetic peptide; note = XENP018348 vhCDR2
EIRLKSNNYATHYAEPVKG

SEQ ID NO: 14149 - protein, 11 aa, synthetic construct
  source 1..11: note = Description of Artificial Sequence: Synthetic peptide; note = XENP018348 vhCDR3
YYGNYGGYFDV

SEQ ID NO: 14150 - protein, 214 aa, synthetic construct
  source 1..214: note = Description of Artificial Sequence: Synthetic polypeptide; note = XENP018348 1G6_H1_L1.5_IgG1_PVA_/S267K Light Chain
SIVMTQTPATLSVSPGERATLSCRASQSVSNDVAWYQQKPGQSPRLLINYASHRYTGVPDRFTGSGYGTEFTLTISSLQSEDFAVYFCQQDYSSPRTFGGGTKVEIKRTVAAPSVFIFPPSDEQLKSGTASVVCLLNNFYPREAKVQWKVDNALQSGNSQESVTEQDSKDSTYSLSSTLTLSKADYEKHKVYACEVTHQGLSSPVTKSFNRGEC

SEQ ID NO: 14151 - protein, 107 aa, synthetic construct; identical to SEQ ID NO: 8539
  source 1..107: note = Description of Artificial Sequence: Synthetic polypeptide; note = VL of XENP018348

SEQ ID NO: 14152 - protein, 11 aa, synthetic construct
  source 1..11: note = Description of Artificial Sequence: Synthetic peptide; note = XENP018348 vlCDR1
RASQSVSNDVA

SEQ ID NO: 14153 - protein, 7 aa, synthetic construct
  source 1..7: note = Description of Artificial Sequence: Synthetic peptide; note = XENP018348 vlCDR2
YASHRYT

SEQ ID NO: 14154 - protein, 9 aa, synthetic construct
  source 1..9: note = Description of Artificial Sequence: Synthetic peptide; note = XENP018348 vlCDR3
QQDYSSPRT

SEQ ID NO: 14155 - protein, 451 aa, synthetic construct; identical to SEQ ID NO: 11545
  source 1..451: note = Description of Artificial Sequence: Synthetic polypeptide; note = XENP018349 1G6_H1_L1.6_IgG1_PVA_/S267K Heavy Chain

SEQ ID NO: 14156 - protein, 122 aa, synthetic construct; identical to SEQ ID NO: 6246
  source 1..122: note = Description of Artificial Sequence: Synthetic polypeptide; note = VH of XENP018349

SEQ ID NO: 14157 - protein, 5 aa, synthetic construct
  source 1..5: note = Description of Artificial Sequence: Synthetic peptide; note = XENP018349 vhCDR1
NYWMN

SEQ ID NO: 14158 - protein, 19 aa, synthetic construct
  source 1..19: note = Description of Artificial Sequence: Synthetic peptide; note = XENP018349 vhCDR2
EIRLKSNNYATHYAEPVKG

SEQ ID NO: 14159 - protein, 11 aa, synthetic construct
  source 1..11: note = Description of Artificial Sequence: Synthetic peptide; note = XENP018349 vhCDR3
YYGNYGGYFDV

SEQ ID NO: 14160 - protein, 214 aa, synthetic construct
  source 1..214: note = Description of Artificial Sequence: Synthetic polypeptide; note = XENP018349 1G6_H1_L1.6_IgG1_PVA_/S267K Light Chain
SIVMTQSPKTLSVSPGERATLSCRASQSVSNDVAWYQQKPGQSPRLLINYASHRYTGVPDRFTGSGYGTEFTLTISSLQSEDFAVYFCQQDYSSPRTFGGGTKVEIKRTVAAPSVFIFPPSDEQLKSGTASVVCLLNNFYPREAKVQWKVDNALQSGNSQESVTEQDSKDSTYSLSSTLTLSKADYEKHKVYACEVTHQGLSSPVTKSFNRGEC

SEQ ID NO: 14161 - protein, 107 aa, synthetic construct; identical to SEQ ID NO: 8548
  source 1..107: note = Description of Artificial Sequence: Synthetic polypeptide; note = VL of XENP018349

SEQ ID NO: 14162 - protein, 11 aa, synthetic construct
  source 1..11: note = Description of Artificial Sequence: Synthetic peptide; note = XENP018349 vlCDR1
RASQSVSNDVA

SEQ ID NO: 14163 - protein, 7 aa, synthetic construct
  source 1..7: note = Description of Artificial Sequence: Synthetic peptide; note = XENP018349 vlCDR2
YASHRYT

SEQ ID NO: 14164 - protein, 9 aa, synthetic construct
  source 1..9: note = Description of Artificial Sequence: Synthetic peptide; note = XENP018349 vlCDR3
QQDYSSPRT

SEQ ID NO: 14165 - protein, 451 aa, synthetic construct; identical to SEQ ID NO: 11545
  source 1..451: note = Description of Artificial Sequence: Synthetic polypeptide; note = XENP018350 1G6_H1_L1.7_IgG1_PVA_/S267K Heavy Chain

SEQ ID NO: 14166 - protein, 122 aa, synthetic construct; identical to SEQ ID NO: 6246
  source 1..122: note = Description of Artificial Sequence: Synthetic polypeptide; note = VH of XENP018350

SEQ ID NO: 14167 - protein, 5 aa, synthetic construct
  source 1..5: note = Description of Artificial Sequence: Synthetic peptide; note = XENP018350 vhCDR1
NYWMN

SEQ ID NO: 14168 - protein, 19 aa, synthetic construct
  source 1..19: note = Description of Artificial Sequence: Synthetic peptide; note = XENP018350 vhCDR2
EIRLKSNNYATHYAEPVKG

SEQ ID NO: 14169 - protein, 11 aa, synthetic construct
  source 1..11: note = Description of Artificial Sequence: Synthetic peptide; note = XENP018350 vhCDR3
YYGNYGGYFDV

SEQ ID NO: 14170 - protein, 214 aa, synthetic construct
  source 1..214: note = Description of Artificial Sequence: Synthetic polypeptide; note = XENP018350 1G6_H1_L1.7_IgG1_PVA_/S267K Light Chain
SIVMTQSPASLSVSPGERATLSCRASQSVSNDVAWYQQKPGQSPRLLINYASHRYTGVPDRFTGSGYGTEFTLTISSLQSEDFAVYFCQQDYSSPRTFGGGTKVEIKRTVAAPSVFIFPPSDEQLKSGTASVVCLLNNFYPREAKVQWKVDNALQSGNSQESVTEQDSKDSTYSLSSTLTLSKADYEKHKVYACEVTHQGLSSPVTKSFNRGEC

SEQ ID NO: 14171 - protein, 107 aa, synthetic construct; identical to SEQ ID NO: 8557
  source 1..107: note = Description of Artificial Sequence: Synthetic polypeptide; note = VL of XENP018350

SEQ ID NO: 14172 - protein, 11 aa, synthetic construct
  source 1..11: note = Description of Artificial Sequence: Synthetic peptide; note = XENP018350 vlCDR1
RASQSVSNDVA

SEQ ID NO: 14173 - protein, 7 aa, synthetic construct
  source 1..7: note = Description of Artificial Sequence: Synthetic peptide; note = XENP018350 vlCDR2
YASHRYT

SEQ ID NO: 14174 - protein, 9 aa, synthetic construct
  source 1..9: note = Description of Artificial Sequence: Synthetic peptide; note = XENP018350 vlCDR3
QQDYSSPRT

SEQ ID NO: 14175 - protein, 451 aa, synthetic construct; identical to SEQ ID NO: 11545
  source 1..451: note = Description of Artificial Sequence: Synthetic polypeptide; note = XENP018351 1G6_H1_L1.8_IgG1_PVA_/S267K Heavy Chain

SEQ ID NO: 14176 - protein, 122 aa, synthetic construct; identical to SEQ ID NO: 6246
  source 1..122: note = Description of Artificial Sequence: Synthetic polypeptide; note = VH of XENP018351

SEQ ID NO: 14177 - protein, 5 aa, synthetic construct
  source 1..5: note = Description of Artificial Sequence: Synthetic peptide; note = XENP018351 vhCDR1
NYWMN

SEQ ID NO: 14178 - protein, 19 aa, synthetic construct
  source 1..19: note = Description of Artificial Sequence: Synthetic peptide; note = XENP018351 vhCDR2
EIRLKSNNYATHYAEPVKG

SEQ ID NO: 14179 - protein, 11 aa, synthetic construct
  source 1..11: note = Description of Artificial Sequence: Synthetic peptide; note = XENP018351 vhCDR3
YYGNYGGYFDV

SEQ ID NO: 14180 - protein, 214 aa, synthetic construct
  source 1..214: note = Description of Artificial Sequence: Synthetic polypeptide; note = XENP018351 1G6_H1_L1.8_IgG1_PVA_/S267K Light Chain
SIVMTQSPAFLSVSPGERATLSCRASQSVSNDVAWYQQKPGQSPRLLINYASHRYTGVPDRFTGSGYGTEFTLTISSLQSEDFAVYFCQQDYSSPRTFGGGTKVEIKRTVAAPSVFIFPPSDEQLKSGTASVVCLLNNFYPREAKVQWKVDNALQSGNSQESVTEQDSKDSTYSLSSTLTLSKADYEKHKVYACEVTHQGLSSPVTKSFNRGEC

SEQ ID NO: 14181 - protein, 107 aa, synthetic construct; identical to SEQ ID NO: 8566
  source 1..107: note = Description of Artificial Sequence: Synthetic polypeptide; note = VL of XENP018351

SEQ ID NO: 14182 - protein, 11 aa, synthetic construct
  source 1..11: note = Description of Artificial Sequence: Synthetic peptide; note = XENP018351 vlCDR1
RASQSVSNDVA

SEQ ID NO: 14183 - protein, 7 aa, synthetic construct
  source 1..7: note = Description of Artificial Sequence: Synthetic peptide; note = XENP018351 vlCDR2
YASHRYT

SEQ ID NO: 14184 - protein, 9 aa, synthetic construct
  source 1..9: note = Description of Artificial Sequence: Synthetic peptide; note = XENP018351 vlCDR3
QQDYSSPRT

SEQ ID NO: 14185 - protein, 451 aa, synthetic construct; identical to SEQ ID NO: 11545
  source 1..451: note = Description of Artificial Sequence: Synthetic polypeptide; note = XENP018352 1G6_H1_L1.9_IgG1_PVA_/S267K Heavy Chain

SEQ ID NO: 14186 - protein, 122 aa, synthetic construct; identical to SEQ ID NO: 6246
  source 1..122: note = Description of Artificial Sequence: Synthetic polypeptide; note = VH of XENP018352

SEQ ID NO: 14187 - protein, 5 aa, synthetic construct
  source 1..5: note = Description of Artificial Sequence: Synthetic peptide; note = XENP018352 vhCDR1
NYWMN

SEQ ID NO: 14188 - protein, 19 aa, synthetic construct
  source 1..19: note = Description of Artificial Sequence: Synthetic peptide; note = XENP018352 vhCDR2
EIRLKSNNYATHYAEPVKG

SEQ ID NO: 14189 - protein, 11 aa, synthetic construct
  source 1..11: note = Description of Artificial Sequence: Synthetic peptide; note = XENP018352 vhCDR3
YYGNYGGYFDV

SEQ ID NO: 14190 - protein, 214 aa, synthetic construct
  source 1..214: note = Description of Artificial Sequence: Synthetic polypeptide; note = XENP018352 1G6_H1_L1.9_IgG1_PVA_/S267K Light Chain
SIVMTQSPATLLVSPGERATLSCRASQSVSNDVAWYQQKPGQSPRLLINYASHRYTGVPDRFTGSGYGTEFTLTISSLQSEDFAVYFCQQDYSSPRTFGGGTKVEIKRTVAAPSVFIFPPSDEQLKSGTASVVCLLNNFYPREAKVQWKVDNALQSGNSQESVTEQDSKDSTYSLSSTLTLSKADYEKHKVYACEVTHQGLSSPVTKSFNRGEC

SEQ ID NO: 14191 - protein, 107 aa, synthetic construct; identical to SEQ ID NO: 8575
  source 1..107: note = Description of Artificial Sequence: Synthetic polypeptide; note = VL of XENP018352

SEQ ID NO: 14192 - protein, 11 aa, synthetic construct
  source 1..11: note = Description of Artificial Sequence: Synthetic peptide; note = XENP018352 vlCDR1
RASQSVSNDVA

SEQ ID NO: 14193 - protein, 7 aa, synthetic construct
  source 1..7: note = Description of Artificial Sequence: Synthetic peptide; note = XENP018352 vlCDR2
YASHRYT

SEQ ID NO: 14194 - protein, 9 aa, synthetic construct
  source 1..9: note = Description of Artificial Sequence: Synthetic peptide; note = XENP018352 vlCDR3
QQDYSSPRT

SEQ ID NO: 14195 - protein, 451 aa, synthetic construct; identical to SEQ ID NO: 11545
  source 1..451: note = Description of Artificial Sequence: Synthetic polypeptide; note = XENP018353 1G6_H1_L1.10_IgG1_PVA_/S267K Heavy Chain

SEQ ID NO: 14196 - protein, 122 aa, synthetic construct; identical to SEQ ID NO: 6246
  source 1..122: note = Description of Artificial Sequence: Synthetic polypeptide; note = VH of XENP018353

SEQ ID NO: 14197 - protein, 5 aa, synthetic construct
  source 1..5: note = Description of Artificial Sequence: Synthetic peptide; note = XENP018353 vhCDR1
NYWMN

SEQ ID NO: 14198 - protein, 19 aa, synthetic construct
  source 1..19: note = Description of Artificial Sequence: Synthetic peptide; note = XENP018353 vhCDR2
EIRLKSNNYATHYAEPVKG

SEQ ID NO: 14199 - protein, 11 aa, synthetic construct
  source 1..11: note = Description of Artificial Sequence: Synthetic peptide; note = XENP018353 vhCDR3
YYGNYGGYFDV

SEQ ID NO: 14200 - protein, 214 aa, synthetic construct
  source 1..214: note = Description of Artificial Sequence: Synthetic polypeptide; note = XENP018353 1G6_H1_L1.10_IgG1_PVA_/S267K Light Chain
SIVMTQSPATLSVSAGERATLSCRASQSVSNDVAWYQQKPGQSPRLLINYASHRYTGVPDRFTGSGYGTEFTLTISSLQSEDFAVYFCQQDYSSPRTFGGGTKVEIKRTVAAPSVFIFPPSDEQLKSGTASVVCLLNNFYPREAKVQWKVDNALQSGNSQESVTEQDSKDSTYSLSSTLTLSKADYEKHKVYACEVTHQGLSSPVTKSFNRGEC

SEQ ID NO: 14201 - protein, 107 aa, synthetic construct; identical to SEQ ID NO: 8584
  source 1..107: note = Description of Artificial Sequence: Synthetic polypeptide; note = VL of XENP018353

SEQ ID NO: 14202 - protein, 11 aa, synthetic construct
  source 1..11: note = Description of Artificial Sequence: Synthetic peptide; note = XENP018353 vlCDR1
RASQSVSNDVA

SEQ ID NO: 14203 - protein, 7 aa, synthetic construct
  source 1..7: note = Description of Artificial Sequence: Synthetic peptide; note = XENP018353 vlCDR2
YASHRYT

SEQ ID NO: 14204 - protein, 9 aa, synthetic construct
  source 1..9: note = Description of Artificial Sequence: Synthetic peptide; note = XENP018353 vlCDR3
QQDYSSPRT

SEQ ID NO: 14205 - protein, 451 aa, synthetic construct; identical to SEQ ID NO: 11545
  source 1..451: note = Description of Artificial Sequence: Synthetic polypeptide; note = XENP018354 1G6_H1_L1.11_IgG1_PVA_/S267K Heavy Chain

SEQ ID NO: 14206 - protein, 122 aa, synthetic construct; identical to SEQ ID NO: 6246
  source 1..122: note = Description of Artificial Sequence: Synthetic polypeptide; note = VH of XENP018354

SEQ ID NO: 14207 - protein, 5 aa, synthetic construct
  source 1..5: note = Description of Artificial Sequence: Synthetic peptide; note = XENP018354 vhCDR1
NYWMN

SEQ ID NO: 14208 - protein, 19 aa, synthetic construct
  source 1..19: note = Description of Artificial Sequence: Synthetic peptide; note = XENP018354 vhCDR2
EIRLKSNNYATHYAEPVKG

SEQ ID NO: 14209 - protein, 11 aa, synthetic construct
  source 1..11: note = Description of Artificial Sequence: Synthetic peptide; note = XENP018354 vhCDR3
YYGNYGGYFDV

SEQ ID NO: 14210 - protein, 214 aa, synthetic construct
  source 1..214: note = Description of Artificial Sequence: Synthetic polypeptide; note = XENP018354 1G6_H1_L1.11_IgG1_PVA_/S267K Light Chain
SIVMTQSPATLSVSPGDRATLSCRASQSVSNDVAWYQQKPGQSPRLLINYASHRYTGVPDRFTGSGYGTEFTLTISSLQSEDFAVYFCQQDYSSPRTFGGGTKVEIKRTVAAPSVFIFPPSDEQLKSGTASVVCLLNNFYPREAKVQWKVDNALQSGNSQESVTEQDSKDSTYSLSSTLTLSKADYEKHKVYACEVTHQGLSSPVTKSFNRGEC

SEQ ID NO: 14211 - protein, 107 aa, synthetic construct; identical to SEQ ID NO: 8593
  source 1..107: note = Description of Artificial Sequence: Synthetic polypeptide; note = VL of XENP018354

SEQ ID NO: 14212 - protein, 11 aa, synthetic construct
  source 1..11: note = Description of Artificial Sequence: Synthetic peptide; note = XENP018354 vlCDR1
RASQSVSNDVA

SEQ ID NO: 14213 - protein, 7 aa, synthetic construct
  source 1..7: note = Description of Artificial Sequence: Synthetic peptide; note = XENP018354 vlCDR2
YASHRYT

SEQ ID NO: 14214 - protein, 9 aa, synthetic construct
  source 1..9: note = Description of Artificial Sequence: Synthetic peptide; note = XENP018354 vlCDR3
QQDYSSPRT

SEQ ID NO: 14215 - protein, 451 aa, synthetic construct; identical to SEQ ID NO: 11545
  source 1..451: note = Description of Artificial Sequence: Synthetic polypeptide; note = XENP018355 1G6_H1_L1.12_IgG1_PVA_/S267K Heavy Chain

SEQ ID NO: 14216 - protein, 122 aa, synthetic construct; identical to SEQ ID NO: 6246
  source 1..122: note = Description of Artificial Sequence: Synthetic polypeptide; note = VH of XENP018355

SEQ ID NO: 14217 - protein, 5 aa, synthetic construct
  source 1..5: note = Description of Artificial Sequence: Synthetic peptide; note = XENP018355 vhCDR1
NYWMN

SEQ ID NO: 14218 - protein, 19 aa, synthetic construct
  source 1..19: note = Description of Artificial Sequence: Synthetic peptide; note = XENP018355 vhCDR2
EIRLKSNNYATHYAEPVKG

SEQ ID NO: 14219 - protein, 11 aa, synthetic construct
  source 1..11: note = Description of Artificial Sequence: Synthetic peptide; note = XENP018355 vhCDR3
YYGNYGGYFDV

SEQ ID NO: 14220 - protein, 214 aa, synthetic construct
  source 1..214: note = Description of Artificial Sequence: Synthetic polypeptide; note = XENP018355 1G6_H1_L1.12_IgG1_PVA_/S267K Light Chain
SIVMTQSPATLSVSPGERVTLSCRASQSVSNDVAWYQQKPGQSPRLLINYASHRYTGVPDRFTGSGYGTEFTLTISSLQSEDFAVYFCQQDYSSPRTFGGGTKVEIKRTVAAPSVFIFPPSDEQLKSGTASVVCLLNNFYPREAKVQWKVDNALQSGNSQESVTEQDSKDSTYSLSSTLTLSKADYEKHKVYACEVTHQGLSSPVTKSFNRGEC

SEQ ID NO: 14221 - protein, 107 aa, synthetic construct; identical to SEQ ID NO: 8602
  source 1..107: note = Description of Artificial Sequence: Synthetic polypeptide; note = VL of XENP018355

SEQ ID NO: 14222 - protein, 11 aa, synthetic construct
  source 1..11: note = Description of Artificial Sequence: Synthetic peptide; note = XENP018355 vlCDR1
RASQSVSNDVA

SEQ ID NO: 14223 - protein, 7 aa, synthetic construct
  source 1..7: note = Description of Artificial Sequence: Synthetic peptide; note = XENP018355 vlCDR2
YASHRYT

SEQ ID NO: 14224 - protein, 9 aa, synthetic construct
  source 1..9: note = Description of Artificial Sequence: Synthetic peptide; note = XENP018355 vlCDR3
QQDYSSPRT

SEQ ID NO: 14225 - protein, 451 aa, synthetic construct; identical to SEQ ID NO: 11545
  source 1..451: note = Description of Artificial Sequence: Synthetic polypeptide; note = XENP018356 1G6_H1_L1.13_IgG1_PVA_/S267K Heavy Chain

SEQ ID NO: 14226 - protein, 122 aa, synthetic construct; identical to SEQ ID NO: 6246
  source 1..122: note = Description of Artificial Sequence: Synthetic polypeptide; note = VH of XENP018356

SEQ ID NO: 14227 - protein, 5 aa, synthetic construct
  source 1..5: note = Description of Artificial Sequence: Synthetic peptide; note = XENP018356 vhCDR1
NYWMN

SEQ ID NO: 14228 - protein, 19 aa, synthetic construct
  source 1..19: note = Description of Artificial Sequence: Synthetic peptide; note = XENP018356 vhCDR2
EIRLKSNNYATHYAEPVKG

SEQ ID NO: 14229 - protein, 11 aa, synthetic construct
  source 1..11: note = Description of Artificial Sequence: Synthetic peptide; note = XENP018356 vhCDR3
YYGNYGGYFDV

SEQ ID NO: 14230 - protein, 214 aa, synthetic construct
  source 1..214: note = Description of Artificial Sequence: Synthetic polypeptide; note = XENP018356 1G6_H1_L1.13_IgG1_PVA_/S267K Light Chain
SIVMTQSPATLSVSPGERATISCRASQSVSNDVAWYQQKPGQSPRLLINYASHRYTGVPDRFTGSGYGTEFTLTISSLQSEDFAVYFCQQDYSSPRTFGGGTKVEIKRTVAAPSVFIFPPSDEQLKSGTASVVCLLNNFYPREAKVQWKVDNALQSGNSQESVTEQDSKDSTYSLSSTLTLSKADYEKHKVYACEVTHQGLSSPVTKSFNRGEC

SEQ ID NO: 14231 - protein, 107 aa, synthetic construct; identical to SEQ ID NO: 8611
  source 1..107: note = Description of Artificial Sequence: Synthetic polypeptide; note = VL of XENP018356

SEQ ID NO: 14232 - protein, 11 aa, synthetic construct
  source 1..11: note = Description of Artificial Sequence: Synthetic peptide; note = XENP018356 vlCDR1
RASQSVSNDVA

SEQ ID NO: 14233 - protein, 7 aa, synthetic construct
  source 1..7: note = Description of Artificial Sequence: Synthetic peptide; note = XENP018356 vlCDR2
YASHRYT

SEQ ID NO: 14234 - protein, 9 aa, synthetic construct
  source 1..9: note = Description of Artificial Sequence: Synthetic peptide; note = XENP018356 vlCDR3
QQDYSSPRT

SEQ ID NO: 14235 - protein, 451 aa, synthetic construct; identical to SEQ ID NO: 11545
  source 1..451: note = Description of Artificial Sequence: Synthetic polypeptide; note = XENP018357 1G6_H1_L1.14_IgG1_PVA_/S267K Heavy Chain

SEQ ID NO: 14236 - protein, 122 aa, synthetic construct; identical to SEQ ID NO: 6246
  source 1..122: note = Description of Artificial Sequence: Synthetic polypeptide; note = VH of XENP018357

SEQ ID NO: 14237 - protein, 5 aa, synthetic construct
  source 1..5: note = Description of Artificial Sequence: Synthetic peptide; note = XENP018357 vhCDR1
NYWMN

SEQ ID NO: 14238 - protein, 19 aa, synthetic construct
  source 1..19: note = Description of Artificial Sequence: Synthetic peptide; note = XENP018357 vhCDR2
EIRLKSNNYATHYAEPVKG

SEQ ID NO: 14239 - protein, 11 aa, synthetic construct
  source 1..11: note = Description of Artificial Sequence: Synthetic peptide; note = XENP018357 vhCDR3
YYGNYGGYFDV

SEQ ID NO: 14240 - protein, 214 aa, synthetic construct
  source 1..214: note = Description of Artificial Sequence: Synthetic polypeptide; note = XENP018357 1G6_H1_L1.14_IgG1_PVA_/S267K Light Chain
SIVMTQSPATLSVSPGERATLTCRASQSVSNDVAWYQQKPGQSPRLLINYASHRYTGVPDRFTGSGYGTEFTLTISSLQSEDFAVYFCQQDYSSPRTFGGGTKVEIKRTVAAPSVFIFPPSDEQLKSGTASVVCLLNNFYPREAKVQWKVDNALQSGNSQESVTEQDSKDSTYSLSSTLTLSKADYEKHKVYACEVTHQGLSSPVTKSFNRGEC

SEQ ID NO: 14241 - protein, 107 aa, synthetic construct; identical to SEQ ID NO: 8620
  source 1..107: note = Description of Artificial Sequence: Synthetic polypeptide; note = VL of XENP018357

SEQ ID NO: 14242 - protein, 11 aa, synthetic construct
  source 1..11: note = Description of Artificial Sequence: Synthetic peptide; note = XENP018357 vlCDR1
RASQSVSNDVA

SEQ ID NO: 14243 - protein, 7 aa, synthetic construct
  source 1..7: note = Description of Artificial Sequence: Synthetic peptide; note = XENP018357 vlCDR2
YASHRYT

SEQ ID NO: 14244 - protein, 9 aa, synthetic construct
  source 1..9: note = Description of Artificial Sequence: Synthetic peptide; note = XENP018357 vlCDR3
QQDYSSPRT

SEQ ID NO: 14245 - protein, 451 aa, synthetic construct; identical to SEQ ID NO: 11545
  source 1..451: note = Description of Artificial Sequence: Synthetic polypeptide; note = XENP018358 1G6_H1_L1.15_IgG1_PVA_/S267K Heavy Chain

SEQ ID NO: 14246 - protein, 122 aa, synthetic construct; identical to SEQ ID NO: 6246
  source 1..122: note = Description of Artificial Sequence: Synthetic polypeptide; note = VH of XENP018358

SEQ ID NO: 14247 - protein, 5 aa, synthetic construct
  source 1..5: note = Description of Artificial Sequence: Synthetic peptide; note = XENP018358 vhCDR1
NYWMN

SEQ ID NO: 14248 - protein, 19 aa, synthetic construct
  source 1..19: note = Description of Artificial Sequence: Synthetic peptide; note = XENP018358 vhCDR2
EIRLKSNNYATHYAEPVKG

SEQ ID NO: 14249 - protein, 11 aa, synthetic construct
  source 1..11: note = Description of Artificial Sequence: Synthetic peptide; note = XENP018358 vhCDR3
YYGNYGGYFDV

SEQ ID NO: 14250 - protein, 214 aa, synthetic construct
  source 1..214: note = Description of Artificial Sequence: Synthetic polypeptide; note = XENP018358 1G6_H1_L1.15_IgG1_PVA_/S267K Light Chain
SIVMTQSPATLSVSPGERATLSCKASQSVSNDVAWYQQKPGQSPRLLINYASHRYTGVPDRFTGSGYGTEFTLTISSLQSEDFAVYFCQQDYSSPRTFGGGTKVEIKRTVAAPSVFIFPPSDEQLKSGTASVVCLLNNFYPREAKVQWKVDNALQSGNSQESVTEQDSKDSTYSLSSTLTLSKADYEKHKVYACEVTHQGLSSPVTKSFNRGEC

SEQ ID NO: 14251 - protein, 107 aa, synthetic construct; identical to SEQ ID NO: 8629
  source 1..107: note = Description of Artificial Sequence: Synthetic polypeptide; note = VL of XENP018358

SEQ ID NO: 14252 - protein, 11 aa, synthetic construct
  source 1..11: note = Description of Artificial Sequence: Synthetic peptide; note = XENP018358 vlCDR1
KASQSVSNDVA

SEQ ID NO: 14253 - protein, 7 aa, synthetic construct
  source 1..7: note = Description of Artificial Sequence: Synthetic peptide; note = XENP018358 vlCDR2
YASHRYT

SEQ ID NO: 14254 - protein, 9 aa, synthetic construct
  source 1..9: note = Description of Artificial Sequence: Synthetic peptide; note = XENP018358 vlCDR3
QQDYSSPRT

SEQ ID NO: 14255 - protein, 451 aa, synthetic construct; identical to SEQ ID NO: 11545
  source 1..451: note = Description of Artificial Sequence: Synthetic polypeptide; note = XENP018359 1G6_H1_L1.16_IgG1_PVA_/S267K Heavy Chain

SEQ ID NO: 14256 - protein, 122 aa, synthetic construct; identical to SEQ ID NO: 6246
  source 1..122: note = Description of Artificial Sequence: Synthetic polypeptide; note = VH of XENP018359

SEQ ID NO: 14257 - protein, 5 aa, synthetic construct
  source 1..5: note = Description of Artificial Sequence: Synthetic peptide; note = XENP018359 vhCDR1
NYWMN

SEQ ID NO: 14258 - protein, 19 aa, synthetic construct
  source 1..19: note = Description of Artificial Sequence: Synthetic peptide; note = XENP018359 vhCDR2
EIRLKSNNYATHYAEPVKG

SEQ ID NO: 14259 - protein, 11 aa, synthetic construct
  source 1..11: note = Description of Artificial Sequence: Synthetic peptide; note = XENP018359 vhCDR3
YYGNYGGYFDV

SEQ ID NO: 14260 - protein, 214 aa, synthetic construct
  source 1..214: note = Description of Artificial Sequence: Synthetic polypeptide; note = XENP018359 1G6_H1_L1.16_IgG1_PVA_/S267K Light Chain
SIVMTQSPATLSVSPGERATLSCRASQDVSNDVAWYQQKPGQSPRLLINYASHRYTGVPDRFTGSGYGTEFTLTISSLQSEDFAVYFCQQDYSSPRTFGGGTKVEIKRTVAAPSVFIFPPSDEQLKSGTASVVCLLNNFYPREAKVQWKVDNALQSGNSQESVTEQDSKDSTYSLSSTLTLSKADYEKHKVYACEVTHQGLSSPVTKSFNRGEC

SEQ ID NO: 14261 - protein, 107 aa, synthetic construct; identical to SEQ ID NO: 8638
  source 1..107: note = Description of Artificial Sequence: Synthetic polypeptide; note = VL of XENP018359

SEQ ID NO: 14262 - protein, 11 aa, synthetic construct
  source 1..11: note = Description of Artificial Sequence: Synthetic peptide; note = XENP018359 vlCDR1
RASQDVSNDVA

SEQ ID NO: 14263 - protein, 7 aa, synthetic construct
  source 1..7: note = Description of Artificial Sequence: Synthetic peptide; note = XENP018359 vlCDR2
YASHRYT

SEQ ID NO: 14264 - protein, 9 aa, synthetic construct
  source 1..9: note = Description of Artificial Sequence: Synthetic peptide; note = XENP018359 vlCDR3
QQDYSSPRT

SEQ ID NO: 14265 - protein, 451 aa, synthetic construct; identical to SEQ ID NO: 11545
  source 1..451: note = Description of Artificial Sequence: Synthetic polypeptide; note = XENP018360 1G6_H1_L1.17_IgG1_PVA_/S267K Heavy Chain

SEQ ID NO: 14266 - protein, 122 aa, synthetic construct; identical to SEQ ID NO: 6246
  source 1..122: note = Description of Artificial Sequence: Synthetic polypeptide; note = VH of XENP018360

SEQ ID NO: 14267 - protein, 5 aa, synthetic construct
  source 1..5: note = Description of Artificial Sequence: Synthetic peptide; note = XENP018360 vhCDR1
NYWMN

SEQ ID NO: 14268 - protein, 19 aa, synthetic construct
  source 1..19: note = Description of Artificial Sequence: Synthetic peptide; note = XENP018360 vhCDR2
EIRLKSNNYATHYAEPVKG

SEQ ID NO: 14269 - protein, 11 aa, synthetic construct
  source 1..11: note = Description of Artificial Sequence: Synthetic peptide; note = XENP018360 vhCDR3
YYGNYGGYFDV

SEQ ID NO: 14270 - protein, 214 aa, synthetic construct
  source 1..214: note = Description of Artificial Sequence: Synthetic polypeptide; note = XENP018360 1G6_H1_L1.17_IgG1_PVA_/S267K Light Chain
SIVMTQSPATLSVSPGERATLSCRASQGVSNDVAWYQQKPGQSPRLLINYASHRYTGVPDRFTGSGYGTEFTLTISSLQSEDFAVYFCQQDYSSPRTFGGGTKVEIKRTVAAPSVFIFPPSDEQLKSGTASVVCLLNNFYPREAKVQWKVDNALQSGNSQESVTEQDSKDSTYSLSSTLTLSKADYEKHKVYACEVTHQGLSSPVTKSFNRGEC

SEQ ID NO: 14271 - protein, 107 aa, synthetic construct; identical to SEQ ID NO: 8647
  source 1..107: note = Description of Artificial Sequence: Synthetic polypeptide; note = VL of XENP018360

SEQ ID NO: 14272 - protein, 11 aa, synthetic construct
  source 1..11: note = Description of Artificial Sequence: Synthetic peptide; note = XENP018360 vlCDR1
RASQGVSNDVA

SEQ ID NO: 14273 - protein, 7 aa, synthetic construct
  source 1..7: note = Description of Artificial Sequence: Synthetic peptide; note = XENP018360 vlCDR2
YASHRYT

SEQ ID NO: 14274 - protein, 9 aa, synthetic construct
  source 1..9: note = Description of Artificial Sequence: Synthetic peptide; note = XENP018360 vlCDR3
QQDYSSPRT

SEQ ID NO: 14275 - protein, 451 aa, synthetic construct; identical to SEQ ID NO: 11545
  source 1..451: note = Description of Artificial Sequence: Synthetic polypeptide; note = XENP018361 1G6_H1_L1.18_IgG1_PVA_/S267K Heavy Chain

SEQ ID NO: 14276 - protein, 122 aa, synthetic construct; identical to SEQ ID NO: 6246
  source 1..122: note = Description of Artificial Sequence: Synthetic polypeptide; note = VH of XENP018361

SEQ ID NO: 14277 - protein, 5 aa, synthetic construct
  source 1..5: note = Description of Artificial Sequence: Synthetic peptide; note = XENP018361 vhCDR1
NYWMN

SEQ ID NO: 14278 - protein, 19 aa, synthetic construct
  source 1..19: note = Description of Artificial Sequence: Synthetic peptide; note = XENP018361 vhCDR2
EIRLKSNNYATHYAEPVKG

SEQ ID NO: 14279 - protein, 11 aa, synthetic construct
  source 1..11: note = Description of Artificial Sequence: Synthetic peptide; note = XENP018361 vhCDR3
YYGNYGGYFDV

SEQ ID NO: 14280 - protein, 214 aa, synthetic construct
  source 1..214: note = Description of Artificial Sequence: Synthetic polypeptide; note = XENP018361 1G6_H1_L1.18_IgG1_PVA_/S267K Light Chain
SIVMTQSPATLSVSPGERATLSCRASQSISNDVAWYQQKPGQSPRLLINYASHRYTGVPDRFTGSGYGTEFTLTISSLQSEDFAVYFCQQDYSSPRTFGGGTKVEIKRTVAAPSVFIFPPSDEQLKSGTASVVCLLNNFYPREAKVQWKVDNALQSGNSQESVTEQDSKDSTYSLSSTLTLSKADYEKHKVYACEVTHQGLSSPVTKSFNRGEC

SEQ ID NO: 14281 - protein, 107 aa, synthetic construct; identical to SEQ ID NO: 8656
  source 1..107: note = Description of Artificial Sequence: Synthetic polypeptide; note = VL of XENP018361

SEQ ID NO: 14282 - protein, 11 aa, synthetic construct
  source 1..11: note = Description of Artificial Sequence: Synthetic peptide; note = XENP018361 vlCDR1
RASQSISNDVA

SEQ ID NO: 14283 - protein, 7 aa, synthetic construct
  source 1..7: note = Description of Artificial Sequence: Synthetic peptide; note = XENP018361 vlCDR2
YASHRYT

SEQ ID NO: 14284 - protein, 9 aa, synthetic construct
  source 1..9: note = Description of Artificial Sequence: Synthetic peptide; note = XENP018361 vlCDR3
QQDYSSPRT

SEQ ID NO: 14285 - protein, 451 aa, synthetic construct; identical to SEQ ID NO: 11545
  source 1..451: note = Description of Artificial Sequence: Synthetic polypeptide; note = XENP018362 1G6_H1_L1.19_IgG1_PVA_/S267K Heavy Chain

SEQ ID NO: 14286 - protein, 122 aa, synthetic construct; identical to SEQ ID NO: 6246
  source 1..122: note = Description of Artificial Sequence: Synthetic polypeptide; note = VH of XENP018362

SEQ ID NO: 14287 - protein, 5 aa, synthetic construct
  source 1..5: note = Description of Artificial Sequence: Synthetic peptide; note = XENP018362 vhCDR1
NYWMN

SEQ ID NO: 14288 - protein, 19 aa, synthetic construct
  source 1..19: note = Description of Artificial Sequence: Synthetic peptide; note = XENP018362 vhCDR2
EIRLKSNNYATHYAEPVKG

SEQ ID NO: 14289 - protein, 11 aa, synthetic construct
  source 1..11: note = Description of Artificial Sequence: Synthetic peptide; note = XENP018362 vhCDR3
YYGNYGGYFDV

SEQ ID NO: 14290 - protein, 214 aa, synthetic construct
  source 1..214: note = Description of Artificial Sequence: Synthetic polypeptide; note = XENP018362 1G6_H1_L1.19_IgG1_PVA_/S267K Light Chain
SIVMTQSPATLSVSPGERATLSCRASQSLSNDVAWYQQKPGQSPRLLINYASHRYTGVPDRFTGSGYGTEFTLTISSLQSEDFAVYFCQQDYSSPRTFGGGTKVEIKRTVAAPSVFIFPPSDEQLKSGTASVVCLLNNFYPREAKVQWKVDNALQSGNSQESVTEQDSKDSTYSLSSTLTLSKADYEKHKVYACEVTHQGLSSPVTKSFNRGEC

SEQ ID NO: 14291 - protein, 107 aa, synthetic construct; identical to SEQ ID NO: 8665
  source 1..107: note = Description of Artificial Sequence: Synthetic polypeptide; note = VL of XENP018362

SEQ ID NO: 14292 - protein, 11 aa, synthetic construct
  source 1..11: note = Description of Artificial Sequence: Synthetic peptide; note = XENP018362 vlCDR1
RASQSLSNDVA

SEQ ID NO: 14293 - protein, 7 aa, synthetic construct
  source 1..7: note = Description of Artificial Sequence: Synthetic peptide; note = XENP018362 vlCDR2
YASHRYT

SEQ ID NO: 14294 - protein, 9 aa, synthetic construct
  source 1..9: note = Description of Artificial Sequence: Synthetic peptide; note = XENP018362 vlCDR3
QQDYSSPRT

SEQ ID NO: 14295 - protein, 451 aa, synthetic construct; identical to SEQ ID NO: 11545
  source 1..451: note = Description of Artificial Sequence: Synthetic polypeptide; note = XENP018363 1G6_H1_L1.20_IgG1_PVA_/S267K Heavy Chain

SEQ ID NO: 14296 - protein, 122 aa, synthetic construct; identical to SEQ ID NO: 6246
  source 1..122: note = Description of Artificial Sequence: Synthetic polypeptide; note = VH of XENP018363

SEQ ID NO: 14297 - protein, 5 aa, synthetic construct
  source 1..5: note = Description of Artificial Sequence: Synthetic peptide; note = XENP018363 vhCDR1
NYWMN

SEQ ID NO: 14298 - protein, 19 aa, synthetic construct
  source 1..19: note = Description of Artificial Sequence: Synthetic peptide; note = XENP018363 vhCDR2
EIRLKSNNYATHYAEPVKG

SEQ ID NO: 14299 - protein, 11 aa, synthetic construct
  source 1..11: note = Description of Artificial Sequence: Synthetic peptide; note = XENP018363 vhCDR3
YYGNYGGYFDV

SEQ ID NO: 14300 - protein, 214 aa, synthetic construct
  source 1..214: note = Description of Artificial Sequence: Synthetic polypeptide; note = XENP018363 1G6_H1_L1.20_IgG1_PVA_/S267K Light Chain
SIVMTQSPATLSVSPGERATLSCRASQSVTNDVAWYQQKPGQSPRLLINYASHRYTGVPDRFTGSGYGTEFTLTISSLQSEDFAVYFCQQDYSSPRTFGGGTKVEIKRTVAAPSVFIFPPSDEQLKSGTASVVCLLNNFYPREAKVQWKVDNALQSGNSQESVTEQDSKDSTYSLSSTLTLSKADYEKHKVYACEVTHQGLSSPVTKSFNRGEC

SEQ ID NO: 14301 - protein, 107 aa, synthetic construct; identical to SEQ ID NO: 8674
  source 1..107: note = Description of Artificial Sequence: Synthetic polypeptide; note = VL of XENP018363

SEQ ID NO: 14302 - protein, 11 aa, synthetic construct
  source 1..11: note = Description of Artificial Sequence: Synthetic peptide; note = XENP018363 vlCDR1
RASQSVTNDVA

SEQ ID NO: 14303 - protein, 7 aa, synthetic construct
  source 1..7: note = Description of Artificial Sequence: Synthetic peptide; note = XENP018363 vlCDR2
YASHRYT

SEQ ID NO: 14304 - protein, 9 aa, synthetic construct
  source 1..9: note = Description of Artificial Sequence: Synthetic peptide; note = XENP018363 vlCDR3
QQDYSSPRT

SEQ ID NO: 14305 - protein, 451 aa, synthetic construct; identical to SEQ ID NO: 11545
  source 1..451: note = Description of Artificial Sequence: Synthetic polypeptide; note = XENP018364 1G6_H1_L1.21_IgG1_PVA_/S267K Heavy Chain

SEQ ID NO: 14306 - protein, 122 aa, synthetic construct; identical to SEQ ID NO: 6246
  source 1..122: note = Description of Artificial Sequence: Synthetic polypeptide; note = VH of XENP018364

SEQ ID NO: 14307 - protein, 5 aa, synthetic construct
  source 1..5: note = Description of Artificial Sequence: Synthetic peptide; note = XENP018364 vhCDR1
NYWMN

SEQ ID NO: 14308 - protein, 19 aa, synthetic construct
  source 1..19: note = Description of Artificial Sequence: Synthetic peptide; note = XENP018364 vhCDR2
EIRLKSNNYATHYAEPVKG

SEQ ID NO: 14309 - protein, 11 aa, synthetic construct
  source 1..11: note = Description of Artificial Sequence: Synthetic peptide; note = XENP018364 vhCDR3
YYGNYGGYFDV

SEQ ID NO: 14310 - protein, 214 aa, synthetic construct
  source 1..214: note = Description of Artificial Sequence: Synthetic polypeptide; note = XENP018364 1G6_H1_L1.21_IgG1_PVA_/S267K Light Chain
SIVMTQSPATLSVSPGERATLSCRASQSVANDVAWYQQKPGQSPRLLINYASHRYTGVPDRFTGSGYGTEFTLTISSLQSEDFAVYFCQQDYSSPRTFGGGTKVEIKRTVAAPSVFIFPPSDEQLKSGTASVVCLLNNFYPREAKVQWKVDNALQSGNSQESVTEQDSKDSTYSLSSTLTLSKADYEKHKVYACEVTHQGLSSPVTKSFNRGEC

SEQ ID NO: 14311 - protein, 107 aa, synthetic construct; identical to SEQ ID NO: 8683
  source 1..107: note = Description of Artificial Sequence: Synthetic polypeptide; note = VL of XENP018364

SEQ ID NO: 14312 - protein, 11 aa, synthetic construct
  source 1..11: note = Description of Artificial Sequence: Synthetic peptide; note = XENP018364 vlCDR1
RASQSVANDVA

SEQ ID NO: 14313 - protein, 7 aa, synthetic construct
  source 1..7: note = Description of Artificial Sequence: Synthetic peptide; note = XENP018364 vlCDR2
YASHRYT

SEQ ID NO: 14314 - protein, 9 aa, synthetic construct
  source 1..9: note = Description of Artificial Sequence: Synthetic peptide; note = XENP018364 vlCDR3
QQDYSSPRT

SEQ ID NO: 14315 - protein, 451 aa, synthetic construct; identical to SEQ ID NO: 11545
  source 1..451: note = Description of Artificial Sequence: Synthetic polypeptide; note = XENP018365 1G6_H1_L1.22_IgG1_PVA_/S267K Heavy Chain

SEQ ID NO: 14316 - protein, 122 aa, synthetic construct; identical to SEQ ID NO: 6246
  source 1..122: note = Description of Artificial Sequence: Synthetic polypeptide; note = VH of XENP018365

SEQ ID NO: 14317 - protein, 5 aa, synthetic construct
  source 1..5: note = Description of Artificial Sequence: Synthetic peptide; note = XENP018365 vhCDR1
NYWMN

SEQ ID NO: 14318 - protein, 19 aa, synthetic construct
  source 1..19: note = Description of Artificial Sequence: Synthetic peptide; note = XENP018365 vhCDR2
EIRLKSNNYATHYAEPVKG

SEQ ID NO: 14319 - protein, 11 aa, synthetic construct
  source 1..11: note = Description of Artificial Sequence: Synthetic peptide; note = XENP018365 vhCDR3
YYGNYGGYFDV

SEQ ID NO: 14320 - protein, 214 aa, synthetic construct
  source 1..214: note = Description of Artificial Sequence: Synthetic polypeptide; note = XENP018365 1G6_H1_L1.22_IgG1_PVA_/S267K Light Chain
SIVMTQSPATLSVSPGERATLSCRASQSVQNDVAWYQQKPGQSPRLLINYASHRYTGVPDRFTGSGYGTEFTLTISSLQSEDFAVYFCQQDYSSPRTFGGGTKVEIKRTVAAPSVFIFPPSDEQLKSGTASVVCLLNNFYPREAKVQWKVDNALQSGNSQESVTEQDSKDSTYSLSSTLTLSKADYEKHKVYACEVTHQGLSSPVTKSFNRGEC

SEQ ID NO: 14321 - protein, 107 aa, synthetic construct; identical to SEQ ID NO: 8692
  source 1..107: note = Description of Artificial Sequence: Synthetic polypeptide; note = VL of XENP018365

SEQ ID NO: 14322 - protein, 11 aa, synthetic construct
  source 1..11: note = Description of Artificial Sequence: Synthetic peptide; note = XENP018365 vlCDR1
RASQSVQNDVA

SEQ ID NO: 14323 - protein, 7 aa, synthetic construct
  source 1..7: note = Description of Artificial Sequence: Synthetic peptide; note = XENP018365 vlCDR2
YASHRYT

SEQ ID NO: 14324 - protein, 9 aa, synthetic construct
  source 1..9: note = Description of Artificial Sequence: Synthetic peptide; note = XENP018365 vlCDR3
QQDYSSPRT

SEQ ID NO: 14325 - protein, 451 aa, synthetic construct; identical to SEQ ID NO: 11545
  source 1..451: note = Description of Artificial Sequence: Synthetic polypeptide; note = XENP018366 1G6_H1_L1.23_IgG1_PVA_/S267K Heavy Chain

SEQ ID NO: 14326 - protein, 122 aa, synthetic construct; identical to SEQ ID NO: 6246
  source 1..122: note = Description of Artificial Sequence: Synthetic polypeptide; note = VH of XENP018366

SEQ ID NO: 14327 - protein, 5 aa, synthetic construct
  source 1..5: note = Description of Artificial Sequence: Synthetic peptide; note = XENP018366 vhCDR1
NYWMN

SEQ ID NO: 14328 - protein, 19 aa, synthetic construct
  source 1..19: note = Description of Artificial Sequence: Synthetic peptide; note = XENP018366 vhCDR2
EIRLKSNNYATHYAEPVKG

SEQ ID NO: 14329 - protein, 11 aa, synthetic construct
  source 1..11: note = Description of Artificial Sequence: Synthetic peptide; note = XENP018366 vhCDR3
YYGNYGGYFDV

SEQ ID NO: 14330 - protein, 214 aa, synthetic construct
  source 1..214: note = Description of Artificial Sequence: Synthetic polypeptide; note = XENP018366 1G6_H1_L1.23_IgG1_PVA_/S267K Light Chain
SIVMTQSPATLSVSPGERATLSCRASQSVGNDVAWYQQKPGQSPRLLINYASHRYTGVPDRFTGSGYGTEFTLTISSLQSEDFAVYFCQQDYSSPRTFGGGTKVEIKRTVAAPSVFIFPPSDEQLKSGTASVVCLLNNFYPREAKVQWKVDNALQSGNSQESVTEQDSKDSTYSLSSTLTLSKADYEKHKVYACEVTHQGLSSPVTKSFNRGEC

SEQ ID NO: 14331 - protein, 107 aa, synthetic construct; identical to SEQ ID NO: 8701
  source 1..107: note = Description of Artificial Sequence: Synthetic polypeptide; note = VL of XENP018366

SEQ ID NO: 14332 - protein, 11 aa, synthetic construct
  source 1..11: note = Description of Artificial Sequence: Synthetic peptide; note = XENP018366 vlCDR1
RASQSVGNDVA

SEQ ID NO: 14333 - protein, 7 aa, synthetic construct
  source 1..7: note = Description of Artificial Sequence: Synthetic peptide; note = XENP018366 vlCDR2
YASHRYT

SEQ ID NO: 14334 - protein, 9 aa, synthetic construct
  source 1..9: note = Description of Artificial Sequence: Synthetic peptide; note = XENP018366 vlCDR3
QQDYSSPRT

SEQ ID NO: 14335 - protein, 451 aa, synthetic construct; identical to SEQ ID NO: 11545
  source 1..451: note = Description of Artificial Sequence: Synthetic polypeptide; note = XENP018367 1G6_H1_L1.24_IgG1_PVA_/S267K Heavy Chain

SEQ ID NO: 14336 - protein, 122 aa, synthetic construct; identical to SEQ ID NO: 6246
  source 1..122: note = Description of Artificial Sequence: Synthetic polypeptide; note = VH of XENP018367

SEQ ID NO: 14337 - protein, 5 aa, synthetic construct
  source 1..5: note = Description of Artificial Sequence: Synthetic peptide; note = XENP018367 vhCDR1
NYWMN

SEQ ID NO: 14338 - protein, 19 aa, synthetic construct
  source 1..19: note = Description of Artificial Sequence: Synthetic peptide; note = XENP018367 vhCDR2
EIRLKSNNYATHYAEPVKG

SEQ ID NO: 14339 - protein, 11 aa, synthetic construct
  source 1..11: note = Description of Artificial Sequence: Synthetic peptide; note = XENP018367 vhCDR3
YYGNYGGYFDV

SEQ ID NO: 14340 - protein, 214 aa, synthetic construct
  source 1..214: note = Description of Artificial Sequence: Synthetic polypeptide; note = XENP018367 1G6_H1_L1.24_IgG1_PVA_/S267K Light Chain
SIVMTQSPATLSVSPGERATLSCRASQSVVNDVAWYQQKPGQSPRLLINYASHRYTGVPDRFTGSGYGTEFTLTISSLQSEDFAVYFCQQDYSSPRTFGGGTKVEIKRTVAAPSVFIFPPSDEQLKSGTASVVCLLNNFYPREAKVQWKVDNALQSGNSQESVTEQDSKDSTYSLSSTLTLSKADYEKHKVYACEVTHQGLSSPVTKSFNRGEC

SEQ ID NO: 14341 - protein, 107 aa, synthetic construct; identical to SEQ ID NO: 8710
  source 1..107: note = Description of Artificial Sequence: Synthetic polypeptide; note = VL of XENP018367

SEQ ID NO: 14342 - protein, 11 aa, synthetic construct
  source 1..11: note = Description of Artificial Sequence: Synthetic peptide; note = XENP018367 vlCDR1
RASQSVVNDVA

SEQ ID NO: 14343 - protein, 7 aa, synthetic construct
  source 1..7: note = Description of Artificial Sequence: Synthetic peptide; note = XENP018367 vlCDR2
YASHRYT

SEQ ID NO: 14344 - protein, 9 aa, synthetic construct
  source 1..9: note = Description of Artificial Sequence: Synthetic peptide; note = XENP018367 vlCDR3
QQDYSSPRT

SEQ ID NO: 14345 - protein, 451 aa, synthetic construct; identical to SEQ ID NO: 11545
  source 1..451: note = Description of Artificial Sequence: Synthetic polypeptide; note = XENP018368 1G6_H1_L1.25_IgG1_PVA_/S267K Heavy Chain

SEQ ID NO: 14346 - protein, 122 aa, synthetic construct; identical to SEQ ID NO: 6246
  source 1..122: note = Description of Artificial Sequence: Synthetic polypeptide; note = VH of XENP018368

SEQ ID NO: 14347 - protein, 5 aa, synthetic construct
  source 1..5: note = Description of Artificial Sequence: Synthetic peptide; note = XENP018368 vhCDR1
NYWMN

SEQ ID NO: 14348 - protein, 19 aa, synthetic construct
  source 1..19: note = Description of Artificial Sequence: Synthetic peptide; note = XENP018368 vhCDR2
EIRLKSNNYATHYAEPVKG

SEQ ID NO: 14349 - protein, 11 aa, synthetic construct
  source 1..11: note = Description of Artificial Sequence: Synthetic peptide; note = XENP018368 vhCDR3
YYGNYGGYFDV

SEQ ID NO: 14350 - protein, 214 aa, synthetic construct
  source 1..214: note = Description of Artificial Sequence: Synthetic polypeptide; note = XENP018368 1G6_H1_L1.25_IgG1_PVA_/S267K Light Chain
SIVMTQSPATLSVSPGERATLSCRASQSVHNDVAWYQQKPGQSPRLLINYASHRYTGVPDRFTGSGYGTEFTLTISSLQSEDFAVYFCQQDYSSPRTFGGGTKVEIKRTVAAPSVFIFPPSDEQLKSGTASVVCLLNNFYPREAKVQWKVDNALQSGNSQESVTEQDSKDSTYSLSSTLTLSKADYEKHKVYACEVTHQGLSSPVTKSFNRGEC

SEQ ID NO: 14351 - protein, 107 aa, synthetic construct; identical to SEQ ID NO: 8719
  source 1..107: note = Description of Artificial Sequence: Synthetic polypeptide; note = VL of XENP018368

SEQ ID NO: 14352 - protein, 11 aa, synthetic construct
  source 1..11: note = Description of Artificial Sequence: Synthetic peptide; note = XENP018368 vlCDR1
RASQSVHNDVA

SEQ ID NO: 14353 - protein, 7 aa, synthetic construct
  source 1..7: note = Description of Artificial Sequence: Synthetic peptide; note = XENP018368 vlCDR2
YASHRYT

SEQ ID NO: 14354 - protein, 9 aa, synthetic construct
  source 1..9: note = Description of Artificial Sequence: Synthetic peptide; note = XENP018368 vlCDR3
QQDYSSPRT

SEQ ID NO: 14355 - protein, 451 aa, synthetic construct; identical to SEQ ID NO: 11545
  source 1..451: note = Description of Artificial Sequence: Synthetic polypeptide; note = XENP018369 1G6_H1_L1.26_IgG1_PVA_/S267K Heavy Chain

SEQ ID NO: 14356 - protein, 122 aa, synthetic construct; identical to SEQ ID NO: 6246
  source 1..122: note = Description of Artificial Sequence: Synthetic polypeptide; note = VH of XENP018369

SEQ ID NO: 14357 - protein, 5 aa, synthetic construct
  source 1..5: note = Description of Artificial Sequence: Synthetic peptide; note = XENP018369 vhCDR1
NYWMN

SEQ ID NO: 14358 - protein, 19 aa, synthetic construct
  source 1..19: note = Description of Artificial Sequence: Synthetic peptide; note = XENP018369 vhCDR2
EIRLKSNNYATHYAEPVKG

SEQ ID NO: 14359 - protein, 11 aa, synthetic construct
  source 1..11: note = Description of Artificial Sequence: Synthetic peptide; note = XENP018369 vhCDR3
YYGNYGGYFDV

SEQ ID NO: 14360 - protein, 214 aa, synthetic construct
  source 1..214: note = Description of Artificial Sequence: Synthetic polypeptide; note = XENP018369 1G6_H1_L1.26_IgG1_PVA_/S267K Light Chain
SIVMTQSPATLSVSPGERATLSCRASQSVDNDVAWYQQKPGQSPRLLINYASHRYTGVPDRFTGSGYGTEFTLTISSLQSEDFAVYFCQQDYSSPRTFGGGTKVEIKRTVAAPSVFIFPPSDEQLKSGTASVVCLLNNFYPREAKVQWKVDNALQSGNSQESVTEQDSKDSTYSLSSTLTLSKADYEKHKVYACEVTHQGLSSPVTKSFNRGEC

SEQ ID NO: 14361 - protein, 107 aa, synthetic construct; identical to SEQ ID NO: 8728
  source 1..107: note = Description of Artificial Sequence: Synthetic polypeptide; note = VL of XENP018369

SEQ ID NO: 14362 - protein, 11 aa, synthetic construct
  source 1..11: note = Description of Artificial Sequence: Synthetic peptide; note = XENP018369 vlCDR1
RASQSVDNDVA

SEQ ID NO: 14363 - protein, 7 aa, synthetic construct
  source 1..7: note = Description of Artificial Sequence: Synthetic peptide; note = XENP018369 vlCDR2
YASHRYT

SEQ ID NO: 14364 - protein, 9 aa, synthetic construct
  source 1..9: note = Description of Artificial Sequence: Synthetic peptide; note = XENP018369 vlCDR3
QQDYSSPRT

SEQ ID NO: 14365 - protein, 451 aa, synthetic construct; identical to SEQ ID NO: 11545
  source 1..451: note = Description of Artificial Sequence: Synthetic polypeptide; note = XENP018370 1G6_H1_L1.27_IgG1_PVA_/S267K Heavy Chain

SEQ ID NO: 14366 - protein, 122 aa, synthetic construct; identical to SEQ ID NO: 6246
  source 1..122: note = Description of Artificial Sequence: Synthetic polypeptide; note = VH of XENP018370

SEQ ID NO: 14367 - protein, 5 aa, synthetic construct
  source 1..5: note = Description of Artificial Sequence: Synthetic peptide; note = XENP018370 vhCDR1
NYWMN

SEQ ID NO: 14368 - protein, 19 aa, synthetic construct
  source 1..19: note = Description of Artificial Sequence: Synthetic peptide; note = XENP018370 vhCDR2
EIRLKSNNYATHYAEPVKG

SEQ ID NO: 14369 - protein, 11 aa, synthetic construct
  source 1..11: note = Description of Artificial Sequence: Synthetic peptide; note = XENP018370 vhCDR3
YYGNYGGYFDV

SEQ ID NO: 14370 - protein, 214 aa, synthetic construct
  source 1..214: note = Description of Artificial Sequence: Synthetic polypeptide; note = XENP018370 1G6_H1_L1.27_IgG1_PVA_/S267K Light Chain
SIVMTQSPATLSVSPGERATLSCRASQSVKNDVAWYQQKPGQSPRLLINYASHRYTGVPDRFTGSGYGTEFTLTISSLQSEDFAVYFCQQDYSSPRTFGGGTKVEIKRTVAAPSVFIFPPSDEQLKSGTASVVCLLNNFYPREAKVQWKVDNALQSGNSQESVTEQDSKDSTYSLSSTLTLSKADYEKHKVYACEVTHQGLSSPVTKSFNRGEC

SEQ ID NO: 14371 - protein, 107 aa, synthetic construct; identical to SEQ ID NO: 8737
  source 1..107: note = Description of Artificial Sequence: Synthetic polypeptide; note = VL of XENP018370

SEQ ID NO: 14372 - protein, 11 aa, synthetic construct
  source 1..11: note = Description of Artificial Sequence: Synthetic peptide; note = XENP018370 vlCDR1
RASQSVKNDVA

SEQ ID NO: 14373 - protein, 7 aa, synthetic construct
  source 1..7: note = Description of Artificial Sequence: Synthetic peptide; note = XENP018370 vlCDR2
YASHRYT

SEQ ID NO: 14374 - protein, 9 aa, synthetic construct
  source 1..9: note = Description of Artificial Sequence: Synthetic peptide; note = XENP018370 vlCDR3
QQDYSSPRT

SEQ ID NO: 14375 - protein, 451 aa, synthetic construct; identical to SEQ ID NO: 11545
  source 1..451: note = Description of Artificial Sequence: Synthetic polypeptide; note = XENP018371 1G6_H1_L1.28_IgG1_PVA_/S267K Heavy Chain

SEQ ID NO: 14376 - protein, 122 aa, synthetic construct; identical to SEQ ID NO: 6246
  source 1..122: note = Description of Artificial Sequence: Synthetic polypeptide; note = VH of XENP018371

SEQ ID NO: 14377 - protein, 5 aa, synthetic construct
  source 1..5: note = Description of Artificial Sequence: Synthetic peptide; note = XENP018371 vhCDR1
NYWMN

SEQ ID NO: 14378 - protein, 19 aa, synthetic construct
  source 1..19: note = Description of Artificial Sequence: Synthetic peptide; note = XENP018371 vhCDR2
EIRLKSNNYATHYAEPVKG

SEQ ID NO: 14379 - protein, 11 aa, synthetic construct
  source 1..11: note = Description of Artificial Sequence: Synthetic peptide; note = XENP018371 vhCDR3
YYGNYGGYFDV

SEQ ID NO: 14380 - protein, 214 aa, synthetic construct
  source 1..214: note = Description of Artificial Sequence: Synthetic polypeptide; note = XENP018371 1G6_H1_L1.28_IgG1_PVA_/S267K Light Chain
SIVMTQSPATLSVSPGERATLSCRASQSVYNDVAWYQQKPGQSPRLLINYASHRYTGVPDRFTGSGYGTEFTLTISSLQSEDFAVYFCQQDYSSPRTFGGGTKVEIKRTVAAPSVFIFPPSDEQLKSGTASVVCLLNNFYPREAKVQWKVDNALQSGNSQESVTEQDSKDSTYSLSSTLTLSKADYEKHKVYACEVTHQGLSSPVTKSFNRGEC

SEQ ID NO: 14381 - protein, 107 aa, synthetic construct; identical to SEQ ID NO: 8746
  source 1..107: note = Description of Artificial Sequence: Synthetic polypeptide; note = VL of XENP018371

SEQ ID NO: 14382 - protein, 11 aa, synthetic construct
  source 1..11: note = Description of Artificial Sequence: Synthetic peptide; note = XENP018371 vlCDR1
RASQSVYNDVA

SEQ ID NO: 14383 - protein, 7 aa, synthetic construct
  source 1..7: note = Description of Artificial Sequence: Synthetic peptide; note = XENP018371 vlCDR2
YASHRYT

SEQ ID NO: 14384 - protein, 9 aa, synthetic construct
  source 1..9: note = Description of Artificial Sequence: Synthetic peptide; note = XENP018371 vlCDR3
QQDYSSPRT

SEQ ID NO: 14385 - protein, 451 aa, synthetic construct; identical to SEQ ID NO: 11545
  source 1..451: note = Description of Artificial Sequence: Synthetic polypeptide; note = XENP018372 1G6_H1_L1.29_IgG1_PVA_/S267K Heavy Chain

SEQ ID NO: 14386 - protein, 122 aa, synthetic construct; identical to SEQ ID NO: 6246
  source 1..122: note = Description of Artificial Sequence: Synthetic polypeptide; note = VH of XENP018372

SEQ ID NO: 14387 - protein, 5 aa, synthetic construct
  source 1..5: note = Description of Artificial Sequence: Synthetic peptide; note = XENP018372 vhCDR1
NYWMN

SEQ ID NO: 14388 - protein, 19 aa, synthetic construct
  source 1..19: note = Description of Artificial Sequence: Synthetic peptide; note = XENP018372 vhCDR2
EIRLKSNNYATHYAEPVKG

SEQ ID NO: 14389 - protein, 11 aa, synthetic construct
  source 1..11: note = Description of Artificial Sequence: Synthetic peptide; note = XENP018372 vhCDR3
YYGNYGGYFDV

SEQ ID NO: 14390 - protein, 214 aa, synthetic construct
  source 1..214: note = Description of Artificial Sequence: Synthetic polypeptide; note = XENP018372 1G6_H1_L1.29_IgG1_PVA_/S267K Light Chain
SIVMTQSPATLSVSPGERATLSCRASQSVSDDVAWYQQKPGQSPRLLINYASHRYTGVPDRFTGSGYGTEFTLTISSLQSEDFAVYFCQQDYSSPRTFGGGTKVEIKRTVAAPSVFIFPPSDEQLKSGTASVVCLLNNFYPREAKVQWKVDNALQSGNSQESVTEQDSKDSTYSLSSTLTLSKADYEKHKVYACEVTHQGLSSPVTKSFNRGEC

SEQ ID NO: 14391 - protein, 107 aa, synthetic construct; identical to SEQ ID NO: 8755
  source 1..107: note = Description of Artificial Sequence: Synthetic polypeptide; note = VL of XENP018372

SEQ ID NO: 14392 - protein, 11 aa, synthetic construct
  source 1..11: note = Description of Artificial Sequence: Synthetic peptide; note = XENP018372 vlCDR1
RASQSVSDDVA

SEQ ID NO: 14393 - protein, 7 aa, synthetic construct
  source 1..7: note = Description of Artificial Sequence: Synthetic peptide; note = XENP018372 vlCDR2
YASHRYT

SEQ ID NO: 14394 - protein, 9 aa, synthetic construct
  source 1..9: note = Description of Artificial Sequence: Synthetic peptide; note = XENP018372 vlCDR3
QQDYSSPRT

SEQ ID NO: 14395 - protein, 451 aa, synthetic construct; identical to SEQ ID NO: 11545
  source 1..451: note = Description of Artificial Sequence: Synthetic polypeptide; note = XENP018373 1G6_H1_L1.30_IgG1_PVA_/S267K Heavy Chain

SEQ ID NO: 14396 - protein, 122 aa, synthetic construct; identical to SEQ ID NO: 6246
  source 1..122: note = Description of Artificial Sequence: Synthetic polypeptide; note = VH of XENP018373

SEQ ID NO: 14397 - protein, 5 aa, synthetic construct
  source 1..5: note = Description of Artificial Sequence: Synthetic peptide; note = XENP018373 vhCDR1
NYWMN

SEQ ID NO: 14398 - protein, 19 aa, synthetic construct
  source 1..19: note = Description of Artificial Sequence: Synthetic peptide; note = XENP018373 vhCDR2
EIRLKSNNYATHYAEPVKG

SEQ ID NO: 14399 - protein, 11 aa, synthetic construct
  source 1..11: note = Description of Artificial Sequence: Synthetic peptide; note = XENP018373 vhCDR3
YYGNYGGYFDV

SEQ ID NO: 14400 - protein, 214 aa, synthetic construct
  source 1..214: note = Description of Artificial Sequence: Synthetic polypeptide; note = XENP018373 1G6_H1_L1.30_IgG1_PVA_/S267K Light Chain
SIVMTQSPATLSVSPGERATLSCRASQSVSHDVAWYQQKPGQSPRLLINYASHRYTGVPDRFTGSGYGTEFTLTISSLQSEDFAVYFCQQDYSSPRTFGGGTKVEIKRTVAAPSVFIFPPSDEQLKSGTASVVCLLNNFYPREAKVQWKVDNALQSGNSQESVTEQDSKDSTYSLSSTLTLSKADYEKHKVYACEVTHQGLSSPVTKSFNRGEC

SEQ ID NO: 14401 - protein, 107 aa, synthetic construct; identical to SEQ ID NO: 8764
  source 1..107: note = Description of Artificial Sequence: Synthetic polypeptide; note = VL of XENP018373

SEQ ID NO: 14402 - protein, 11 aa, synthetic construct
  source 1..11: note = Description of Artificial Sequence: Synthetic peptide; note = XENP018373 vlCDR1
RASQSVSHDVA

SEQ ID NO: 14403 - protein, 7 aa, synthetic construct
  source 1..7: note = Description of Artificial Sequence: Synthetic peptide; note = XENP018373 vlCDR2
YASHRYT

SEQ ID NO: 14404 - protein, 9 aa, synthetic construct
  source 1..9: note = Description of Artificial Sequence: Synthetic peptide; note = XENP018373 vlCDR3
QQDYSSPRT

SEQ ID NO: 14405 - protein, 451 aa, synthetic construct; identical to SEQ ID NO: 11545
  source 1..451: note = Description of Artificial Sequence: Synthetic polypeptide; note = XENP018374 1G6_H1_L1.31_IgG1_PVA_/S267K Heavy Chain

SEQ ID NO: 14406 - protein, 122 aa, synthetic construct; identical to SEQ ID NO: 6246
  source 1..122: note = Description of Artificial Sequence: Synthetic polypeptide; note = VH of XENP018374

SEQ ID NO: 14407 - protein, 5 aa, synthetic construct
  source 1..5: note = Description of Artificial Sequence: Synthetic peptide; note = XENP018374 vhCDR1
NYWMN

SEQ ID NO: 14408 - protein, 19 aa, synthetic construct
  source 1..19: note = Description of Artificial Sequence: Synthetic peptide; note = XENP018374 vhCDR2
EIRLKSNNYATHYAEPVKG

SEQ ID NO: 14409 - protein, 11 aa, synthetic construct
  source 1..11: note = Description of Artificial Sequence: Synthetic peptide; note = XENP018374 vhCDR3
YYGNYGGYFDV

SEQ ID NO: 14410 - protein, 214 aa, synthetic construct
  source 1..214: note = Description of Artificial Sequence: Synthetic polypeptide; note = XENP018374 1G6_H1_L1.31_IgG1_PVA_/S267K Light Chain
SIVMTQSPATLSVSPGERATLSCRASQSVSEDVAWYQQKPGQSPRLLINYASHRYTGVPDRFTGSGYGTEFTLTISSLQSEDFAVYFCQQDYSSPRTFGGGTKVEIKRTVAAPSVFIFPPSDEQLKSGTASVVCLLNNFYPREAKVQWKVDNALQSGNSQESVTEQDSKDSTYSLSSTLTLSKADYEKHKVYACEVTHQGLSSPVTKSFNRGEC

SEQ ID NO: 14411 - protein, 107 aa, synthetic construct; identical to SEQ ID NO: 8773
  source 1..107: note = Description of Artificial Sequence: Synthetic polypeptide; note = VL of XENP018374

SEQ ID NO: 14412 - protein, 11 aa, synthetic construct
  source 1..11: note = Description of Artificial Sequence: Synthetic peptide; note = XENP018374 vlCDR1
RASQSVSEDVA

SEQ ID NO: 14413 - protein, 7 aa, synthetic construct
  source 1..7: note = Description of Artificial Sequence: Synthetic peptide; note = XENP018374 vlCDR2
YASHRYT

SEQ ID NO: 14414 - protein, 9 aa, synthetic construct
  source 1..9: note = Description of Artificial Sequence: Synthetic peptide; note = XENP018374 vlCDR3
QQDYSSPRT

SEQ ID NO: 14415 - protein, 451 aa, synthetic construct; identical to SEQ ID NO: 11545
  source 1..451: note = Description of Artificial Sequence: Synthetic polypeptide; note = XENP018375 1G6_H1_L1.32_IgG1_PVA_/S267K Heavy Chain

SEQ ID NO: 14416 - protein, 122 aa, synthetic construct; identical to SEQ ID NO: 6246
  source 1..122: note = Description of Artificial Sequence: Synthetic polypeptide; note = VH of XENP018375

SEQ ID NO: 14417 - protein, 5 aa, synthetic construct
  source 1..5: note = Description of Artificial Sequence: Synthetic peptide; note = XENP018375 vhCDR1
NYWMN

SEQ ID NO: 14418 - protein, 19 aa, synthetic construct
  source 1..19: note = Description of Artificial Sequence: Synthetic peptide; note = XENP018375 vhCDR2
EIRLKSNNYATHYAEPVKG

SEQ ID NO: 14419 - protein, 11 aa, synthetic construct
  source 1..11: note = Description of Artificial Sequence: Synthetic peptide; note = XENP018375 vhCDR3
YYGNYGGYFDV

SEQ ID NO: 14420 - protein, 214 aa, synthetic construct
  source 1..214: note = Description of Artificial Sequence: Synthetic polypeptide; note = XENP018375 1G6_H1_L1.32_IgG1_PVA_/S267K Light Chain
SIVMTQSPATLSVSPGERATLSCRASQSVSSDVAWYQQKPGQSPRLLINYASHRYTGVPDRFTGSGYGTEFTLTISSLQSEDFAVYFCQQDYSSPRTFGGGTKVEIKRTVAAPSVFIFPPSDEQLKSGTASVVCLLNNFYPREAKVQWKVDNALQSGNSQESVTEQDSKDSTYSLSSTLTLSKADYEKHKVYACEVTHQGLSSPVTKSFNRGEC

SEQ ID NO: 14421 - protein, 107 aa, synthetic construct; identical to SEQ ID NO: 8782
  source 1..107: note = Description of Artificial Sequence: Synthetic polypeptide; note = VL of XENP018375

SEQ ID NO: 14422 - protein, 11 aa, synthetic construct
  source 1..11: note = Description of Artificial Sequence: Synthetic peptide; note = XENP018375 vlCDR1
RASQSVSSDVA

SEQ ID NO: 14423 - protein, 7 aa, synthetic construct
  source 1..7: note = Description of Artificial Sequence: Synthetic peptide; note = XENP018375 vlCDR2
YASHRYT

SEQ ID NO: 14424 - protein, 9 aa, synthetic construct
  source 1..9: note = Description of Artificial Sequence: Synthetic peptide; note = XENP018375 vlCDR3
QQDYSSPRT

SEQ ID NO: 14425 - protein, 451 aa, synthetic construct; identical to SEQ ID NO: 11545
  source 1..451: note = Description of Artificial Sequence: Synthetic polypeptide; note = XENP018376 1G6_H1_L1.33_IgG1_PVA_/S267K Heavy Chain

SEQ ID NO: 14426 - protein, 122 aa, synthetic construct; identical to SEQ ID NO: 6246
  source 1..122: note = Description of Artificial Sequence: Synthetic polypeptide; note = VH of XENP018376

SEQ ID NO: 14427 - protein, 5 aa, synthetic construct
  source 1..5: note = Description of Artificial Sequence: Synthetic peptide; note = XENP018376 vhCDR1
NYWMN

SEQ ID NO: 14428 - protein, 19 aa, synthetic construct
  source 1..19: note = Description of Artificial Sequence: Synthetic peptide; note = XENP018376 vhCDR2
EIRLKSNNYATHYAEPVKG

SEQ ID NO: 14429 - protein, 11 aa, synthetic construct
  source 1..11: note = Description of Artificial Sequence: Synthetic peptide; note = XENP018376 vhCDR3
YYGNYGGYFDV

SEQ ID NO: 14430 - protein, 214 aa, synthetic construct
  source 1..214: note = Description of Artificial Sequence: Synthetic polypeptide; note = XENP018376 1G6_H1_L1.33_IgG1_PVA_/S267K Light Chain
SIVMTQSPATLSVSPGERATLSCRASQSVSRDVAWYQQKPGQSPRLLINYASHRYTGVPDRFTGSGYGTEFTLTISSLQSEDFAVYFCQQDYSSPRTFGGGTKVEIKRTVAAPSVFIFPPSDEQLKSGTASVVCLLNNFYPREAKVQWKVDNALQSGNSQESVTEQDSKDSTYSLSSTLTLSKADYEKHKVYACEVTHQGLSSPVTKSFNRGEC

SEQ ID NO: 14431 - protein, 107 aa, synthetic construct; identical to SEQ ID NO: 8791
  source 1..107: note = Description of Artificial Sequence: Synthetic polypeptide; note = VL of XENP018376

SEQ ID NO: 14432 - protein, 11 aa, synthetic construct
  source 1..11: note = Description of Artificial Sequence: Synthetic peptide; note = XENP018376 vlCDR1
RASQSVSRDVA

SEQ ID NO: 14433 - protein, 7 aa, synthetic construct
  source 1..7: note = Description of Artificial Sequence: Synthetic peptide; note = XENP018376 vlCDR2
YASHRYT

SEQ ID NO: 14434 - protein, 9 aa, synthetic construct
  source 1..9: note = Description of Artificial Sequence: Synthetic peptide; note = XENP018376 vlCDR3
QQDYSSPRT

SEQ ID NO: 14435 - protein, 451 aa, synthetic construct; identical to SEQ ID NO: 11545
  source 1..451: note = Description of Artificial Sequence: Synthetic polypeptide; note = XENP018377 1G6_H1_L1.34_IgG1_PVA_/S267K Heavy Chain

SEQ ID NO: 14436 - protein, 122 aa, synthetic construct; identical to SEQ ID NO: 6246
  source 1..122: note = Description of Artificial Sequence: Synthetic polypeptide; note = VH of XENP018377

SEQ ID NO: 14437 - protein, 5 aa, synthetic construct
  source 1..5: note = Description of Artificial Sequence: Synthetic peptide; note = XENP018377 vhCDR1
NYWMN

SEQ ID NO: 14438 - protein, 19 aa, synthetic construct
  source 1..19: note = Description of Artificial Sequence: Synthetic peptide; note = XENP018377 vhCDR2
EIRLKSNNYATHYAEPVKG

SEQ ID NO: 14439 - protein, 11 aa, synthetic construct
  source 1..11: note = Description of Artificial Sequence: Synthetic peptide; note = XENP018377 vhCDR3
YYGNYGGYFDV

SEQ ID NO: 14440 - protein, 214 aa, synthetic construct
  source 1..214: note = Description of Artificial Sequence: Synthetic polypeptide; note = XENP018377 1G6_H1_L1.34_IgG1_PVA_/S267K Light Chain
SIVMTQSPATLSVSPGERATLSCRASQSVSLDVAWYQQKPGQSPRLLINYASHRYTGVPDRFTGSGYGTEFTLTISSLQSEDFAVYFCQQDYSSPRTFGGGTKVEIKRTVAAPSVFIFPPSDEQLKSGTASVVCLLNNFYPREAKVQWKVDNALQSGNSQESVTEQDSKDSTYSLSSTLTLSKADYEKHKVYACEVTHQGLSSPVTKSFNRGEC

SEQ ID NO: 14441 - protein, 107 aa, synthetic construct; identical to SEQ ID NO: 8800
  source 1..107: note = Description of Artificial Sequence: Synthetic polypeptide; note = VL of XENP018377

SEQ ID NO: 14442 - protein, 11 aa, synthetic construct
  source 1..11: note = Description of Artificial Sequence: Synthetic peptide; note = XENP018377 vlCDR1
RASQSVSLDVA

SEQ ID NO: 14443 - protein, 7 aa, synthetic construct
  source 1..7: note = Description of Artificial Sequence: Synthetic peptide; note = XENP018377 vlCDR2
YASHRYT

SEQ ID NO: 14444 - protein, 9 aa, synthetic construct
  source 1..9: note = Description of Artificial Sequence: Synthetic peptide; note = XENP018377 vlCDR3
QQDYSSPRT

SEQ ID NO: 14445 - protein, 451 aa, synthetic construct; identical to SEQ ID NO: 11545
  source 1..451: note = Description of Artificial Sequence: Synthetic polypeptide; note = XENP018378 1G6_H1_L1.35_IgG1_PVA_/S267K Heavy Chain

SEQ ID NO: 14446 - protein, 122 aa, synthetic construct; identical to SEQ ID NO: 6246
  source 1..122: note = Description of Artificial Sequence: Synthetic polypeptide; note = VH of XENP018378

SEQ ID NO: 14447 - protein, 5 aa, synthetic construct
  source 1..5: note = Description of Artificial Sequence: Synthetic peptide; note = XENP018378 vhCDR1
NYWMN

SEQ ID NO: 14448 - protein, 19 aa, synthetic construct
  source 1..19: note = Description of Artificial Sequence: Synthetic peptide; note = XENP018378 vhCDR2
EIRLKSNNYATHYAEPVKG

SEQ ID NO: 14449 - protein, 11 aa, synthetic construct
  source 1..11: note = Description of Artificial Sequence: Synthetic peptide; note = XENP018378 vhCDR3
YYGNYGGYFDV

SEQ ID NO: 14450 - protein, 214 aa, synthetic construct
  source 1..214: note = Description of Artificial Sequence: Synthetic polypeptide; note = XENP018378 1G6_H1_L1.35_IgG1_PVA_/S267K Light Chain
SIVMTQSPATLSVSPGERATLSCRASQSVSTDVAWYQQKPGQSPRLLINYASHRYTGVPDRFTGSGYGTEFTLTISSLQSEDFAVYFCQQDYSSPRTFGGGTKVEIKRTVAAPSVFIFPPSDEQLKSGTASVVCLLNNFYPREAKVQWKVDNALQSGNSQESVTEQDSKDSTYSLSSTLTLSKADYEKHKVYACEVTHQGLSSPVTKSFNRGEC

SEQ ID NO: 14451 - protein, 107 aa, synthetic construct; identical to SEQ ID NO: 8809
  source 1..107: note = Description of Artificial Sequence: Synthetic polypeptide; note = VL of XENP018378

SEQ ID NO: 14452 - protein, 11 aa, synthetic construct
  source 1..11: note = Description of Artificial Sequence: Synthetic peptide; note = XENP018378 vlCDR1
RASQSVSTDVA

SEQ ID NO: 14453 - protein, 7 aa, synthetic construct
  source 1..7: note = Description of Artificial Sequence: Synthetic peptide; note = XENP018378 vlCDR2
YASHRYT

SEQ ID NO: 14454 - protein, 9 aa, synthetic construct
  source 1..9: note = Description of Artificial Sequence: Synthetic peptide; note = XENP018378 vlCDR3
QQDYSSPRT

SEQ ID NO: 14455 - protein, 451 aa, synthetic construct; identical to SEQ ID NO: 11545
  source 1..451: note = Description of Artificial Sequence: Synthetic polypeptide; note = XENP018379 1G6_H1_L1.36_IgG1_PVA_/S267K Heavy Chain

SEQ ID NO: 14456 - protein, 122 aa, synthetic construct; identical to SEQ ID NO: 6246
  source 1..122: note = Description of Artificial Sequence: Synthetic polypeptide; note = VH of XENP018379

SEQ ID NO: 14457 - protein, 5 aa, synthetic construct
  source 1..5: note = Description of Artificial Sequence: Synthetic peptide; note = XENP018379 vhCDR1
NYWMN

SEQ ID NO: 14458 - protein, 19 aa, synthetic construct
  source 1..19: note = Description of Artificial Sequence: Synthetic peptide; note = XENP018379 vhCDR2
EIRLKSNNYATHYAEPVKG

SEQ ID NO: 14459 - protein, 11 aa, synthetic construct
  source 1..11: note = Description of Artificial Sequence: Synthetic peptide; note = XENP018379 vhCDR3
YYGNYGGYFDV

SEQ ID NO: 14460 - protein, 214 aa, synthetic construct
  source 1..214: note = Description of Artificial Sequence: Synthetic polypeptide; note = XENP018379 1G6_H1_L1.36_IgG1_PVA_/S267K Light Chain
SIVMTQSPATLSVSPGERATLSCRASQSVSGDVAWYQQKPGQSPRLLINYASHRYTGVPDRFTGSGYGTEFTLTISSLQSEDFAVYFCQQDYSSPRTFGGGTKVEIKRTVAAPSVFIFPPSDEQLKSGTASVVCLLNNFYPREAKVQWKVDNALQSGNSQESVTEQDSKDSTYSLSSTLTLSKADYEKHKVYACEVTHQGLSSPVTKSFNRGEC

SEQ ID NO: 14461 - protein, 107 aa, synthetic construct; identical to SEQ ID NO: 8818
  source 1..107: note = Description of Artificial Sequence: Synthetic polypeptide; note = VL of XENP018379

SEQ ID NO: 14462 - protein, 11 aa, synthetic construct
  source 1..11: note = Description of Artificial Sequence: Synthetic peptide; note = XENP018379 vlCDR1
RASQSVSGDVA

SEQ ID NO: 14463 - protein, 7 aa, synthetic construct
  source 1..7: note = Description of Artificial Sequence: Synthetic peptide; note = XENP018379 vlCDR2
YASHRYT

SEQ ID NO: 14464 - protein, 9 aa, synthetic construct
  source 1..9: note = Description of Artificial Sequence: Synthetic peptide; note = XENP018379 vlCDR3
QQDYSSPRT

SEQ ID NO: 14465 - protein, 451 aa, synthetic construct; identical to SEQ ID NO: 11545
  source 1..451: note = Description of Artificial Sequence: Synthetic polypeptide; note = XENP018380 1G6_H1_L1.37_IgG1_PVA_/S267K Heavy Chain

SEQ ID NO: 14466 - protein, 122 aa, synthetic construct; identical to SEQ ID NO: 6246
  source 1..122: note = Description of Artificial Sequence: Synthetic polypeptide; note = VH of XENP018380

SEQ ID NO: 14467 - protein, 5 aa, synthetic construct
  source 1..5: note = Description of Artificial Sequence: Synthetic peptide; note = XENP018380 vhCDR1
NYWMN

SEQ ID NO: 14468 - protein, 19 aa, synthetic construct
  source 1..19: note = Description of Artificial Sequence: Synthetic peptide; note = XENP018380 vhCDR2
EIRLKSNNYATHYAEPVKG

SEQ ID NO: 14469 - protein, 11 aa, synthetic construct
  source 1..11: note = Description of Artificial Sequence: Synthetic peptide; note = XENP018380 vhCDR3
YYGNYGGYFDV

SEQ ID NO: 14470 - protein, 214 aa, synthetic construct
  source 1..214: note = Description of Artificial Sequence: Synthetic polypeptide; note = XENP018380 1G6_H1_L1.37_IgG1_PVA_/S267K Light Chain
SIVMTQSPATLSVSPGERATLSCRASQSVSYDVAWYQQKPGQSPRLLINYASHRYTGVPDRFTGSGYGTEFTLTISSLQSEDFAVYFCQQDYSSPRTFGGGTKVEIKRTVAAPSVFIFPPSDEQLKSGTASVVCLLNNFYPREAKVQWKVDNALQSGNSQESVTEQDSKDSTYSLSSTLTLSKADYEKHKVYACEVTHQGLSSPVTKSFNRGEC

SEQ ID NO: 14471 - protein, 107 aa, synthetic construct; identical to SEQ ID NO: 8827
  source 1..107: note = Description of Artificial Sequence: Synthetic polypeptide; note = VL of XENP018380

SEQ ID NO: 14472 - protein, 11 aa, synthetic construct
  source 1..11: note = Description of Artificial Sequence: Synthetic peptide; note = XENP018380 vlCDR1
RASQSVSYDVA

SEQ ID NO: 14473 - protein, 7 aa, synthetic construct
  source 1..7: note = Description of Artificial Sequence: Synthetic peptide; note = XENP018380 vlCDR2
YASHRYT

SEQ ID NO: 14474 - protein, 9 aa, synthetic construct
  source 1..9: note = Description of Artificial Sequence: Synthetic peptide; note = XENP018380 vlCDR3
QQDYSSPRT

SEQ ID NO: 14475 - protein, 451 aa, synthetic construct; identical to SEQ ID NO: 11545
  source 1..451: note = Description of Artificial Sequence: Synthetic polypeptide; note = XENP018381 1G6_H1_L1.38_IgG1_PVA_/S267K Heavy Chain

SEQ ID NO: 14476 - protein, 122 aa, synthetic construct; identical to SEQ ID NO: 6246
  source 1..122: note = Description of Artificial Sequence: Synthetic polypeptide; note = VH of XENP018381

SEQ ID NO: 14477 - protein, 5 aa, synthetic construct
  source 1..5: note = Description of Artificial Sequence: Synthetic peptide; note = XENP018381 vhCDR1
NYWMN

SEQ ID NO: 14478 - protein, 19 aa, synthetic construct
  source 1..19: note = Description of Artificial Sequence: Synthetic peptide; note = XENP018381 vhCDR2
EIRLKSNNYATHYAEPVKG

SEQ ID NO: 14479 - protein, 11 aa, synthetic construct
  source 1..11: note = Description of Artificial Sequence: Synthetic peptide; note = XENP018381 vhCDR3
YYGNYGGYFDV

SEQ ID NO: 14480 - protein, 214 aa, synthetic construct
  source 1..214: note = Description of Artificial Sequence: Synthetic polypeptide; note = XENP018381 1G6_H1_L1.38_IgG1_PVA_/S267K Light Chain
SIVMTQSPATLSVSPGERATLSCRASQSVSNNVAWYQQKPGQSPRLLINYASHRYTGVPDRFTGSGYGTEFTLTISSLQSEDFAVYFCQQDYSSPRTFGGGTKVEIKRTVAAPSVFIFPPSDEQLKSGTASVVCLLNNFYPREAKVQWKVDNALQSGNSQESVTEQDSKDSTYSLSSTLTLSKADYEKHKVYACEVTHQGLSSPVTKSFNRGEC

SEQ ID NO: 14481 - protein, 107 aa, synthetic construct; identical to SEQ ID NO: 8836
  source 1..107: note = Description of Artificial Sequence: Synthetic polypeptide; note = VL of XENP018381

SEQ ID NO: 14482 - protein, 11 aa, synthetic construct
  source 1..11: note = Description of Artificial Sequence: Synthetic peptide; note = XENP018381 vlCDR1
RASQSVSNNVA

SEQ ID NO: 14483 - protein, 7 aa, synthetic construct
  source 1..7: note = Description of Artificial Sequence: Synthetic peptide; note = XENP018381 vlCDR2
YASHRYT

SEQ ID NO: 14484 - protein, 9 aa, synthetic construct
  source 1..9: note = Description of Artificial Sequence: Synthetic peptide; note = XENP018381 vlCDR3
QQDYSSPRT

SEQ ID NO: 14485 - protein, 451 aa, synthetic construct; identical to SEQ ID NO: 11545
  source 1..451: note = Description of Artificial Sequence: Synthetic polypeptide; note = XENP018382 1G6_H1_L1.39_IgG1_PVA_/S267K Heavy Chain

SEQ ID NO: 14486 - protein, 122 aa, synthetic construct; identical to SEQ ID NO: 6246
  source 1..122: note = Description of Artificial Sequence: Synthetic polypeptide; note = VH of XENP018382

SEQ ID NO: 14487 - protein, 5 aa, synthetic construct
  source 1..5: note = Description of Artificial Sequence: Synthetic peptide; note = XENP018382 vhCDR1
NYWMN

SEQ ID NO: 14488 - protein, 19 aa, synthetic construct
  source 1..19: note = Description of Artificial Sequence: Synthetic peptide; note = XENP018382 vhCDR2
EIRLKSNNYATHYAEPVKG

SEQ ID NO: 14489 - protein, 11 aa, synthetic construct
  source 1..11: note = Description of Artificial Sequence: Synthetic peptide; note = XENP018382 vhCDR3
YYGNYGGYFDV

SEQ ID NO: 14490 - protein, 214 aa, synthetic construct
  source 1..214: note = Description of Artificial Sequence: Synthetic polypeptide; note = XENP018382 1G6_H1_L1.39_IgG1_PVA_/S267K Light Chain
SIVMTQSPATLSVSPGERATLSCRASQSVSNEVAWYQQKPGQSPRLLINYASHRYTGVPDRFTGSGYGTEFTLTISSLQSEDFAVYFCQQDYSSPRTFGGGTKVEIKRTVAAPSVFIFPPSDEQLKSGTASVVCLLNNFYPREAKVQWKVDNALQSGNSQESVTEQDSKDSTYSLSSTLTLSKADYEKHKVYACEVTHQGLSSPVTKSFNRGEC

SEQ ID NO: 14491 - protein, 107 aa, synthetic construct; identical to SEQ ID NO: 8845
  source 1..107: note = Description of Artificial Sequence: Synthetic polypeptide; note = VL of XENP018382

SEQ ID NO: 14492 - protein, 11 aa, synthetic construct
  source 1..11: note = Description of Artificial Sequence: Synthetic peptide; note = XENP018382 vlCDR1
RASQSVSNEVA

SEQ ID NO: 14493 - protein, 7 aa, synthetic construct
  source 1..7: note = Description of Artificial Sequence: Synthetic peptide; note = XENP018382 vlCDR2
YASHRYT

SEQ ID NO: 14494 - protein, 9 aa, synthetic construct
  source 1..9: note = Description of Artificial Sequence: Synthetic peptide; note = XENP018382 vlCDR3
QQDYSSPRT

SEQ ID NO: 14495 - protein, 451 aa, synthetic construct; identical to SEQ ID NO: 11545
  source 1..451: note = Description of Artificial Sequence: Synthetic polypeptide; note = XENP018383 1G6_H1_L1.40_IgG1_PVA_/S267K Heavy Chain

SEQ ID NO: 14496 - protein, 122 aa, synthetic construct; identical to SEQ ID NO: 6246
  source 1..122: note = Description of Artificial Sequence: Synthetic polypeptide; note = VH of XENP018383

SEQ ID NO: 14497 - protein, 5 aa, synthetic construct
  source 1..5: note = Description of Artificial Sequence: Synthetic peptide; note = XENP018383 vhCDR1
NYWMN

SEQ ID NO: 14498 - protein, 19 aa, synthetic construct
  source 1..19: note = Description of Artificial Sequence: Synthetic peptide; note = XENP018383 vhCDR2
EIRLKSNNYATHYAEPVKG

SEQ ID NO: 14499 - protein, 11 aa, synthetic construct
  source 1..11: note = Description of Artificial Sequence: Synthetic peptide; note = XENP018383 vhCDR3
YYGNYGGYFDV

SEQ ID NO: 14500 - protein, 214 aa, synthetic construct
  source 1..214: note = Description of Artificial Sequence: Synthetic polypeptide; note = XENP018383 1G6_H1_L1.40_IgG1_PVA_/S267K Light Chain
SIVMTQSPATLSVSPGERATLSCRASQSVSNHVAWYQQKPGQSPRLLINYASHRYTGVPDRFTGSGYGTEFTLTISSLQSEDFAVYFCQQDYSSPRTFGGGTKVEIKRTVAAPSVFIFPPSDEQLKSGTASVVCLLNNFYPREAKVQWKVDNALQSGNSQESVTEQDSKDSTYSLSSTLTLSKADYEKHKVYACEVTHQGLSSPVTKSFNRGEC

SEQ ID NO: 14501 - protein, 107 aa, synthetic construct; identical to SEQ ID NO: 8854
  source 1..107: note = Description of Artificial Sequence: Synthetic polypeptide; note = VL of XENP018383

SEQ ID NO: 14502 - protein, 11 aa, synthetic construct
  source 1..11: note = Description of Artificial Sequence: Synthetic peptide; note = XENP018383 vlCDR1
RASQSVSNHVA

SEQ ID NO: 14503 - protein, 7 aa, synthetic construct
  source 1..7: note = Description of Artificial Sequence: Synthetic peptide; note = XENP018383 vlCDR2
YASHRYT

SEQ ID NO: 14504 - protein, 9 aa, synthetic construct
  source 1..9: note = Description of Artificial Sequence: Synthetic peptide; note = XENP018383 vlCDR3
QQDYSSPRT

SEQ ID NO: 14505 - protein, 451 aa, synthetic construct; identical to SEQ ID NO: 11545
  source 1..451: note = Description of Artificial Sequence: Synthetic polypeptide; note = XENP018384 1G6_H1_L1.41_IgG1_PVA_/S267K Heavy Chain

SEQ ID NO: 14506 - protein, 122 aa, synthetic construct; identical to SEQ ID NO: 6246
  source 1..122: note = Description of Artificial Sequence: Synthetic polypeptide; note = VH of XENP018384

SEQ ID NO: 14507 - protein, 5 aa, synthetic construct
  source 1..5: note = Description of Artificial Sequence: Synthetic peptide; note = XENP018384 vhCDR1
NYWMN

SEQ ID NO: 14508 - protein, 19 aa, synthetic construct
  source 1..19: note = Description of Artificial Sequence: Synthetic peptide; note = XENP018384 vhCDR2
EIRLKSNNYATHYAEPVKG

SEQ ID NO: 14509 - protein, 11 aa, synthetic construct
  source 1..11: note = Description of Artificial Sequence: Synthetic peptide; note = XENP018384 vhCDR3
YYGNYGGYFDV

SEQ ID NO: 14510 - protein, 214 aa, synthetic construct
  source 1..214: note = Description of Artificial Sequence: Synthetic polypeptide; note = XENP018384 1G6_H1_L1.41_IgG1_PVA_/S267K Light Chain
SIVMTQSPATLSVSPGERATLSCRASQSVSNSVAWYQQKPGQSPRLLINYASHRYTGVPDRFTGSGYGTEFTLTISSLQSEDFAVYFCQQDYSSPRTFGGGTKVEIKRTVAAPSVFIFPPSDEQLKSGTASVVCLLNNFYPREAKVQWKVDNALQSGNSQESVTEQDSKDSTYSLSSTLTLSKADYEKHKVYACEVTHQGLSSPVTKSFNRGEC

SEQ ID NO: 14511 - protein, 107 aa, synthetic construct; identical to SEQ ID NO: 8863
  source 1..107: note = Description of Artificial Sequence: Synthetic polypeptide; note = VL of XENP018384

SEQ ID NO: 14512 - protein, 11 aa, synthetic construct
  source 1..11: note = Description of Artificial Sequence: Synthetic peptide; note = XENP018384 vlCDR1
RASQSVSNSVA

SEQ ID NO: 14513 - protein, 7 aa, synthetic construct
  source 1..7: note = Description of Artificial Sequence: Synthetic peptide; note = XENP018384 vlCDR2
YASHRYT

SEQ ID NO: 14514 - protein, 9 aa, synthetic construct
  source 1..9: note = Description of Artificial Sequence: Synthetic peptide; note = XENP018384 vlCDR3
QQDYSSPRT

SEQ ID NO: 14515 - protein, 451 aa, synthetic construct; identical to SEQ ID NO: 11545
  source 1..451: note = Description of Artificial Sequence: Synthetic polypeptide; note = XENP018385 1G6_H1_L1.42_IgG1_PVA_/S267K Heavy Chain

SEQ ID NO: 14516 - protein, 122 aa, synthetic construct; identical to SEQ ID NO: 6246
  source 1..122: note = Description of Artificial Sequence: Synthetic polypeptide; note = VH of XENP018385

SEQ ID NO: 14517 - protein, 5 aa, synthetic construct
  source 1..5: note = Description of Artificial Sequence: Synthetic peptide; note = XENP018385 vhCDR1
NYWMN

SEQ ID NO: 14518 - protein, 19 aa, synthetic construct
  source 1..19: note = Description of Artificial Sequence: Synthetic peptide; note = XENP018385 vhCDR2
EIRLKSNNYATHYAEPVKG

SEQ ID NO: 14519 - protein, 11 aa, synthetic construct
  source 1..11: note = Description of Artificial Sequence: Synthetic peptide; note = XENP018385 vhCDR3
YYGNYGGYFDV

SEQ ID NO: 14520 - protein, 214 aa, synthetic construct
  source 1..214: note = Description of Artificial Sequence: Synthetic polypeptide; note = XENP018385 1G6_H1_L1.42_IgG1_PVA_/S267K Light Chain
SIVMTQSPATLSVSPGERATLSCRASQSVSNRVAWYQQKPGQSPRLLINYASHRYTGVPDRFTGSGYGTEFTLTISSLQSEDFAVYFCQQDYSSPRTFGGGTKVEIKRTVAAPSVFIFPPSDEQLKSGTASVVCLLNNFYPREAKVQWKVDNALQSGNSQESVTEQDSKDSTYSLSSTLTLSKADYEKHKVYACEVTHQGLSSPVTKSFNRGEC

SEQ ID NO: 14521 - protein, 107 aa, synthetic construct; identical to SEQ ID NO: 8872
  source 1..107: note = Description of Artificial Sequence: Synthetic polypeptide; note = VL of XENP018385

SEQ ID NO: 14522 - protein, 11 aa, synthetic construct
  source 1..11: note = Description of Artificial Sequence: Synthetic peptide; note = XENP018385 vlCDR1
RASQSVSNRVA

SEQ ID NO: 14523 - protein, 7 aa, synthetic construct
  source 1..7: note = Description of Artificial Sequence: Synthetic peptide; note = XENP018385 vlCDR2
YASHRYT

SEQ ID NO: 14524 - protein, 9 aa, synthetic construct
  source 1..9: note = Description of Artificial Sequence: Synthetic peptide; note = XENP018385 vlCDR3
QQDYSSPRT

SEQ ID NO: 14525 - protein, 451 aa, synthetic construct; identical to SEQ ID NO: 11545
  source 1..451: note = Description of Artificial Sequence: Synthetic polypeptide; note = XENP018386 1G6_H1_L1.43_IgG1_PVA_/S267K Heavy Chain

SEQ ID NO: 14526 - protein, 122 aa, synthetic construct; identical to SEQ ID NO: 6246
  source 1..122: note = Description of Artificial Sequence: Synthetic polypeptide; note = VH of XENP018386

SEQ ID NO: 14527 - protein, 5 aa, synthetic construct
  source 1..5: note = Description of Artificial Sequence: Synthetic peptide; note = XENP018386 vhCDR1
NYWMN

SEQ ID NO: 14528 - protein, 19 aa, synthetic construct
  source 1..19: note = Description of Artificial Sequence: Synthetic peptide; note = XENP018386 vhCDR2
EIRLKSNNYATHYAEPVKG

SEQ ID NO: 14529 - protein, 11 aa, synthetic construct
  source 1..11: note = Description of Artificial Sequence: Synthetic peptide; note = XENP018386 vhCDR3
YYGNYGGYFDV

(The sequence listing continues in the following parts.)

What is claimed:

1. A heterodimeric antibody comprising:
a) a first heavy chain comprising:
i) a first variant Fc domain; and
ii) a single chain Fv region (scFv) that binds a first antigen, wherein said scFv region comprises a first variable heavy domain, a first variable light domain and a charged scFv linker, wherein said charged scFv linker covalently attaches said first variable heavy domain and said variable light domain; and
b) a second heavy chain comprising a VH-CH1-hinge-CH2-CH3 monomer, wherein VH is a second variable heavy domain and CH2-CH3 is a second variant Fc domain; and
c) a light chain comprising a second variable light domain and a light constant domain;
wherein said second variant Fc domain comprises amino acid substitutions N208D/Q295E/N384D/Q418E/N241D, wherein said first and second variant Fc domains each comprise amino acid substitutions E233P/L234V/L235A/G236del/S267K; wherein said first variant Fc domain comprises amino acid substitutions S364K/E357Q and second variant Fc domain comprises amino acid substitutions L368D/K370S, wherein said first variable heavy domain and first variable light domain are selected from the sets comprising SEQ ID NO:11376 and SEQ ID NO: 11377, SEQ ID NO:22970 and SEQ ID NO:22971, SEQ ID NO:11394 and SEQ ID NO:11395, SEQ ID NO:11367 and SEQ ID NO:11368 and SEQ ID NO:11412 and SEQ ID NO:11413, wherein numbering is according to the EU index as in Kabat.

2. A heterodimeric antibody according to claim 1 wherein the CH1-hinge-CH2-CH3 component of the second heavy chain has SEQ ID NO:37725, said first variant Fc domain has SEQ ID NO:37726 and said constant light domain has SEQ ID NO:37727.

3. A heterodimeric antibody according to claim 1, wherein said second variable heavy domain and said second variable light domain form an antigen binding domain that binds a human checkpoint receptor from the group human CTLA-4, human LAG-3, human TIM-3 and human TIGIT.

4. A heterodimeric antibody according to claim 1 wherein said first variable heavy domain has SEQ ID NO:11394 and first variable light domain has SEQ ID NO:11395.

5. A heterodimeric antibody according to claim 1 wherein said first heavy chain has SEQ ID NO:23581, said second heavy chain has SEQ ID NO: 23576 and said light chain has SEQ ID NO:23591.

6. A nucleic acid composition comprising:
a) a first nucleic acid encoding said first heavy chain of claim 1;
b) a second nucleic acid encoding said second heavy chain of claim 1; and
c) a third nucleic acid encoding said light chain of claim 1.

7. An expression vector composition comprising:
a) a first expression vector comprising said first nucleic acid of claim 6;
b) a second expression vector comprising said second nucleic acid of claim 6; and
c) a third expression vector comprising said third nucleic acid of claim 6.

8. A host cell comprising said expression vector composition of claim 7.

9. A method of making a heterodimeric antibody according to claim 1 comprising culturing said host cell of claim 8 under conditions wherein said antibody is expressed, and recovering said antibody.

10. A heterodimeric antibody comprising:
a) a first heavy chain comprising:
i) a first variant Fc domain; and
ii) a single chain Fv region (scFv) that binds a first antigen, wherein said scFv region comprises a first variable heavy domain, a first variable light domain and a charged scFv linker, wherein said charged scFv linker covalently attaches said first variable heavy domain and said variable light domain; and
b) a second heavy chain comprising a VH-CH1-hinge-CH2-CH3 monomer, wherein VH is a second variable heavy domain and CH2-CH3 is a second variant Fc domain; and
c) a light chain comprising a second variable light domain and a light constant domain;
wherein said second variant Fc domain comprises amino acid substitutions N208D/Q295E/N384D/Q418E/N241D, wherein said first and second variant Fc domains each comprise amino acid substitutions E233P/L234V/L235A/G236del/S267K; wherein said first variant Fc domain comprises amino acid substitutions S364K/E357Q and second variant Fc domain comprises amino acid substitutions L368D/K370S, wherein said first variable heavy domain and first variable light domain are selected from the sets comprising SEQ ID NO:6149 and SEQ ID NO:6154, SEQ ID NO:6119 and SEQ ID NO:6124, SEQ ID NO:6159 and SEQ ID NO:6164, SEQ ID NO:5709 and SEQ ID NO:5714 and SEQ ID NO:5549 and SEQ ID NO:5554, wherein numbering is according to the EU index as in Kabat.

12. A heterodimeric antibody according to claim 10 wherein the CH1-hinge-CH2-CH3 component of the second heavy chain has SEQ ID NO:37725, said first variant Fc domain has SEQ ID NO:37726 and said constant light domain has SEQ ID NO:37727.

13. A heterodimeric antibody according to claim 10, wherein said second variable heavy domain and said second variable light domain form an antigen binding domain that binds a human checkpoint receptor from the group human PD-1, human LAG-3, human TIM-3 and human TIGIT.

14. A heterodimeric antibody according to claim 12 wherein said first variable heavy domain has SEQ ID NO:6149 and first variable light domain has SEQ ID NO:6154.

15. A heterodimeric antibody according to claim 10 wherein said first heavy chain has SEQ ID NO:35612, said second heavy chain has SEQ ID NO:35607 and said light chain has SEQ ID NO:35622.

16. A nucleic acid composition comprising:
a) a first nucleic acid encoding said first heavy chain of claim 10;
b) a second nucleic acid encoding said second heavy chain of claim 10; and
c) a third nucleic acid encoding said light chain of claim 10.

17. An expression vector composition comprising:
a) a first expression vector comprising said first nucleic acid of claim 16;
b) a second expression vector comprising said second nucleic acid of claim 16; and
c) a third expression vector comprising said third nucleic acid of claim 16.

18. A host cell comprising said expression vector composition of claim 17.

19. A method of making a heterodimeric antibody according to claim 10 comprising culturing said host cell of claim 8 under conditions wherein said antibody is expressed, and recovering said antibody.
